United States Patent Application Publication US 2018/0126003 A1 - sequence listing, part 173

SEQ ID NO: 305813 - DNA, 4032 bp, Artificial Sequence
  derived and/or modified sequence
atggacgcccccagagccagcgccgccaagccccccaccggcagaaagatgaaggccagagccccccccccccccggcaaggccgccaccctgcacgtgcacagcgaccagaagcccccccacgacggcgccctgggcagccagcagaacctggtgagaatgaaggaggccctgagagccagcaccatggacgtgaccgtggtgctgcccagcggcctggagaagagaagcgtgctgaacggcagccacgccatgatggacctgctggtggagctgtgcctgcagaaccacctgaaccccagccaccacgccctggagatcagaagcagcgagacccagcagcccctgagcttcaagcccaacaccctgatcggcaccctgaacgtgcacaccgtgttcctgaaggagaaggtgcccgaggagaaggtgaagcccggcccccccaaggtgcccgagaagagcgtgagactggtggtgaactacctgagaacccagaaggccgtggtgagagtgagccccgaggtgcccctgcagaacatcctgcccgtgatctgcgccaagtgcgaggtgagccccgagcacgtggtgctgctgagagacaacatcgccggcgaggagctggagctgagcaagagcctgaacgagctgggcatcaaggagctgtacgcctgggacaacagaagagagaccttcagaaagagcagcctgggcaacgacgagaccgacaaggagaagaagaagttcctgggcttcttcaaggtgaacaagagaagcaacagcaaggccgagcagctggtgctgagcggcgccgacagcgacgaggacaccagcagagccgcccccggcagaggcctgaacggctgcctgaccacccccaacagccccagcatgcacagcagaagcctgaccctgggccccagcctgagcctgggcagcatcagcggcgtgagcgtgaagagcgagatgaagaagagaagagccccccccccccccggcagcggcccccccgtgcaggacaaggccagcgagaaggtgagcctgggcagccagatcgacctgcagaagaagaagagaagagcccccgcccccccccccccccagccccccccccccagccccctgatccccaacagaaccgaggacaaggaggagaacagaaagagcaccatgggcggcggcagacaggtgccccagaagccccccagaggcaccgccagaggccccccccagctggtgctgccccccccccccccctaccccccccccgacaccgacgtggtggagcccctgagcttccccggcgagggcgccggcagcgaggccagcgaccccatccccaagctgagcctgcccctgggcagcggcagccactgcagccccgacggcgccccccaggtgctgagcgaggccgaggagaccgtgagcgtgggcagctgcttcgccagcgaggacaccaccgaggacagcggcgtgatgagcagccccagcgacatcgtgagcctggacagccagcaggacagcatgaagtacaaggacaagtgggccaccgaccaggaggactgcagcgaccaggacctggccggcacccccgacctgggcccccagaagagccccctgtgggagaagaacggcagcgagaacagccacctgagaaccgagaaggccgtgaccgccagcaacgacgaggaggacctgctgatcgccggcgagttcagaaagaccctggccgagctggacgaggacctggaggagatggaggacagctacgagaccgacaccagcagcctgaccagcagcatccacggcgccagcaaccactgcccccaggacgccatgatcccccacggcgacaccgacgccatccccgtgaccttcatcggcgaggtgagcgacgaccccgtggacagcggcctgttcagcaacagaaacaacaacgccggcagcttcgacagcgagggcgtggccagcagaagagacagcctggcccccctgcaggccgagcacagccagccccacgagaaggccagagaggaggtgcccgccctgcaccccgccagccacgacgtgggcaagggcatcagagtggccctgagcaacatcagcaaggacggcaacctgatggagaccgcccccagagtgaccagcttcgccagcaacctgcacaccgacaacctgaacgccaaggtgaaggacaaggtgtacggctgcgccgacggcgagagaacccaggccaccgagagagtgaacagccagcccgtgaacgagaaggacagcaacgacaagaacgccgccctggcccccaccagctggcaccagagaggccagaaccccggcaagagctacagactgaagcacggcctgaccacctacaagatcatcccccccaagagcgagatgagatgctacgacagagacgtgagcctgagcaccggcgccatcaagatcgacgagctgggcaacctggtgagcccccacgccaccggcatcagaatcatcagcctgagcagcagcgtgcccgaggccgagagccagcccatcggcaaggtgagagagttctggagatgcaacagcgtggagaagcacctgggcagacccagcgagagcagcgccagaggcccccccagcacccccgtgcccacccagacccagaaccccgagagcagactgcaggccgaccccaagcccatcagcccccagcagaagagcgcccaccacgagggcagaaaccccctgggcgagggcagaaaccagccccccaccatgggcatgggccacgtgagagtgcccgccgcccacaccaccgaggtgaccttcctgaagccccagagaagaaccagcagccagtacgtggccagcgccatcgccaagagaatcggcgcccccaaggtgcacgccgacgtggtgagaccccacggctacgccgagaagggctacgccggcaaggcccccgtgctggccgccccccccgtgaccgtgaaggacgacagaaccagcagcccccacagcgagacccagggctggaaggacggcgcccagtggccctgcgtgaccccccccaacaaccacggcgaggacctggccgtgggcgccccccccagaggcgaggtgatcggcccccacagaaagctgagcacccaggacagacccgccgccatccacagaagcagctgcttcagcctggtgcagagcagccagagagacagagtgagcgtgggccagagctgcggcttcagcggcaagcagagcaccagcagccaggaggccagcagcgccagcgagcccagaagagcccccgacggcaccgaccccccccccccccacaccagcgacacccaggcctgcagcagagagctggtgaacggcagcgtgagagcccccggccacggcgagcccagccacccccccggcggcagcggcaccgagagccacatcctgctggagagagaggagaagcccagcgtgttcagcaccgacggcaacgagaccgacagcatctggccccccagcatcttcggccccaagaagaagttcaagcccgtggtgcagagacccgtgcccaaggacaccagcctgcacagcgccctgatggaggccatccacagcgccggcggcaaggacagactgagaaagaccgccgagcacaccggcgagggcagacccgccaagctgagctacaccgaggccgagggcgagagaagcgccctgctggccgccatcagaggccacagcggcacctgcagcctgagaaaggtggccagcagcgccagcgaggagctgcagagcttcagagacgccgccctgagcgcccagggcagcgagagccccctgctggaggacctgggcctgctgagcccccccgccatccccccccccccccccccccccagccaggccctgagcgcccccagaaccgccagcagattcagcaccggcaccctgagcaacaccgccgacgccagacaggccctgatggacgccatcagaagcggcaccggcgccgccagactgagaaaggtgcccctgctggtgtag

SEQ ID NO: 305814 - DNA, 3441 bp, Artificial Sequence
  derived and/or modified sequence
ctgagagacaacatcgccggcgaggagctggagctgagcaagagcctgaacgagctgggcatcaaggagctgtacgcctgggacaacagaagagagaccttcagaaagagcagcctgggcaacgacgagaccgacaaggagaagaagaagttcctgggcttcttcaaggtgaacaagagaagcaacagcaaggccgagcagctggtgctgagcggcgccgacagcgacgaggacaccagcagagccgcccccggcagaggcctgaacggctgcctgaccacccccaacagccccagcatgcacagcagaagcctgaccctgggccccagcctgagcctgggcagcatcagcggcgtgagcgtgaagagcgagatgaagaagagaagagccccccccccccccggcagcggcccccccgtgcaggacaaggccagcgagaaggtgagcctgggcagccagatcgacctgcagaagaagaagagaagagcccccgcccccccccccccccagccccccccccccagccccctgatccccaacagaaccgaggacaaggaggagaacagaaagagcaccatgggcggcggcagacaggtgccccagaagccccccagaggcaccgccagaggccccccccagctggtgctgccccccccccccccctaccccccccccgacaccgacgtggtggagcccctgagcttccccggcgagggcgccggcagcgaggccagcgaccccatccccaagctgagcctgcccctgggcagcggcagccactgcagccccgacggcgccccccaggtgctgagcgaggccgaggagaccgtgagcgtgggcagctgcttcgccagcgaggacaccaccgaggacagcggcgtgatgagcagccccagcgacatcgtgagcctggacagccagcaggacagcatgaagtacaaggacaagtgggccaccgaccaggaggactgcagcgaccaggacctggccggcacccccgacctgggcccccagaagagccccctgtgggagaagaacggcagcgagaacagccacctgagaaccgagaaggccgtgaccgccagcaacgacgaggaggacctgctgatcgccggcgagttcagaaagaccctggccgagctggacgaggacctggaggagatggaggacagctacgagaccgacaccagcagcctgaccagcagcatccacggcgccagcaaccactgcccccaggacgccatgatcccccacggcgacaccgacgccatccccgtgaccttcatcggcgaggtgagcgacgaccccgtggacagcggcctgttcagcaacagaaacaacaacgccggcagcttcgacagcgagggcgtggccagcagaagagacagcctggcccccctgcaggccgagcacagccagccccacgagaaggccagagaggaggtgcccgccctgcaccccgccagccacgacgtgggcaagggcatcagagtggccctgagcaacatcagcaaggacggcaacctgatggagaccgcccccagagtgaccagcttcgccagcaacctgcacaccgacaacctgaacgccaaggtgaaggacaaggtgtacggctgcgccgacggcgagagaacccaggccaccgagagagtgaacagccagcccgtgaacgagaaggacagcaacgacaagaacgccgccctggcccccaccagctggcaccagagaggccagaaccccggcaagagctacagactgaagcacggcctgaccacctacaagatcatcccccccaagagcgagatgagatgctacgacagagacgtgagcctgagcaccggcgccatcaagatcgacgagctgggcaacctggtgagcccccacgccaccggcatcagaatcatcagcctgagcagcagcgtgcccgaggccgagagccagcccatcggcaaggtgagagagttctggagatgcaacagcgtggagaagcacctgggcagacccagcgagagcagcgccagaggcccccccagcacccccgtgcccacccagacccagaaccccgagagcagactgcaggccgaccccaagcccatcagcccccagcagaagagcgcccaccacgagggcagaaaccccctgggcgagggcagaaaccagccccccaccatgggcatgggccacgtgagagtgcccgccgcccacaccaccgaggtgaccttcctgaagccccagagaagaaccagcagccagtacgtggccagcgccatcgccaagagaatcggcgcccccaaggtgcacgccgacgtggtgagaccccacggctacgccgagaagggctacgccggcaaggcccccgtgctggccgccccccccgtgaccgtgaaggacgacagaaccagcagcccccacagcgagacccagggctggaaggacggcgcccagtggccctgcgtgaccccccccaacaaccacggcgaggacctggccgtgggcgccccccccagaggcgaggtgatcggcccccacagaaagctgagcacccaggacagacccgccgccatccacagaagcagctgcttcagcctggtgcagagcagccagagagacagagtgagcgtgggccagagctgcggcttcagcggcaagcagagcaccagcagccaggaggccagcagcgccagcgagcccagaagagcccccgacggcaccgaccccccccccccccacaccagcgacacccaggcctgcagcagagagctggtgaacggcagcgtgagagcccccggccacggcgagcccagccacccccccggcggcagcggcaccgagagccacatcctgctggagagagaggagaagcccagcgtgttcagcaccgacggcaacgagaccgacagcatctggccccccagcatcttcggccccaagaagaagttcaagcccgtggtgcagagacccgtgcccaaggacaccagcctgcacagcgccctgatggaggccatccacagcgccggcggcaaggacagactgagaaagaccgccgagcacaccggcgagggcagacccgccaagctgagctacaccgaggccgagggcgagagaagcgccctgctggccgccatcagaggccacagcggcacctgcagcctgagaaaggtggccagcagcgccagcgaggagctgcagagcttcagagacgccgccctgagcgcccagggcagcgagagccccctgctggaggacctgggcctgctgagcccccccgccatccccccccccccccccccccccagccaggccctgagcgcccccagaaccgccagcagattcagcaccggcaccctgagcaacaccgccgacgccagacaggccctgatggacgccatcagaagcggcaccggcgccgccagactgagaaaggtgcccctgctggtgtag

SEQ ID NO: 305815 - DNA, 5555 bp, Artificial Sequence
  derived and/or modified sequence
ccgcccgctagagacgattccagccccttccgtccgccgcgctccgccgctgtcctccgccggcccgcgtgggaggacgatgggtcagcgcggaaaaagtgaatgagggcggcagcggtggcggcggtagccagcgcctgactcggcgggcccggagcaccgcccgcgtcccggcccccggcaccatggacgcgccgcgcgcctcggcggccaagcccccgaccgggaggaagatgaaggctcgtgctcccccacctcctggaaaggctgccactctgcatgtgcacagtgaccagaagcccccccacgatggggccctcgggtcgcagcagaacttggttcgcatgaaggaggcgctgagggccagcaccatggacgtcaccgtggtcctgcctagtgggctggagaagaggagcgtgctcaatgggagccatgcgatgatggacctactggttgaactttgccttcagaaccacctgaatccatcccaccatgcccttgaaattcggtcttcagaaacccaacaacctttgagttttaagccaaatactttgattgggaccctgaatgtgcatactgtgtttctgaaagaaaaagttcctgaagagaaggttaagcctggtccccctaaggtgcctgagaaatctgtgcgtttggtcgtgaattacctgcggacacaaaaagctgttgtgcgtgtgagccctgaggttcctctccagaatattctcccagtcatttgtgcaaagtgtgaggtcagcccagagcacgtggttctcctcagggacaacattgccggagaggagctggagctgtccaagtccctgaacgagctcgggataaaggagctctacgcgtgggacaacagaagagaaacctttaggaaatcatcacttggcaatgatgagacagataaagagaagaaaaaatttctgggatttttcaaagttaataaaagaagcaatagtaaggctgagcagctcgtgctgtcgggtgcagacagcgatgaggacacctccagggctgccccaggaaggggtttgaacggctgtttaacgacccccaactccccatccatgcactcacgttctcttacgctgggtccatccctctcgctgggcagcatctcaggggtgtccgtgaagtcggagatgaagaagcgccgagcccctcctcctccaggttcagggccacctgtgcaagacaaggcatcggaaaaggtatctcttgggtcacagattgatttacagaagaagaagcggcgagcgccagctccccctccaccacagccaccaccaccgagtcccctgatccccaaccgcactgaggataaggaggagaacaggaagagcacgatgggtggtggacggcaggtgccacaaaagcctcccagaggcactgctcggggtccaccccagttagtgcttcccccacccccgccctaccctcctcccgacacagacgtggtggagcctctcagctttcccggggaaggcgctggttccgaggcctcagacccgatacccaaactaagcctgcccctggggtctggcagccactgcagcccggatggagccccgcaggtgctgtcagaggcggaggagaccgtgtcagttggcagctgttttgcgtcggaggacacgaccgaggactcaggagtgatgagttccccctcagacatcgtctctctggactcgcagcaggacagcatgaaatacaaagacaagtgggccacagaccaggaagactgcagtgaccaggacctcgctggaaccccagacctgggtccccagaagagccccttgtgggagaagaatggctctgagaactcacatctgagaactgaaaaagctgtcacagcctcaaatgatgaagaagacctattaattgctggagagttccgtaaaacccttgcagaacttgatgaagacctggaagaaatggaagacagctatgaaacagacaccagctccctcaccagctccatccatggtgcatccaaccactgcccacaggatgccatgatccctcacggcgacacagatgcaatcccagtaacattcataggggaagtttcagatgatcctgtggattcggggttgttttccaatagaaacaacaatgctgggtctttcgactcggagggtgttgccagcaggagagactccctggcgccacttcaagctgagcacagccagccccatgaaaaggcaagggaggaagtacctgccctgcaccccgcttcccatgacgtcggaaaaggaatccgtgtggccttatctaacatctctaaagatgggaatctaatggaaacggcgcccagggtgacttcttttgcttcgaatcttcacacagacaacctaaatgcaaaagtgaaagacaaagtgtatggctgtgctgacggggagaggactcaagccacagagagagtgaattcccaaccggtgaatgaaaaggacagcaacgataaaaacgctgccttggcaccaacatcatggcaccaacgaggccaaaacccagggaaaagctacagacttaagcacggcctcacaacgtataaaatcattcctccaaagtcagagatgcgatgttacgacagagatgtgtccctctccaccggagccattaagattgacgagctggggaacttggtgagtcctcacgccaccggcatcaggatcatttccctgtcttcgtctgtgcctgaagcagaatctcagcccattgggaaagtcagagagttctggaggtgcaactctgtggaaaaacacctgggccgaccctcagagagctctgccaggggacccccctccacccctgtgcccacgcagacgcagaatccagagagcagactccaagcagaccccaagccaatatcgccccagcagaagtctgcccaccatgagggccggaaccccctaggggaggggagaaaccagccccccaccatgggcatgggtcacgtgagggtgccagcagctcacaccacagaagtcacatttctcaagcctcagagaagaacgtccagccagtatgtggcctctgccattgccaagcgcataggagccccaaaagtccatgctgatgtggtgaggccacacggttatgccgagaagggttatgcaggcaaggcgccagtgctggctgcaccacctgtcactgtgaaagatgacaggacatccagcccacactcagagacacaaggatggaaggatggtgcccagtggccctgtgtcactcctcccaacaaccacggggaagatttggcagtgggagcccctcctaggggggaggtcattggcccacacaggaagttgtctactcaggacagacctgctgctatccacagaagctcctgtttctcactggttcagtcttcccagagggatcgtgtttctgtgggacagagctgtggtttcagtggaaagcaaagcacaagtagccaggaggccagctcagcatctgagcccagacgcgcacctgatggtacagacccaccccctccacacacatctgacactcaggcctgcagcagggagctggtcaatggctctgtgcgcgccccaggccacggcgagccttcccaccctccaggagggtctggcacagaaagccacattctcctagaaagagaggaaaagcccagtgtgttctctacagatggaaatgaaacagacagtatttggccacccagcatttttgggccgaagaaaaaattcaaacctgttgtccagagaccagtcccaaaagacacatccctgcactctgccctgatggaagccatccactctgcgggagggaaggacagactacgcaagacggcagaacacaccggggagggcaggccagcgaaactgtcctacacggaggcagagggcgaacgatctgcactgctggcagctatccgcgggcacagcggcacctgcagcctgaggaaggtggcatcctctgcttctgaggagctccagagcttccgagatgccgcactctctgctcagggctcggaaagtcctctgctagaagaccttggtcttctgtccccaccagccattcccccaccaccccctccaccctcccaggctctctctgcaccaaggacggcctccaggttcagcacgggcaccctcagcaacaccgcagacgcaaggcaagccttgatggacgccatccgctccggcacaggggctgcgagactgagaaaggtgcccttgctcgtgtgaatgaacagaggccagagaattgcagaaacccacctgtaatatgcccacaggcgtcactcaaggagtctgcatagccaggaacatcaagttttggtgttactttcttgtctacaggccaaatgcgcacagttgattttcggtgtgttcctgtataacggcttgaaaggaaaggagaagatgctgtgtcgctgcgcagctcgtgtgccaaggaaatgtgttttgcctctgaatatcttaagttgctaataaacgattcttgttggcaggttaatgggactataaatgctggagcccagcactcacacttaattatatttatgggcaaagtaaaaagaatcatgccttagactgattttggacctttgagacttttaccacatacagatggatgaaactacttactgatttaagatcttttgaattttagaaaaaacatatgaatcagatggaacaatctgaatgtgatatgctccatgatgctgtgtgttttggtagtaagaaaaaaaaattgggaggcttttcaaaggtggctttgttaggtagtaaaactgctggattcttcttcctcaaatatttggggctaacacttcacagagggtcacagtccatgatctgaccaactaagcttttaaaaatcaactattaccacccagaaaacagtcctacgtgatcatgtggccagggcatgcccgagtcctgcaagggtggcgggtggctgaggtcacaccaccactggagtggatgggcagtgccccacatggacagccattccccaggctatgaagtgacataggcctcccccacggtgcctgtgtacggagcctgatgacttcactgggagccttctggaatcctgcagagggtcaaggagcagggatgttggatgcccacctgtcaagagttcagatcaaagttgcgctgagagcatcacaattttggttcagccttgacgcgtttgtccaacagctcattggctccctttgtatgatatcgtggtcttctcacatggtgcccagtcaccaatatttataatgaggtctaactacagcagtagtttttcatatatatctctaaaacattttgttatattgaaaaaagtaatagaaatcaagatgtgttgatgaaataaaatgtgtatctgagtgagaaaacaagtatggtgaggtcactttaatgtttcacagcgatctcagatctaggcctcaggtagaatggaagctgttctgcattcactgattaacgttgctaaactcttggtgaggcacgagctaccagccaattgctcttcatcacagctatctgtcttttagtgccacaaataaaagaaaatcaaatctt

SEQ ID NO: 305816 - DNA, 4780 bp, Artificial Sequence
  derived and/or modified sequence
ctcagggacaacattgccggagaggagctggagctgtccaagtccctgaacgagctcgggataaaggagctctacgcgtgggacaacagaagagaaacctttaggaaatcatcacttggcaatgatgagacagataaagagaagaaaaaatttctgggatttttcaaagttaataaaagaagcaatagtaaggctgagcagctcgtgctgtcgggtgcagacagcgatgaggacacctccagggctgccccaggaaggggtttgaacggctgtttaacgacccccaactccccatccatgcactcacgttctcttacgctgggtccatccctctcgctgggcagcatctcaggggtgtccgtgaagtcggagatgaagaagcgccgagcccctcctcctccaggttcagggccacctgtgcaagacaaggcatcggaaaaggtatctcttgggtcacagattgatttacagaagaagaagcggcgagcgccagctccccctccaccacagccaccaccaccgagtcccctgatccccaaccgcactgaggataaggaggagaacaggaagagcacgatgggtggtggacggcaggtgccacaaaagcctcccagaggcactgctcggggtccaccccagttagtgcttcccccacccccgccctaccctcctcccgacacagacgtggtggagcctctcagctttcccggggaaggcgctggttccgaggcctcagacccgatacccaaactaagcctgcccctggggtctggcagccactgcagcccggatggagccccgcaggtgctgtcagaggcggaggagaccgtgtcagttggcagctgttttgcgtcggaggacacgaccgaggactcaggagtgatgagttccccctcagacatcgtctctctggactcgcagcaggacagcatgaaatacaaagacaagtgggccacagaccaggaagactgcagtgaccaggacctcgctggaaccccagacctgggtccccagaagagccccttgtgggagaagaatggctctgagaactcacatctgagaactgaaaaagctgtcacagcctcaaatgatgaagaagacctattaattgctggagagttccgtaaaacccttgcagaacttgatgaagacctggaagaaatggaagacagctatgaaacagacaccagctccctcaccagctccatccatggtgcatccaaccactgcccacaggatgccatgatccctcacggcgacacagatgcaatcccagtaacattcataggggaagtttcagatgatcctgtggattcggggttgttttccaatagaaacaacaatgctgggtctttcgactcggagggtgttgccagcaggagagactccctggcgccacttcaagctgagcacagccagccccatgaaaaggcaagggaggaagtacctgccctgcaccccgcttcccatgacgtcggaaaaggaatccgtgtggccttatctaacatctctaaagatgggaatctaatggaaacggcgcccagggtgacttcttttgcttcgaatcttcacacagacaacctaaatgcaaaagtgaaagacaaagtgtatggctgtgctgacggggagaggactcaagccacagagagagtgaattcccaaccggtgaatgaaaaggacagcaacgataaaaacgctgccttggcaccaacatcatggcaccaacgaggccaaaacccagggaaaagctacagacttaagcacggcctcacaacgtataaaatcattcctccaaagtcagagatgcgatgttacgacagagatgtgtccctctccaccggagccattaagattgacgagctggggaacttggtgagtcctcacgccaccggcatcaggatcatttccctgtcttcgtctgtgcctgaagcagaatctcagcccattgggaaagtcagagagttctggaggtgcaactctgtggaaaaacacctgggccgaccctcagagagctctgccaggggacccccctccacccctgtgcccacgcagacgcagaatccagagagcagactccaagcagaccccaagccaatatcgccccagcagaagtctgcccaccatgagggccggaaccccctaggggaggggagaaaccagccccccaccatgggcatgggtcacgtgagggtgccagcagctcacaccacagaagtcacatttctcaagcctcagagaagaacgtccagccagtatgtggcctctgccattgccaagcgcataggagccccaaaagtccatgctgatgtggtgaggccacacggttatgccgagaagggttatgcaggcaaggcgccagtgctggctgcaccacctgtcactgtgaaagatgacaggacatccagcccacactcagagacacaaggatggaaggatggtgcccagtggccctgtgtcactcctcccaacaaccacggggaagatttggcagtgggagcccctcctaggggggaggtcattggcccacacaggaagttgtctactcaggacagacctgctgctatccacagaagctcctgtttctcactggttcagtcttcccagagggatcgtgtttctgtgggacagagctgtggtttcagtggaaagcaaagcacaagtagccaggaggccagctcagcatctgagcccagacgcgcacctgatggtacagacccaccccctccacacacatctgacactcaggcctgcagcagggagctggtcaatggctctgtgcgcgccccaggccacggcgagccttcccaccctccaggagggtctggcacagaaagccacattctcctagaaagagaggaaaagcccagtgtgttctctacagatggaaatgaaacagacagtatttggccacccagcatttttgggccgaagaaaaaattcaaacctgttgtccagagaccagtcccaaaagacacatccctgcactctgccctgatggaagccatccactctgcgggagggaaggacagactacgcaagacggcagaacacaccggggagggcaggccagcgaaactgtcctacacggaggcagagggcgaacgatctgcactgctggcagctatccgcgggcacagcggcacctgcagcctgaggaaggtggcatcctctgcttctgaggagctccagagcttccgagatgccgcactctctgctcagggctcggaaagtcctctgctagaagaccttggtcttctgtccccaccagccattcccccaccaccccctccaccctcccaggctctctctgcaccaaggacggcctccaggttcagcacgggcaccctcagcaacaccgcagacgcaaggcaagccttgatggacgccatccgctccggcacaggggctgcgagactgagaaaggtgcccttgctcgtgtgaatgaacagaggccagagaattgcagaaacccacctgtaatatgcccacaggcgtcactcaaggagtctgcatagccaggaacatcaagttttggtgttactttcttgtctacaggccaaatgcgcacagttgattttcggtgtgttcctgtataacggcttgaaaggaaaggagaagatgctgtgtcgctgcgcagctcgtgtgccaaggaaatgtgttttgcctctgaatatcttaagttgctaataaacgattcttgttggcaggttaatgggactataaatgctggagcccagcactcacacttaattatatttatgggcaaagtaaaaagaatcatgccttagactgattttggacctttgagacttttaccacatacagatggatgaaactacttactgatttaagatcttttgaattttagaaaaaacatatgaatcagatggaacaatctgaatgtgatatgctccatgatgctgtgtgttttggtagtaagaaaaaaaaattgggaggcttttcaaaggtggctttgttaggtagtaaaactgctggattcttcttcctcaaatatttggggctaacacttcacagagggtcacagtccatgatctgaccaactaagcttttaaaaatcaactattaccacccagaaaacagtcctacgtgatcatgtggccagggcatgcccgagtcctgcaagggtggcgggtggctgaggtcacaccaccactggagtggatgggcagtgccccacatggacagccattccccaggctatgaagtgacataggcctcccccacggtgcctgtgtacggagcctgatgacttcactgggagccttctggaatcctgcagagggtcaaggagcagggatgttggatgcccacctgtcaagagttcagatcaaagttgcgctgagagcatcacaattttggttcagccttgacgcgtttgtccaacagctcattggctccctttgtatgatatcgtggtcttctcacatggtgcccagtcaccaatatttataatgaggtctaactacagcagtagtttttcatatatatctctaaaacattttgttatattgaaaaaagtaatagaaatcaagatgtgttgatgaaataaaatgtgtatctgagtgagaaaacaagtatggtgaggtcactttaatgtttcacagcgatctcagatctaggcctcaggtagaatggaagctgttctgcattcactgattaacgttgctaaactcttggtgaggcacgagctaccagccaattgctcttcatcacagctatctgtcttttagtgccacaaataaaagaaaatcaaatctta

SEQ ID NO: 305817 - DNA, 4032 bp, Artificial Sequence
  derived and/or modified sequence
atggatgccccaagggcatccgcagcgaaacccccgactggtaggaaaatgaaggctcgcgcaccaccaccgccgggcaaggccgccacactgcatgtccactctgaccaaaagccaccacatgatggagctcttggcagccagcagaacctggttaggatgaaggaagctctgcgggccagcaccatggatgtgacggtagtcctcccctccggtctggagaagagatcagtgcttaacggtagtcatgccatgatggacctcctcgtggaactgtgccttcagaatcatctcaatccaagtcatcatgccctcgagatacggagcagcgagacccagcaaccactgtcattcaagccaaataccttgatcggtactctgaacgttcacaccgtgtttttgaaggaaaaggtaccagaagagaaagttaaaccagggccacccaaagtcccggaaaagtccgtccgactcgttgtgaattatttgaggactcagaaagctgtcgtgcgagtttctcctgaagtccccctccagaatattctcccggtcatctgcgcaaagtgtgaggttagtccagagcatgtggtgcttctgcgcgacaacatcgccggtgaggaactcgaactgagtaagagtttgaatgaactgggaatcaaggagttgtatgcgtgggacaatcgcagagaaaccttcaggaaatccagtttgggaaatgatgagactgataaggagaaaaaaaagtttctgggcttttttaaagtgaataagcgcagtaactctaaggccgagcaattggtcctaagtggcgccgacagcgacgaagatacttcgagagctgctcccgggcgcggcctaaatggctgcctgaccacgcccaattcaccctccatgcactcacggtcgttgacattaggcccttccctctccttggggtccatctcaggtgtgtccgtcaaatccgagatgaagaaacgaagggctccgcctccccctggttctggcccccctgtgcaggacaaggcctcggagaaggtttccctcggaagccaaattgatctgcagaagaagaagaggagagctccagcgccaccacctcctcaaccaccaccaccctcccctcttattcccaatcggacagaagataaggaggaaaacaggaagtcaaccatggggggaggtaggcaggtgccacagaaaccccctcgcggaaccgcacgcggccccccccaacttgtattgccgcctccccccccctacccaccgccagacaccgatgtcgtggaaccattatcattcccaggtgagggggctggttcagaagcatccgatcccattccaaaactgtctctgcccctaggatctggtagccactgtagccccgacggggccccacaggtcttgtcagaagcggaagaaacggtctccgttggctcttgcttcgccagcgaagatactaccgaggactccggcgtgatgagctcaccttcagacatcgtttcgctcgactcccagcaggatagcatgaagtataaggataaatgggctactgaccaggaggactgttctgaccaagaccttgccgggactcccgatttggggcctcagaagagcccactgtgggagaagaacggatctgaaaattctcacctgagaaccgagaaagccgtaaccgcgtccaacgacgaagaagacctcctgatcgccggcgagtttcgtaagaccctcgccgagctcgacgaagacctggaggaaatggaggactcgtacgagaccgacacatcgtccctgacatctagtatccatggagcctctaatcactgccctcaagacgccatgatcccccatggcgataccgacgccatccccgtgaccttcatcggtgaagtgagcgatgaccctgtggacagcggcttgtttagcaataggaataacaacgccggatcattcgattcagagggcgtggcctcccgccgggactccctggcacccctgcaagcagaacactctcagccgcatgagaaggcacgagaggaggtgcccgcccttcatcctgctagccacgacgtaggtaaaggaattagggtggctctctccaacatttcaaaagatggaaacctaatggaaacagctcctagagtgacaagctttgcatccaatttacataccgacaacttgaatgctaaagtgaaggacaaggtgtatggatgtgcagacggggagcgaactcaggctaccgaacgggtgaattcacaacccgtcaacgagaaggatagcaacgataagaacgcagccctcgcccccacctcatggcatcagcggggccaaaaccctgggaagagttaccggctcaaacacggattgaccacttacaagattatcccccccaagagcgagatgcgttgttatgaccgggacgtcagcttgtccaccggcgctattaaaattgacgagctcggcaacctcgtgtctccccatgctacaggtatcagaattatctctctgagcagctctgtgcccgaggcagagagccaacctattggcaaagttcgggaattctggaggtgtaattccgtggagaaacacctgggccggccttcagaaagctcagctagggggccaccgtctactcctgttccaacacaaactcaaaacccagagtcaagattgcaggccgatcccaaacccatctcgccgcagcagaagtccgcacaccatgaggggcgaaatcccttgggcgagggccggaatcagccaccgactatggggatgggccacgtaagagttcccgccgcccacaccacagaggtgacattcctcaaaccccagcgcagaaccagttctcagtatgtcgcgagcgcgatcgcaaagaggattggggctccgaaggtccatgccgatgtagtccgcccacatggttacgctgagaaaggctatgccggcaaagcacccgtgctggctgcaccaccagtgactgtgaaggatgaccgcacaagcagccctcactccgagacccagggctggaaggacggagcccagtggccctgcgtgactccccccaacaaccacggcgaagacctcgcagtgggagcgcctcctagaggcgaagtgatagggccgcaccgcaaattgagtactcaggatcgccccgctgccattcacagatcatcatgcttctctctggtccaatctagccagcgtgaccgagtttccgttgggcagagctgtggattctcagggaaacagagcaccagttctcaagaagcttcgtcagctagcgagccgcggcgtgcccctgacggtaccgatccgcccccccctcatacaagcgatactcaagcctgcagcagagaattagtgaacggatccgtgcgtgcccctgggcacggtgaaccatcacacccgcctgggggttccggtaccgaatcgcacatactccttgaacgtgaggagaaaccatctgtgttctccactgacgggaatgagaccgacagtatttggcctccgtctatcttcggacccaagaagaagttcaagccggtagttcagcgccccgtacccaaagacacttccctgcatagtgctcttatggaggccattcactcggcggggggaaaagataggctccggaagacagctgaacataccggagaaggaagacctgcgaagctctcttacactgaagctgaaggtgaaaggtcagcgttgttagcagcaattcgaggtcactctgggacttgttcactgcgcaaggttgcctctagcgccagcgaggagctccagagctttcgcgacgcagctctgtctgcacaagggagcgaaagccccctgctcgaggatttagggctcctgtcaccccccgcgatcccacctcctccacctccccctagccaagccctgtccgcgcctcggacggccagtagattctctaccgggaccctgagtaatacagccgacgctcgccaagcgttgatggatgcgattaggagcggaactggagccgctcggttgagaaaggtccctctccttgtttag

SEQ ID NO: 305818 - DNA, 3441 bp, Artificial Sequence
  derived and/or modified sequence
ctgcgggataatatcgcgggcgaggagcttgaattgagcaagtccttaaacgagctggggattaaggagttgtatgcctgggataaccgccgagaaaccttccggaaatcctcactggggaacgatgagacagacaaagaaaaaaagaagtttcttggtttcttcaaggtcaataaaaggtcaaactcaaaagccgagcagttggtattgtctggcgccgactcagacgaagatacaagcagagccgccccgggccgtggtctgaacggatgtctgacaacccctaacagcccatcaatgcacagcaggtcccttacgcttggacctagcttaagtttgggctccatttcgggggtttctgtgaaatccgagatgaagaagaggagagcacccccccctcccggtagcggaccgcctgtgcaagacaaggcaagcgagaaggtgtcattgggttcgcagatcgatctgcagaaaaaaaaaagaagagcacctgctccccctccgccacagcccccaccaccttcacctttaataccaaacaggactgaggataaggaggaaaacagaaagtcgaccatgggaggcggtcgccaggttccacagaagcctcctcggggtacagcaaggggcccaccacaattagttcttccgcccccccccccctacccaccgcccgacaccgatgtggtagagcccctcagctttccaggtgagggcgcggggtcagaggcctctgatcccattccaaaactttcactccccttgggctctgggtctcattgttcccctgatggtgcgccccaggtcctctctgaggcagaggagacggtctccgttggtagctgcttcgcttctgaggacacgacggaggatagcggtgtgatgagttcacccagcgatatcgttagcctcgattcccaacaagactccatgaaatataaagacaagtgggccactgatcaggaggattgcagcgatcaggatttggcaggaacccctgacctggggccccagaagtcaccgctgtgggagaagaatggctcagaaaactctcatctgagaactgagaaagccgtgaccgcctccaatgatgaggaggacctgctgattgctggcgagtttcgcaaaacactggctgagctggatgaggatcttgaggagatggaggatagctacgagacggacacttcatccctgacctcctcaatacacggcgccagcaaccattgtccccaggacgccatgatcccgcatggcgatacggatgccatcccagtgacatttataggggaggtctccgacgaccctgtggacagcgggctcttttccaatcgtaacaataacgccggatcttttgactccgaaggcgtagcaagcagaagagattcacttgctccgcttcaggcggagcactcgcagccgcacgagaaagccagagaggaggtacctgcactccacccagcaagtcatgacgtcggcaagggcattcgggtcgctctgtccaacataagcaaggatgggaatctgatggagactgccccacgggtgactagtttcgcatctaacctgcataccgacaacttaaatgctaaggtgaaagacaaggtctatggttgcgcagatggggagagaacgcaggcgacagagcgcgtcaattcccagccagtcaacgaaaaggacagcaacgacaagaatgcagccttggccccaacgagctggcatcagcgaggccagaaccccggcaagtcctatagattgaaacacggtctgaccacatataagatcatccccccaaaatctgagatgaggtgttatgatagagatgtatccctttcaaccggcgccatcaaaattgacgaactgggaaaccttgttagcccacatgcaacaggtatccgcattatatctcttagttcctcggtgccagaagctgagagccagccgatcggcaaggtgcgcgagttttggcgctgtaacagcgtagaaaagcacctggggaggcccagcgagtcaagcgctcgagggcccccttcaactcctgtccccacacagactcagaaccctgaatcgagacttcaggctgaccctaagcccattagcccccaacagaaatcggcccaccatgaagggcggaaccccctaggtgaaggcagaaatcagccgccaaccatgggcatgggccacgtgagagtcccagccgctcatacgacggaagtgacttttctgaagccacagcgccgaacctcaagccagtacgttgcttccgctatcgccaaaagaattggcgcccccaaggtccacgctgatgttgttaggccccacgggtatgcagagaaggggtacgccgggaaggctcctgtcctggccgctcccccagtgactgtcaaagatgatcgcacaagctctccgcattctgagacccagggctggaaagacggagcccaatggccctgcgtcacccctcccaataaccatggagaagacctggccgttggcgcaccaccaagaggggaggttatcgggcctcaccggaagctcagcacgcaagatcgacccgcagccatccacaggtcctcttgcttttcactcgtgcagagttcccagcgtgatagagtgtctgtgggccagagctgcggcttcagcggaaagcagagtacctcctcacaggaggcatcctcagcgtctgaaccacgtagagcccccgatggcaccgacccgcctcccccacacacttccgacacacaagcctgctctagggaactggtgaatggatctgtgcgcgcccccggccatggggaaccttcacacccacctggaggctctgggaccgaaagccacatattgctcgaaagggaggaaaagccctcagtgttcagcaccgatggcaacgaaaccgatagcatctggccccccagcatctttggacctaagaaaaagttcaaacccgttgttcagcgcccagtcccaaaggacaccagcctccacagtgccctgatggaggcgattcattctgctggaggaaaagatcggcttaggaaaaccgcggaacataccggggaaggtcgacccgcaaaactgtcttatactgaggcggagggcgagcgctctgccctcctggcagccatacggggacactccggcacttgttcattgaggaaggtggcttcatctgcaagcgaagagctgcagtcattccgagatgcagcccttagcgcccaggggagcgaatcaccactgctagaagatctcggtttactgagccccccagccatcccaccacctccccctccgcctagccaggctttgtcagccccaaggaccgctagcagattctccaccggtactttatccaacactgccgatgctcggcaggcactgatggatgccattaggtccggtacaggggccgcacgcctgcggaaagttcctctgctagtgtag

SEQ ID NO: 305819 - DNA, 4032 bp, Artificial Sequence
  derived and/or modified sequence
atggatgccccccgggccagcgctgccaagcccccaactggaaggaagatgaaggcccgggcccctcctcctcctgggaaggccgccaccctgcacgtgcacagcgaccagaagccccctcatgatggagccctgggcagccagcagaacctggtgaggatgaaggaggccctgcgggccagcaccatggatgtgacagtggtgctgcccagcggcctggagaagaggtctgtgctgaatggcagccacgccatgatggacctgctggtggagctgtgcctgcagaaccacctgaaccccagccaccacgccctggagatccgcagcagcgagacccagcagcccctgtccttcaagcccaacaccctcatcggcaccctgaatgtgcacacagtgttcctgaaggagaaggtgcctgaggagaaggtgaagccaggcccccccaaggtgcctgagaagtctgtgcggctggtggtgaactacctgcggacccagaaggctgtggtgcgggtgtccccagaggtgcccctgcagaacatcctgcccgtcatctgtgccaagtgtgaggtgtccccagagcacgtggtgctgctgcgggacaacattgctggggaggagctggagctgagcaagagcctgaatgagctgggcatcaaggagctgtatgcctgggacaacagaagagagaccttcaggaagagcagcctgggcaatgatgaaacagacaaggagaagaagaagttcctgggcttcttcaaggtgaacaagaggagcaacagcaaggccgagcagctggtgctgagcggggctgacagtgatgaggacaccagcagagctgcccctggccggggcctgaatggctgcctgaccacccccaacagccccagcatgcacagccgcagcctgaccctgggccccagcctgagcctgggcagcatcagcggcgtgtctgtgaagtctgagatgaagaagagaagagcccctcctcctcctggcagcggcccccctgtgcaggacaaggccagcgagaaggtgtccctgggcagccagattgacctgcagaagaagaagaggcgggccccagcccctcctccaccccagcccccaccacccagccccctcatccccaacagaacagaggacaaggaggagaacaggaagagcaccatgggcggcggccggcaggtgccccagaagccaccccggggcacagcccggggccccccccagctggtgctgcccccacctccaccctacccacctccagacacagatgtggtggagcccctgtccttccctggagagggcgccggcagcgaggccagtgaccccatccccaagctgagcctgcccctgggcagcggcagccactgcagcccagatggagccccccaggtgctgtctgaggccgaggagaccgtgtctgtgggcagctgctttgccagcgaggacaccacagaagattctggagtgatgagcagccccagcgacatcgtgtccctggacagccagcaggacagcatgaagtacaaggacaagtgggccacagaccaggaggactgcagcgaccaggacctggccggcaccccagacctgggcccccagaagagccccctgtgggagaagaatggaagtgagaacagccacctgaggacagagaaggctgtgacagccagcaatgatgaggaggacctgctgattgctggggagttcaggaagaccctggccgagctggatgaggacctggaggagatggaggacagctatgaaacagacaccagcagcctgaccagcagcatccatggagccagcaaccactgcccccaggatgccatgatcccccatggagacacagatgccatccctgtgaccttcatcggggaggtgtctgatgatcctgtggacagcggcctcttcagcaacagaaacaacaatgccggcagctttgattctgaaggagtggccagcagaagagacagcctggcccccctgcaggccgagcacagccagccccatgagaaggcccgggaggaggtgcctgccctgcacccagccagccatgatgtgggcaagggcatccgggtggccctgagcaacatcagcaaggatggcaacctgatggagacagccccccgggtgaccagctttgccagcaacctgcacacagacaacctgaatgccaaggtgaaggacaaggtgtatggctgtgctgatggagagaggacccaggccacagagcgggtgaacagccagcctgtgaatgagaaggacagcaatgacaagaatgctgccctggcccccacctcctggcaccagaggggccagaaccctgggaagagctaccgcctgaagcacggcctgaccacctacaagatcatcccccccaagtctgagatgcgctgctatgacagagatgtgtccctgagcactggagccatcaagattgatgagctgggcaacctggtgagcccccacgccaccggcatccgcatcatcagcctgagcagctctgtgcctgaggccgagagccagcccatcggcaaggtgcgggagttctggcgctgcaacagcgtggagaagcacctgggccggcccagcgagagcagcgcccggggcccccccagcacccctgtgcccacccagacccagaaccctgagagccggctgcaggccgaccccaagcccatcagcccccagcagaagagcgcccaccacgagggcaggaaccccctgggggagggcaggaaccagccccccaccatgggcatgggccacgtgcgggtgcctgctgcccacaccacagaggtgaccttcctgaagccccagaggaggaccagcagccagtatgtggccagcgccatcgccaagagaattggagcccccaaggtgcatgctgatgtggtgcggccccacggctacgccgagaagggctacgccggcaaggcccctgtgctggccgcccctcctgtgacagtgaaggatgacaggaccagcagcccccacagcgagacccagggctggaaggatggagcccagtggccctgtgtgaccccacccaacaaccacggggaggacctggccgtgggcgcccccccaagaggagaggtgattggcccccacaggaagctgagcacccaggacaggcctgctgccatccacaggagcagctgcttcagcctggtgcagagcagccagagggacagagtgtctgtgggccagagctgtggcttcagcggcaagcagagcaccagcagccaggaggccagcagcgccagcgagccccggcgggccccagatggaacagatcctcctccaccccacaccagtgacacccaggcctgcagccgggagctggtgaatggatctgtgcgggcccctggccacggggagcccagccaccccccaggcggcagcggcacagagagccacatcctgctggagcgggaggagaagcccagcgtcttcagcacagatggaaatgaaacagacagcatctggcccccatccatcttcggccccaagaagaagttcaagcctgtggtgcagaggcctgtgcccaaggacaccagcctgcacagcgccctgatggaggccatccacagcgctgggggcaaggaccggctgaggaagacagctgagcacactggagagggccggcctgccaagctgagctacacagaggccgagggggagaggtctgccctgctggccgccatccggggccacagcggcacctgcagcctgaggaaggtggccagcagcgccagcgaggagctgcagagcttcagagatgctgccctgagcgcccagggcagcgagagccccctgctggaggacctgggcctgctgagccccccagccatccccccacctcctcctccacccagccaggccctgagcgcccccaggacagccagccgcttcagcacaggcaccctgagcaacacagcagatgcccggcaggccctgatggatgccatccgctctggaactggagctgcccggctgaggaaggtgcccctgctggtgtag

SEQ ID NO: 305820 - DNA, 3441 bp, Artificial Sequence
  derived and/or modified sequence
ctgcgggacaacattgctggggaggagctggagctgagcaagagcctgaatgagctgggcatcaaggagctgtatgcctgggacaacagaagagagaccttcaggaagagcagcctgggcaatgatgaaacagacaaggagaagaagaagttcctgggcttcttcaaggtgaacaagaggagcaacagcaaggccgagcagctggtgctgtctggagctgacagtgatgaggacaccagccgggccgcccctggccggggcctgaatggctgcctgaccacccccaacagccccagcatgcacagccgcagcctgaccctgggccccagcctgagcctgggcagcatctctggagtgtctgtgaagtctgagatgaagaagaggcgggcccctcctcctcctggcagcggcccccctgtgcaggacaaggccagcgagaaggtgtccctgggcagccagattgacctgcagaagaagaagagaagagccccagcccctcctccaccccagcccccaccacccagccccctcatccccaacagaacagaggacaaggaggagaacaggaagagcaccatgggcggcggccggcaggtgccccagaagccaccccggggcacagcccggggccccccccagctggtgctgcccccacctccaccctacccacctccagacacagatgtggtggagcccctgtccttccctggagagggcgccggcagcgaggccagtgaccccatccccaagctgagcctgcccctgggcagcggcagccactgcagcccagatggagccccccaggtgctgtctgaggccgaggagaccgtgtctgtgggcagctgctttgccagcgaggacaccacagaggacagcggcgtgatgagcagccccagcgacatcgtgtccctggacagccagcaggacagcatgaagtacaaggacaagtgggccacagaccaggaggactgcagcgaccaggacctggccggcaccccagacctgggcccccagaagagccccctgtgggagaagaatggaagtgagaacagccacctgaggacagagaaggctgtgacagccagcaatgatgaggaggacctgctgattgctggggagttcaggaagaccctggccgagctggatgaggacctggaggagatggaggacagctatgaaacagacaccagcagcctgaccagcagcatccacggggccagcaaccactgcccccaggatgccatgatcccccacggggacacagatgccatccctgtgaccttcatcggggaggtgtctgatgatcctgtggacagcggcctcttcagcaacagaaacaacaatgccggcagctttgacagcgagggcgtggccagccggcgggacagcctggcccccctgcaggccgagcacagccagccccatgagaaggcccgggaggaggtgcctgccctgcacccagccagccatgatgtgggcaagggcatccgggtggccctgagcaacatcagcaaggatggcaacctgatggagacagccccccgggtgaccagctttgccagcaacctgcacacagacaacctgaatgccaaggtgaaggacaaggtgtatggctgtgctgatggagagaggacccaggccacagagcgggtgaacagccagcctgtgaatgagaaggacagcaatgacaagaatgctgccctggcccccacctcctggcaccagaggggccagaaccctgggaagagctaccgcctgaagcacggcctgaccacctacaagatcatcccccccaagtctgagatgcgctgctatgacagagatgtgtccctgagcactggagccatcaagattgatgagctgggcaacctggtgagcccccacgccaccggcatccgcatcatcagcctgagcagctctgtgcctgaggccgagagccagcccatcggcaaggtgcgggagttctggcgctgcaacagcgtggagaagcacctgggccggcccagcgagagcagcgcccggggcccccccagcacccctgtgcccacccagacccagaaccctgagagccggctgcaggccgaccccaagcccatcagcccccagcagaagagcgcccaccacgagggcaggaaccccctgggggagggcaggaaccagccccccaccatgggcatgggccacgtgcgggtgcctgctgcccacaccacagaggtgaccttcctgaagccccagaggaggaccagcagccagtatgtggccagcgccatcgccaagagaattggagcccccaaggtgcatgctgatgtggtgcggccccacggctatgcagagaagggctacgccggcaaggcccctgtgctggccgcccctcctgtgacagtgaaggatgacaggaccagcagcccccacagcgagacccagggctggaaggatggagcccagtggccctgtgtgaccccacccaacaaccacggggaggacctggccgtgggcgcccccccaagaggagaggtgattggcccccacaggaagctgagcacccaggacaggcctgctgccatccacaggagcagctgcttcagcctggtgcagagcagccagagggacagagtgtctgtgggccagagctgtggcttcagcggcaagcagagcaccagcagccaggaggccagcagcgccagcgagccccggcgggccccagatggaacagaccccccaccaccccacaccagtgacacccaggcctgcagccgggagctggtgaatggatctgtgcgggcccctggccatggagagcccagccaccccccaggcggcagcggcacagagagccacatcctgctggagcgggaggagaagcccagcgtcttcagcacagatggaaatgaaacagacagcatctggccacccagcatcttcggccccaagaagaagttcaagcctgtggtgcagaggcctgtgcccaaggacaccagcctgcacagcgccctgatggaggccatccacagcgctgggggcaaggaccggctgaggaagacagctgagcacactggagagggccgcccagccaagctgagctacacagaagctgagggggagaggtctgccctgctggccgccatccggggccacagcggcacctgcagcctgaggaaggtggccagcagcgccagcgaggagctgcagagcttcagagatgctgccctgagcgcccagggcagcgagagccccctgctggaggacctgggcctgctgagccccccagccatccccccacctcctcctccacccagccaggccctgagcgcccccaggacagccagccgcttcagcacaggcaccctgagcaacacagcagatgcccggcaggccctgatggatgccatccgcagcggcaccggggccgcccggctgaggaaggtgcccctgctggtgtag

SEQ ID NO: 305821 - DNA, 4032 bp, Artificial Sequence
  derived and/or modified sequence
atggacgccccccgggccagcgccgccaagccccccaccggccggaagatgaaggcacgggccccaccacctccaggcaaagctgcaaccctccacgtgcacagcgatcagaaacccccccatgatggcgcccttggttctcagcagaacctggtcagaatgaaagaagccctacgcgcctcaaccatggacgtgaccgtcgtcctgccatctggattagaaaagcgcagcgtgctgaacggatcacatgccatgatggatctcctggtagagctatgtctacaaaaccaccttaacccgtcgcaccacgccctggaaatcagatctagcgagacacagcaaccattgagcttcaaacctaatacgctcatagggactctgaatgtgcacaccgtgtttctgaaggaaaaagtccccgaggaaaaagtaaagcccggcccccctaaggtgccagagaaatcagttaggctggttgtcaattatttaagaactcagaaggccgtggtcagagtgtctcccgaggtgccattacaaaacattctcccagtgatctgtgccaaatgtgaggtcagcccggaacatgtggttctgctgcgcgataatatagctggcgaggaactagaactctcaaaatctcttaatgagctgggaatcaaagaactctatgcttgggataacaggagagagactttccggaagagctccctcggtaatgatgaaaccgataaggagaagaagaaatttctcggttttttcaaggtgaacaaaaggtccaattcaaaggctgaacagctggtgctgtccggagctgatagcgatgaggatacatctcgcgccgcgcccgggaggggtctgaatggctgcctgactacccctaacagcccttccatgcactcacggtccctcacactaggaccctccctctctctagggtctatatccggggtctcagttaagtcggagatgaagaaaagacgtgcccctccacctccaggaagtgggccacccgtgcaggacaaagcatccgagaaggttagcttgggatctcagattgatcttcagaaaaagaagaggagagctcccgcaccccctccccctcagccaccaccgccatccccacttattcccaaccgcaccgaagataaggaggaaaacaggaaatcgactatgggcggaggcaggcaggttccgcagaagcctccaagaggcacggctcgcggcccgccccagttggtgctgccccctccccccccatacccgccacctgacaccgacgtggtggagccactgtcctttcctggagagggggctggaagcgaggcatcagaccctatcccgaaattatcccttcctttgggttctggatctcattgttctcctgatggggcgccgcaagtcctatcagaagctgaggagacggtatcggtagggtcatgctttgcttcagaggatacgacagaggattcaggggtgatgtcaagcccttcagacattgtgtctcttgattctcagcaggacagcatgaagtataaagacaagtgggctacagatcaggaagactgttcggatcaggaccttgcggggacgccagaccttgggccacaaaagagcccactctgggagaagaacggctccgaaaactcgcacctgagaactgagaaagccgttaccgccagtaacgatgaggaggatttactaatcgctggtgagttcagaaaaacgctggccgaactggatgaggacttggaggaaatggaagactcctacgaaacggatacctcctccctgacaagcagtattcacggtgctagcaaccattgcccacaagatgctatgattcctcatggcgatacagatgccattcctgtgactttcatcggagaggtctccgacgaccccgtggattccggcctgttcagcaatcgtaataataacgccggttccttcgatagtgagggcgtcgctagccggcgtgactcactggccccgctacaggctgaacacagtcagccacacgaaaaagcccgcgaagaagtcccagcgcttcacccagcgtcgcatgatgtaggtaaaggaatccgagtcgccctttcgaacattagtaaagatggtaacctgatggaaacagcgccccgggtgacctcgttcgcttccaatctgcacacagataatctgaacgccaaggtgaaagacaaggtttatggctgcgcagacggcgagagaacgcaggcgacagaacgggtcaattctcagcccgtcaacgagaaagactccaatgataaaaacgcagcactcgctccaacttcctggcaccagaggggccaaaatccaggcaagagttatcgacttaagcacgggttaacaacctataagattatcccacccaaaagcgaaatgcgatgctatgaccgtgacgtgtccctcagcacaggagccattaaaatcgatgagttgggcaatttggtatctccccacgctaccggtatccgaataatctctctttcaagcagcgtccccgaggccgaatctcaacctattgggaaagtgcgtgaattttggcggtgtaactcagtagagaagcacctaggtcggcctagcgagagcagcgcccggggccccccctcaacgcctgttcctacgcagacgcagaatcctgaaagtaggctgcaggctgaccccaagcccatttcaccacaacaaaagagtgcgcaccacgaaggtaggaacccccttggggagggccgtaatcagccccctaccatgggtatggggcacgtgcgggtgccagcagcacatacaacagaggtgaccttcctgaagccgcagcgacggacgtcgagtcagtatgtagcatccgccatagccaaaaggatcggtgcaccaaaggttcatgctgatgtggtgcgtccccacggatacgctgagaagggctacgctggcaaggcacccgtactggccgctcccccggtgacagtgaaggacgacagaacttcatccccgcacagcgaaacacagggctggaaggatggcgcacagtggccctgcgttactccccctaataaccacggtgaggatctagccgtgggcgccccacctagaggagaggtgatagggccccaccgtaagctgtctacccaagaccgaccagccgccatccatcgcagctcctgcttctcactggtgcagagctcacagcgagacagggtctccgttgggcagtcctgtggcttcagcggaaagcagtctacttcctcccaggaagcctctagtgcatccgaaccccgaagagctcctgatggaaccgaccccccacccccccacacctccgacacacaagcgtgcagcagagaattggtgaatgggagcgtgcgcgctccaggccatggtgagccaagccatccacccggagggagcggcacggaatcccacattctgctggagcgggaggagaaaccctcagtcttttccacagacggaaacgaaacagatagtatttggccaccgtcaatatttgggcccaaaaagaagttcaaacctgtggtgcaacggcccgtccctaaagacacgtctctgcactctgccttgatggaggcgattcatagtgccggaggtaaagatcgcctcaggaagaccgccgaacatactggtgaaggtcgccccgcaaaactttcctataccgaggccgagggcgagagatcagcactgctggctgcaatccgagggcacagcggaacatgctcactcagaaaggtggcaagctctgcttccgaagagctacagtcattccgtgatgcagccctgagtgcccagggatccgagtcccctctcctggaagacctcggcctcttatcccccccagccatccctccaccaccaccgcccccctcacaggccctgtctgcacccaggacagcttcacggttcagtaccggcactctgagcaatacagccgacgcccgccaggctttgatggatgctatccgaagtggcaccggggccgccagattgcgcaaggtgcctcttttggtgtag

SEQ ID NO: 305822 - DNA, 3441 bp, Artificial Sequence
  derived and/or modified sequence
ctgcgggacaacatcgccggcgaggagctggagctgagcaagagcttaaatgaattggggatcaaggagttgtacgcctgggataaccggcgggaaacatttagaaagtctagcctagggaatgacgaaacggacaaagagaagaaaaagttcctcggcttcttcaaagtgaacaagcgaagtaactctaaagccgagcagctcgttctgtccggcgctgatagcgatgaggacacttcccgcgccgcgccgggccggggtttaaatggttgccttacaaccccgaatagtcccagtatgcactcaaggtccctgacccttggcccaagcttatcgcttggcagtatatcaggggtgagtgtgaagagcgaaatgaagaagagacgcgctccacctccaccggggtcaggcccacccgtacaggataaggccagtgaaaaggtcagtctgggatcccagatcgacttacagaaaaagaagcgcagagctcccgcgccacctccaccacaaccccccccccctagtcccctgatcccaaatcgcaccgaggataaggaggaaaaccggaagagcaccatggggggcggccgtcaagtgccacagaaaccgccacgaggtactgcccgaggacccccacagttagtcctgcccccccctcccccgtacccaccgccggatacagatgtagtggagccactgtcattcccgggggagggagctggatccgaggcctccgatcctatccccaagctaagcttgcccctaggcagtggctctcactgcagccccgacggagctccacaggtgctcagtgaagccgaggagacagtatcagtgggttcatgttttgccagtgaagatactacagaagacagcggagtgatgtccagcccatcagacatcgtgagcctcgacagccagcaggattccatgaagtataaagacaagtgggccacagaccaagaggactgtagtgaccaggatctagccggtaccccggacttgggccctcagaaatccccattgtgggaaaagaacggatctgagaactctcacctgcgaacggaaaaggcagttactgcctctaacgatgaggaagacctcctgatcgccggagaatttagaaagactctcgcggaactcgacgaggatctggaggagatggaggactcctatgagactgatacatcctcactgacctcctctattcacggggcatctaaccattgcccccaggatgccatgatcccacacggtgatactgatgccatccccgtgacctttatcggggaagtcagtgacgacccggtagactctggtctgtttagcaataggaacaataacgctgggtcattcgattctgaaggcgtggccagtagacgtgacagcctggccccactgcaggctgagcactcccagccacacgaaaaggcgagggaagaggttcctgctcttcaccctgcaagtcatgacgtgggtaagggtattcgggtggccttatctaacatctccaaagacggaaaccttatggagaccgctcctcgggtgacctcgtttgctagtaacctgcatactgacaacttgaatgctaaggttaaagacaaggtgtatggatgcgctgacggtgagcgcacccaagccactgagagagtgaactcacagccagttaacgaaaaagatagcaacgataagaacgctgctctggctcccaccagttggcaccagaggggacagaatccgggcaaatcataccggctcaaacatgggctgaccacttataagatcatacccccaaaatcagagatgagatgctacgaccgagacgtgagcctgtcaacaggtgctattaagatcgacgagttgggcaatctggtgtccccccatgccaccggaatacgcataattagcctgtcctcttccgtccccgaggccgaatcccagcccataggcaaggtcagggagttttggcggtgcaacagtgtggaaaagcacctcggcagaccttccgaatcgagcgcacgtggccctccgtctacaccagtccccactcagacacagaaccctgagtcgcggctgcaagctgaccccaaaccaatcagtcctcagcaaaagtccgcgcatcatgagggccgcaatcctctgggcgagggccggaatcagcctcccaccatggggatgggtcatgtgcgcgtgcccgcggcgcataccactgaagtgacctttctgaaacctcagcggcgcacaagtagtcagtacgttgcatccgccattgccaagcgaataggagcgcctaaggtgcatgccgatgtagtgagaccccacgggtatgccgagaagggctatgccggaaaggcccccgtgctcgcggcaccaccagtaacagtgaaagatgatcgcacgagctcaccccactccgagacgcagggttggaaggacggggcacagtggccatgtgttaccccgcctaataaccatggagaagacctggcggtaggagctcctcccaggggtgaagttataggacctcatcgtaaactgagcacacaggatcgtccggctgcaatccaccgaagcagctgtttctcattagtgcaatcaagtcagcgggatcgggtcagcgtgggccagtcatgtggcttcagtgggaagcagtctacatcatcccaagaggcgtcatcagcttccgagcccaggagagcaccagacgggacagatccaccccccccgcatacctccgatacccaggcatgttcccgcgaactggtgaatggttcagtgagagctcccggccacggcgaaccaagtcacccacccggcgggtccggaacagaatctcacatcttgctagagcgggaagaaaaacccagcgtgttttccactgatgggaacgagacagactcgatttggcccccatcaatcttcgggccaaagaagaagtttaagcccgtggtgcaacgcccagtgcctaaagatacttcactccattccgcgctgatggaggctatccattcggcaggcggtaaggaccgcctccggaaaaccgccgaacataccggtgaaggccgtccagctaaactgtcctataccgaagccgagggggaacgcagcgccttgctggccgcaatcaggggacattccggaacatgttccttgaggaaggtcgcttcaagcgcatctgaggaactccagtcttttcgcgatgccgccttaagtgctcagggtagtgaatcccccctgctggaagacttagggttgttatcccccccagctattccgcctccccctccccctccatcacaggctctctcggcacctcggacagcctccaggttctctactggaaccctgtctaacaccgccgacgccagacaggcccttatggatgccattcgctccgggacaggggcagctcgcttgaggaaggtcccccttctcgtctag

SEQ ID NO: 305823 - DNA, 4032 bp, Artificial Sequence
  derived and/or modified sequence
atggacgcacccagagcgagcgcagcaaagcctccaacggggcgaaaaatgaaggccagggccccaccccctccaggcaaggcagccacgttacacgtgcatagcgatcagaaaccgcctcatgatggggcactaggttctcagcagaacttagtgcgaatgaaggaagctctaagagccagcacaatggacgtgacggtggttcttccatccggactggagaagcggagtgtgctgaatgggtctcatgcaatgatggatttgctggtagagttatgccttcagaatcatcttaacccatcccaccacgccctggagataagaagctcggagacccagcaacctttatctttcaagccgaatacactgataggcactcttaacgttcataccgtgttcctgaaagagaaagtgccggaagaaaaggtgaaaccaggccctcctaaggttcccgagaagtccgtccggttggtcgtgaactacctgcggacccagaaagcggttgtccgtgttagccccgaggtccctctccagaatatcctgccagtgatctgtgctaaatgcgaggtcagcccagagcacgtggtgctgctgagagacaatattgctggggaagagcttgagctgtccaagtctcttaacgaactcggtatcaaagaactgtatgcgtgggataaccggagggagacttttcgaaaaagcagtttaggcaacgacgaaaccgacaaagagaaaaaaaaatttctgggcttcttcaaagtgaacaagaggtccaatagcaaagccgagcagttggtactgagcggtgctgacagcgacgaggacacgagtcgagcggcacccggtcgcggtcttaacggctgcctgaccacccccaattcacccagcatgcattctcggagcctcacgctggggccaagcctctcattgggctcaattagtggggtgagtgttaaaagtgagatgaagaaacggagagcccctcccccaccaggatctgggcctccagtccaggacaaagccagtgagaaagtatctcttggatcccagatcgatctgcagaagaagaagaggcgcgcacctgcccctcccccacctcaaccacctcctcccagcccgctcatacccaatcggaccgaggataaggaggagaaccggaagtccacaatgggtggaggaaggcaggtgccacagaagccaccgcgaggcacagctagggggccacctcagcttgttctccctcctcctcctccctacccccctccagacacagacgtggtagaacccctgagtttccccggagagggggcaggttcagaagcctccgacccaattcccaaactcagcctcccactgggaagcggaagtcactgctcccctgatggcgcaccccaggttctctccgaggctgaggagacagtctccgtgggtagctgcttcgcaagcgaggataccaccgaggattctggagtcatgagctctccttccgacattgtgagcctagactctcagcaggactccatgaaatataaagataagtgggcaacggatcaggaagactgttcggaccaagatctcgccggaactcccgatctcggaccacaaaaatctccactttgggagaaaaatggttccgagaattctcacctcaggacagaaaaggctgtgacagcctcaaacgacgaggaggatctacttattgcgggagagtttaggaaaacactggccgagttggatgaggacctagaggagatggaggattcatacgaaacagacacatcctcattgacctcgtccatacacggggctagcaaccactgtcctcaggatgctatgatacctcacggggacacagatgcaatccccgtgacttttatcggggaggtaagtgatgaccccgttgactctggactgttttccaataggaataataatgcaggcagtttcgactctgaaggagtagcctcacgaagagactctctagcgcctctgcaggctgagcattcgcagcctcatgaaaaagccagggaggaagtgcctgcactgcacccagcatcccacgacgttggaaaggggattcgggttgccctatcgaatatcagtaaggatggaaacttaatggagactgcgccaagagtaacctcattcgcgtctaatttgcacaccgacaatctgaacgcaaaagtgaaggataaggtgtatggctgtgccgacggggaaagaacacaggccactgagcgggtgaattctcagcccgtaaatgaaaaggattcgaatgataaaaatgccgctctggctccaacgtcatggcaccagagaggacagaatcccggaaaaagctatcgactcaaacacggcctcactacctataagatcatcccacccaaatcagagatgcgctgctatgatcgcgacgtgagtctgtctactggagcaataaagatcgatgagctcggcaatttagtgagccctcatgcaacaggcatccgaattattagcttgtccagctccgtccccgaggctgaaagtcagcccatcggtaaagtgagagagttttggcggtgcaacagcgtggagaaacatctgggcaggccctctgaaagctccgccagaggcccaccttccacccccgttccaactcagacacaaaacccagagagtcgattacaggctgatcccaaacccatctccccacagcagaaaagtgcccaccacgaagggcgtaatccactgggcgagggcagaaaccagcccccaaccatgggcatgggacacgtgagggtacctgcagcccacacaacagaggtcactttccttaagcctcagagacggaccagtagccagtacgtggcctcagccatagctaagaggattggagccccaaaggtccatgctgacgtggtgcgaccacacggttacgccgagaaaggctacgccggaaaggcgcctgtattggccgctcccccagttacggtgaaggatgataggacgagcagtccacactctgagacccaagggtggaaagacggcgcacaatggccttgcgttacaccacctaacaaccacggggaggacttggccgtgggagcaccccctagaggagaagtcattggccctcatcgtaagcttagtacccaagatagaccggcagcaatccaccggtcatcctgctttagtctcgtccagagtagtcagcgagaccgggttagcgtgggacaatcttgtgggttcagcgggaagcagagcacatccagtcaagaggcctcatcagcatcagagcctcgacgggcaccagacggaacagatccaccccctccacacacctccgacacacaggcctgcagccgagagttggttaacggttcggttagagccccaggacacggtgaacccagccatcctcccggaggttcaggaacggaatctcatattctgctggaacgtgaagagaaaccttcagtgttcagtactgacggtaatgagacggactccatatggcccccttccatattcggacctaagaagaaatttaaacctgtagtgcagagacccgttccaaaggatacgtctctacattccgctttaatggaggccattcactccgccggagggaaggaccgcctgaggaagacagcggagcacaccggcgagggaaggcccgcaaaactgtcttatacagaagccgagggggagagaagtgccctactggctgcaattcggggacactcagggacatgttccttgcgaaaggtggccagttctgcttctgaagaattacagtctttccgagacgccgcactgtctgcacaaggctccgaatcaccgctcctggaagatctcggactgcttagcccacctgccatccctccccctcccccacctccaagtcaggcgctgtcagctccgcgaaccgctagccggttctcgaccggaactctttctaacacagcagacgcccgacaggccttaatggacgctattcggagcggtaccggggctgcaaggctgcgaaaagttcccctactggtttag

SEQ ID NO: 305824 - DNA, 3441 bp, Artificial Sequence
  derived and/or modified sequence
ctcagggataatatcgccggagaagaactcgagctgagcaaatctctgaacgaactgggcatcaaagagctctacgcgtgggacaatcgacgtgaaacctttagaaaatctagtctagggaacgacgaaacagataaggagaagaagaagttcctgggatttttcaaggtgaacaagcggtcaaactccaaagccgaacagctcgtgttatctggagctgactccgacgaagacaccagtcgcgcagctcccggtagaggcctcaatggctgccttaccactcctaacagcccatccatgcactcccgctcacttactctcggcccttctctgtcgctggggtcaattagtggagtctctgtgaaaagcgagatgaaaaagagaagagccccaccacctccaggaagcggccctcccgtgcaggacaaggctagcgagaaagtctctctagggtcacagattgatctccagaaaaagaaaagacgggctcccgctccccctccgccacagccccctcctccttctcccctgatacccaaccgcactgaggataaggaagaaaaccgcaaatccacgatgggtgggggacggcaggttccccagaaacctcccaggggtaccgctcgcggtccaccacagctcgtgctgccccctccgcctccctatccaccacctgatactgatgtagtggagcctctatcctttccaggcgaaggggcaggaagtgaggcctctgaccctataccgaagctgtctctccccctcgggtccggctcgcattgttctcccgacggagcaccccaggtgctcagcgaggcagaagagacggtcagtgtggggtcttgtttcgctagtgaggataccaccgaagacagcggcgtgatgtcgtctccctcagacatcgtatcactggacagccagcaggatagtatgaagtataaggacaagtgggctacagaccaagaagactgctcagatcaggacctggctggcacccccgatcttggcccacagaagagccccttgtgggagaaaaacggatctgagaattctcatctgaggaccgagaaagccgtgactgcatccaatgacgaagaagatctgctgatcgcaggggaatttagaaagacactcgccgagctggacgaggacttggaagagatggaagacagctatgaaaccgacacttcttctctcacgagcagcattcacggggcttccaatcactgtccccaagacgctatgataccccacggcgacactgacgccatccctgtcacctttattggcgaggtgagcgacgatccggtggactcgggcctcttctcaaatcggaacaacaatgctggaagcttcgacagtgaaggggtagcctctaggcgggattcattggcaccactgcaggcagagcactctcaaccccacgagaaggcccgtgaagaggtgccggcattgcaccccgctagtcacgatgtggggaaaggaattcgcgttgcgctcagcaacatctctaaggatggcaatttgatggagaccgcacccagggtaaccagtttcgcttctaatctgcatactgataacctgaacgcaaaggtcaaggacaaggtgtatgggtgcgctgatggggaacgaacccaggcaacagaaagagttaactcccaaccggtgaatgagaaagacagcaacgataagaatgccgcattggctccaacctcttggcaccaaaggggtcagaaccccggaaaatcctacagactgaaacatgggctgacaacatataagattatcccccctaaaagtgaaatgcggtgctatgatcgtgacgtgagtctgagcactggagccataaagattgacgaactaggcaatcttgtgtccccgcatgcaaccggcattcggattatttccctttcttccagcgtacctgaggccgagagccaacctataggtaaagtccgcgaattttggagatgtaatagcgtagaaaagcaccttggcagaccgagcgaaagcagcgctaggggccctccttcaacaccagtcccgacgcagacccagaacccagaatcccgattgcaggctgatcctaaaccgatttctcctcagcagaagtcagcccatcatgaaggccgtaatcccctcggcgaaggccgaaaccagcctcctacaatgggtatgggccacgtccgggtgccagctgcccacactacagaagttacattcctgaaaccccagcgaagaactagttcgcaatatgttgcaagcgccatcgcgaaaagaatcggcgctccaaaagtccatgctgatgtcgtgcggcctcacggatatgccgaaaaggggtatgctggcaaggcccctgttttggccgcacctccagtgaccgtcaaggacgatcgcacatcatccccacatagtgagactcaaggctggaaggacggggcacagtggccctgtgtgacccctcctaacaatcatggcgaggacttagcagtgggcgctccccctaggggggaggtgattgggcctcacagaaagctcagtacgcaggacagaccagccgctatccaccggagtagctgtttctccctcgtgcagtcatctcagagagatcgtgtgagcgtgggacagtcttgcggcttctctgggaagcagagcacctcaagtcaagaggcatccagcgcctccgaaccaaggcgagcccctgacggaacagaccccccacccccacatacttcagatacccaggcttgctccagggagctcgttaatggctctgtgcgcgctccagggcacggagagccctctcaccctccaggaggaagtggaaccgaatcacatatcctgctggaaagggaagaaaaaccttctgtgttctccacagatggaaacgagaccgacagcatatggccaccgtccatcttcggcccaaaaaaaaagtttaagcccgtcgtccagcgccctgttccaaaggacacctctctgcacagcgctctgatggaggcgatccactctgcaggaggtaaggaccggttacggaagaccgcagagcataccggcgaaggaagacctgccaagctgagctacactgaagcagaaggcgaacgctcagcactcctcgccgctatccggggacatagtggtacttgttctctccggaaagtggcctccagcgccagtgaggaactgcagtctttccgggacgccgcattgtccgcccagggatccgagtctccactcttggaggatttagggttactgtccccaccggcaatcccgcctcccccacctcctccatctcaggccctgtcagcacctcggaccgcaagccgattttccacaggcactttatccaacactgcggatgcgaggcaggctctgatggacgcaatccgttcagggactggagctgcaagactgcggaaggttccgctgttggtgtag

SEQ ID NO: 305825 - protein, 274 aa, Artificial Sequence
  derived and/or modified sequence
MEDSYETDTSSLTSSIHGASNHCPQDAMIPHGDTDAIPVTFIGEVSDDPVDSGLFSNRNNNAGSFDSEGVASRRDSLAPLQAEHSQPHEKAREEVPALHPASHDVGKGIRVALSNISKDGNLMETAPRVTSFASNLHTDNLNAKVKDKVYGCADGERTQATERVNSQPVNEKDSNDKNAALAPTSWHQRGQNPGKSYRLKHGLTTYKIIPPKSESSGGATLWKNTWADPQRALPGDPPPPLCPRRRRIQRADSKQTPSQYRPSRSLPTMRAGTP

SEQ ID NO: 305826 - DNA, 825 bp, Artificial Sequence
  derived and/or modified sequence
atggaggacagctacgagaccgacaccagcagcctgaccagcagcatccacggcgccagcaaccactgcccccaggacgccatgatcccccacggcgacaccgacgccatccccgtgaccttcatcggcgaggtgagcgacgaccccgtggacagcggcctgttcagcaacagaaacaacaacgccggcagcttcgacagcgagggcgtggccagcagaagagacagcctggcccccctgcaggccgagcacagccagccccacgagaaggccagagaggaggtgcccgccctgcaccccgccagccacgacgtgggcaagggcatcagagtggccctgagcaacatcagcaaggacggcaacctgatggagaccgcccccagagtgaccagcttcgccagcaacctgcacaccgacaacctgaacgccaaggtgaaggacaaggtgtacggctgcgccgacggcgagagaacccaggccaccgagagagtgaacagccagcccgtgaacgagaaggacagcaacgacaagaacgccgccctggcccccaccagctggcaccagagaggccagaaccccggcaagagctacagactgaagcacggcctgaccacctacaagatcatcccccccaagagcgagagcagcggcggcgccaccctgtggaagaacacctgggccgacccccagagagccctgcccggcgacccccccccccccctgtgccccagaagaagaagaatccagagagccgacagcaagcagacccccagccagtacagacccagcagaagcctgcccaccatgagagccggcaccccctag

SEQ ID NO: 305827 - DNA, 1832 bp, Artificial Sequence
  derived and/or modified sequence
aaatacaaagacaagtgggccacagaccaggaagactgcagtgaccaggacctcgctggaaccccagacctgggtccccagaagagccccttgtgggagaagaatggctctgagaactcacatctgagaactgaaaaagctgtcacagcctcaaatgatgaagaagacctattaattgctggagagttccgtaaaacccttgcagaacttgatgaagacctggaagaaatggaagacagctatgaaacagacaccagctccctcaccagctccatccatggtgcatccaaccactgcccacaggatgccatgatccctcacggcgacacagatgcaatcccagtaacattcataggggaagtttcagatgatcctgtggattcggggttgttttccaatagaaacaacaatgctgggtctttcgactcggagggtgttgccagcaggagagactccctggcgccacttcaagctgagcacagccagccccatgaaaaggcaagggaggaagtacctgccctgcaccccgcttcccatgacgtcggaaaaggaatccgtgtggccttatctaacatctctaaagatgggaatctaatggaaacggcgcccagggtgacttcttttgcttcgaatcttcacacagacaacctaaatgcaaaagtgaaagacaaagtgtatggctgtgctgacggggagaggactcaagccacagagagagtgaattcccaaccggtgaatgaaaaggacagcaacgataaaaacgctgccttggcaccaacatcatggcaccaacgaggccaaaacccagggaaaagctacagacttaagcacggcctcacaacgtataaaatcattcctccaaagtcagagagttctggaggtgcaactctgtggaaaaacacctgggccgaccctcagagagctctgccaggggacccccctccacccctgtgcccacgcagacgcagaatccagagagcagactccaagcagaccccaagccaatatcgccccagcagaagtctgcccaccatgagggccggaaccccctaggggaggggagaaaccagccccccaccatgggcatgggtcacgtgagggtgccagcagctcacaccacagaagtcacatttctcaagcctcagagaagaacgtccagccagtatgtggcctctgccattgccaagcgcataggagccccaaaagtccatgctgatgtggtgaggccacacggttatgccgagaagggttatgcaggcaaggcgccagtgctggctgcaccacctgtcactgtgaaagatgacaggacatccagcccacactcagagacacaaggatggaaggatggtgcccagtggccctgtgtcactcctcccaacaaccacggggaagatttggcagtgggagcccctcctaggggggaggtcattggcccacacaggaagttgtctactcaggacagacctgctgctatccacagaagctcctgtttctcactggttcagtcttcccagagggatcgtgtttctgtgggacagagctgtggtttcagtggaaagcaaagcacaagtagccaggaggccagctcagcatctgagcccagacgcgcacctgatggtacagacccaccccctccacacacatctgacactcaggcctgcagcagggagctggtcaatggctctgtgcgcgccccaggccacggcgagccttcccaccctccaggagggtctggcacagaaagccacattctcctagaaagagaggaaaagcccagtgtgttctctacagatggaaatgaaacagacagtatttggccacccagcattttt

SEQ ID NO: 305828 - DNA, 825 bp, Artificial Sequence
  derived and/or modified sequence
atggaagactcatacgaaaccgatacgtcctcgctgacgtcatctatacatggcgccagcaatcactgtcctcaggatgccatgatccctcacggtgacacagatgctatcccagttacctttatcggcgaggtgtctgatgatcctgtcgacagcggactgttctccaataggaataataatgccggcagcttcgacagtgagggggtggcatcacgacgagactctctcgccccattacaagccgagcattctcaaccccacgagaaggcaagggaggaagtgcccgccctccaccccgcgtctcatgatgtcgggaagggcatcagagttgcgctcagcaacatctcgaaggatggcaacttgatggagactgccccgcgggtgactagcttcgccagtaatttacacaccgataatctcaacgctaaggtcaaagacaaggtttacgggtgcgcggacggggagcgcactcaggcaaccgagcgagtcaactcacaaccagttaacgaaaaggattctaacgataagaatgccgccctggctccgaccagttggcaccagaggggacagaacccaggtaaatcttaccgtttaaaacatggcctcaccacctacaaaattattccgcccaagagtgaatcatcaggcggagcgaccttgtggaaaaacacttgggcggacccacaacgtgcattacccggcgatccccccccaccactgtgcccacgcaggcggcgcattcaaagggccgactctaagcagactccctcccagtaccgaccatcccgctccctgccgacaatgcgggctggaactccttag

SEQ ID NO: 305829 - DNA, 825 bp, Artificial Sequence
  derived and/or modified sequence
atggaggacagctatgaaacagacaccagcagcctgaccagcagcatccatggagccagcaaccactgcccccaggatgccatgatcccccatggagacacagatgccatccctgtgaccttcatcggggaggtgtctgatgatcctgtggacagcggcctcttcagcaacagaaacaacaatgccggcagctttgattctgaaggagtggccagcagaagagacagcctggcccccctgcaggccgagcacagccagccccatgagaaggcccgggaggaggtgcctgccctgcacccagccagccatgatgtgggcaagggcatccgggtggccctgagcaacatcagcaaggatggcaacctgatggagacagccccccgggtgaccagctttgccagcaacctgcacacagacaacctgaatgccaaggtgaaggacaaggtgtatggctgtgctgatggagagaggacccaggccacagagcgggtgaacagccagcctgtgaatgagaaggacagcaatgacaagaatgctgccctggcccccacctcctggcaccagaggggccagaaccctgggaagagctaccgcctgaagcacggcctgaccacctacaagatcatcccccccaagtctgagagcagcggcggggccaccctgtggaagaacacctgggccgacccccagagggccctgcccggggaccccccaccacccctgtgccccaggagaagacgcatccagagagctgacagcaagcagacccccagccagtaccggcccagccgcagcctgcccaccatgagagctggcaccccctag

SEQ ID NO: 305830 - DNA, 825 bp, Artificial Sequence
  derived and/or modified sequence
atggaggacagctacgagaccgacaccagcagcctgaccagcagcattcacggggcgtccaaccactgcccccaggacgccatgattccgcacggggacacagacgctatccctgtcaccttcatcggagaagtgtccgatgatcctgtcgactccgggctcttctctaacaggaacaataatgccgggtctttcgattccgagggtgtcgcctctcgcagggattcactggcccccctgcaggcggagcattcgcagcctcatgagaaggcacgagaggaggtgcctgccttgcatccggcgtcgcacgacgtggggaagggcattcgggttgccctctcaaacatatccaaagatggaaaccttatggaaaccgctcccagagtgaccagctttgctagcaatctgcataccgataatctaaatgctaaggtgaaggataaagtttatgggtgcgccgacggggaacgcacgcaggctaccgagcgcgtcaattcacagccagtaaatgagaaggactctaacgataaaaatgcggctctcgccccaactagttggcatcaacgcggccaaaacccaggcaagagctaccgactgaaacatggcctgacaacatacaaaatcatcccacccaagtccgaatcctccgggggagctactctgtggaagaatacttgggctgatcctcagcgggccctacctggggatcctcccccccctctgtgtccccgcaggcgccggattcagcgcgcagattcgaagcaaaccccgtctcagtaccgtccctcccgtagcctgcctacgatgagggctggcaccccttag

SEQ ID NO: 305831 - DNA, 825 bp, Artificial Sequence
  derived and/or modified sequence
atggaggacagctacgaaacagatacatcttccctcaccagctcaatccacggggctagcaaccactgcccccaggacgccatgatcccacatggcgacaccgatgctatccccgtcacatttattggcgaggtttccgacgaccctgtggatagcggattattctcaaaccggaacaacaatgcgggaagctttgatagcgagggggttgccagtcggcgtgactcactggccccactgcaagccgagcactcacaaccacatgagaaagcacgggaggaggttcctgcactccacccagcttcacatgacgtcgggaagggcattcgtgtggcactttcaaacatatccaaagacgggaacctgatggagactgcacctcgtgtgacctcatttgcctctaacctacatacagacaacctgaatgcgaaggtgaaggataaggtgtacgggtgtgcggatggcgagcggacgcaggccacagaaagggtgaacagtcagccagtgaacgagaaagacagcaatgacaaaaatgctgctcttgcccctactagctggcatcaacggggtcagaacccagggaaatcataccggttaaagcacggcctcacaacctataaaattattccccctaagtcagagagttctggcggtgcaacactttggaaaaatacctgggccgatccccagagggcactgcccggagaccccccacctcctctgtgtcccagacgtagacgcattcagcgggcagacagcaaacagactccgtctcagtatcgcccaagtaggtcactaccgaccatgcgcgcagggactccctag

SEQ ID NO: 305832 - protein, 269 aa, Artificial Sequence
  derived and/or modified sequence
MPKEQLELLKKESQNLENNFRQILFLIEQIDVLKALLRDMKDGMDNNHNWNTHGDPVEDPDHTEEVSNLVNYVLKKLREDQVEMADYALKSAGASIIEAGTSESYKNNKAKLYWHGIGFLNHEMPPDIILQPDVYPGKCWAFPGSQGHTLIKLATKIIPTAVTMEHISEKVSPSGNISSAPKEFSVYVQRYMCRFVIQAGITKKCEGEEIFLGQFIYNKTGTTVQTFELQHAVSEYLLCVKLNIFSNWGHPKYTCLYRFRVHGTPGKHI

SEQ ID NO: 305833 - DNA, 1386 bp, Artificial Sequence
  derived and/or modified sequence
aacagaagaatcagaagcttttcaaaattccgtcttcaagaagaaacacccgtggaggaagaagacattatacaaaacaaatttagaaactgggatcatgagtggaaaaacaaaggcaagaagggctgccatgttttttagacgttgctctgaagacgccagcggtagcgccagtggcaatgctttgttatcagaggacgaaaatcctgatgcgaatggggtaactcgatcatggaagattattctaagtacaatgcttacactgacttttcttcttgtaggactcctaaatcatcagtggcttaaagaaacagatgttcctcagaaatccagacaattatatgccataattgcagaatatggttcaaggctttataaatatcaggccagacttcgtatgcctaaagagcaactggaacttttaaagaaggaaagccagaatctggaaaacaattttcgtcaaattctatttttgatcgaacaaatagatgtcctgaaggcattgctaagagatatgaaggatggtatggacaataatcacaactggaacacccatggagaccctgtggaggacccggaccacacagaggaagtgtcaaacttggtcaattatgtacttaaaaagttgagagaagaccaagtcgagatggctgattatgccctgaagtcggccggagcctccatcattgaagctgggacctcagaaagttataaaaataataaagcaaaattgtactggcatgggataggtttcctaaatcatgaaatgcctccagatattattcttcagccggatgtctaccctggaaagtgctgggcttttccaggttcccagggtcataccctaatcaagcttgctacaaagatcataccaactgctgttaccatggagcacatctcagagaaggtgtctccgtcaggaaacatctccagtgcacccaaggaattttctgtctatgttcagaggtatatgtgcaggtttgttatacaggcgggcatcacaaaaaaatgtgaaggagaagaaattttcctaggtcagtttatatataacaaaacaggaaccaccgttcaaacatttgaactccagcatgcagtttctgaatatttattatgtgtgaaacttaatatctttagcaactggggacacccgaagtatacttgtttatatcgattcagggtccatggcacaccaggcaagcacatctagaagagttggtacagaaggccatgccacatgtccagaatattcaagaatgcttattctcttagatgataccgcacccataggaattgagaattgggagtgggaagaaaacctcaaagtggttcatacttgcctgtaaaaagtaaatgcattttactaataaaaaaatatggaagtaaatt

SEQ ID NO: 305834 - DNA, 810 bp, Artificial Sequence
  derived and/or modified sequence
atgcccaaggagcagctggagctgctgaagaaggagagccagaacctggagaacaacttcagacagatcctgttcctgatcgagcagatcgacgtgctgaaggccctgctgagagacatgaaggacggcatggacaacaaccacaactggaacacccacggcgaccccgtggaggaccccgaccacaccgaggaggtgagcaacctggtgaactacgtgctgaagaagctgagagaggaccaggtggagatggccgactacgccctgaagagcgccggcgccagcatcatcgaggccggcaccagcgagagctacaagaacaacaaggccaagctgtactggcacggcatcggcttcctgaaccacgagatgccccccgacatcatcctgcagcccgacgtgtaccccggcaagtgctgggccttccccggcagccagggccacaccctgatcaagctggccaccaagatcatccccaccgccgtgaccatggagcacatcagcgagaaggtgagccccagcggcaacatcagcagcgcccccaaggagttcagcgtgtacgtgcagagatacatgtgcagattcgtgatccaggccggcatcaccaagaagtgcgagggcgaggagatcttcctgggccagttcatctacaacaagaccggcaccaccgtgcagaccttcgagctgcagcacgccgtgagcgagtacctgctgtgcgtgaagctgaacatcttcagcaactggggccaccccaagtacacctgcctgtacagattcagagtgcacggcacccccggcaagcacatctag

SEQ ID NO: 305835 - DNA, 810 bp, Artificial Sequence
  derived and/or modified sequence
atgcccaaggaacagctggaactccttaaaaaggaatcccagaatttggagaataactttaggcaaatcttatttctgattgaacaaatcgacgttctgaaggctttgttgcgcgatatgaaggacggaatggataataatcataattggaatacgcacggagaccccgtggaggatccagatcacactgaggaagtgtctaacttggtgaactacgtgctgaaaaagctcagggaagaccaggtcgaaatggctgactacgcattgaagtccgctggagctagtattatagaggctgggacatctgagtcctataaaaacaacaaagctaagttatactggcacggcataggcttcctaaatcacgaaatgcctcctgacatcatcctacagccagacgtatacccaggcaaatgttgggccttccctggcagccagggccatacgctgattaagctggccaccaagataatacctacagccgttactatggagcacatttccgagaaggtgagtccttcgggcaatatctctagcgcccccaaagaattttcagtatatgtgcagcgttatatgtgccggtttgtcatacaagcgggaattacaaaaaaatgcgagggtgaggagatcttcctgggccagtttatatacaataagacaggaacgaccgtacagacctttgagcttcaacatgctgtaagtgaatacttgctgtgtgtcaaactgaacattttttctaattggggccatcccaaatacacctgcctgtatagatttagggtgcacgggactcctggcaaacacatttag

SEQ ID NO: 305836 - DNA, 810 bp, Artificial Sequence
  derived and/or modified sequence
atgccgaaagaacagctggagcttcttaagaaagaatcgcagaacctggagaataatttcagacagattttgttcctgatcgagcagattgacgtgctgaaggctcttcttagagatatgaaagatggtatggataataatcataactggaatacacacggcgaccccgtggaagatcctgaccatactgaggaggtcagcaatcttgttaattacgtcttaaagaagcttagagaggaccaagtcgagatggctgactacgcgctgaagtccgctggcgcatccataatcgaagcaggaacatccgaatcctacaaaaacaataaggccaaactttattggcatggcatcggcttcctgaatcatgagatgcccccggatattatcctccagcctgacgtatacccgggcaagtgctgggcatttcccgggagccagggacacacactcattaagctggctaccaagatcattccaaccgcagtcaccatggaacacatatctgaaaaggtctcgccttcaggaaacatttcttcagctccaaaggaattttctgtatacgtccaaagatatatgtgcagattcgtgattcaggccgggataacgaagaagtgcgaaggggaagagatctttctgggacagttcatctacaacaaaactggaacgaccgttcaaacattcgagctacagcatgccgtctcagaatatctgctttgtgtgaaattgaatatcttttccaattggggccatcctaaatatacctgcctctaccggtttcgagtccacgggaccccaggaaaacatatctag

SEQ ID NO: 305837 - DNA, 810 bp, Artificial Sequence
  derived and/or modified sequence
atgcccaaggagcagctggagctgctgaagaaggagagccagaacctggagaacaacttccggcagatcctcttcctgattgagcagattgatgtgctgaaggccctgctgcgggacatgaaggatggcatggacaacaaccacaactggaacacccatggagaccctgtggaggaccctgaccacacagaggaggtgagcaacctggtgaactacgtgctgaagaagctgcgggaggaccaggtggagatggctgactatgccctgaagtctgctggggccagcatcattgaagctggcaccagcgagagctacaagaacaacaaggccaagctgtactggcatggaattggcttcctgaaccacgagatgcccccagacatcatcctgcagccagatgtgtacccaggcaagtgctgggccttccctggcagccagggccacaccctcatcaagctggccaccaagatcatccccacagctgtgaccatggagcacatcagcgagaaggtgagccccagcggcaacatcagcagcgcccccaaggagttctctgtgtatgtgcagcgctacatgtgccgctttgtgatccaggccggcatcaccaagaagtgtgagggggaggagatcttcctgggccagttcatctacaacaagacaggcaccaccgtgcagacctttgagctgcagcacgctgtgtctgagtacctgctgtgtgtgaagctgaacatcttcagcaactggggccaccccaagtacacctgcctgtaccgcttccgggtgcacggcaccccaggcaagcacatctag

SEQ ID NO: 305838 - DNA, 810 bp, Artificial Sequence
  derived and/or modified sequence
atgcccaaggagcagctggagctgctgaagaaggagagccagaacctcgaaaacaatttcagacaaatcctgtttttgatcgagcagatcgacgttcttaaagccctgctgagggatatgaaagacgggatggacaacaatcacaactggaatacccacggtgacccggtggaggatccagaccacactgaagaagtgtctaacctggttaattatgtgcttaaaaagctgcgggaagatcaggtggagatggctgactatgctcttaagagcgctggagcctcgattatcgaagccggaaccagcgaatcatacaaaaacaacaaagctaagctgtactggcacggcattggcttcttgaatcacgaaatgcctcccgacattattctccagccggatgtataccctggaaagtgttgggcttttcccgggagtcaaggccacactttgataaagctagcgacaaaaataatccccactgccgtcaccatggaacacatctctgaaaaagttagcccatcaggtaacattagctccgcccccaaagaattctcggtgtatgtgcagcgctacatgtgcaggtttgtgattcaggcagggattacgaaaaaatgtgagggcgaggaaatttttctaggccagtttatctataataagacgggcactacagttcaaacatttgaattgcaacacgcagtgtccgagtacctcctgtgtgtcaaacttaatatcttctccaattgggggcaccctaaatatacttgtttgtacaggttccgagtacacgggacacccggcaagcacatctag

SEQ ID NO: 305839 - DNA, 810 bp, Artificial Sequence
  derived and/or modified sequence
atgcccaaggagcagctggagctgctgaagaaggagagccagaacttggagaacaattttagacagattctttttcttatcgaacaaatcgacgtactgaaggccctcctcagggacatgaaagatggaatggacaataaccacaattggaacactcatggcgatcctgtcgaagaccccgaccatacagaggaagtttctaacttggttaactacgtccttaagaagctgcgagaagatcaggtcgaaatggccgattacgccctgaaatccgctggggcatccatcattgaagcaggaacttctgaaagttacaagaataacaaagccaaactgtactggcacggcatcggctttctcaaccacgaaatgcctcccgatataatccttcagcctgatgtttatcccggtaaatgctgggcctttccaggcagtcagggacacacactcatcaagctcgcaactaaaattatcccgacggccgttacaatggaacatatttctgaaaaagtttcccctagcggtaatatcagttcagcccccaaggagttttccgtttatgtgcaaaggtacatgtgtcgctttgttattcaagccgggatcacaaaaaagtgcgaaggtgaagagatcttcttgggtcagtttatctataataaaactggaaccacagtgcaaacttttgagctccagcatgcagtgtccgaatatctgctgtgcgtcaagcttaacatctttagcaattggggtcacccaaagtacacatgtttatatcggttcagggttcatgggacccccgggaaacacatttag

SEQ ID NO: 305840 - DNA, 810 bp, Artificial Sequence
  derived and/or modified sequence
atgccgaaggagcaattagaactgttaaaaaaagagtctcaaaacctcgagaacaatttcaggcagattctctttctcattgagcaaattgacgtgctcaaggctctgctgcgagacatgaaggatgggatggacaacaaccacaactggaatactcatggcgacccagtggaagatccagatcacactgaagaagtgtcgaatctcgtgaactacgtgctcaagaagctccgggaagaccaggtcgagatggccgactatgcactgaaaagtgctggcgctagcataatcgaagccggaacaagtgagtcgtacaagaacaataaagccaaactctactggcacggaatcggatttctgaatcacgaaatgccgcctgacataatcctgcagcccgatgtgtaccccggtaagtgttgggcttttccaggctcacagggccacacgcttataaaacttgccacaaaaattatccccaccgctgtgactatggaacacatcagcgagaaggttagtccttctggaaatatttcttctgcccctaaggaattctcagtctatgtccagcgctacatgtgcagattcgtcatccaggctggaatcacaaagaaatgcgagggcgaagagatttttctggggcagttcatctacaacaaaacaggtactacggttcaaaccttcgagctccaacacgctgtgtccgagtacctgctctgtgtcaagctgaatatcttctccaattgggggcatcccaagtacacgtgtctgtaccggttcagggtccacggcacacccggaaagcatatctag

SEQ ID NO: 305841 - DNA, 810 bp, Artificial Sequence
  derived and/or modified sequence
atgcccaaagaacaactagaactgctgaaaaaggaaagtcagaatcttgagaataattttcgccagatcctgttcctgatcgagcaaattgacgttctgaaggccttactccgcgatatgaaagatgggatggataacaatcacaattggaacacacacggagaccctgtggaggatcctgaccacaccgaggaagtgtctaatctggttaattacgtgcttaagaaactaagggaagaccaggtcgaaatggcagattatgcgctcaagtctgcaggcgcatccatcatcgaagcaggaacctctgaaagctacaaaaataataaggcaaaactctattggcacggcatcggcttcctgaaccatgagatgccccctgatatcattctccagcccgatgtctaccccggtaaatgttgggcttttccaggaagccaggggcataccctaatcaagttggccaccaaaataatccccaccgccgttacaatggagcacatttctgagaaggtttcaccctctggcaatattagctctgccccaaaggagtttagtgtatatgtgcagagatacatgtgccgttttgtgatccaggctgggatcaccaagaagtgtgaaggcgaggagatcttcctaggccagttcatctacaataagactggaacaacagtccagacatttgagcttcagcacgctgtctccgagtatttactgtgcgtcaagctcaacatcttttcaaattgggggcacccgaagtacacgtgcctctataggttcagagtccatggtacacccggtaaacatatctag

SEQ ID NO: 305842 - DNA, 810 bp, Artificial Sequence
  derived and/or modified sequence
atgcctaaagagcaactggaacttttaaagaaggaaagccagaatctggaaaacaattttcgtcaaattctatttttgatcgaacaaatagatgtcctgaaggcattgctaagagatatgaaggatggtatggacaataatcacaactggaacacccatggagaccctgtggaggacccggaccacacagaggaagtgtcaaacttggtcaattatgtacttaaaaagttgagagaagaccaagtcgagatggctgattatgccctgaagtcggccggagcctccatcattgaagctgggacctcagaaagttataaaaataataaagcaaaattgtactggcatgggataggtttcctaaatcatgaaatgcctccagatattattcttcagccggatgtctaccctggaaagtgctgggcttttccaggttcccagggtcataccctaatcaagcttgctacaaagatcataccaactgctgttaccatggagcacatctcagagaaggtgtctccgtcaggaaacatctccagtgcacccaaggaattttctgtctatgttcagaggtatatgtgcaggtttgttatacaggcgggcatcacaaaaaaatgtgaaggagaagaaattttcctaggtcagtttatatataacaaaacaggaaccaccgttcaaacatttgaactccagcatgcagtttctgaatatttattatgtgtgaaacttaatatctttagcaactggggacacccgaagtatacttgtttatatcgattcagggtccatggcacaccaggcaagcacatctag

SEQ ID NO: 305843 - protein, 294 aa, Artificial Sequence
  derived and/or modified sequence
MRAHAQRGRGCTRRSAAVLMARHGLPLLPLLSLLVGAWLKLGNGQATSMVQLQGGRFLMGTNSPDSRDGDGPVREATVKPFAIDIFPVTNKDFRYIRDFVREKKYRTEAEMFGWSFVFEDFVSDELRNKATQPMKSVLWWLPVEKAFWRQPAGPGSGIRERLEHPVLHVSWNDARAYCAWRGKRLPTEEEWEFAARGGLKGQVYPWGNWFQPNRTNLWQGKFPKGDKAEDGFHGVSPVNAFPAQNNYGLYDLLGNVWEWTASPYQAAEQDMRVLRGASWIDTADGSANHRARVT

SEQ ID NO: 305844 - DNA, 885 bp, Artificial Sequence
  derived and/or modified sequence
atgagagcccacgcccagagaggcagaggctgcaccagaagaagcgccgccgtgctgatggccagacacggcctgcccctgctgcccctgctgagcctgctggtgggcgcctggctgaagctgggcaacggccaggccaccagcatggtgcagctgcagggcggcagattcctgatgggcaccaacagccccgacagcagagacggcgacggccccgtgagagaggccaccgtgaagcccttcgccatcgacatcttccccgtgaccaacaaggacttcagatacatcagagacttcgtgagagagaagaagtacagaaccgaggccgagatgttcggctggagcttcgtgttcgaggacttcgtgagcgacgagctgagaaacaaggccacccagcccatgaagagcgtgctgtggtggctgcccgtggagaaggccttctggagacagcccgccggccccggcagcggcatcagagagagactggagcaccccgtgctgcacgtgagctggaacgacgccagagcctactgcgcctggagaggcaagagactgcccaccgaggaggagtgggagttcgccgccagaggcggcctgaagggccaggtgtacccctggggcaactggttccagcccaacagaaccaacctgtggcagggcaagttccccaagggcgacaaggccgaggacggcttccacggcgtgagccccgtgaacgccttccccgcccagaacaactacggcctgtacgacctgctgggcaacgtgtgggagtggaccgccagcccctaccaggccgccgagcaggacatgagagtgctgagaggcgccagctggatcgacaccgccgacggcagcgccaaccacagagccagagtgacctag

SEQ ID NO: 305845 - DNA, 885 bp, Artificial Sequence
  derived and/or modified sequence
atgagggcgcacgcacagaggggtagaggctgtactaggcgcagcgccgcagtgctgatggcgcgccacggcctgcctctgcttcccctgcttagtcttcttgtcggcgcctggctcaagcttggcaacggccaagctacctccatggttcagctgcagggagggagattcttgatgggaacgaatagtcccgactctcgggatggggacggacccgttagggaggcaaccgtgaagcctttcgcgattgatattttcccagtgaccaataaggactttagatatatccgggactttgtccgagaaaagaagtaccggacagaggcggaaatgttcggctggtccttcgtgttcgaagattttgtatctgacgaactccgcaacaaggccactcagcccatgaaaagtgtattatggtggctgcctgtggagaaagctttttggcggcagccagccggccctggcagcggcattcgagagcggttggagcatcccgtgctgcatgtgtcctggaacgacgccagagcatactgcgcttggaggggtaagcgcctacccactgaagaggagtgggagtttgctgccagggggggcctgaagggccaggtgtatccatggggaaattggttccagccaaataggaccaatctttggcagggaaaatttcctaaaggagacaaggcggaggacggattccatggagtaagtcccgtcaatgctttccctgctcaaaacaactacggcttgtacgacctattgggcaacgtttgggaatggaccgcctctccttatcaagccgcggagcaggacatgcgtgtcttgcgcggcgcaagttggatcgacactgccgatggctccgcgaaccaccgcgctcgcgtgacctag

SEQ ID NO: 305846 - DNA, 885 bp, Artificial Sequence
  derived and/or modified sequence
atgagggcccacgcccagaggggccggggctgcaccaggagatctgctgctgtgctgatggcccggcacggcctgcccctgctgcccctgctgagcctgctggtgggcgcctggctgaagctgggcaatggccaggccacctccatggtgcagctgcagggcggccgcttcctgatgggcaccaacagcccagacagcagagatggagatggccctgtgcgggaggccaccgtgaagccctttgccatcgacatcttccctgtgaccaacaaggacttccgctacatccgggactttgtgcgggagaagaagtacagaacagaagctgagatgtttggctggagctttgtgtttgaagattttgtgtctgatgagctgaggaacaaggccacccagcccatgaagtctgtgctgtggtggctgcctgtggagaaggccttctggaggcagcctgctggccctggcagcggcatccgggagcggctggagcaccctgtgctgcacgtgtcctggaatgatgcccgggcctactgtgcctggaggggcaagaggctgcccacagaggaggagtgggagtttgctgcccggggcggcctgaagggccaggtgtacccctggggcaactggttccagcccaacagaaccaacctgtggcagggcaagttccccaagggggacaaggcagaagatggcttccatggagtgtcccctgtgaatgccttccctgcccagaacaactacggcctgtatgacctgctgggcaatgtgtgggagtggacagccagcccctaccaggccgctgagcaggacatgagggtgctgcggggggcctcctggattgacacagcagatggcagcgccaaccaccgggcccgggtgacctag

SEQ ID NO: 305847 - DNA, 885 bp, Artificial Sequence
  derived and/or modified sequence
atgcgggcccacgcccagcggggccggggctgcacccggcggagcgccgccgtgctcatggcgcgacacgggctgccactgctccccctccttagcctcctggtgggcgcctggctaaagttgggaaacgggcaagccacgtctatggtccagttacaaggcggcaggttcctcatggggacaaacagccccgatagtagagacggtgacggccccgtgcgcgaggcaaccgtgaagcctttcgccattgatatcttcccggtgaccaacaaggactttaggtatatccgcgatttcgtacgggagaaaaagtatcggactgaggccgagatgtttggctggtcatttgtatttgaagatttcgtgagcgatgagctgaggaataaggccactcaaccaatgaaatccgtgttatggtggttacctgttgagaaggcattctggaggcagccggccggacctggttcaggtattcgggaaaggctggaacaccccgtgttacatgttagctggaatgatgcgcgggcatattgcgcttggaggggaaaacggctgccaacagaagaagagtgggagttcgccgctcggggggggttaaagggccaagtgtatccatggggtaactggtttcagcctaatcgcactaacctttggcaaggtaaattcccgaagggtgataaggctgaggacgggttccacggtgtcagcccagtgaacgcctttccggcacaaaacaactatgggttatacgatctgctggggaacgtgtgggaatggactgctagcccttatcaggctgcagagcaggacatgcgggtgctgcgcggagcgtcgtggattgatacagccgacggttctgccaaccaccgggctcgagtgacctag

SEQ ID NO: 305848 - DNA, 885 bp, Artificial Sequence
  derived and/or modified sequence
atgagggcccacgcccaacgaggcaggggatgtacacgccgttccgccgcagtcctgatggctcgccacgggctgccgcttctgcccctgctcagtctgctcgtcggggcttggctgaagctcggtaacggacaagccaccagcatggtgcaactgcagggcggtcgcttcctgatgggcacgaactctcctgacagtagagacggcgacggccctgtgcgtgaggctaccgtgaaaccattcgcaatcgatatcttccccgttaccaataaagacttccgttacattcgtgacttcgttcgcgaaaaaaaataccgaacagaagccgaaatgtttggctggtccttcgtctttgaagatttcgtgagcgatgaactgagaaacaaggcaacccaacccatgaaaagtgtcttatggtggctgcccgtagagaaggcattctggaggcagccagcgggaccgggttcgggcataagagaacgactggagcacccagtactgcacgtttcgtggaacgatgccagggcctactgcgcatggaggggcaagaggctccctaccgaggaagagtgggaattcgctgctcgtggtggactgaaaggtcaggtctatccctggggcaattggttccagcctaaccggactaacctgtggcagggtaagtttcccaaaggagataaggccgaagatgggttccacggcgtgtctcctgttaatgcgttcccagcccaaaacaactacggcctgtacgaccttttgggcaatgtgtgggaatggactgccagtccttatcaggctgctgagcaagacatgagagtcctgcgaggcgcttcctggatcgataccgcagatggcagcgctaaccaccgtgccagggtcacctag

SEQ ID NO: 305849 - DNA, 881 bp, Artificial Sequence
  derived and/or modified sequence
atgagggcgcatgcgcagcggggccgtgggtgtacgcggcgcagcgcggcagtcctgatggcccggcatgggttaccgctgctgcccctgctgtcgctcctggtcggcgcgtggctcaagctaggaaatggacaggctactagcatggtccaactgcagggtgggagattcctgatgggaacaaattctccagacagcagagatggtgacgggcctgtgcgggaggcgacagtgaaaccctttgccatcgacatatttcctgtcaccaacaaagatttcaggtacatcagggattttgtcagggagaaaaagtatcggacagaagctgagatgtttggatggagctttgtctttgaggactttgtctctgatgagctgagaaacaaagccacccagccaatgaagtctgtactctggtggcttccagtggaaaaggcattttggaggcagcctgcaggtcctggctctggcatccgagagagactggagcacccagtgttacacgtgagctggaatgacgcccgtgcctactgtgcttggcggggaaaacgactgcccacggaggaagagtgggagtttgccgcccgagggggcttgaagggtcaagtttacccatgggggaactggttccagccaaaccgcaccaacctgtggcagggaaagttccccaagggagacaaagctgaggatggcttccatggagtctccccagtgaatgctttccccgcccagaacaactacgggctctatgacctcctggggaacgtgtgggagtggacagcatcaccgtaccaggctgctgagcaggacatgcgcgtcctccggggggcatcctggatcgacacagctgatggctctgccaatcaccgggcccgggtcac

SEQ ID NO: 305850 - protein, 68 aa, Artificial Sequence
  derived and/or modified sequence
MVPGTPSPLLGRGKELWLESLACLPGAVKRDCTITGWSEPFPPYPVACPVPLELLAEEGCPCSSLARG

SEQ ID NO: 305851 - protein, 145 aa, Artificial Sequence
  derived and/or modified sequence
MVPGTPSPLLGRGKELWLESLACLPGAVKRDCTITGWSEPFPPYPVACPVPLELLAEEESYFSTVKIIYTVGHSISIVALFVAITILVALRRLHCPRNYVHTQLFTTFILKAGAVFLKDAALFHSDDTDHCSFSTGCPCSSLARG

SEQ ID NO: 305852 - protein, 359 aa, Artificial Sequence
  derived and/or modified sequence
MVPGTPSPLLGRGKELWLESLACLPGAVKRDCTITGWSEPFPPYPVACPVPLELLAEEESYFSTVKIIYTVGHSISIVALFVAITILVALRRLHCPRNYVHTQLFTTFILKAGAVFLKDAALFHSDDTDHCSFSTVLCKVSVAASHFATMTNFSWLLAEAVYLNCLLASTSPSSRRAFWWLVLAGWGLPVLFTGTWVSCKLAFEDIACWDLDDTSPYWWIIKGPIVLSVGVNFGLFLNIIRILVRKLEPAQGSLHTQSQYWRLSKSTLFLIPLFGIHYIIFNFLPDNAGLGIRLPLELGLGSFQGFIVAILYCFLNQEVRTEISRKWHGHDPELLPAWRTRAKWTTPSRSAAKVLTSMC

SEQ ID NO: 305853 - DNA, 207 bp, Artificial Sequence
  derived and/or modified sequence
atggtccccggcacgccttcccccctgttggggcgaggcaaagagctgtggctggaatccctggcttgccttcctggcgcagttaagagggattgcactatcacaggttggtctgaaccctttcctccttaccccgtcgcatgtccagtgccccttgaattgctggctgaagagggctgcccgtgctcgtcattagccaggggatag

SEQ ID NO: 305854 - DNA, 438 bp, Artificial Sequence
  derived and/or modified sequence
atggttccaggaacgccctcccccctgctaggccgcggcaaggagctttggcttgagagtctggcatgtctgcctggtgctgttaagcgggattgcacaatcacaggatggagtgagccgttccctccctatcctgtggcatgcccagtccccctggaacttctagccgaggaagaaagttatttcagcaccgtgaagatcatatatacagtgggacattcaatctccatcgtggcactctttgtggccatcaccatcttggttgccctgaggcgcctacactgtccgcgcaattacgtccatactcaattattcacaacctttatccttaaagccggagctgtgtttctcaaggacgcggctttattccattctgacgacacggaccactgttctttcagtaccggttgcccctgctcctcccttgctcgaggctag

SEQ ID NO: 305855 - DNA, 1080 bp, Artificial Sequence
  derived and/or modified sequence
atggtccctggcacaccctcccccctgctggggcgaggaaaagaattgtggctggaatcacttgcctgcctccccggggcggtcaagcgggactgcaccatcaccggttggtctgagccattccccccgtaccccgtcgcatgcccagttccattggaacttctggcagaggaggaatcttatttctctacggttaagataatatacaccgtggggcatagcatatcaatagttgcactattcgtggcaatcacaatcttagtggcactcaggcggctccactgccctcggaattacgtacatacccaattattcaccaccttcatccttaaagccggtgccgtgtttctgaaagacgcagccctgtttcatagcgacgatacagaccactgctccttttccactgtactgtgcaaagtaagtgtcgccgcctcacacttcgctacgatgactaatttcagttggctcctagctgaagctgtgtacttaaactgtctgctggcatctacttctcctagctctaggagagccttctggtggctggtgctcgccgggtggggccttcctgttctgtttaccggaacgtgggtttcctgcaaacttgcctttgaggatattgcatgctgggacttggacgataccagcccatactggtggattatcaagggccccattgttttaagcgtcggcgttaatttcgggttattccttaacattattcgcattctcgtaagaaagctagagcccgctcaggggtcccttcacactcagtcacaatattggcggctgtctaagagcacactcttcctgatccccttgtttgggattcattatatcatcttcaatttcttgcccgacaacgctggcctcggtatccggttgcccctggaactgggcctcggaagctttcaaggctttatcgtcgctattctctactgtttccttaaccaggaagtgagaacagagattagtaggaaatggcatggtcacgatccagagttgctccctgcatggaggactcgagcaaagtggaccaccccatctaggagcgccgctaaggtactcacaagtatgtgttag

SEQ ID NO: 305856 - DNA, 1228 bp, Artificial Sequence
  derived and/or modified sequence
tcacttccctggcctaggtgctgggacagtgagggcctcttttctccctactgcccttaggatgctggcagcccagctcaccactcctcacccctcaggggaataatcctctttgtgaagagatggcacctttgaagccagagaaggaaggccccatagtgtgtccctgggcaggctagacctgggccccaggcctctggagccaccctctctgttgctcagaggagctgtccatgcaaaccctgccagggtcacttgatggtccctggcacccccagccccctcctggggagagggaaggagttgtggctagagagtcttgcttgcctcccaggggctgtgaaacgggattgtactatcactggctggtctgagccctttccaccttaccctgtggcctgccctgtgcctctggagctgctggctgaggagggctgcccgtgctcttcactggcacgtgggtgagctgcaaactggccttcgaggacatcgcgtgctgggacctggacgacacctccccctactggtggatcatcaaagggcccattgtcctctcggtcggggtgaactttgggctttttctcaatattatccgcatcctggtgaggaaactggagccagctcagggcagcctccatacccagtctcagtattggcgtctctccaagtcgacacttttcctgatcccactctttggaattcactacatcatcttcaacttcctgccagacaatgctggcctgggcatccgcctccccctggagctgggactgggttccttccagggcttcattgttgccatcctctactgcttcctcaaccaagaggtgaggactgagatctcacggaagtggcatggccatgaccctgagcttctgccagcctggaggacccgtgctaagtggaccacgccttcccgctcggcggcaaaggtgctgacatctatgtgctaggctgcctcatcacgccactggagtccacacttgaatttgggcagctaccacgggtctgccatgctctggaggagcaagggggccacatccccaccccagctgttacccagcccggggcaggtgcagcccttcctccctgtctctgcatctgactctcttttgaggtccctgtatgtctacctctgacttctgtggtccctctgtgtctgctctcatccattcctcttactggggcctggggctctagcccaaggctcagaggagccaataaacct

SEQ ID NO: 305857 - DNA, 1459 bp, Artificial Sequence
  derived and/or modified sequence
tcacttccctggcctaggtgctgggacagtgagggcctcttttctccctactgcccttaggatgctggcagcccagctcaccactcctcacccctcaggggaataatcctctttgtgaagagatggcacctttgaagccagagaaggaaggccccatagtgtgtccctgggcaggctagacctgggccccaggcctctggagccaccctctctgttgctcagaggagctgtccatgcaaaccctgccagggtcacttgatggtccctggcacccccagccccctcctggggagagggaaggagttgtggctagagagtcttgcttgcctcccaggggctgtgaaacgggattgtactatcactggctggtctgagccctttccaccttaccctgtggcctgccctgtgcctctggagctgctggctgaggaggaatcttacttctccacagtgaagattatctacaccgtgggccatagcatctctattgtagccctcttcgtggccatcaccatcctggttgctctcaggaggctccactgcccccggaactacgtccacacccagctgttcaccacttttatcctcaaggcgggagctgtgttcctgaaggatgctgcccttttccacagcgacgacactgaccactgcagcttctccactggctgcccgtgctcttcactggcacgtgggtgagctgcaaactggccttcgaggacatcgcgtgctgggacctggacgacacctccccctactggtggatcatcaaagggcccattgtcctctcggtcggggtgaactttgggctttttctcaatattatccgcatcctggtgaggaaactggagccagctcagggcagcctccatacccagtctcagtattggcgtctctccaagtcgacacttttcctgatcccactctttggaattcactacatcatcttcaacttcctgccagacaatgctggcctgggcatccgcctccccctggagctgggactgggttccttccagggcttcattgttgccatcctctactgcttcctcaaccaagaggtgaggactgagatctcacggaagtggcatggccatgaccctgagcttctgccagcctggaggacccgtgctaagtggaccacgccttcccgctcggcggcaaaggtgctgacatctatgtgctaggctgcctcatcacgccactggagtccacacttgaatttgggcagctaccacgggtctgccatgctctggaggagcaagggggccacatccccaccccagctgttacccagcccggggcaggtgcagcccttcctccctgtctctgcatctgactctcttttgaggtccctgtatgtctacctctgacttctgtggtccctctgtgtctgctctcatccattcctcttactggggcctggggctctagcccaaggctcagaggagccaataaacct

SEQ ID NO: 305858 - DNA, 1292 bp, Artificial Sequence
  derived and/or modified sequence
tcacttccctggcctaggtgctgggacagtgagggcctcttttctccctactgcccttaggatgctggcagcccagctcaccactcctcacccctcaggggaataatcctctttgtgaagagatggcacctttgaagccagagaaggaaggccccatagggctgtgaaacgggattgtactatcactggctggtctgagccctttccaccttaccctgtggcctgccctgtgcctctggagctgctggctgaggaggaatcttacttctccacagtgaagattatctacaccgtgggccatagcatctctattgtagccctcttcgtggccatcaccatcctggttgctctcaggaggctccactgcccccggaactacgtccacacccagctgttcaccacttttatcctcaaggcgggagctgtgttcctgaaggatgctgcccttttccacagcgacgacactgaccactgcagcttctccactggctgcccgtgctcttcactggcacgtgggtgagctgcaaactggccttcgaggacatcgcgtgctgggacctggacgacacctccccctactggtggatcatcaaagggcccattgtcctctcggtcggggtgaactttgggctttttctcaatattatccgcatcctggtgaggaaactggagccagctcagggcagcctccatacccagtctcagtattggcgtctctccaagtcgacacttttcctgatcccactctttggaattcactacatcatcttcaacttcctgccagacaatgctggcctgggcatccgcctccccctggagctgggactgggttccttccagggcttcattgttgccatcctctactgcttcctcaaccaagaggtgaggactgagatctcacggaagtggcatggccatgaccctgagcttctgccagcctggaggacccgtgctaagtggaccacgccttcccgctcggcggcaaaggtgctgacatctatgtgctaggctgcctcatcacgccactggagtccacacttgaatttgggcagctaccacgggtctgccatgctctggaggagcaagggggccacatccccaccccagctgttacccagcccggggcaggtgcagcccttcctccctgtctctgcatctgactctcttttgaggtccctgtatgtctacctctgacttctgtggtccctctgtgtctgctctcatccattcctcttactggggcctggggctctagcccaaggctcagaggagccaataaacctgtaaatgaa

SEQ ID NO: 305859 - DNA, 1613 bp, Artificial Sequence
  derived and/or modified sequence
tcacttccctggcctaggtgctgggacagtgagggcctcttttctccctactgcccttaggatgctggcagcccagctcaccactcctcacccctcaggggaataatcctctttgtgaagagatggcacctttgaagccagagaaggaaggccccatagtgtgtccctgggcaggctagacctgggccccaggcctctggagccaccctctctgttgctcagaggagctgtccatgcaaaccctgccagggtcacttgatggtccctggcacccccagccccctcctggggagagggaaggagttgtggctagagagtcttgcttgcctcccaggggctgtgaaacgggattgtactatcactggctggtctgagccctttccaccttaccctgtggcctgccctgtgcctctggagctgctggctgaggaggaatcttacttctccacagtgaagattatctacaccgtgggccatagcatctctattgtagccctcttcgtggccatcaccatcctggttgctctcaggaggctccactgcccccggaactacgtccacacccagctgttcaccacttttatcctcaaggcgggagctgtgttcctgaaggatgctgcccttttccacagcgacgacactgaccactgcagcttctccactgttctatgcaaggtctctgtggccgcctcccatttcgccaccatgaccaacttcagctggctgttggcagaagccgtctacctgaactgcctcctggcctccacctcccccagctcaaggagagccttctggtggctggttctcgctggctgggggctgcccgtgctcttcactggcacgtgggtgagctgcaaactggccttcgaggacatcgcgtgctgggacctggacgacacctccccctactggtggatcatcaaagggcccattgtcctctcggtcggggtgaactttgggctttttctcaatattatccgcatcctggtgaggaaactggagccagctcagggcagcctccatacccagtctcagtattggcgtctctccaagtcgacacttttcctgatcccactctttggaattcactacatcatcttcaacttcctgccagacaatgctggcctgggcatccgcctccccctggagctgggactgggttccttccagggcttcattgttgccatcctctactgcttcctcaaccaagaggtgaggactgagatctcacggaagtggcatggccatgaccctgagcttctgccagcctggaggacccgtgctaagtggaccacgccttcccgctcggcggcaaaggtgctgacatctatgtgctaggctgcctcatcacgccactggagtccacacttgaatttgggcagctaccacgggtctgccatgctctggaggagcaagggggccacatccccaccccagctgttacccagcccggggcaggtgcagcccttcctccctgtctctgcatctgactctcttttgaggtccctgtatgtctacctctgacttctgtggtccctctgtgtctgctctcatccattcctcttactggggcctggggctctagcccaaggctcagaggagccaataaacct

SEQ ID NO: 305860 - DNA, 207 bp, Artificial Sequence
  derived and/or modified sequence
atggtgcccggcacccccagccccctgctgggccggggcaaggagctgtggctggagagcctggcctgcctgcctggagctgtgaagagggactgcaccatcaccggctggagcgagcccttccccccctaccctgtggcctgccctgtgcccctggagctgctggccgaggagggctgcccctgcagcagcctggcccggggctag

SEQ ID NO: 305861 - DNA, 438 bp, Artificial Sequence
  derived and/or modified sequence
atggtgcccggcacccccagccccctgctgggccggggcaaggagctgtggctggagagcctggcctgcctgcctggagctgtgaagagggactgcaccatcaccggctggagcgagcccttccccccctaccctgtggcctgccctgtgcccctggagctgctggccgaggaggagagctacttcagcacagtgaagatcatctacacagtgggccacagcatcagcatcgtggccctgtttgtggccatcaccatcctggtggccctgcggcggctgcactgccccagaaattatgtgcacacccagctgttcaccaccttcatcctgaaggccggggctgtgttcctgaaggatgctgccctcttccacagtgatgacacagaccactgcagcttcagcacaggctgcccctgcagcagcctggcccggggctag

SEQ ID NO: 305862 - DNA, 456 bp, Artificial Sequence
  derived and/or modified sequence
atgctgcccttcagcacagccaccaccctgaccacagctgccagccccctggccgcccgggccctgcactggcacgtgggggagctgcagacaggcctgcggggccaccgggtgctgggccctggccgccacctgcccctgctggtggaccaccagagggcccactgccccctgggccgcggggagctgtgggccttcagccagtactacccccaccctggagaggagactggagccagcagcggccagcccccctaccctgtgtctgtgctggccagcctgcaggtggacaccttcccagaccccaccctgtggaacagcctgcaccacctgcagctgcctgcccggcagtgctggccaggccaccccccacctcctggggccggcaccggcttcctgcccggcctgcactgctgccaccccctgctgctgccccagcccagaggagaggactag

SEQ ID NO: 305863 - DNA, 1080 bp, Artificial Sequence
  derived and/or modified sequence
atggtgcccggcacccccagccccctgctgggccggggcaaggagctgtggctggagagcctggcctgcctgcctggagctgtgaagagggactgcaccatcaccggctggagcgagcccttccccccctaccctgtggcctgccctgtgcccctggagctgctggccgaggaggagagctacttcagcacagtgaagatcatctacacagtgggccacagcatcagcatcgtggccctgtttgtggccatcaccatcctggtggccctgcggcggctgcactgccccagaaattatgtgcacacccagctgttcaccaccttcatcctgaaggccggggctgtgttcctgaaggatgctgccctcttccacagtgatgacacagaccactgcagcttcagcacagtgctgtgcaaggtgtctgtggccgccagccactttgccaccatgaccaacttctcctggctgctggccgaggccgtgtacctgaactgcctgctggccagcaccagccccagcagcagaagagccttctggtggctggtgctggccggctggggcctgcctgtgctcttcaccggcacctgggtgtcctgcaagctggcctttgaggacatcgcctgctgggacctggatgacaccagcccctactggtggatcatcaagggccccatcgtgctgtctgtgggcgtgaactttggcctcttcctgaacatcatccgcatcctggtgaggaagctggagcccgcccagggcagcctgcacacccagagccagtactggaggctgagcaagagcaccctcttcctgatccccctgtttggcatccactacatcatcttcaacttcctgcctgacaatgccggcctgggcatccggctgcccctggagctgggcctgggcagcttccagggcttcatcgtggccatcctgtactgcttcctgaaccaggaggtgaggacagagatcagcaggaagtggcacggccatgaccctgagctgctgcctgcctggaggacccgggccaagtggaccacccccagccgctctgctgccaaggtgctgacctccatgtgctag

SEQ ID NO: 305864 - DNA, 207 bp, Artificial Sequence
  derived and/or modified sequence
atggtgcccggcacccccagccccctgctgggccggggcaaggagctctggctggagtccctggcgtgtctacctggcgcagtgaaacgggattgtaccattaccgggtggtccgagcccttcccgccttatcccgtcgcttgccctgtgccgctggagctcctcgccgaggaggggtgtccgtgttcctctttggcaagaggatag

SEQ ID NO: 305865 - DNA, 438 bp, Artificial Sequence
  derived and/or modified sequence
atggtgcccggcacccccagccccctgctgggccggggcaaggagctgtggctggagtcccttgcctgtttgccaggtgcggttaaaagggactgcaccatcacaggctggtccgagccctttcccccctatcctgtagcctgcccagtccctttggaactgctggccgaggaggaatcatacttttccaccgtgaaaatcatttacacagttggccacagcatttccattgtcgcgctgtttgtagctatcaccattctagtcgccctgaggcgtctccactgcccaagaaattacgtgcacacacagctgtttacaactttcatcctgaaagcgggggcagttttcctaaaggatgcagccctttttcacagcgacgatacagaccactgttccttctcaacaggatgcccttgcagttccctggcaaggggctag

SEQ ID NO: 305866 - DNA, 456 bp, Artificial Sequence
  derived and/or modified sequence
atgctgcccttcagcaccgccaccaccctgaccaccgccgccagcccacttgcagcacgggctttgcactggcacgtgggcgaactccagaccgggttacggggacatagagtgttgggacccgggcgacatttgcctctgctagtagaccaccaacgagcccattgtcctttagggcgcggagaattatgggccttcagtcagtattacccccaccctggcgaggagacaggagcttcttccgggcagcctccgtaccctgtcagtgttctggccagtttgcaggtcgatacattccctgatccaacattgtggaattctcttcaccatctccagttgcccgcgagacaatgctggcctggccatcccccccctccgggcgccgggacaggatttcttcctggcctccattgttgccatcccttgttgctacctcagcctaggggcgaggattag

SEQ ID NO: 305867 - DNA, 1080 bp, Artificial Sequence
  derived and/or modified sequence
atggtgcccggcacccccagccccctgctgggccggggcaaggagctgtggctggaatcgctggcctgcttacccggtgcagtgaaaagagattgcactattactggttggtctgagcctttcccgccctaccctgtggcatgccccgtgcccctcgagctccttgctgaggaggaatcctacttctccacagtgaaaatcatttatactgtcggccactctatcagcatcgtcgctctgttcgtcgccattacaatcctcgttgccctaagacgcctgcactgtcccaggaattatgttcacacccagctatttactacgttcatcctcaaagctggcgccgtgtttctaaaggacgctgccctcttccatagcgacgacactgatcattgcagcttttcgacggtgctgtgcaaggtgtccgttgcagcttctcattttgctacgatgaccaacttctcctggttgctggcagaggcagtatatcttaactgtctgcttgcctcaacttctcccagctcccgaagggccttctggtggcttgtactcgctgggtgggggttaccagttctatttacaggtacttgggtgtcatgtaagctggccttcgaggatattgcttgctgggacctggatgacacttcaccatattggtggattatcaagggacctatcgtattgtctgtcggcgtgaactttggtttatttttgaatatcattcgaattctggttcgaaagcttgagcccgctcagggctctctgcacacccagtctcagtactggcgactgagcaaatccaccctgttcctgatcccccttttcggaattcattacataatctttaacttcctccctgacaatgctggcttgggtatcaggctgccgcttgaattgggacttgggtcctttcagggcttcatcgtggcaatcctttattgtttcctcaatcaggaggtgaggacagagatctctcgcaagtggcacggccacgatccagagctcctgcccgcctggaggacacgcgccaagtggaccactccaagccggtcagctgccaaggttctcacgagtatgtgttag

SEQ ID NO: 305868 - DNA, 207 bp, Artificial Sequence
  derived and/or modified sequence
atggtcccaggcaccccaagtccattgctcggccgtggcaaagaattatggctcgagtccctggcatgcctacccggagctgtgaaaagagattgtaccatcacaggctggtcagagccattccccccatacccagtggcatgtcctgtgccactggagctcctcgcagaagaggggtgcccatgttcatctctggcaagaggctag

SEQ ID NO: 305869 - DNA, 438 bp, Artificial Sequence
  derived and/or modified sequence
atggtcccaggcaccccatctcccctgcttggtagaggtaaagagctctggctggagtccctagcctgcctgcctggtgccgttaaacgcgattgcacaattactggctggtctgagcccttccccccatatccggttgcatgtcccgtgccgctcgagctcctagctgaagaagagagttactttagcacagttaaaatcatctacacggtgggacactccatttctattgtggcccttttcgtcgctatcacaattctggtagccctacgcaggctgcattgtccacgaaattacgtgcacacccagttatttacaaccttcattctgaaggccggtgccgtttttctcaaagatgctgccctttttcacagtgacgacacagaccactgcagcttctccacagggtgtccctgttcaagcttggcacggggatag

SEQ ID NO: 305870 - DNA, 456 bp, Artificial Sequence
  derived and/or modified sequence
atgctgcccttcagcaccgctaccaccttaactacagcggcttcccctctggccgcacgagctctgcactggcatgtcggtgagctacagaccggcctgcgaggtcatagggtattagggccaggtcgtcacctcccattacttgtcgatcaccagagagctcactgtcctctaggacgcggtgagctctgggctttctcgcagtattacccacaccctggagaagagacaggtgcttcttctggccagccgccataccccgtcagcgtactggccagtttacaggtcgacaccttccctgatcctaccctgtggaactcactgcaccacttgcaactcccagcccgtcagtgctggcctggtcacccccctcctccaggtgctggaacaggcttcctgccgggtcttcactgctgccaccctctactgctgccccagccgcgtggcgaggattag

SEQ ID NO: 305871 - DNA, 1080 bp, Artificial Sequence
  derived and/or modified sequence
atggtgcccggtaccccgtctcctctcctcggtaggggtaaagaactttggctggaaagcctggcgtgcttgcccggagccgtgaaacgggattgtacaatcaccggctggagtgaaccttttccgccatatcccgtggcttgtccagttccattagagcttctggccgaagaggagtcgtacttctccacagttaagatcatctacaccgtaggccatagcatttccattgtcgcgctctttgtcgcgattaccatcttggtcgcactgagaagactgcactgccccagaaactatgtacacacacagctgttcaccacctttattctcaaggctggtgctgtgttcctgaaggacgcagccctgttccatagcgacgacaccgatcactgttcattctctaccgtcctatgtaaggtgagtgtggcagcatcccacttcgccacaatgacaaatttcagctggctgttggccgaagctgtgtacctcaattgcctcctcgcgagcacgagtccgtccagtagacgcgctttctggtggcttgtcctggctggttggggactgcccgtgctttttactggtacctgggtgagttgcaagctcgctttcgaggatattgcatgctgggacctcgacgatacatcaccttattggtggataataaaggggccaattgtgctgtccgttggagtcaattttggtctttttttgaacatcattagaatattagttagaaagctggagccagcccaggggtcactgcatacccagtcgcaatattggagattaagcaaatccaccctgtttttgattcctctctttggtatacattatataatctttaactttctgcctgataatgccggattggggatcagactgcctctggagttagggctcggcagttttcaggggtttatagtggcaattctatactgcttcctgaatcaagaagtgagaactgagatcagtcgcaagtggcacgggcacgatccagaactgctacctgcgtggcgcacaagggcaaaatggacgacaccttcaaggtctgccgcaaaggtcctgacaagtatgtgctag

SEQ ID NO: 305872 - DNA, 207 bp, Artificial Sequence
  derived and/or modified sequence
atggtgcccggcacccccagccccctgctgggcagaggcaaggagctgtggctggagagcctggcctgcctgcccggcgccgtgaagagagactgcaccatcaccggctggagcgagcccttccccccctaccccgtggcctgccccgtgcccctggagctgctggccgaggagggctgcccctgcagcagcctggccagaggctag

SEQ ID NO: 305873 - DNA, 438 bp, Artificial Sequence
  derived and/or modified sequence
atggtgcccggcacccccagccccctgctgggcagaggcaaggagctgtggctggagagcctggcctgcctgcccggcgccgtgaagagagactgcaccatcaccggctggagcgagcccttccccccctaccccgtggcctgccccgtgcccctggagctgctggccgaggaggagagctacttcagcaccgtgaagatcatctacaccgtgggccacagcatcagcatcgtggccctgttcgtggccatcaccatcctggtggccctgagaagactgcactgccccagaaactacgtgcacacccagctgttcaccaccttcatcctgaaggccggcgccgtgttcctgaaggacgccgccctgttccacagcgacgacaccgaccactgcagcttcagcaccggctgcccctgcagcagcctggccagaggctag

SEQ ID NO: 305874 - DNA, 456 bp, Artificial Sequence
  derived and/or modified sequence
atgctgcccttcagcaccgccaccaccctgaccaccgccgccagccccctggccgccagagccctgcactggcacgtgggcgagctgcagaccggcctgagaggccacagagtgctgggccccggcagacacctgcccctgctggtggaccaccagagagcccactgccccctgggcagaggcgagctgtgggccttcagccagtactacccccaccccggcgaggagaccggcgccagcagcggccagcccccctaccccgtgagcgtgctggccagcctgcaggtggacaccttccccgaccccaccctgtggaacagcctgcaccacctgcagctgcccgccagacagtgctggcccggccacccccccccccccggcgccggcaccggcttcctgcccggcctgcactgctgccaccccctgctgctgccccagcccagaggcgaggactag

SEQ ID NO: 305875 - DNA, 1080 bp, Artificial Sequence
  derived and/or modified sequence
atggtgcccggcacccccagccccctgctgggcagaggcaaggagctgtggctggagagcctggcctgcctgcccggcgccgtgaagagagactgcaccatcaccggctggagcgagcccttccccccctaccccgtggcctgccccgtgcccctggagctgctggccgaggaggagagctacttcagcaccgtgaagatcatctacaccgtgggccacagcatcagcatcgtggccctgttcgtggccatcaccatcctggtggccctgagaagactgcactgccccagaaactacgtgcacacccagctgttcaccaccttcatcctgaaggccggcgccgtgttcctgaaggacgccgccctgttccacagcgacgacaccgaccactgcagcttcagcaccgtgctgtgcaaggtgagcgtggccgccagccacttcgccaccatgaccaacttcagctggctgctggccgaggccgtgtacctgaactgcctgctggccagcaccagccccagcagcagaagagccttctggtggctggtgctggccggctggggcctgcccgtgctgttcaccggcacctgggtgagctgcaagctggccttcgaggacatcgcctgctgggacctggacgacaccagcccctactggtggatcatcaagggccccatcgtgctgagcgtgggcgtgaacttcggcctgttcctgaacatcatcagaatcctggtgagaaagctggagcccgcccagggcagcctgcacacccagagccagtactggagactgagcaagagcaccctgttcctgatccccctgttcggcatccactacatcatcttcaacttcctgcccgacaacgccggcctgggcatcagactgcccctggagctgggcctgggcagcttccagggcttcatcgtggccatcctgtactgcttcctgaaccaggaggtgagaaccgagatcagcagaaagtggcacggccacgaccccgagctgctgcccgcctggagaaccagagccaagtggaccacccccagcagaagcgccgccaaggtgctgaccagcatgtgctag

SEQ ID NO: 305876 - DNA, 1717 bp, Artificial Sequence
  derived and/or modified sequence
attttctaatttaagtgaaaccactagtgtcagcagacaaacgtgtgagctgaacttgacatccttttcttcaactgctcccttctcaaatattttcaaactagaggagcctttctaaggaaccttgggtaatgtggaacatgggaaccaatgtcagatgaaattgatgtatgaacataatcttcagagaacagcctgcaatatgacctatggatcatttggtggtgtaaaaggtcgagatttaatttgcatccagtctatggatgggatgctgatggtatttgagcaggagagctatgcttttggaagatttctccctggctttcttctgcctggtcctcttgcctacagttcccgtacagattccttccttactgtctcttcctgccaacaagtggaaagttataagtaccaggtacttgcttttgcaacagatgcagataaaaggcaggagactgaacagcaaaaacttggttctggaaaaagactagttgtggattggactctaaatattggagagcaagcccttgacatatgtattgtctctttcaatcagtcggcatcctctgtttttgttcttggtgagagaaactttttttgccttaaggataatggacaaattcgattcatgaagaagcttgattggagcccaagttgttttctgccatattgctcagtttctgaaggaacaataaatactttgattggaaatcataataacatgctgcatatttatcaagatgtgacactgaagtgggccacccaacttccccacattcctgtagcagtaagagtgggctgtttgcatgatttaaagggagtgatagtcactctgagtgatgatggtcacttgcagtgttcatacctggggacagatccttctctgttccaagctccaaacgttcaatctcgagaactaaactatgatgaacttgatgtagaaatgaaagaacttcagaaaatcatcaaagatgttaacaaatcacaaggtgtttggcccatgactgagagagaagatgacttgaacgtttctgtcgtggtttctcctaactttgattcagtttctcaagcgaccgatgttgaggtgggaactgaccttgtcccttctgtcacggtgaaggtcacactgcagaacagagtgatattgcaaaaagccaaattatcagtctacgtgcaaccaccattagaattgacttgtgatcagttcacctttgaatttatgacaccagatttgactagaacagtaagcttttctgtttatctgaaaagaagtatacaccatcagaattggaaggaaatgctgttgtttcttattccagaccaacagatcgaaatcctgatggcattccgcgagttatccaatgtaaatttagacttcccctaaagttaatttgcctaccaggtcagccttcaaaaactgcaagccacaaaattactattgataccaacaaatctccagtcagtcttcttagtctcttcccaggttttgccagtcagtcagatgatgatcaggtgaatgtaatgggttttcacttcttaggaggtgctcgaattactgttcttgcttccaaaacttctcaacgatatcgcattcagagtgaacaatttgaagatctttggctcataaccaatgagcttattcttcgccttcaagaatattttgaaaaacagggagtcaaagattttgcatgttctttttcgggatctataccccttc

SEQ ID NO: 305877 - protein, 408 aa, Artificial Sequence
  derived and/or modified sequence
MKLMYEHNLQRTACNMTYGSFGGVKGRDLICIQSMDGMLMVFEQESYAFGRFLPGFLLPGPLAYSSRTDSFLTVSSCQQVESYKYQVLAFATDADKRQETEQQKLGSGKRLVVDWTLNIGEQALDICIVSFNQSASSVFVLGERNFFCLKDNGQIRFMKKLDWSPSCFLPYCSVSEGTINTLIGNHNNMLHIYQDVTLKWATQLPHIPVAVRVGCLHDLKGVIVTLSDDGHLQCSYLGTDPSLFQAPNVQSRELNYDELDVEMKELQKIIKDVNKSQGVWPMTEREDDLNVSVVVSPNFDSVSQATDVEVGTDLVPSVTVKVTLQNRVILQKAKLSVYVQPPLELTCDQFTFEFMTPDLTRTVSFSVYLKRSIHHQNWKEMLLFLIPDQQIEILMAFRELSNVNLDFP

SEQ ID NO: 305878 - DNA, 1365 bp, Artificial Sequence
  derived and/or modified sequence
taggatctcgttccttccgttaccgttaaagtgaccctgcagaaccgcgtaattctgcagaaagctaaattaagcgtttacgtgcagccaccactggagctaacctgtgaccagttcactttcgaattcatgactccggatcttactagaaccgtttctttctcagtctaccttaagcggtcatacacacccagtgagcttgaaggaaatgctgtggtctcctattctcgacctactgatcgcaaccctgatggtatcccacgcgttattcaatgtaaatttcggcttccactcaagcttatctgcctcccggggcaaccatccaagacagcgtcacacaagatcaccatcgataccaataaatctcccgtgtccctgctgtcactgtttcctggcttcgcgtctcagtccgacgatgatcaggtaaacgtgatgggctttcactttctgggaggcgcaagaataactgtactggcctcgaaaacctcccagcggtatcgcatacaaagtgaacagttcgaagacctctggctcatcaccaatgagctgatcctcagactgcaggagtacttcgagaagcagggagtgaaggatttcgcatgctcttttagcggaagtatccccttacaagagtactttgagcttattgaccatcatttcgaacttcgaatcaacggggagaagctcgaggaactgctgtcggaacgggccgtgcagtttcgggccattcagcggcgcctgctggctcgctttaaggacaaaacgcccgccccgctgcaacacttagatactctgctggatggcacttataagcaggtgatagccctggctgatgccgtggaagagaatcagggaaatctgttccagtcttttactcgtttaaagtccgcaactcatctggttatattactgatcgctttgtggcagaaactctccgcagatcaagtcgcgattctggaggcggctttcctgccgctccaggaagacacgcaagaattgggatgggaggagacagtggatgccgctatttcccacctactgaagacatgcctaagcaaatcgagcaaagagcaggcattgaatctgaattcacagctcaacatccccaaggatacctctcagctcaaaaagcatatcactttgctctgcgaccgtttgtcaaaggggggtagattgtgtctgtccacggatgcagccgcccctcaaactatggtaatgccaggtggttgtactacaatacccgagtcagatttggaagaacgctctgttgaacaggactctactgagctcttcaccaatcatagacaccttaccgctgagacaccgcgccctggaaagaggcttgatggtctccacaaaagatag

SEQ ID NO: 305879 - DNA, 1365 bp, Artificial Sequence
  derived and/or modified sequence
tgagacctggtgcccagcgtgacagtgaaggtgaccctgcagaacagagtcatcctgcagaaggccaagctgtctgtgtatgtgcagccccccctggagctgacctgtgaccagttcacctttgagttcatgaccccagacctgaccaggacagtgtccttctctgtgtacctgaagaggagctacaccccatctgagctggagggcaatgctgtggtgtcctacagccggcccacagacagaaatccagatggcatccccagggtcatccagtgcaagttccggctgcccctgaagctgatctgcctgcccggccagcccagcaagacagccagccacaagatcaccatcgacaccaacaagagccctgtgtccctgctgagcctcttccctggctttgccagccagagtgatgatgaccaggtgaatgtgatgggcttccacttcctgggcggggcccgcatcaccgtgctggccagcaagaccagccagcgctaccgcatccagagcgagcagtttgaggacctgtggctgatcaccaatgaactcatcctgcggctgcaggagtactttgagaagcagggcgtgaaggactttgcctgcagcttcagcggcagcatccccctgcaggagtactttgagctgattgaccaccactttgagctgcgcatcaatggagagaagctggaggagctgctgtctgaaagagctgtgcagttccgggccatccagaggcggctgctggcccgcttcaaggacaagaccccagcccccctgcagcacctggacaccctgctggatggcacctacaagcaggtgattgccctggctgatgctgtggaggagaaccagggcaacctcttccagagcttcacccggctgaagagcgccacccacctggtgatcctgctgattgccctgtggcagaagctgtctgctgaccaggtggccatcctggaggccgccttcctgcccctgcaggaggacacccaggagctgggctgggaggagaccgtggatgctgccatcagccacctgctgaagacctgcctgagcaagagcagcaaggagcaggccctgaacctgaacagccagctgaacatccccaaggacaccagccagctgaagaagcacatcaccctgctgtgtgaccggctgagcaagggcggccgcctgtgcctgagcacagatgctgctgccccccagaccatggtgatgcctgggggctgcaccaccatccctgagagtgacctggaggagaggtctgtggagcaggacagcacagagctgttcaccaaccaccgccacctgacagctgagacccccaggcctgggaagaggctggatggcctgcacaagaggtag

SEQ ID NO: 305880 - DNA, 1365 bp, Artificial Sequence
  derived and/or modified sequence
tgagacctggtgcccagcgtgaccgtgaaggtgaccctgcagaaccgcgttatcctgcaaaaggccaagctatccgtgtatgtgcagcctcctctggaactaacctgtgatcagttcacttttgagtttatgactcccgatctcacacggacagtcagtttcagcgtgtatctgaagaggtcttacacaccaagtgagctggagggtaacgcggttgtctcctacagccgccctactgaccgcaaccccgatggcatcccaagggttatccaatgtaagtttcggttgccactaaaacttatttgcctgcctggccagcccagtaagactgcatcccacaagattaccattgacacgaacaaatctccagtaagtctgctgagtctttttcccggctttgcgtcgcagtcagacgacgatcaggtgaatgtcatgggctttcattttctaggtggagctcgcattaccgtgcttgccagcaagacgtcccagaggtaccgcattcaatcggagcaatttgaagacctgtggctcataacaaatgagttgatcctcaggttacaggagtacttcgagaagcagggggtgaaagacttcgcctgcagctttagtggaagcatccccctgcaggaatactttgagttgatcgaccatcactttgaactcaggatcaacggcgagaagttagaagagctcctcagcgagagggctgtgcagtttcgagccatacagagacgactactcgcccgatttaaagacaaaacgcctgccccactgcagcatctggatacattgttggacggcacctacaagcaagttatagccctggccgacgctgtagaggagaatcagggtaacttattccagagcttcaccaggttaaagtccgccacccacttagtgatcctgctgatcgcgctctggcaaaagctcagcgccgaccaggttgccattctcgaggccgcgttcctgccactgcaggaggatacacaggaattgggatgggaggagacagtggatgccgccatctcccacctgctcaagacctgcctcagcaaaagcagcaaggaacaggcactgaacctgaacagtcagctgaacatcccaaaagacacatctcagctgaaaaaacacattacccttctgtgcgatcgcctctctaagggcggccgactgtgtctgtctacagatgcggcagccccacaaacaatggttatgcctggaggatgcaccaccatccccgaatccgacctggaagaacggtccgtggaacaagacagtacagaactgttcactaaccacaggcacctgactgccgaaactcctagacccggcaagcggctcgatgggctgcacaaaaggtag

SEQ ID NO: 305881 - DNA, 1365 bp, Artificial Sequence
  derived and/or modified sequence
taagatttagtgcctagcgtaaccgtcaaggtcacactgcagaatagagtgatattgcagaaggctaagctctccgtctacgtgcagccaccgctggagctgacatgcgaccagtttacctttgagtttatgacacccgacctgacgaggacggtcagtttctcagtgtacctgaagaggagctacacaccaagcgaactggaaggtaatgccgttgtcagttatagtagacctaccgatcgaaaccctgacggaattccccgtgttattcaatgtaagttcagactacccctgaaattgatttgtctgccaggacagccttctaagacagcaagtcataaaattaccatcgacacgaataagtctcctgtgtccctgttaagcttgttcccaggattcgctagccaaagcgatgacgatcaggtaaacgtgatgggcttccactttctgggcggagccagaatcacagtgctagcttccaaaacttcgcagcgctatcgcatccagtccgagcagttcgaagatctgtggctaatcacaaatgagctgattcttagactgcaggaatatttcgagaaacaaggggtaaaagactttgcctgttcctttagtggctcaatccctctgcaagagtatttcgagcttattgaccatcatttcgagcttcgtataaatggagaaaaacttgaggaactgttgtctgagcgcgctgtgcagttccgcgcaattcagagacggctcctggcccgttttaaagataaaactcctgccccactccagcatctggacacactgcttgatgggacgtacaagcaagttattgccctcgccgacgccgtggaagagaaccagggcaatctcttccaatcctttacccgcctgaaatctgccacccacctggtgatcttactaatagccctctggcagaaattaagtgcagatcaggtagctatcctggaggccgcattcctccccctccaagaggacacccaggagctcggttgggaggagactgtggacgccgcaatctcgcatctcctgaaaacgtgcctgtccaaatcttcgaaagagcaagccctcaacctgaactcacaactaaacattccaaaagatactagccagttaaaaaagcacatcacattactgtgcgaccgcctatcaaaagggggacgattatgcctgtctactgatgcagctgcacctcagaccatggtgatgccaggaggatgtaccaccattcccgagtctgatttggaggagcggagcgttgagcaggatagtactgagttgttcaccaatcaccggcatctcaccgcagaaaccccccgtcctggcaagcgcttggacgggctgcacaagcggtag

SEQ ID NO: 305882 - DNA, 1982 bp, Artificial Sequence
  derived and/or modified sequence
tgaccttgtcccttctgtcacggtgaaggtcacactgcagaacagagtgatattgcaaaaagccaaattatcagtctacgtgcaaccaccattagaattgacttgtgatcagttcacctttgaatttatgacaccagatttgactagaacagtaagcttttctgtttatctgaaaagaagttatacaccatcagaattggaaggaaatgctgttgtttcttattccagaccaacagatcgaaatcctgatggcattccgcgagttatccaatgtaaatttagacttcccctaaagttaatttgcctaccaggtcagccttcaaaaactgcaagccacaaaattactattgataccaacaaatctccagtcagtcttcttagtctcttcccaggttttgccagtcagtcagatgatgatcaggtgaatgtaatgggttttcacttcttaggaggtgctcgaattactgttcttgcttccaaaacttctcaacgatatcgcattcagagtgaacaatttgaagatctttggctcataaccaatgagcttattcttcgccttcaagaatattttgaaaaacagggagtcaaagattttgcatgttctttttcgggatctataccccttcaagaatattttgagttgattgatcatcattttgagctacggataaatggtgaaaaattagaagaactcttatctgagagagctgtacaatttcgggccattcaacgccggctactagcaagattcaaagataaaactcctgcccctcttcaacacctggacaccttgttagatggaacctacaagcaggtaattgctctagcagatgcagtggaggaaaaccaaggcaatctgttccagtcattcaccaggctgaagagtgccacccatttggtgattctgctgatcgcgctgtggcagaagcttagtgctgaccaggttgctattctggaagcggcatttctgccgctacaagaagacactcaagaattgggctgggaagaaacggtggatgccgccatttcccacctgttgaagacttgcctgtcgaagagttctaaggagcaggctttgaacctcaacagccagctgaacatacccaaagacacaagccaactgaagaaacatatcaccttgctctgcgatagattatccaaaggtggccgtctctgcctaagtaccgatgcagcagccccacagaccatggtcatgccaggtggttgtactacaatcccagagtcagacctagaagaaagatcagtagaacaagactctacagaactgtttaccaaccacagacatctcactgcagagacacccaggcctggtaagagactggatggccttcacaagcgttagttaagtcagaagcagtgacaatctggtcagtttttgtcataccagagagcattccgcaaagctgcttgttttccaatttcttcattcttccccttagcactggtgcagctgaatttgatcctttgtgtattcctgtcactattcagatcttttctctctctttctctcttactctctttttttccagaagtttcacccctccaaggagtctcggaataattcaagtagagttgtttggttgagaggaacatccccatctcaaggccgaacctgtgtgaacctcatgccaagcacagatatagggctggcgcaggtgcttcctaaagctcaccttcctggagatgacatgcatagaaagaggggttgggactttttacttcactaggagaacttgtaacaccatggggaagtcagctgaaacttgtcttgttttgccaggaaaggaagtagttgcctttggtcatccatctgctaatagtcacagaatacagtgaaatgacatagttttgggttagattttataatgcaaagattcagatccaaaataatttcataccccattttttcacagaattcttatatagtaaatgtatcaagtttaataaagcatctcattgtc

SEQ ID NO: 305883 - DNA, 1365 bp, Artificial Sequence
  derived and/or modified sequence
tgagacctggtgcccagcgtgaccgtgaaggtgaccctgcagaacagagtgatcctgcagaaggccaagctgagcgtgtacgtgcagccccccctggagctgacctgcgaccagttcaccttcgagttcatgacccccgacctgaccagaaccgtgagcttcagcgtgtacctgaagagaagctacacccccagcgagctggagggcaacgccgtggtgagctacagcagacccaccgacagaaaccccgacggcatccccagagtgatccagtgcaagttcagactgcccctgaagctgatctgcctgcccggccagcccagcaagaccgccagccacaagatcaccatcgacaccaacaagagccccgtgagcctgctgagcctgttccccggcttcgccagccagagcgacgacgaccaggtgaacgtgatgggcttccacttcctgggcggcgccagaatcaccgtgctggccagcaagaccagccagagatacagaatccagagcgagcagttcgaggacctgtggctgatcaccaacgagctgatcctgagactgcaggagtacttcgagaagcagggcgtgaaggacttcgcctgcagcttcagcggcagcatccccctgcaggagtacttcgagctgatcgaccaccacttcgagctgagaatcaacggcgagaagctggaggagctgctgagcgagagagccgtgcagttcagagccatccagagaagactgctggccagattcaaggacaagacccccgcccccctgcagcacctggacaccctgctggacggcacctacaagcaggtgatcgccctggccgacgccgtggaggagaaccagggcaacctgttccagagcttcaccagactgaagagcgccacccacctggtgatcctgctgatcgccctgtggcagaagctgagcgccgaccaggtggccatcctggaggccgccttcctgcccctgcaggaggacacccaggagctgggctgggaggagaccgtggacgccgccatcagccacctgctgaagacctgcctgagcaagagcagcaaggagcaggccctgaacctgaacagccagctgaacatccccaaggacaccagccagctgaagaagcacatcaccctgctgtgcgacagactgagcaagggcggcagactgtgcctgagcaccgacgccgccgccccccagaccatggtgatgcccggcggctgcaccaccatccccgagagcgacctggaggagagaagcgtggagcaggacagcaccgagctgttcaccaaccacagacacctgaccgccgagacccccagacccggcaagagactggacggcctgcacaagagatag

SEQ ID NO: 305884 - protein, 1580 aa, Artificial Sequence
  derived and/or modified sequence
MEAQSHSSTTTEKKKVENSIVKCSTRTDVSEKAVASSTTSNEDESPGQTYHRERRNAITMQPQNVQGLSKVSEEPSTSSDERASLIKKEIHGSLPHVAEPSVPYRGTVFAMDPRNGYMEPHYHPPHLFPAFHPPVPIDARHHEGRYHYDPSPIPPLHMTSALSSSPTYPDLPFIRISPHRNPTAASESPFSPPHPYINPYMDYIRSLHSSPSLSMISATRGLSPTDAPHAGVSPAEYYHQMALLTGQRSPYADIIPSAATAGTGAIHMEYLHAMDSTRFSSPRLSARPSRKRTLSISPLSDHSFDLQTMIRTSPNSLVTILNNSRSSSSASGSYGHLSASAISPALSFTYSSAPVSLHMHQQILSRQQSLGSAFGHSPPLIHPAPTFPTQRPIPGIPTVLNPVQVSSGPSESSQNKPTSESAVSSTGDPMHNKRSKIKPDEDLPSPGARGQQEQPEGTTLVKEEGDKDESKQEPEVIYETNCHWEGCAREFDTQEQLVHHINNDHIHGEKKEFVCRWLDCSREQKPFKAQYMLVVHMRRHTGEKPHKCTFEGCTKAYSRLENLKTHLRSHTGEKPYVCEHEGCNKAFSNASDRAKHQNRTHSNEKPYVCKIPGCTKRYTDPSSLRKHVKTVHGPEAHVTKKQRGDIHPRPPPPRDSGSHSQSRSPGRPTQGALGEQQDLSNTTSKREECLQVKTVKAEKPMTSQPSPGGQSSCSSQQSPISNYSNSGLELPLTDGGSIGDLSAIDETPIMDSTISTATTALALQARRNPAGTKWMEHVKLERLKQVNGMFPRLNPILPPKAPAVSPLIGNGTQSNNTCSLGGPMTLLPGRSDLSGVDVTMLNMLNRRDSSASTISSAYLSSRRSSGISPCFSSRRSSEASQAEGRPQNVSVADSYDPISTDASRRSSEASQSDGLPSLLSLTPAQQYRLKAKYAAATGGPPPTPLPNMERMSLKTRLALLGDALEPGVALPPVHAPRRCSDGGAHGYGRRHLQPHDAPGHGVRRASDPVRTGSEGLALPRVPRFSSLSSCNPPAMATSAEKRSLVLQNYTRPEGGQSRNFHSSPCPPSITENVTLESLTMDADANLNDEDFLPDDVVQYLNSQNQAGYEQHFPSALPDDSKVPHGPGDFDAPGLPDSHAGQQFHALEQPCPEGSKTDLPIQWNEVSSGSADLSSSKLKCGPRPAVPQTRAFGFCNGMVVHPQNPLRSGPAGGYQTLGENSNPYGGPEHLMLHNSPGSGTSGNAFHEQPCKAPQYGNCLNRQPVAPGALDGACGAGIQASKLKSTPMQGSGGQLNFGLPVAPNESAGSMVNGMQNQDPVGQGYLAHQLLGDSMQHPGAGRPGQQMLGQISATSHINIYQGPESCLPGAHGMGSQPSSLAVVRGYQPCASFGGSRRQAMPRDSLALQSGQLSDTSQTCRVNGIKMEMKGQPHPLCSNLQNYSGQFYDQTVGFSQQDTKAGSFSISDASCLLQGTSAKNSELLSPGANQVTSTVDSLDSHDLEGVQIDFDAIIDDGDHSSLMSGALSPSIIQNLSHSSSRLTTPRASLPFPALSMSTTNMAIGDMSSLLTSLAEESKFLAVMQ

SEQ ID NO: 305885 - protein, 180 aa, Artificial Sequence
  derived and/or modified sequence
MEAQSHSSTTTEKKKVENSIVKCSTRTDVSEKAVASSTTSNEDESPGQTYHRERRNAITMQPQNVQGLSKVSEEPSTSSDERASLIKKEIHGSLPHVAEPSVPYRGTVFAMDPRNGYMEPHYHPPHLFPAFHPPVPIDARHHEGRYHYDPSPIPPLHMTSALSSSPTYPDLPFIRISPHR

SEQ ID NO: 305886 - DNA, 8228 bp, Artificial Sequence
  derived and/or modified sequence
ccgcgggtctatgggaagttcggggacttgacagccgctgccgccgcagggcatttttggtcgaagagagctgaagtaatgagaagacatcatggaggcccagtcccacagctccacgaccactgaaaagaaaaaagttgagaattccatagtgaagtgctccactcgaacagatgtgagcgagaaagccgttgcctccagcaccacttctaatgaggatgaaagtcctggacagacttatcacagagagagaagaaacgcaatcactatgcagccacagaatgtccaggggctcagcaaagtcagtgaggaaccttcaacatcgagtgacgagagggcctcattgatcaagaaagagatccatgggtccctgccacacgtggcggagccctctgtgccgtaccgcgggacggtgtttgccatggaccccaggaatggttacatggagccccactaccaccctcctcatcttttccctgccttccatcctcctgtaccaattgatgccagacatcatgagggccgttaccattacgatccatctccgattcctccattgcatatgacttccgccttatctagtagccctacgtatccggacctgcccttcattaggatctccccacaccggaaccccactgctgcttccgagtctcccttcagccctccacatccctacattaatccctacatggactatatccgctccttgcacagcagcccatcgctctccatgatctcagcaacccgtgggctgagccctacagatgcgccccatgcaggagtcagcccagcagaatactatcatcagatggccctgctaactggccagcgcagcccctatgcagacattattccctcagctgccaccgccggcacgggggccatccacatggaatatcttcatgctatggatagcaccagattctccagccccaggctgtcagccaggccgagccgaaaacgtacactgtccatatcaccactctccgatcatagctttgaccttcagaccatgataaggacgtctcccaactccttggtcacgattctcaataattcccgtagcagctcttcagcaagtggctcctatggtcacttatctgcaagtgcaatcagccctgccttgagcttcacctactcttccgcgcccgtctctctccacatgcatcagcagatcctaagccgacaacagagcttaggttcagcctttggacacagccctccactcatccaccctgccccaacttttccaacacagaggcctattccagggatccctacggttctgaaccccgtccaggtcagctccggcccttctgagtcctcacagaacaagcccacgagtgagtctgcagtgagcagcactggtgacccgatgcacaacaagaggtccaagatcaaacccgatgaagacctccccagcccaggggctcgggggcagcaggaacagcccgaaggaacaacccttgtcaaggaggaaggggacaaagatgaaagcaaacaggagcctgaagtcatctatgagacaaactgccactgggaaggctgcgcgagggagttcgacacccaagagcagcttgtgcaccatataaataacgaccatattcatggagagaagaaggagttcgtgtgcaggtggctggactgctcaagagagcagaaacccttcaaagcccagtatatgttggtagtgcatatgagaagacacacgggcgagaagcctcacaaatgcacttttgaaggttgcacaaaggcctactcgagactagaaaacttgaaaacacacttgagatctcacactggagagaaaccatacgtctgtgagcacgaaggttgcaacaaggctttctcaaatgcctctgatcgcgccaaacaccaaaacagaacgcattccaatgagaaaccatatgtgtgcaaaatcccaggctgcactaagcgttacacagacccaagctccctccggaaacatgtgaagacagtgcatggcccagaggctcatgtcaccaagaagcagcgaggggacatccatcctcggccgccacccccgagagattccggcagccattcacagtccaggtcgcctggccgaccgactcagggagcccttggtgagcagcaggacctcagcaacactacctcaaagcgggaagaatgcctccaggtgaaaaccgtcaaggcagagaagccaatgacatctcagccaagccctggtggtcagtcttcatgcagcagccaacagtcccccatcagcaactattccaacagtgggctcgagcttcctctgaccgatggaggtagtataggagacctcagtgccatcgatgaaaccccaatcatggactcaaccatttccactgcaaccacagcccttgctttgcaagccaggagaaacccggcagggaccaaatggatggagcacgtaaaactagaaaggctaaaacaagtgaatggaatgtttccgcgactgaaccccattctaccccctaaagcccctgcggtctctcctctcataggaaatggcacacagtccaacaacacctgcagcttgggtgggcccatgacgcttctcccgggcagaagcgacctctctggggtggacgtcactatgctgaacatgctcaacagaagggacagcagcgccagcaccatcagctcggcctacctgagcagccgccgctcctcagggatctcgccctgcttctccagccgccgctccagcgaggcgtcacaggccgagggccggccgcagaacgtgagcgtggccgactcctacgaccccatctccaccgacgcctcgcgccgctccagcgaagccagccagagcgacggcctgcccagcctgctcagcctcacgcccgcccagcagtaccgcctcaaggccaagtacgcggctgccacaggagggccgccgccgacgcccctgcccaacatggagaggatgagcctgaagacgcgcctggcgctgctcggggatgccctcgagcctggcgtggccctgcctccagttcatgccccgaggaggtgcagcgacgggggagcccacggctacgggcggcgccacctgcagccgcacgatgcgccgggccacggcgtgaggagggccagcgacccggtgcggacaggctccgagggcctggccctgcctcgtgtgccgcgcttcagcagcctcagcagctgcaaccccccggcgatggccacgtccgcggagaagcgcagtctcgtgcttcagaattacacgcggcccgagggcggccagtcccgaaacttccactcgtccccctgtcctcccagcatcaccgagaacgtcaccctggagtccctgaccatggacgctgatgccaacctgaacgatgaggatttcctgccggacgacgtggtgcagtatttaaattcccagaaccaagcagggtacgagcagcacttccccagcgccctcccggacgacagcaaagtgccccacgggcccggtgactttgacgcgcccgggctgccagacagccacgctggccagcagttccatgccctcgagcagccctgccccgagggcagcaaaaccgacctgcccattcagtggaacgaagtcagctccggaagcgccgacctgtcctcctccaagctcaagtgtgggccgcggcccgctgtgccgcagactcgcgcctttgggttctgcaacggcatggtcgtccacccgcagaaccccttgaggagcgggcctgctgggggctatcagaccctcggggagaacagcaacccctacggtggcccagagcacttgatgctccacaacagccccggaagtggcaccagtggaaacgccttccatgaacagccctgtaaggccccgcagtatgggaactgtctcaacaggcagccagtggcccctggtgcactcgacggtgcctgtggtgccgggattcaagcctcaaagctgaagagcacccccatgcaagggagcgggggccagctgaatttcggcctgccggtagcgccaaatgagtcagctggcagcatggtgaatggcatgcagaaccaggacccagtgggacaggggtacctggctcaccagctcctcggcgacagcatgcagcacccgggggcaggccgccccggtcagcagatgcttgggcagattagtgctacctcacacatcaacatctaccaagggccagagagctgcctgccaggggctcacggcatgggcagccagccgtcaagcttggcagttgtcaggggctaccagccatgtgccagctttgggggcagcaggcgccaggctatgccgagggacagccttgctctgcagtcaggacagctcagtgacacaagtcagacctgcagggtgaatggtatcaagatggagatgaaagggcagccccatccgctgtgctctaatctgcagaattactctggtcagttctatgaccaaaccgtgggcttcagtcagcaagacacgaaagctggttcattctctatttcagacgccagctgcctgctacaggggaccagcgccaaaaactctgagttactttccccaggtgctaatcaggtgacaagcacagtggacagcctcgacagccatgacctggaaggggtacagattgacttcgatgccatcatagacgatggggaccactccagcctgatgtcgggggccctgagcccaagtatcattcagaacctttcccatagctcctcccgcctcaccacgcctcgggcgtccctcccattcccagcgctgtccatgagcaccaccaacatggctatcggggacatgagttctttgctgacctccctagcggaagaaagcaaattccttgcagttatgcaataggctttaggaaaaaaagactgcaaccaacggaaatcaataggagttgaagagattaaactgactttgttttggctgtttttttagttctgtatgtattttagcaatctcatctcacctaactgagatgtgtttcaattatattccttttatggaaaaggactctgaaaaaccctaaagtattctagggagaaactgtcttccatttcagttttgaatcagtattgttacactcaaaccaccctctttttaaaaaaaaaaaaaaaaactgtaagccccgccccctttttagtaaaccgatgtaaatttgtgatgtgcatattcttctttcttttagaagagcagtcaaattaaaggatttgacatgttttgctgttgctcaaaggaaataggagttggtgtgcttgtgaccaaggggttacacttccagcttttaaaattctcctttacatgtgctcagtgttttgttttgtgttttggtttctgttttttattttaattcccacattgggcacaagaatcagaatatggatagctagtttaagaaacttttgtgggtgcactgtagcatagatgacagaatattgatgttccccccatctccaattcagttcagggcattccacagttaaacagaaatgggaacgtggggctcttataaatgaaatgggcgctcacagttttggttttcagctcttcatgtctgtaagtgtgctttgggggaggctatgtctgtatggtcgattctcagttatcacatttgcctctcctcccactaccttcatgaacattcagtgctgtttcgcactgcagttagagagaagggacggacagttggtgacactcagccacattgctacttttatctgttctggtaagaagttagatagatggtagattgaagcaattgggtagaattagttgggggaatatttatgagttgctgtgtttgttgattagttccatctctttcccattttaactgagaattgattatatatagctctaagtatataggtatttaaacaaccccacaagcggctgtatcagtaacatttattaattccactatagtgagggaggatttccattctaaataccttattttgagggatttataaaacttagttgtaaaagagaaagcccacatagtgggaataaattgcttcagccatttttagtatttgagagcactagggaagatgtttagtagctgtgtggatgccttttttcacaccctgtctattgaatgctgcatccattcacgaagttaaatgttacatgcagttagtccttaatgtggactggatctgtacttttgttttggattaaaacatttaaagatttttgaagtgcagctactccccacgtgcatttgatacacataaaagtcatactgtgtgtgcacaaagagtacatggattttccagcatattgctttaaaaaattatataaactgttaaaatattaacacctcaggctacctgctgtattctgtcccattgacccctggaattggatttactgcaagtgattgataattcaattatgtggcttttcccctttaatcttgccatttaaattacagtagaaagacaaaatcaagtaaaataaagtgttagataatagaaagagtgttaagaccagcccacttttctcatgtttatgttctttcatttggaccaagaatctccgcatggaggttgatttgccactggggactttggctaagactattaggtttgctttcaactagatgttcctgagacaagcagagggacactgcaattccccttccatgcctgctgttctcccccatgtaagtcttctttgaaattaacggatgtgtctcctttggaacagccccataacaaaagagaactactgatctgagcataggaaagtagaggctctaccacttttcagttgaaaaagcaagactttctctgtgtttctgaaacaaggcataatgttgtcacagaatcagagatccagtctcacttttccacaaatctccaaatctccagtcttatcttgtgtgctctaatggtttggttcaatccctttccaactcttgttttcaaagcatggggcctgagtgttctccactcctcctaagaaaggagcttgggtggaagggaccatgctgacctcctccatcagagggctcttccagtagtattctcggatgcaacctccatttctcagttaccattatttcctgtatcagctttgtccttcctggagggatgcacagtgatccggcccaccactgttgttgtcttgtgcttctgctctttcctatggtttcaggttattttctgggtttcccctattcttcttttatttctttttttttttatatttgctttcctttctactgcttttagatttgcaggagatgcaagtttcagctcaatgtttggcttctctcaatatggaaatttcagaaggacagaggagaggagggaggaagaagaaagtatactcctccagaatttcagtgatctgttgtggcagtccagtggaaggaaggtcttttgaggtcacttagaagcatctttttgggacatccttttgggatctctgtaggctaggcatctcatatcttgagactcacccccagcctccaagcctctctccatttctctaacctatgcattttagagcgagaggaccgcctcactagtgtcaccatcctgccttttctaaaacatgcaggctcacacattctactcctgcttaatgtctgtgttaaacgttttctaaccatttttgttttatttttctgaaaaagttaacccctcccaactcctcacacattggctcttcctcttgagccacaaagttttgattcttgcgatgtatgtgccttattttatgttaatcttgtcaatgagagggaccagttggtgttgcccaatcagcactccaaggctgtgtgtgcaccagccagagagcgcacggtggtagcagagtcgaggctgtcttgtatcctggtttcatgtgttgttttgaactgataggaggatgttctcttctgacaagttacccttgtgtatcctgcagacatgtaaaataaaatacaagttcatttttttcaccttttttagatttttttaaaaaataaaatgtgtaatcctttttttaaaagaaacacatgtaaatacatttaagtattgtaggcatagcgttcagatgtgactggcccaggcgttcctcggacaagcctgcattccccgtgatcacgcccacctcaagcccaggggctgcagcccagccacagatgaactctacctttgctttcagaaccacttagtccttttgtaacaaagaaaaaaaaatgtttcttacaatgtcaataaaaaattctttgtatggaaaaaaaaaaaaaaaa

SEQ ID NO: 305887 - DNA, 4743 bp, Artificial Sequence
  derived and/or modified sequence
atggaagcccaaagccatagttctaccaccacggagaagaagaaggtggaaaattccatcgttaagtgcagtacgcggactgatgtctctgagaaggctgtcgcttcgtctaccacctctaatgaggatgagagtcccggccagacataccatagagaaaggagaaacgctattaccatgcaaccccagaatgtgcaggggttatcgaaggtcagtgaggagccctcaacaagtagcgacgaacgggccagtttaataaagaaagaaattcatggttccctaccgcacgtggctgaaccctctgtcccctataggggaacagtgttcgctatggatcctagaaacggatacatggagccccattaccaccccccccacctgtttccagccttccacccaccagtacccattgacgctagacaccacgaggggcgctatcactacgatccatcgccaataccaccgctgcatatgaccagcgccttaagttctagcccaacataccccgatctccccttcatacgtattagtcctcacaggaatcctacagccgcttcagaatccccgttttcacctccacatccgtacatcaacccctacatggattatatccggtccctgcattcatccccaagcttgtctatgatctccgccactagaggcttgagccccacagatgccccacacgctggggtgagcccagccgagtattatcatcagatggcactgctgacggggcaaaggtctccctacgccgacatcatcccctcggccgcaactgccggtacaggagccattcatatggagtatttacacgctatggactccacacggtttagcagccccagattgagtgctcggccaagccgaaaacgcacactatctatctcccccctgtcagatcacagcttcgacctccagaccatgatcagaacctcccctaattcactggtgaccattcttaacaactctcgaagctcctcatcagccagtggtagctacgggcatctaagcgcttctgccatcagccccgctctgtcgtttacatattcatcagctccggtctctttgcacatgcatcagcaaatcttgtcccgccagcaatccctggggtctgcattcggccacagcccacccctcattcacccagcccctacctttcccacacagagaccgatcccaggaatccctactgttttgaatcccgtgcaggttagctctggcccatctgagagttctcagaacaagccgacatccgaatccgccgtgtcctctacaggcgacccgatgcacaataaaagaagtaagatcaagccagacgaggatctgccatctccgggggctcgaggccagcaagagcagcctgaaggaacgactctcgtgaaagaagaaggagacaaggacgaatccaagcaggagcctgaagttatttacgaaactaactgccactgggaaggttgcgcaagggaattcgatacacaggagcagctggtccatcatattaataatgaccacatccacggggaaaaaaaggaatttgtctgcagatggctggactgctcacgggaacagaagccattcaaagcccaatacatgctagtagtgcacatgagaagacacaccggggagaaacctcacaaatgtaccttcgaaggctgcacaaaggcctatagtaggcttgagaacctgaagacccacctgcgtagtcacactggcgagaaaccctacgtgtgtgagcacgaaggctgtaacaaagcgttctctaatgcttccgacagggcaaaacaccagaaccgcacccactctaatgagaaaccctatgtgtgcaagattcccggttgtacgaaacggtataccgacccttccagcttaaggaagcacgttaagacagtgcacggccccgaggcccacgtgacgaaaaagcagagaggcgacatccatccacgaccaccgccaccgcgggacagcggtagccattcacaatcaaggagtccaggcagaccaactcagggtgccttgggggagcagcaggacctgtctaacaccactagcaagcgagaagagtgtcttcaggtcaagacagtgaaggccgaaaagcctatgacaagtcagccttctcctgggggtcagtcttcctgttctagtcagcaatctccaatctctaactattccaactccgggctcgagctgcctttgaccgatggaggatcgatcggtgacctgtcagccatcgatgagacgccaatcatggactcgacaatttcgacggcaactacagcgctggctttgcaagcaaggaggaatcctgccggaacaaagtggatggaacacgtgaaattggagcggctgaaacaggtgaatggaatgtttcccaggctaaatccaatccttcctcctaaagcccccgccgtgtcaccacttatcggcaatggaacccaatccaataacacttgcagtctgggagggcccatgacgctgctgcctggtcgctctgacttaagtggggtggatgttactatgctgaatatgctgaaccgacgggatagctccgcctctaccatctcaagtgcatatctgtccagcaggaggagttccggcatcagcccatgctttagctctcgtaggtcttcggaggcatctcaagctgaagggcggccccagaacgtgagcgtagcggatagctatgatccaatctcaacagacgcttctaggcgaagcagtgaggcaagtcagagcgacgggcttccctcgttgctttctctgacacccgcccagcagtacagactcaaggccaaatatgccgcagccaccggggggccgcctcccactcccctgccaaacatggagcgcatgtctctgaagacccgcctggccctcctgggggatgctctggagcccggagtagcactcccacctgtgcatgccccccgcagatgcagcgacgggggggcgcatgggtacggcaggcgccatctgcagccacacgacgcacctggccacggtgtccggagagcaagtgaccccgttcggacggggagtgaggggttagcactgccgcgagttcccaggttcagctcactgagcagttgcaacccaccagcgatggccacctctgcagagaaacgctccctggttcttcagaactacacgcgaccagagggtggccagtctcgaaactttcatagctccccttgcccccctagtataactgaaaatgtaacacttgagtccctcaccatggacgccgatgctaatctgaatgacgaagatttcttgcctgacgacgtggttcagtatctcaattcacaaaaccaggcaggttatgaacaacacttcccttcagccctacccgatgactctaaagtgccgcacggtccaggcgacttcgacgccccagggctgcccgatagtcacgcaggacagcagttccacgcgctggaacagccttgcccagaggggtccaagactgacctaccaatacaatggaacgaggtctcatcaggtagcgcggatttgtcttcctccaagttgaaatgcggtccgcgccctgcagtccctcagacaagagcctttggtttctgtaacgggatggtggttcatccccaaaatcccctccggtcaggaccagccgggggctatcaaacactgggcgaaaactcgaatccgtacggcggaccggagcacctcatgctgcataacagtcctggaagcggaaccagcggcaatgcatttcacgaacagccctgtaaggccccacaatacgggaattgtttaaatcgacaacctgtagctcctggcgccctggacggcgcttgcggagccggtattcaagcatccaagctgaaatccacccctatgcaaggttccggcgggcagttaaacttcggactccccgtggcccctaatgagtccgcgggatcaatggttaacggcatgcagaaccaggatcccgtggggcagggctacttagcccatcagttgttaggcgactctatgcaacaccctggggcagggcgacccggacagcagatgcttggacagatctctgccactagccatattaatatttatcagggacctgagagctgtctccccggagcccatgggatggggtcacaaccaagttccctggctgtggttcgggggtatcagccatgcgcttcatttggcgggagtcggcgacaggctatgccacgggactctctggcactgcagtccgggcaactctctgatacatcacagacatgcagagtaaacggtatcaaaatggagatgaagggccaaccccatcccctctgttctaatctgcaaaactattccgggcagttttatgatcagacagttggcttcagccagcaggatactaaggccggatctttctcgatctcagatgctagctgcctgcttcaaggaacctctgcaaagaatagtgagcttctctctcctggggcaaaccaagtgacttcgaccgtggactccttggattcacatgacctagagggtgtccagatcgatttcgatgcaattatagacgacggagaccactcatccctcatgagtggcgcactttctccttccatcatccagaatttaagccattcttcttcaagactaacgacccctagagcctccttgccttttccagcactgtcgatgtcaaccaccaacatggccatcggagacatgtcaagcttgctgacatccctcgcagaagagtcgaaatttttagcagttatgcagtag

SEQ ID NO: 305888 - DNA, 543 bp, Artificial Sequence
  derived and/or modified sequence
atggaggcccagtcccacagttctaccactaccgaaaaaaaaaaggtggaaaattctatagttaagtgttcgaccaggactgacgtgagtgaaaaagccgtggcttccagcaccaccagtaacgaggatgaatcacccggtcaaacatatcacagggagaggcgtaacgctattacaatgcaaccacagaatgttcagggcctaagcaaggtgtccgaagagccgtctacatcttccgacgagagggcctctctgatcaagaaggagatacatggaagtttgcctcatgtcgccgagccgtcagtgccatacaggggtaccgtttttgctatggacccaagaaatggttacatggaaccacactaccatccaccacacctgtttcccgcgtttcatccacccgttcctattgatgcccgacaccacgaaggcaggtatcactatgatccctcacccatccctccacttcacatgacttcggccctctcatccagcccaacctacccggacttaccatttatacggattagtccacacagatag

SEQ ID NO: 305889 - DNA, 8208 bp, Artificial Sequence
  derived and/or modified sequence
gtctatgggaagttcggggacttgacagccgctgccgccgcagggcatttttggtcgaagagagctgaagtaatgagaagacatcatggaggcccagtcccacagctccacgaccactgaaaagaaaaaagttgagaattccatagtgaagtgctccactcgaacagatgtgagcgagaaagccgttgcctccagcaccacttctaatgaggatgaaagtcctggacagacttatcacagagagagaagaaacgcaatcactatgcagccacagaatgtccaggggctcagcaaagtcagtgaggaaccttcaacatcgagtgacgagagggcctcattgatcaagaaagagatccatgggtccctgccacacgtggcggagccctctgtgccgtaccgcgggacggtgtttgccatggaccccaggaatggttacatggagccccactaccaccctcctcatcttttccctgccttccatcctcctgtaccaattgatgccagacatcatgagggccgttaccattacgatccatctccgattcctccattgcatatgacttccgccttatctagtagccctacgtatccggacctgcccttcattaggatctccccacaccggaaccccactgctgcttccgagtctcccttcagccctccacatccctacattaatccctacatggactatatccgctccttgcacagcagcccatcgctctccatgatctcagcaacccgtgggctgagccctacagatgcgccccatgcaggagtcagcccagcagaatactatcatcagatggccctgctaactggccagcgcagcccctatgcagacattattccctcagctgccaccgccggcacgggggccatccacatggaatatcttcatgctatggatagcaccagattctccagccccaggctgtcagccaggccgagccgaaaacgtacactgtccatatcaccactctccgatcatagctttgaccttcagaccatgataaggacgtctcccaactccttggtcacgattctcaataattcccgtagcagctcttcagcaagtggctcctatggtcacttatctgcaagtgcaatcagccctgccttgagcttcacctactcttccgcgcccgtctctctccacatgcatcagcagatcctaagccgacaacagagcttaggttcagcctttggacacagccctccactcatccaccctgccccaacttttccaacacagaggcctattccagggatccctacggttctgaaccccgtccaggtcagctccggcccttctgagtcctcacagaacaagcccacgagtgagtctgcagtgagcagcactggtgacccgatgcacaacaagaggtccaagatcaaacccgatgaagacctccccagcccaggggctcgggggcagcaggaacagcccgaaggaacaacccttgtcaaggaggaaggggacaaagatgaaagcaaacaggagcctgaagtcatctatgagacaaactgccactgggaaggctgcgcgagggagttcgacacccaagagcagcttgtgcaccatataaataacgaccatattcatggagagaagaaggagttcgtgtgcaggtggctggactgctcaagagagcagaaacccttcaaagcccagtatatgttggtagtgcatatgagaagacacacgggcgagaagcctcacaaatgcacttttgaaggttgcacaaaggcctactcgagactagaaaacttgaaaacacacttgagatctcacactggagagaaaccatacgtctgtgagcacgaaggttgcaacaaggctttctcaaatgcctctgatcgcgccaaacaccaaaacagaacgcattccaatgagaaaccatatgtgtgcaaaatcccaggctgcactaagcgttacacagacccaagctccctccggaaacatgtgaagacagtgcatggcccagaggctcatgtcaccaagaagcagcgaggggacatccatcctcggccgccacccccgagagattccggcagccattcacagtccaggtcgcctggccgaccgactcagggagcccttggtgagcagcaggacctcagcaacactacctcaaagcgggaagaatgcctccaggtgaaaaccgtcaaggcagagaagccaatgacatctcagccaagccctggtggtcagtcttcatgcagcagccaacagtcccccatcagcaactattccaacagtgggctcgagcttcctctgaccgatggaggtagtataggagacctcagtgccatcgatgaaaccccaatcatggactcaaccatttccactgcaaccacagcccttgctttgcaagccaggagaaacccggcagggaccaaatggatggagcacgtaaaactagaaaggctaaaacaagtgaatggaatgtttccgcgactgaaccccattctaccccctaaagcccctgcggtctctcctctcataggaaatggcacacagtccaacaacacctgcagcttgggtgggcccatgacgcttctcccgggcagaagcgacctctctggggtggacgtcactatgctgaacatgctcaacagaagggacagcagcgccagcaccatcagctcggcctacctgagcagccgccgctcctcagggatctcgccctgcttctccagccgccgctccagcgaggcgtcacaggccgagggccggccgcagaacgtgagcgtggccgactcctacgaccccatctccaccgacgcctcgcgccgctccagcgaagccagccagagcgacggcctgcccagcctgctcagcctcacgcccgcccagcagtaccgcctcaaggccaagtacgcggctgccacaggagggccgccgccgacgcccctgcccaacatggagaggatgagcctgaagacgcgcctggcgctgctcggggatgccctcgagcctggcgtggccctgcctccagttcatgccccgaggaggtgcagcgacgggggagcccacggctacgggcggcgccacctgcagccgcacgatgcgccgggccacggcgtgaggagggccagcgacccggtgcggacaggctccgagggcctggccctgcctcgtgtgccgcgcttcagcagcctcagcagctgcaaccccccggcgatggccacgtccgcggagaagcgcagtctcgtgcttcagaattacacgcggcccgagggcggccagtcccgaaacttccactcgtccccctgtcctcccagcatcaccgagaacgtcaccctggagtccctgaccatggacgctgatgccaacctgaacgatgaggatttcctgccggacgacgtggtgcagtatttaaattcccagaaccaagcagggtacgagcagcacttccccagcgccctcccggacgacagcaaagtgccccacgggcccggtgactttgacgcgcccgggctgccagacagccacgctggccagcagttccatgccctcgagcagccctgccccgagggcagcaaaaccgacctgcccattcagtggaacgaagtcagctccggaagcgccgacctgtcctcctccaagctcaagtgtgggccgcggcccgctgtgccgcagactcgcgcctttgggttctgcaacggcatggtcgtccacccgcagaaccccttgaggagcgggcctgctgggggctatcagaccctcggggagaacagcaacccctacggtggcccagagcacttgatgctccacaacagccccggaagtggcaccagtggaaacgccttccatgaacagccctgtaaggccccgcagtatgggaactgtctcaacaggcagccagtggcccctggtgcactcgacggtgcctgtggtgccgggattcaagcctcaaagctgaagagcacccccatgcaagggagcgggggccagctgaatttcggcctgccggtagcgccaaatgagtcagctggcagcatggtgaatggcatgcagaaccaggacccagtgggacaggggtacctggctcaccagctcctcggcgacagcatgcagcacccgggggcaggccgccccggtcagcagatgcttgggcagattagtgctacctcacacatcaacatctaccaagggccagagagctgcctgccaggggctcacggcatgggcagccagccgtcaagcttggcagttgtcaggggctaccagccatgtgccagctttgggggcagcaggcgccaggctatgccgagggacagccttgctctgcagtcaggacagctcagtgacacaagtcagacctgcagggtgaatggtatcaagatggagatgaaagggcagccccatccgctgtgctctaatctgcagaattactctggtcagttctatgaccaaaccgtgggcttcagtcagcaagacacgaaagctggttcattctctatttcagacgccagctgcctgctacaggggaccagcgccaaaaactctgagttactttccccaggtgctaatcaggtgacaagcacagtggacagcctcgacagccatgacctggaaggggtacagattgacttcgatgccatcatagacgatggggaccactccagcctgatgtcgggggccctgagcccaagtatcattcagaacctttcccatagctcctcccgcctcaccacgcctcgggcgtccctcccattcccagcgctgtccatgagcaccaccaacatggctatcggggacatgagttctttgctgacctccctagcggaagaaagcaaattccttgcagttatgcaataggctttaggaaaaaaagactgcaaccaacggaaatcaataggagttgaagagattaaactgactttgttttggctgtttttttagttctgtatgtattttagcaatctcatctcacctaactgagatgtgtttcaattatattccttttatggaaaaggactctgaaaaaccctaaagtattctagggagaaactgtcttccatttcagttttgaatcagtattgttacactcaaaccaccctctttttaaaaaaaaaaaaaaaaactgtaagccccgccccctttttagtaaaccgatgtaaatttgtgatgtgcatattcttctttcttttagaagagcagtcaaattaaaggatttgacatgttttgctgttgctcaaaggaaataggagttggtgtgcttgtgaccaaggggttacacttccagcttttaaaattctcctttacatgtgctcagtgttttgttttgtgttttggtttctgttttttattttaattcccacattgggcacaagaatcagaatatggatagctagtttaagaaacttttgtgggtgcactgtagcatagatgacagaatattgatgttccccccatctccaattcagttcagggcattccacagttaaacagaaatgggaacgtggggctcttataaatgaaatgggcgctcacagttttggttttcagctcttcatgtctgtaagtgtgctttgggggaggctatgtctgtatggtcgattctcagttatcacatttgcctctcctcccactaccttcatgaacattcagtgctgtttcgcactgcagttagagagaagggacggacagttggtgacactcagccacattgctacttttatctgttctggtaagaagttagatagatggtagattgaagcaattgggtagaattagttgggggaatatttatgagttgctgtgtttgttgattagttccatctctttcccattttaactgagaattgattatatatagctctaagtatataggtatttaaacaaccccacaagcggctgtatcagtaacatttattaattccactatagtgagggaggatttccattctaaataccttattttgagggatttataaaacttagttgtaaaagagaaagcccacatagtgggaataaattgcttcagccatttttagtatttgagagcactagggaagatgtttagtagctgtgtggatgccttttttcacaccctgtctattgaatgctgcatccattcacgaagttaaatgttacatgcagttagtccttaatgtggactggatctgtacttttgttttggattaaaacatttaaagatttttgaagtgcagctactccccacgtgcatttgatacacataaaagtcatactgtgtgtgcacaaagagtacatggattttccagcatattgctttaaaaaattatataaactgttaaaatattaacacctcaggctacctgctgtattctgtcccattgacccctggaattggatttactgcaagtgattgataattcaattatgtggcttttcccctttaatcttgccatttaaattacagtagaaagacaaaatcaagtaaaataaagtgttagataatagaaagagtgttaagaccagcccacttttctcatgtttatgttctttcatttggaccaagaatctccgcatggaggttgatttgccactggggactttggctaagactattaggtttgctttcaactagatgttcctgagacaagcagagggacactgcaattccccttccatgcctgctgttctcccccatgtaagtcttctttgaaattaacggatgtgtctcctttggaacagccccataacaaaagagaactactgatctgagcataggaaagtagaggctctaccacttttcagttgaaaaagcaagactttctctgtgtttctgaaacaaggcataatgttgtcacagaatcagagatccagtctcacttttccacaaatctccaaatctccagtcttatcttgtgtgctctaatggtttggttcaatccctttccaactcttgttttcaaagcatggggcctgagtgttctccactcctcctaagaaaggagcttgggtggaagggaccatgctgacctcctccatcagagggctcttccagtagtattctcggatgcaacctccatttctcagttaccattatttcctgtatcagctttgtccttcctggagggatgcacagtgatccggcccaccactgttgttgtcttgtgcttctgctctttcctatggtttcaggttattttctgggtttcccctattcttcttttatttctttttttttttatatttgctttcctttctactgcttttagatttgcaggagatgcaagtttcagctcaatgtttggcttctctcaatatggaaatttcagaaggacagaggagaggagggaggaagaagaaagtatactcctccagaatttcagtgatctgttgtggcagtccagtggaaggaaggtcttttgaggtcacttagaagcatctttttgggacatccttttgggatctctgtaggctaggcatctcatatcttgagactcacccccagcctccaagcctctctccatttctctaacctatgcattttagagcgagaggaccgcctcactagtgtcaccatcctgccttttctaaaacatgcaggctcacacattctactcctgcttaatgtctgtgttaaacgttttctaaccatttttgttttatttttctgaaaaagttaacccctcccaactcctcacacattggctcttcctcttgagccacaaagttttgattcttgcgatgtatgtgccttattttatgttaatcttgtcaatgagagggaccagttggtgttgcccaatcagcactccaaggctgtgtgtgcaccagccagagagcgcacggtggtagcagagtcgaggctgtcttgtatcctggtttcatgtgttgttttgaactgataggaggatgttctcttctgacaagttacccttgtgtatcctgcagacatgtaaaataaaatacaagttcatttttttcaccttttttagatttttttaaaaaataaaatgtgtaatcctttttttaaaagaaacacatgtaaatacatttaagtattgtaggcatagcgttcagatgtgactggcccaggcgttcctcggacaagcctgcattccccgtgatcacgcccacctcaagcccaggggctgcagcccagccacagatgaactctacctttgctttcagaaccacttagtccttttgtaacaaagaaaaaaaaatgtttcttacaatgtcaataaaaaattctttgtatggaa

SEQ ID NO: 305890 - DNA, 653 bp, Artificial Sequence
  derived and/or modified sequence
tgcggttctcttgctcgctttctgttctcttgcttactttcaaatgcagacgtgcactacagcgtcaccagggcatttttggtcgaagagagctgaagtaatgagaagacatcatggaggcccagtcccacagctccacgaccactgaaaagaaaaaagttgagaattccatagtgaagtgctccactcgaacagatgtgagcgagaaagccgttgcctccagcaccacttctaatgaggatgaaagtcctggacagacttatcacagagagagaagaaacgcaatcactatgcagccacagaatgtccaggggctcagcaaagtcagtgaggaaccttcaacatcgagtgacgagagggcctcattgatcaagaaagagatccatgggtccctgccacacgtggcggagccctctgtgccgtaccgcgggacggtgtttgccatggaccccaggaatggttacatggagccccactaccaccctcctcatcttttccctgccttccatcctcctgtaccaattgatgccagacatcatgagggccgttaccattacgatccatctccgattcctccattgcatatgacttccgccttatctagtagccctacgtatccggacctgcccttcattaggatctccccacaccgg

SEQ ID NO: 305891 - DNA, 4743 bp, Artificial Sequence
  derived and/or modified sequence
atggaggcccagagccacagcagcaccaccacagagaagaagaaggtggagaacagcatcgtgaagtgcagcaccaggacagatgtgtctgagaaggctgtggccagcagcaccaccagcaatgaagatgagagccctggccagacctaccaccgggagaggagaaatgccatcaccatgcagccccagaatgtgcagggcctgagcaaggtgtctgaggagcccagcaccagcagtgatgagcgggccagcctcatcaagaaggagatccacggcagcctgccccacgtggccgagcccagcgtgccctaccggggcaccgtgtttgccatggaccccagaaatggctacatggagccccactaccaccccccccacctgtttcctgccttccacccccctgtgcccattgatgcccggcaccacgagggccgctaccactatgaccccagccccatcccccccctgcacatgaccagcgccctgagcagcagccccacctacccagacctgcccttcatccgcatcagcccccacaggaaccccacagctgccagcgagagccccttcagccccccccacccctacatcaacccctacatggactacatccgcagcctgcacagcagccccagcctgtccatgatcagcgccacccggggcctgagccccacagatgcccctcatgctggggtgtccccagctgagtactaccaccagatggccctgctgaccggccagaggagcccctatgctgacatcatccccagcgctgccacagctggcactggagccatccacatggagtacctgcacgccatggacagcacccgcttcagcagcccccggctgagcgcccggcccagcaggaagaggaccctgagcatcagccccctgagtgaccacagctttgacctgcagaccatgatccgcaccagccccaacagcctggtgaccatcctgaacaacagccgcagcagcagcagcgccagcggcagctatggccacctgagcgccagcgccatcagccctgccctgtccttcacctacagcagcgcccctgtgtccctgcacatgcaccagcagatcctgagccggcagcagagcctgggcagcgccttcggccacagccccccactcatccacccagcccccaccttccccacccagaggcccatccctggcatccccaccgtgctgaaccctgtgcaggtgagcagcggccccagcgagagcagccagaacaagcccaccagcgagagcgctgtgagcagcactggagaccccatgcacaacaagaggagcaagatcaagccagatgaggacctgcccagccctggggcccggggccagcaggagcagcctgagggcaccaccctggtgaaggaggagggggacaaggatgagagcaagcaggagcctgaggtgatctatgagaccaactgccactgggagggctgtgcccgggagtttgacacccaggagcagctggtgcaccacatcaacaatgaccacatccatggagagaagaaggagtttgtgtgccgctggctggactgcagccgggagcagaagcccttcaaggcccagtacatgctggtggtgcacatgaggaggcacactggagagaagccccacaagtgcacctttgagggctgcaccaaggcctacagccggctggagaacctgaagacccacctgcggagccacactggagagaagccctacgtgtgtgagcacgagggctgcaacaaggccttcagcaatgccagtgaccgggccaagcaccagaacagaacccacagcaatgagaagccctacgtgtgcaagatccctggctgcaccaagcgctacacagaccccagcagcctgaggaagcacgtgaagacagtgcacggccctgaggcccacgtgaccaagaagcagagaggagacatccacccccggcccccaccaccccgggacagcggcagccacagccagagccgcagccctggccggcccacccagggcgccctgggggagcagcaggacctgagcaacaccaccagcaagcgggaggagtgcctgcaggtgaagacagtgaaggccgagaagcccatgaccagccagcccagccctgggggccagagcagctgcagcagccagcagagccccatcagcaactacagcaacagcggcctggagctgcccctgacagatggcggcagcatcggggacctgagcgccattgatgagacccccatcatggacagcaccatcagcacagccaccacagccctggccctgcaggccaggagaaatcctgctggcaccaagtggatggagcacgtgaagctggagcggctgaagcaggtgaatggcatgttcccccggctgaaccccatcctgccccccaaggccccagctgtgagccccctgattggaaatggcacccagagcaacaacacctgcagcctgggcggccccatgaccctgctgcccggccgcagtgacctgagcggcgtggatgtgaccatgctgaacatgctgaacagaagagacagcagcgccagcaccatcagcagcgcctacctgagcagccgccgcagcagcggcatcagcccctgcttcagcagccgccgcagcagcgaggccagccaggccgagggccggccccagaatgtgtctgtggccgacagctatgaccccatcagcacagatgccagccgccgcagcagcgaggccagccagagtgatggcctgcccagcctgctgagcctgaccccagcccagcagtaccgcctgaaggccaagtatgctgctgccactggaggccccccacccacccccctgcccaacatggagaggatgagcctgaagacccggctggccctgctgggagatgccctggagcccggggtggccctgccccctgtgcacgccccccggcgctgcagtgatggaggagcccacggctatggaagaagacacctgcagccccatgatgcccctggccacggcgtgagaagagccagtgaccctgtgaggactggaagtgagggcctggccctgccccgggtgccccgcttcagcagcctgagcagctgcaaccccccagccatggccaccagcgctgagaagaggagcctggtgctgcagaactacaccaggcctgagggcggccagagcaggaacttccacagcagcccctgcccccccagcatcacagaaaatgtgaccctggagagcctgaccatggatgctgatgccaacctgaatgatgaggacttcctgcctgatgatgtggtgcagtacctgaacagccagaaccaggccggctatgagcagcacttccccagcgccctgcctgatgacagcaaggtgccccacggccctggggactttgatgcccctggcctgcctgacagccatgctggccagcagttccacgccctggagcagccctgcccagagggcagcaagacagacctgcccatccagtggaatgaggtgagcagcggcagcgctgacctgagcagcagcaagctgaagtgtggccccaggcctgctgtgccccagacccgggccttcggcttctgcaatggcatggtggtgcacccccagaaccccctgcggagcggccctgctgggggctaccagaccctgggggagaacagcaacccctatggaggccctgagcacctgatgctgcacaacagccctggcagcggcaccagcggaaatgccttccacgagcagccctgcaaggccccccagtatggcaactgcctgaaccggcagcctgtggcccctggggccctggatggagcctgtggggccggcatccaggccagcaagctgaagagcacccccatgcagggcagcggcggccagctgaactttggcctgcctgtggccccaaatgaatctgctggctccatggtgaatggcatgcagaaccaggaccctgtgggccagggctacctggcccaccagctgctgggggacagcatgcagcaccctggagctggccggcccggccagcagatgctgggccagatcagcgccaccagccacatcaacatctaccagggccctgagagctgcctgcccggggcccacggcatgggcagccagcccagcagcctggccgtggtgcggggctaccagccctgtgccagctttggaggcagccggcggcaggccatgccccgggacagcctggccctgcagagcggccagctgagtgacaccagccagacctgccgggtgaatggcatcaagatggagatgaagggccagccccaccccctgtgcagcaacctgcagaactacagcggccagttctatgaccagacagtgggcttcagccagcaggacaccaaggccggcagcttcagcatcagtgatgccagctgcctgctgcagggcaccagcgccaagaacagcgagctgctgagccctggggccaaccaggtgaccagcacagtggacagcctggacagccatgacctggagggcgtgcagattgactttgatgccatcattgatgatggagaccacagcagcctgatgtctggggccctgagccccagcatcatccagaacctgagccacagcagcagccggctgaccaccccccgggccagcctgcccttccctgccctgtccatgagcaccaccaacatggccatcggggacatgagcagcctgctgaccagcctggccgaggagagcaagttcctggccgtgatgcagtag

SEQ ID NO: 305892 - DNA, 543 bp, Artificial Sequence
  derived and/or modified sequence
atggaggcccagagccacagcagcaccaccacagagaagaagaaggtggagaacagcatcgtgaagtgcagcaccaggacagatgtgtctgagaaggctgtggccagcagcaccaccagcaatgaagatgagagccctggccagacctaccaccgggagaggagaaatgccatcaccatgcagccccagaatgtgcagggcctgagcaaggtgtctgaggagcccagcaccagcagtgatgagcgggccagcctcatcaagaaggagatccacggcagcctgccccacgtggccgagcccagcgtgccctaccggggcaccgtgtttgccatggaccccagaaatggctacatggagccccactaccaccccccccacctgtttcctgccttccacccccctgtgcccattgatgcccggcaccacgagggccgctaccactatgaccccagccccatcccccccctgcacatgaccagcgccctgagcagcagccccacctacccagacctgcccttcatccgcatcagcccccacaggtag

SEQ ID NO: 305893 - DNA, 4743 bp, Artificial Sequence
  derived and/or modified sequence
atggaggcccagagccacagcagcaccaccaccgagaagaagaaggtggagaatagcatagtgaagtgcagcactcgcacagatgttagcgaaaaggctgtggcatcgtcaaccacctccaacgaagatgagtcacctggccagacataccacagggagagacggaacgctataacaatgcagcctcagaacgtacaggggctatctaaggtgagtgaagagcccagtacaagctccgatgaacgcgcctcattgattaaaaaagagattcacggctccctaccccacgtggccgagccatctgtaccttatcgcgggacggttttcgccatggacccgcgaaatggttacatggagcctcactatcatccgccccatctcttcccagctttccacccacctgtccctatcgatgcaaggcaccatgaaggaaggtaccactacgaccccagccctataccacccctccacatgacttcagccctcagctcttcccctacatacccagatctgccattcatccggattagcccacatcgcaaccctacagcagcctcggaatctccctttagcccgccgcacccgtacataaacccctacatggattacatacgctcactgcacagctctcccagtctgtccatgatcagcgccaccaggggcctgagtcccacagacgctccacacgcaggcgtgagccctgcagagtactaccaccagatggccttgctgactggtcagcgtagcccctatgccgacatcattcccagtgccgcaaccgcaggaacaggcgcaattcacatggaatacctgcacgccatggactccacccgctttagttctccccggctgtctgcacggccctccagaaagcgtacactctccattagcccgctatctgaccacagttttgacctgcagactatgattcgcaccagcccaaacagtctggtgactatcctcaacaactcgcggagcagttcctccgctagcggaagctacgggcatctgtctgcgtctgcgatctcccccgctttgagctttacgtactcatctgcccccgtgagcctgcacatgcaccagcaaatactctctcgccaacaaagcttaggcagcgcatttggccactcccctccccttatccaccccgcccccacattccccactcagcgtcccatccctggaattcctaccgtgcttaacccggtgcaggtgtctagtgggccttcagaatcctctcaaaataagccaacttcggaaagcgccgtaagctctacaggtgaccccatgcataataaacgctccaagatcaagccagatgaggatcttccatcccctggagctagaggtcagcaggaacagccagagggaaccaccctggttaaggaagagggagacaaggatgagtcaaagcaagagccagaggtaatttacgagacaaattgtcactgggaaggatgcgcgcgcgagttcgacactcaagagcagctggtgcaccatattaacaatgaccacatacacggcgagaagaaagagtttgtgtgccgctggctcgattgttcaagagagcagaagccattcaaagcacagtatatgctggtcgtccacatgcgacgtcacaccggggagaaaccccacaaatgcactttcgagggatgcactaaggcgtattctaggctggagaacctgaaaactcatctccgcagccacacgggagaaaagccttatgtctgtgagcatgaaggctgcaacaaggccttttccaacgcctccgatcgcgccaaacaccagaaccgtactcatagcaatgagaagccatacgtttgcaagatacctggatgcacaaaaagatataccgatccctcgtccctcagaaaacacgtaaaaaccgtgcacggccccgaagcacacgtaactaaaaagcagcggggcgatatacatccaaggcccccgccgccacgagatagcggctcacacagccagagccgctctcccgggcggcccacccagggagcactgggagagcaacaagacttatccaatactactagtaagcgagaagaatgcctgcaggtcaaaaccgtgaaggcggagaaacccatgacctctcagccttcgcccggtggccagagtagctgttcttcccaacagagccccatatctaattactcgaatagtgggctggagctcccgctaaccgacggaggcagcattggcgaccttagcgcaattgatgagacacccattatggatagcactatcagtaccgcaaccacggccctagctctacaggcacgcagaaacccagcagggacaaaatggatggagcatgtcaagttggaaaggctaaagcaggtgaacggcatgtttcctcgacttaatcccattctgcccccaaaagctcccgcagtgagccctctgatcggcaatggaacgcagtctaataacacctgttctctaggcgggcccatgactcttctgccagggcgttcagacctgtctggagttgacgtgacgatgctgaatatgctgaacagaagggattcctccgcctctacaatatcctcagcctatctcagtagtagaaggtcctctggcattagcccctgttttagttcccggagaagctctgaggcttcgcaagccgagggtagaccacaaaatgtgtccgtggctgactcatatgatccgatttccacggacgcaagccgacggagcagtgaagcatcacaaagcgacgggctgccctctcttctttccctgaccccagcgcaacagtaccggctcaaggctaaatatgcagcagcgactggtggacctccccccacccccctgcctaacatggaaaggatgagtctcaaaactcggttggccttgttgggcgacgctttggagccaggtgtggccctaccccctgtgcacgctccccgtcgctgtagcgacggcggcgcccatggctatggcagaaggcatttgcagccccatgacgcacctgggcatggggtccgacgcgcttccgacccagttagaacagggagcgagggactggcccttccgcgagtacctcggttcagtagcctttcttcctgtaatccccccgcaatggccacatctgctgaaaaaagatctttggtgctgcagaattacacccgccctgagggtgggcagagccgaaattttcatagcagtccatgcccaccatccatcacagagaatgtcacactggagtcacttaccatggacgcggatgcaaatctcaacgacgaagactttctgcctgatgatgtggttcaatacctcaactcccagaatcaggctggttatgagcagcatttcccctcagcattacccgatgattcaaaggtgccccatggcccaggggactttgatgccccaggcctccccgactctcatgccggccaacagttccatgctctggagcaaccgtgtcccgaggggagcaagaccgacctacctatccaatggaacgaagtgtcgtccggttcagcggatttgagttcgtctaagctgaagtgcgggccccgccccgccgtgccccagacaagggctttcggcttctgtaacggaatggtggtgcacccacaaaaccctttacggtcaggccctgccggtggttaccaaaccctgggtgagaactccaacccatatggggggcctgagcacctaatgctccacaactcaccaggatcagggacaagcgggaacgctttccacgagcagccctgcaaggctccccagtacggcaattgtctgaacagacagcctgtggctcccggtgctcttgatggggcatgcggtgccgggatccaagcgtctaaacttaagtccacccctatgcagggatctggaggacagctcaacttcggcttaccagtagcacctaatgagtccgctggctcaatggttaacggtatgcagaaccaagatcccgtcggccagggctaccttgcccaccagcttcttggggattccatgcagcatcccggtgcagggcggcccgggcaacagatgttaggtcagatctccgctacctctcacatcaatatatatcagggcccagagagctgtttgccaggggcacatggtatggggtcccagcccagtagtctggccgttgtgaggggctatcagccttgtgcaagtttcggtggtagtcggagacaggccatgcctagggactcactagccctgcagagtggacagctatccgatacttcacagacctgtagggtcaacggcatcaaaatggaaatgaagggacagccccaccctttgtgttcaaacctacagaactactccggccagttctatgaccagaccgtgggattttcacagcaggacacaaaagccggaagtttcagcatatctgatgcatcctgcctgctgcagggtacctcagccaagaatagtgaactgttgtcccccggagcaaaccaagtcacctcgacggttgatagtcttgattcccacgacctggagggggttcaaatagatttcgatgccatcatcgatgacggcgatcactcctctctgatgtctggcgccctttccccatcaatcattcaaaacctgtcccactcaagttctcgactcaccaccccacgcgcaagcctgccctttcccgccctttccatgtctacaacgaacatggctatcggagatatgtccagccttttaacgagcctggccgaggaatccaaattcctggcagtgatgcaatag

SEQ ID NO: 305894 - DNA, 543 bp, Artificial Sequence
  derived and/or modified sequence
atggaggcccagagccacagcagcaccaccaccgagaagaagaaggtggagaatagcatagtcaagtgttcaactaggaccgacgtgagcgagaaagctgtggcatcttcgacgacctcaaacgaagatgagtcacctggacagacataccatcgggagcggcgcaatgctatcactatgcagccacaaaacgtacaggggctgagtaaagtgagcgaggagccgtccacttcctctgacgaaagggctagtctgattaagaaagagatacatggctccctgccacacgttgctgagcctagcgttccttaccggggaacggtcttcgctatggatccgcgaaacggttacatggagccgcactatcatcctcctcacctttttccggcgttccatccaccagtgcccattgatgcgaggcatcacgagggccggtatcattatgatccgtcacccattcctccgttacatatgactagtgcactgtcctcttcaccgacttatccagaccttcctttcatcagaatttcgccacataggtag

SEQ ID NO: 305895 - DNA, 4742 bp, Artificial Sequence
  derived and/or modified sequence
atggaggctcagtcgcatagctcaaccacaactgaaaagaagaaggtggagaactctattgtgaaatgctctactcggactgacgtctccgaaaaagcagtcgcatcatccactacaagtaacgaggacgagtccccaggtcagacttatcaccgcgaaagacggaacgctatcaccatgcagccacagaatgtgcagggactgtccaaagtgtctgaggaaccgtccacatcctctgacgagagagcttctctgatcaagaaggagattcatggaagcctgccccacgttgcggagccctcagtgccttaccgtggcacggtattcgccatggatcctagaaacgggtatatggagccacattaccatcccccacatctattccccgcattccatccacctgtgccgattgacgctagacatcatgaggggagataccattacgatccaagtccgatcccaccgttgcatatgacctctgcactgtccagctctccaacctaccctgatttaccttttattaggatttctccacataggaatccaacggccgcatccgagtcgccttttagccctccccacccctatattaacccctacatggactatatcaggtcattgcatagcagtccgtccttaagtatgatcagcgctaccagagggttgtctcccacggacgctccgcatgccggtgttagtcccgcagagtactaccaccagatggcgctgttaacaggccagcggtcaccatacgctgatatcataccatctgcagccaccgctgggaccggtgctatccatatggaatatctgcatgccatggattctacccggttctcttcacctcggctatcagcacggccttccagaaagcgaacacttagtatctctcctttgagcgaccactcttttgaccttcaaaccatgatacggacctcccctaacagtctggtgacaatcctcaacaactcccgatcatctagctctgctagcggttcctacggtcatctctcagctagcgctatctcccctgctctcagctttacatattccagcgcacctgtgagtctccacatgcatcagcagatactatcccgccagcagagcctagggagcgccttcgggcactctccccctctgatccatcccgctcctaccttcccaacccaaagaccaattccaggtatacccactgtgctcaatcccgtgcaggtgtccagcggtccctcggagagttctcagaacaaaccaacttccgaatcagcagtgtcatcaactggagatccaatgcacaataagcggtcaaagatcaaacccgacgaggacctgccctcccccggtgcccgtggccagcaggagcagcccgaaggcactacccttgtgaaagaggagggggacaaggacgagagcaagcaggaacccgaagtaatttacgagactaattgtcactgggagggttgtgcccgagaatttgatacacaggaacaactggtgcaccacatcaataatgaccacattcacggggagaaaaaggagttcgtctgccggtggttggactgtagcagagagcaaaagcctttcaaggcacagtacatgctggttgtccacatgcgccgtcacacgggcgagaagccgcataagtgcaccttcgaagggtgtacgaaggcatactccagacttgaaaatctgaaaacccacctcagaagtcacaccggcgagaagccatacgtgtgcgagcatgagggatgcaacaaagcattctccaacgcctctgatcgcgctaaacatcagaaccggactcattccaacgagaaaccatacgtttgcaaaatcccaggatgcaccaagagatatactgatcccagtagcctcaggaagcacgttaaaaccgtccacggccctgaggcacacgtgacgaagaaacagcgcggagatattcatccacggccaccccctcctagagactctggatcacatagtcagagccgttcgcctggcagacctacccagggggctctaggcgaacagcaggatctgtcaaataccacctctaagcgagaggaatgcttgcaggtgaagaccgtaaaagctgagaagccaatgacttctcaaccgtcacctggaggccagtccagttgttcgagtcaacaatccccaattagcaactactcaaacagcggcctggaactcccgttgaccgatggcggatccattggcgacctctccgcaatcgatgaaacaccaattatggattctaccatctcaaccgctacgaccgcactggctctccaggcaaggcgaaatcccgctgggacaaagtggatggaacacgtgaaacttgaacgactgaaacaggttaacgggatgttcccaagattgaaccccatattgcccccaaaggcaccagcagtgtccccgctgattggcaacggcacgcagagtaacaatacatgctcactgggcggaccgatgaccctcctacctgggaggtctgacctgtccggcgtcgatgtgacaatgctgaacatgctgaatcggcgtgacagtagtgcgagcactatttcaagcgcctacctgtcatcacggagaagtagtggaatcagcccatgttttagtagtagaaggtccagcgaggcatctcaggctgaagggcgaccacagaacgttagcgtggctgattcatatgatcccatctccactgatgcctctagacgcagctcggaggcctctcagagtgacggactcccctccctactgagcttaactccagcccagcagtacagactgaaagctaaatacgccgcagccacagggggtccgccaccaacccctctgcctaacatggaacggatgtccctgaagactagattggctttgttgggggatgcgctggagccaggcgtggcgctcccaccagtccacgcccctcgcagatgctcagacggcggtgcccatggttatggcaggcgccatttgcaaccacatgatgcccctggccacggcgtccggagggcctccgatcccgtacgcacggggtctgaagggctagccttgccacgcgtgcctagattcagttcattatctagttgcaacccacctgcaatggccacctcggctgagaagcggagtctggtcttgcagaattatactaggccagagggtggacagtctagaaatttccattccagtccatgtccgccaagtatcacagagaacgtaacccttgaatctcttactatggatgccgacgcaaacctgaatgacgaagattttttgcccgatgacgtggtgcagtacctaaatagtcagaaccaagccggatacgagcagcactttccaagtgctctgcctgatgattcaaaagtgccccatgggccaggtgactttgacgctccagggctgcctgatagccacgctggccaacagttccacgcacttgaacagccttgtcctgaagggagtaaaacggacctaccgatccagtggaatgaggtgagctcaggatctgccgatttgtccagctccaagctgaagtgtggcccacgaccagccgtccctcagacacgcgcttttggcttctgtaatggcatggtggtgcacccgcagaacccgctccgcagtggccctgctggcggataccagactctgggggagaattctaatccctacgggggaccagagcatctcatgcttcataactcacctggaagcggcaccagtggaaacgcattccatgagcaaccctgcaaggctccgcagtatggcaactgtcttaaccggcagccggttgccccaggagcactggacggcgcttgcggcgcaggcattcaggcttccaagctgaagtccacccctatgcagggtagcggtggtcagctgaatttcgggctacctgtcgctcccaacgaatccgccggaagtatggtgaacgggatgcaaaaccaggaccccgtaggtcaggggtacctggcacatcagttgctgggagattccatgcagcatcccggagctgggagaccaggacagcaaatgctgggccagatcagtgccacctcacacatcaacatctaccaaggacctgaaagctgcctgccaggtgcacatggaatgggaagccagccttctagtctcgcggtggtgcgcggatatcagccgtgtgcctcattcggcggatccaggagacaggctatgccaagagactcattggccctgcagagcgggcagctgtccgatacctctcaaacgtgtagagtcaatggcatcaagatggagatgaagggacagccacatccgctgtgcagcaatctccagaactactcaggacagttctacgaccagaccgtcgggttttcgcagcaggacactaaagccggaagtttctcaattagcgatgcctcctgcctgcttcagggcaccagtgccaaaaatagtgagctgctttctccaggagccaatcaggtaactagcactgtggattctctcgattcacacgatttggaaggggtccagatcgatttcgatgccattatcgacgatggagatcattcctccctcatgagtggcgcactcagcccttccattattcagaatctctcacactcaagttcccgattaacaacgcccagggcctctctgcctttccccgcactgtcaatgtcaaccactaacatggcaattggagacatgagtagcctactcactagtctcgcagaagaatccaaatttctggcagtcatgcagta

SEQ ID NO: 305896 - DNA, 543 bp, Artificial Sequence
  derived and/or modified sequence
atggaagctcaatctcactcatctaccacaacagagaaaaagaaggtggagaattccatcgtcaaatgcagtacaagaacagatgtaagtgagaaggccgtcgcatcttctaccacgtctaacgaggacgagtcccccggtcagacttaccacagggagagacgaaacgctattacgatgcaaccccaaaatgtccagggtctgtccaaggtgtcggaagagccatctacatcatcagacgaacgtgcgtctcttatcaagaaagagattcatggcagtttgcctcatgttgcggaaccttcggtcccatacaggggcacagtattcgcgatggacccaaggaacggctacatggagccccattatcatccacctcacctgttccctgctttccatccccctgtgcccatcgatgctagacatcatgagggtaggtaccattacgacccttcaccaattcctccactacacatgacgagtgcattaagctctagtccaacatatccagacctccccttcattcggattagtcctcataggtag

SEQ ID NO: 305897 - DNA, 4743 bp, Artificial Sequence
  derived and/or modified sequence
atggaggcccagagccacagcagcaccaccaccgagaagaagaaggtggagaacagcatcgtgaagtgcagcaccagaaccgacgtgagcgagaaggccgtggccagcagcaccaccagcaacgaggacgagagccccggccagacctaccacagagagagaagaaacgccatcaccatgcagccccagaacgtgcagggcctgagcaaggtgagcgaggagcccagcaccagcagcgacgagagagccagcctgatcaagaaggagatccacggcagcctgccccacgtggccgagcccagcgtgccctacagaggcaccgtgttcgccatggaccccagaaacggctacatggagccccactaccaccccccccacctgttccccgccttccacccccccgtgcccatcgacgccagacaccacgagggcagataccactacgaccccagccccatcccccccctgcacatgaccagcgccctgagcagcagccccacctaccccgacctgcccttcatcagaatcagcccccacagaaaccccaccgccgccagcgagagccccttcagccccccccacccctacatcaacccctacatggactacatcagaagcctgcacagcagccccagcctgagcatgatcagcgccaccagaggcctgagccccaccgacgccccccacgccggcgtgagccccgccgagtactaccaccagatggccctgctgaccggccagagaagcccctacgccgacatcatccccagcgccgccaccgccggcaccggcgccatccacatggagtacctgcacgccatggacagcaccagattcagcagccccagactgagcgccagacccagcagaaagagaaccctgagcatcagccccctgagcgaccacagcttcgacctgcagaccatgatcagaaccagccccaacagcctggtgaccatcctgaacaacagcagaagcagcagcagcgccagcggcagctacggccacctgagcgccagcgccatcagccccgccctgagcttcacctacagcagcgcccccgtgagcctgcacatgcaccagcagatcctgagcagacagcagagcctgggcagcgccttcggccacagcccccccctgatccaccccgcccccaccttccccacccagagacccatccccggcatccccaccgtgctgaaccccgtgcaggtgagcagcggccccagcgagagcagccagaacaagcccaccagcgagagcgccgtgagcagcaccggcgaccccatgcacaacaagagaagcaagatcaagcccgacgaggacctgcccagccccggcgccagaggccagcaggagcagcccgagggcaccaccctggtgaaggaggagggcgacaaggacgagagcaagcaggagcccgaggtgatctacgagaccaactgccactgggagggctgcgccagagagttcgacacccaggagcagctggtgcaccacatcaacaacgaccacatccacggcgagaagaaggagttcgtgtgcagatggctggactgcagcagagagcagaagcccttcaaggcccagtacatgctggtggtgcacatgagaagacacaccggcgagaagccccacaagtgcaccttcgagggctgcaccaaggcctacagcagactggagaacctgaagacccacctgagaagccacaccggcgagaagccctacgtgtgcgagcacgagggctgcaacaaggccttcagcaacgccagcgacagagccaagcaccagaacagaacccacagcaacgagaagccctacgtgtgcaagatccccggctgcaccaagagatacaccgaccccagcagcctgagaaagcacgtgaagaccgtgcacggccccgaggcccacgtgaccaagaagcagagaggcgacatccaccccagaccccccccccccagagacagcggcagccacagccagagcagaagccccggcagacccacccagggcgccctgggcgagcagcaggacctgagcaacaccaccagcaagagagaggagtgcctgcaggtgaagaccgtgaaggccgagaagcccatgaccagccagcccagccccggcggccagagcagctgcagcagccagcagagccccatcagcaactacagcaacagcggcctggagctgcccctgaccgacggcggcagcatcggcgacctgagcgccatcgacgagacccccatcatggacagcaccatcagcaccgccaccaccgccctggccctgcaggccagaagaaaccccgccggcaccaagtggatggagcacgtgaagctggagagactgaagcaggtgaacggcatgttccccagactgaaccccatcctgccccccaaggcccccgccgtgagccccctgatcggcaacggcacccagagcaacaacacctgcagcctgggcggccccatgaccctgctgcccggcagaagcgacctgagcggcgtggacgtgaccatgctgaacatgctgaacagaagagacagcagcgccagcaccatcagcagcgcctacctgagcagcagaagaagcagcggcatcagcccctgcttcagcagcagaagaagcagcgaggccagccaggccgagggcagaccccagaacgtgagcgtggccgacagctacgaccccatcagcaccgacgccagcagaagaagcagcgaggccagccagagcgacggcctgcccagcctgctgagcctgacccccgcccagcagtacagactgaaggccaagtacgccgccgccaccggcggccccccccccacccccctgcccaacatggagagaatgagcctgaagaccagactggccctgctgggcgacgccctggagcccggcgtggccctgccccccgtgcacgcccccagaagatgcagcgacggcggcgcccacggctacggcagaagacacctgcagccccacgacgcccccggccacggcgtgagaagagccagcgaccccgtgagaaccggcagcgagggcctggccctgcccagagtgcccagattcagcagcctgagcagctgcaacccccccgccatggccaccagcgccgagaagagaagcctggtgctgcagaactacaccagacccgagggcggccagagcagaaacttccacagcagcccctgcccccccagcatcaccgagaacgtgaccctggagagcctgaccatggacgccgacgccaacctgaacgacgaggacttcctgcccgacgacgtggtgcagtacctgaacagccagaaccaggccggctacgagcagcacttccccagcgccctgcccgacgacagcaaggtgccccacggccccggcgacttcgacgcccccggcctgcccgacagccacgccggccagcagttccacgccctggagcagccctgccccgagggcagcaagaccgacctgcccatccagtggaacgaggtgagcagcggcagcgccgacctgagcagcagcaagctgaagtgcggccccagacccgccgtgccccagaccagagccttcggcttctgcaacggcatggtggtgcacccccagaaccccctgagaagcggccccgccggcggctaccagaccctgggcgagaacagcaacccctacggcggccccgagcacctgatgctgcacaacagccccggcagcggcaccagcggcaacgccttccacgagcagccctgcaaggccccccagtacggcaactgcctgaacagacagcccgtggcccccggcgccctggacggcgcctgcggcgccggcatccaggccagcaagctgaagagcacccccatgcagggcagcggcggccagctgaacttcggcctgcccgtggcccccaacgagagcgccggcagcatggtgaacggcatgcagaaccaggaccccgtgggccagggctacctggcccaccagctgctgggcgacagcatgcagcaccccggcgccggcagacccggccagcagatgctgggccagatcagcgccaccagccacatcaacatctaccagggccccgagagctgcctgcccggcgcccacggcatgggcagccagcccagcagcctggccgtggtgagaggctaccagccctgcgccagcttcggcggcagcagaagacaggccatgcccagagacagcctggccctgcagagcggccagctgagcgacaccagccagacctgcagagtgaacggcatcaagatggagatgaagggccagccccaccccctgtgcagcaacctgcagaactacagcggccagttctacgaccagaccgtgggcttcagccagcaggacaccaaggccggcagcttcagcatcagcgacgccagctgcctgctgcagggcaccagcgccaagaacagcgagctgctgagccccggcgccaaccaggtgaccagcaccgtggacagcctggacagccacgacctggagggcgtgcagatcgacttcgacgccatcatcgacgacggcgaccacagcagcctgatgagcggcgccctgagccccagcatcatccagaacctgagccacagcagcagcagactgaccacccccagagccagcctgcccttccccgccctgagcatgagcaccaccaacatggccatcggcgacatgagcagcctgctgaccagcctggccgaggagagcaagttcctggccgtgatgcagtag

SEQ ID NO: 305898 - DNA, 543 bp, Artificial Sequence
  derived and/or modified sequence
atggaggcccagagccacagcagcaccaccaccgagaagaagaaggtggagaacagcatcgtgaagtgcagcaccagaaccgacgtgagcgagaaggccgtggccagcagcaccaccagcaacgaggacgagagccccggccagacctaccacagagagagaagaaacgccatcaccatgcagccccagaacgtgcagggcctgagcaaggtgagcgaggagcccagcaccagcagcgacgagagagccagcctgatcaagaaggagatccacggcagcctgccccacgtggccgagcccagcgtgccctacagaggcaccgtgttcgccatggaccccagaaacggctacatggagccccactaccaccccccccacctgttccccgccttccacccccccgtgcccatcgacgccagacaccacgagggcagataccactacgaccccagccccatcccccccctgcacatgaccagcgccctgagcagcagccccacctaccccgacctgcccttcatcagaatcagcccccacagatag

SEQ ID NO: 305899 - DNA, 372 bp, Artificial Sequence
  derived and/or modified sequence
atgcagagcgagaagccccagggcctgttcctgcagctgaaccccaatgcttcatctacagagactcagctgctcgtgcctgccctcgagtcacgtgatactctgccgcccactcactgtttcatggccggcacagagtcccccctagggaatccttggcctctgagtctgccccccccatgctggaccggatgcgtgcttcccgccccccgcggacagcggaagcctggacctctcggactgagtatctttataagtctggggaacaaacgtcacaggtctggaaaccacgtggtccgggaatctgaacagcctctgtcccagggcaatccgcatcagggttggggacctgatactaggaaaggccggtag

SEQ ID NO: 305900 - DNA, 3218 bp, Artificial Sequence
  derived and/or modified sequence
actggggcttccttccgtctcgctcggagtttccctctgcgttcgctccgcgctgctggaggctgtcgtcccaatgctccccaaacggcggcgagcgcgggtcgggtcccctagcggcgatgccgcttcctccacgccgccctcgacgcgcttcccgggagtcgccatctacctggtcgagcctcgcatgggtcgcagccgccgggccttcctcacaggcctggcgcgctccaaaggcttccgcgtccttgacgcctgcagctccgaagcgacacatgttgtgatggaagagacctcagcagaggaggccgtcagctggcaggagcgcaggatggcagctgctcccccgggttgcacccccccagctctgctggacataagctggttaacagagagcctgggagctgggcagcctgtacctgtggagtgccggcaccgcctggaggtggctgggccaaggaaggggcctctgagcccagcatggatgcctgcctatgcctgccagcgccctacgcccctcacacaccacaacactggcctctccgaggctctggagatactggccgaggcagcaggctttgaaggcagtgagggccgcctcctcaccttctgcagagcagcctcggtgctcaaggcccttcccagccctgtcacaaccctgagccagctgcaggggcttccccactttggagaacactcctctagggttgtccaggagctgctggagcatggagtgtgtgaggaggtggagagagttcggcgctcagagaggtaccagaccatgaaggtgcgcagggcagggctcggacctaccccaggaatgtcctgccctgggaatgacaacacagtccacaccatgcacggggaggcaaacaggggcagctgacccagcccaggggtcagagaaggtcttgccgaggaagtggcagctaagctgatacctgatatgcacaaggcagccaagtggagacaggctggagtacagtggtgcgatcacagctcacggcagccttgacttcctgggctcaaaccatcctcccacctcagtctctggagtagctgggactacaggcatgtgccaccacaccagctcttcacccagatcttcggggtcggtgtgaagactgctgaccggtggtaccgggaaggactgcgaaccttagatgacctccgagagcagccccagaaactaacccaacagcagaaagcggggctccagcaccaccaggacctgagcaccccagtcctgcggtccgatgtagatgccctgcagcaggtggtggaggaagctgtggggcaggccctgcctggggccaccgtcacgctgaccggcggcttccgcaggtaagaaggcccgacgtgcccctctggcttggcttcagacccctccccagtgaagggacctgagtcggggaccctgaagcgggcccactcgttggaagggatgtggcctggggctggagtgagcaggccgtgtccctgagtcagagtcagactgacgccctcagggggaagttgcagggccatgacgtggacttcctcatcacccaccccaaggagggtcaggaggcggggctgctgcctagagtgatgtgccgcctgcaggaccaggtgagggcctccctgctccccaagagccaccgctggccaatgccactgcctcctgctctctccacaccaccggatggtctcagccacgcccgcctctccccacagggcctcatcctgtaccaccagcaccagcacagctgctgtgagtcccctacccgcctggcccaacagagccacatggacgcttttgagagaagtttctgcattttccgcctaccacaacctccaggggctgctgtggggggatccacgaggccctgcccatcctggaaggccgtgagagtggacttggtagttgcacccgtcagccagttccctttcgccctgctcggttggactggctccaagcttttccagcgggagctgcgccgcttcagccggaaggagaagggcctgtggctgaacagccatgggctgtttgacccggagcagggaagcagcagtggcaagactcctaggtcacggaagtcctgcttctgttgcagaagacatttttccaagcggcttcagaggaagacatcttcagacacctgggccttgagtaccttcctccagagcagagaaacgcctgagcctgcctgtgtcccccacttccactcaggaaattgggctgcccccaacctggccactgaatgtctccaggcagatatgctgccccctgacccccaccttcacccctccccgccaaggcctggctcttccggaggtcaattgtgcctgcaggatcagttgagcccctgctggtgtgctgcagggtgtgatgaggtgggagccctcagtgccagcctcatcactgtgtgaccctgggtctgctcttagcctccccatggctcacgttcctgccctggatgggatgtgagtggggcccacatcgtggagctgtggtggggcctgcagtcatgaatggcaagtggtccctgatgtgcagtgtctcattagttgcactgcagttaactgtggctcctgcagggcaccctgcccagaatgcccagaagagaaccatgcatacctgcactgcatttgagagccatgagctggaggctgtggttcgtgccagcaaggagcctactgtctggtgtgctgtaggcatctggagagggagagggcctgggtaggagctgggaggaagataattttcaactatggggcttcagtactgcagcgccccgagccaggctctgtgcttctgcctttaaggcctgttctcagcacaatgtctcaaaaataggtcatatcctgccactcccgtcgcagagccctttaatggttccaaaccctaagtccacacatagcccctggctctggcatctctccagccccactggccccgagctgcttgactcaccggcttcctatttgatgcacccaggcccccttgtggccaactccctccccttctcactgaggcagaagcactgaggtgggctggacatgggtgccctccacgtccctcatatccccaggcacactctggcctcaggttttgccctggccatgtcatctacctggagtgggccctccccttcttcaggccttgaatcaaaagccactttgttaggcgaggatttcccagaccactcatcacattaaaaaatattttgaaaaca

SEQ ID NO: 305901 - DNA, 813 bp, Artificial Sequence
  derived and/or modified sequence
atgctgccaaagcggcggcgtgctagggtgggctctccatccggtgacgcagctagctcaacgcctccctcaacgagatttcctggggttgcaatatatctggttgaaccaagaatgggccggtccagaagggcctttctgaccggcctggcaaggtctaagggttttcgagtcctcgacgcttgttcaagcgaagccactcacgtggtgatggaggaaaccagtgcagaggaggcggtttcctggcaggaaaggcgaatggccgcagctcctccgggatgcaccccgcctgccctgttggatatcagctggctaaccgaatcactgggtgctggacagcctgtgcccgttgaatgccgacataggctcgaagttgccggtccacgcaagggacctctgtctcccgcctggatgcctgcctatgcctgccaaagacccacccctctgactcaccacaatactggactgtccgaagcgctggagattctggccgaggccgccggcttcgagggctccgaggggaggctgctgacattttgccgcgccgcaagcgtgctgaaggcactccccagtccagtgacaactctgtcacagctgcagggcctgccacacttcggtgagcactccagcagagtggtgcaggaacttctggaacatggtgtttgcgaagaagtggagagggtacgccgctctgagcgataccaaacaatgaaagtaaggagagccggtcttggccctacacccggaatgagctgtcctgggaacgacaacaccgtccacaccatgcatggagaggctaaccggggaagctag

SEQ ID NO: 305902 - DNA, 813 bp, Artificial Sequence
  derived and/or modified sequence
atgctgcccaagagaagaagagcccgggtgggcagccccagcggagatgctgccagcagcaccccacccagcacccgcttccctggggtggccatctacctggtggagcccaggatgggccgcagcagaagagccttcctgaccggcctggcccggagcaagggcttccgggtgctggatgcctgcagcagcgaggccacccacgtggtgatggaggagaccagcgctgaggaggccgtgtcctggcaggagaggaggatggctgctgcccctcctggctgcaccccaccagccctgctggacatctcctggctgacagagagcctgggcgccggccagcctgtgcctgtggagtgccgccaccggctggaggtggccggccccaggaagggccccctgagccctgcctggatgcctgcctatgcctgccagaggcccacccccctgacccaccacaacacaggcctgtctgaggccctggagatcctggccgaggccgccggctttgagggcagcgagggccgcctgctgaccttctgccgggccgcctctgtgctgaaggccctgcccagccctgtgaccaccctgagccagctgcagggcctgccccactttggagagcacagcagccgggtggtgcaggagctgctggagcacggcgtgtgtgaggaggtggagcgggtgagaagaagtgagcgctaccagaccatgaaggtgcggcgggccggcctgggccccaccccaggcatgagctgccctggaaatgacaacacagtgcacaccatgcatggagaggccaacagaggcagctag

SEQ ID NO: 305903 - DNA, 813 bp, Artificial Sequence
  derived and/or modified sequence
atgctgcccaagcggcggcgggcccgggtgggcagccccagcggcgacgctgcttcctctacaccgccctccactaggtttcctggcgttgcaatttacctggtcgagccaaggatgggccggtctcgcagggcgttcctgacagggcttgctcgatccaaggggtttagggtactagacgcatgctcttctgaagcaacccatgtggttatggaagaaacgtccgccgaggaagccgtcagttggcaggagcggaggatggccgctgcgcccccgggttgtacgcctcctgccctccttgatatcagttggcttaccgagagtttgggagccggacagcccgtaccggttgagtgtcgacatcgacttgaagtggctggcccaaggaaaggccctctcagtcccgcttggatgccagcatacgcatgccagcggcctactccccttacccatcataatactggcctgagcgaggccctcgagattctggcagaggccgcaggattcgaaggcagcgaaggaagactcctaaccttctgccgcgccgcatcggtgctgaaagctcttccaagtccagtcactacactgagccaactgcaggggctgccgcactttggagagcactccagcagagtggtgcaggaattactggagcacggcgtgtgtgaggaagtagagagagttcgtagaagtgagcgctaccagactatgaaggtccgcagagcaggacttggacctacacctggaatgtcatgtccaggaaatgacaacactgttcatactatgcacggagaggcgaatcggggatcttag

SEQ ID NO: 305904 - DNA, 813 bp, Artificial Sequence
  derived and/or modified sequence
atgctccctaagcgtcggagggccagagtaggcagcccttcaggcgacgctgcctccagcactcctcctagcaccaggttcccgggagtcgctatctacctggttgagccaaggatgggacggtcccggagggcgtttctcacaggccttgctcggagcaaggggttccgggtactcgacgcttgttcatccgaggcgacccatgtcgttatggaagagactagtgccgaagaagctgtgtcctggcaggagaggcggatggcagcagcaccccctggatgtactcccccagcccttctggatatctcttggctcaccgaatctttgggggcaggccagcctgtgccggtggaatgccggcacagactggaggtggctgggccacgtaagggcccactcagccctgcgtggatgcctgcatatgcctgccagcgtcccacacctctgacccaccacaacacaggactgtcagaggccctagaaatattggcggaggctgctggcttcgaaggtagtgagggtaggctccttacattttgccgcgcagcatctgttctgaaggccctgcctagccctgtgacgactttgtcccagctgcaggggctgcctcactttggtgaacattcatccagagtggttcaggaactattggagcacggagtgtgcgaagaggtggaaagggttcgaagatctgagaggtatcaaactatgaaagtgcggagggcgggtctgggcccaactccgggaatgagttgccccggtaacgataatactgttcataccatgcacggagaggcgaatcgcggttcatag

SEQ ID NO: 305905 - DNA, 813 bp, Artificial Sequence
  derived and/or modified sequence
atgctgcccaagagaagaagagccagagtgggcagccccagcggcgacgccgccagcagcaccccccccagcaccagattccccggcgtggccatctacctggtggagcccagaatgggcagaagcagaagagccttcctgaccggcctggccagaagcaagggcttcagagtgctggacgcctgcagcagcgaggccacccacgtggtgatggaggagaccagcgccgaggaggccgtgagctggcaggagagaagaatggccgccgccccccccggctgcaccccccccgccctgctggacatcagctggctgaccgagagcctgggcgccggccagcccgtgcccgtggagtgcagacacagactggaggtggccggccccagaaagggccccctgagccccgcctggatgcccgcctacgcctgccagagacccacccccctgacccaccacaacaccggcctgagcgaggccctggagatcctggccgaggccgccggcttcgagggcagcgagggcagactgctgaccttctgcagagccgccagcgtgctgaaggccctgcccagccccgtgaccaccctgagccagctgcagggcctgccccacttcggcgagcacagcagcagagtggtgcaggagctgctggagcacggcgtgtgcgaggaggtggagagagtgagaagaagcgagagataccagaccatgaaggtgagaagagccggcctgggccccacccccggcatgagctgccccggcaacgacaacaccgtgcacaccatgcacggcgaggccaacagaggcagctag

SEQ ID NO: 305906 - DNA, 480 bp, Artificial Sequence
  derived and/or modified sequence
atgctccccaaaaggcgtcgcgcaagagttggcagtccttctggggacgcagcttccagtacacccccgagcaccagatttcccggtgtggccatttacctggtagagccccggatgggcagatctcgaagagcattccttaccggtctggcccgctctaaaggttttagggtcctcgatgcttgcagctccgaagccacccacgtggtaatggaagaaacctccgcagaagaagctgtgagttggcaagaacgcaggatggccgcagcacctcctgggtgtacacccccagccctcctcgacatctcatggctgactgagagccttggcgcaggtcagcctgtgccagttgaatgtcgtcatagactagaggaggcactggagatcctggctgaagcagcagggtttgagggcagcgaaggaagactccttactttctgtcgcgccgcgtccgtgttaaaagcattgccctccccgtag

SEQ ID NO: 305907 - DNA, 729 bp, Artificial Sequence
  derived and/or modified sequence
atgctgcctaagaggcgccgcgcccgagtaggcagcccatcaggtgacgcagcctcttccactccccctagcacgagattcccgggggtggccatttatctggtggagccacggatgggccgctctagacgcgccttcctcaccggactcgcccggagtaaggggttcagagtcttggacgcgtgttcttcagaggcaacacacgtcgtgatggaggagaccagtgccgaggaggccgtttcttggcaggaacgccgcatggccgcggcacctcctggatgtactccacctgctttgctggacatttcttggctgacagagtcacttggcgctggtcagccagtaccagtagagtgtaggcacaggttagaagtggccggcccaaggaagggtccacttagtcccgcttggatgccggcctacgcttgtcagagacctacgccccttacccatcataatacgggactcagcgaggccctcgaaattttagccgaggcagcgggcttcgaaggttccgaggggagattactcactttctgtcgcgctgcaagcgttctgaaagcactgcctagcccagttacaaccctctctcaactgcagggccttccgcatttcggcgaacacagtagcagagtggtacaggagcttctagaacatggagtgtgtgaggaggtggaaagagttcggcgcagtgagtcctcttccccgaggagttcagggagtgtgtag

SEQ ID NO: 305908 - DNA, 480 bp, Artificial Sequence
  derived and/or modified sequence
atgctgcccaagagaagaagagcccgggtgggcagccccagcggagatgctgccagcagcaccccacccagcacccgcttccctggggtggccatctacctggtggagcccaggatgggccgcagcagaagagccttcctgaccggcctggcccggagcaagggcttccgggtgctggatgcctgcagcagcgaggccacccacgtggtgatggaggagaccagcgctgaggaggccgtgtcctggcaggagaggaggatggctgctgcccctcctggctgcaccccaccagccctgctggacatctcctggctgacagagagcctgggcgccggccagcctgtgcctgtggagtgccgccaccggctggaggaggccctggagatcctggccgaggccgccggctttgagggcagcgagggccgcctgctgaccttctgcagagctgcctctgtgctgaaggccctgcccagcccctag

SEQ ID NO: 305909 - DNA, 729 bp, Artificial Sequence
  derived and/or modified sequence
atgctgcccaagagaagaagagcccgggtgggcagccccagcggagatgctgccagcagcaccccacccagcacccgcttccctggggtggccatctacctggtggagcccaggatgggccgcagcagaagagccttcctgaccggcctggcccggagcaagggcttccgggtgctggatgcctgcagcagcgaggccacccacgtggtgatggaggagaccagcgctgaggaggccgtgtcctggcaggagaggaggatggctgctgcccctcctggctgcaccccaccagccctgctggacatctcctggctgacagagagcctgggcgccggccagcctgtgcctgtggagtgccgccaccggctggaggtggccggccccaggaagggccccctgagccctgcctggatgcctgcctatgcctgccagaggcccacccccctgacccaccacaacacaggcctgtctgaggccctggagatcctggccgaggccgccggctttgagggcagcgagggccgcctgctgaccttctgccgggccgcctctgtgctgaaggccctgcccagccctgtgaccaccctgagccagctgcagggcctgccccactttggagagcacagcagccgggtggtgcaggagctgctggagcacggcgtgtgtgaggaggtggagcgggtgagaagaagtgagagcagcagccccaggagcagcggctctgtgtag

SEQ ID NO: 305910 - DNA, 550 bp, Artificial Sequence
  derived and/or modified sequence
actggggcttccttccgtctcgctcggagtttccctctgcgttcgctccgcgctgctggaggctgtcgtcccaatgctccccaaacggcggcgagcgcgggtcgggtcccctagcggcgatgccgcttcctccacgccgccctcgacgcgcttcccgggagtcgccatctacctggtcgagcctcgcatgggtcgcagccgccgggccttcctcacaggcctggcgcgctccaaaggcttccgcgtccttgacgcctgcagctccgaagcgacacatgttgtgatggaagagacctcagcagaggaggccgtcagctggcaggagcgcaggatggcagctgctcccccgggttgcacccccccagctctgctggacataagctggttaacagagagcctgggagctgggcagcctgtacctgtggagtgccggcaccgcctggaggaggctctggagatactggccgaggcagcaggctttgaaggcagtgagggccgcctcctcaccttctgcagagcagcctcggtgctcaaggcccttcccagccct

SEQ ID NO: 305911 - DNA, 480 bp, Artificial Sequence
  derived and/or modified sequence
atgctgcccaagcggcggcgggcccgggtgggcagccccagcggcgacgccgcctcttctaccccaccttctacccgctttcctggcgtggcaatctacttggtggaaccaaggatggggcgtagcagacgggcgtttctgaccggcttggcaaggagcaaaggattccgggtactggatgcttgttcaagtgaagccactcacgtggtcatggaggagaccagcgctgaagaggccgtgtcttggcaggaacgaagaatggccgctgctccaccgggatgtaccccacccgccttgctggacatttcttggctcaccgagtccctgggggccggacagcccgttcctgtggagtgcaggcaccgcctcgaagaggcgctggagatcctggctgaggcagccggatttgagggctcagaggggagactcctcactttttgtcgcgcagcttccgttctgaaagcactgccgtccccttag

SEQ ID NO: 305912 - DNA, 729 bp, Artificial Sequence
  derived and/or modified sequence
atgctgcccaagcggcggcgggcccgggtgggcagccccagcggcgatgcagccagcagtacaccaccaagcacgagattccctggagtggcaatttatctggttgagccacgaatgggccgatcacgacgcgcctttttaacggggctggcacggagcaagggttttagagtcctggatgcttgttcatctgaagccacccatgtggtcatggaggaaacctcagcagaagaggccgttagttggcaggaaagacgcatggcagcggctccgccaggttgcaccccacccgctctgctggacattagctggctgacagagagcctgggtgctgggcaacctgtgccggttgagtgcagacatcgactggaagtcgcaggcccaaggaaggggcccctcagtcccgcgtggatgcccgcttatgcctgccagcggccaacaccactcacccatcacaacacaggcttgagcgaggccctcgagatactggccgaagccgcaggctttgagggcagtgaggggagactgctgaccttttgccgcgcagcctccgtactaaaggccctcccctctcctgtgacaacactctcgcagctccagggactgcctcattttggtgaacactcctctagagtcgtgcaggagctgcttgagcacggggtgtgtgaagaggtcgagagggtgcggaggtctgaatcttcaagcccacgatcctctgggtctgtgtag

SEQ ID NO: 305913 - DNA, 480 bp, Artificial Sequence
  derived and/or modified sequence
atgctgccaaagcggagaagggcaagagtgggcagcccctcaggagatgctgcaagtagcaccccccctagtactagatttccgggtgtcgccatttatctggtcgaacctcggatggggaggtcacgaagagcatttctgacaggtctggcaagaagtaaagggttcagggtcctcgacgcctgctcttccgaagctactcatgttgtgatggaagaaacatccgccgaggaggctgtgtcttggcaggagcgacgaatggcagccgcaccccctggatgcactcccccagctctccttgatatatcttggctgacagagtctctgggcgctggacaaccagtcccggtggaatgtcgccatcgcttggaggaggccctagagattctggcggaggccgctggcttcgaagggtcggagggcagactgctaactttctgtcgggctgcaagtgtcctcaaggccttgccttccccctag

SEQ ID NO: 305914 - DNA, 729 bp, Artificial Sequence
  derived and/or modified sequence
atgttacctaagaggcgacgggctagagtgggctctccttccggagacgcggcaagctcaacccctccaagtaccagattccctggcgtcgctatttatttggtggagcccaggatgggtaggtctaggcgcgcattcttgacagggctggctaggagcaagggatttcgcgtgctcgatgcctgctcctcagaagctacccatgtagtgatggaagagacctcagctgaggaagccgtgagctggcaggaacgaagaatggccgctgccccacccggttgtactccccctgccctgctggatatttcttggctcacagagtccctgggagcaggacagccggtgccggtggaatgtaggcacaggctggaagttgctggtcccaggaaggggccacttagtcccgcttggatgcctgcctacgcttgccagaggccaactcccttgacacatcataatacaggacttagcgaggcgttggaaatactggctgaagctgctgggtttgaaggcagcgaggggagattgctgacgttctgccgtgccgcatcagtgttgaaagcactgcccagccccgtcaccaccctctctcaactacaaggtcttccacattttggcgagcatagttctcgagtcgtgcaggaactccttgaacacggagtatgcgaggaggtggagcgggttcggcgtagcgaatcaagctcccctcgaagctccggcagcgtatag

SEQ ID NO: 305915 - DNA, 480 bp, Artificial Sequence
  derived and/or modified sequence
atgctgcccaagagaagaagagccagagtgggcagccccagcggcgacgccgccagcagcaccccccccagcaccagattccccggcgtggccatctacctggtggagcccagaatgggcagaagcagaagagccttcctgaccggcctggccagaagcaagggcttcagagtgctggacgcctgcagcagcgaggccacccacgtggtgatggaggagaccagcgccgaggaggccgtgagctggcaggagagaagaatggccgccgccccccccggctgcaccccccccgccctgctggacatcagctggctgaccgagagcctgggcgccggccagcccgtgcccgtggagtgcagacacagactggaggaggccctggagatcctggccgaggccgccggcttcgagggcagcgagggcagactgctgaccttctgcagagccgccagcgtgctgaaggccctgcccagcccctag

SEQ ID NO: 305916 - DNA, 729 bp, Artificial Sequence
  derived and/or modified sequence
atgctgcccaagagaagaagagccagagtgggcagccccagcggcgacgccgccagcagcaccccccccagcaccagattccccggcgtggccatctacctggtggagcccagaatgggcagaagcagaagagccttcctgaccggcctggccagaagcaagggcttcagagtgctggacgcctgcagcagcgaggccacccacgtggtgatggaggagaccagcgccgaggaggccgtgagctggcaggagagaagaatggccgccgccccccccggctgcaccccccccgccctgctggacatcagctggctgaccgagagcctgggcgccggccagcccgtgcccgtggagtgcagacacagactggaggtggccggccccagaaagggccccctgagccccgcctggatgcccgcctacgcctgccagagacccacccccctgacccaccacaacaccggcctgagcgaggccctggagatcctggccgaggccgccggcttcgagggcagcgagggcagactgctgaccttctgcagagccgccagcgtgctgaaggccctgcccagccccgtgaccaccctgagccagctgcagggcctgccccacttcggcgagcacagcagcagagtggtgcaggagctgctggagcacggcgtgtgcgaggaggtggagagagtgagaagaagcgagagcagcagccccagaagcagcggcagcgtgtag

SEQ ID NO: 305917 - protein, 536 aa, Artificial Sequence
  derived and/or modified sequence
MNASLESLYSACSMQSDTVPLLQNGQHARSQPRASGPPRSIQPQVSPRQRVQRSQPVHILAVRRLQEEDQQFRTSSLPAIPNPFPELCGPGSPPVLTPGSLPPSQAAAKQDVKVFSEDGTSKVVEILADMTARDLCQLLVYKSHCVDDNSWTLVEHHPHLGLERCLEDHELVVQVESTMASESKFLFRKNYAKYEFFKNPMNFFPEQMVTWCQQSNGSQTQLLQNFLNSSSCPEIQGFLHVKELGKKSWKKLYVCLRRSGLYCSTKGTSKEPRHLQLLADLEDSNIFSLIAGRKQYNAPTDHGLCIKPNKVRNETKELRLLCAEDEQTRTCWMTAFRLLKYGMLLYQNYRIPQQRKALLSPFSTPVRSVSENSLVAMDFSGQTGRVIENPAEAQSAALEEGHAWRKRSTRMNILGSQSPLHPSTLSTVIHRTQHWFHGRISREESHRIIKQQGLVDGLFLLRDSQSNPKAFVLTLCHHQKIKNFQILPCEDDGQTFFSLDDGNTKFSDLIQLVDFYQLNKGVLPCKLKHHCIRVAL

SEQ ID NO: 305918 - protein, 126 aa, Artificial Sequence
  derived and/or modified sequence
MNILGSQSPLHPSTLSTVIHRTQHWFHGRISREESHRIIKQQGLVDGLFLLRDSQSNPKAFVLTLCHHQKIKNFQILPCEDDGQTFFSLDDGNTKFSDLIQLVDFYQLNKGVLPCKLKHHCIRVAL

SEQ ID NO: 305919 - protein, 588 aa, Artificial Sequence
  derived and/or modified sequence
MQAAGPLFRSKDKVEQTPRSQQDPAGPGLPAQSDRLANHQEDDVDLEALVNDMNASLESLYSACSMQSDTVPLLQNGQHARSQPRASGPPRSIQPQVSPRQRVQRSQPVHILAVRRLQEEDQQFRTSSLPAIPNPFPELCGPGSPPVLTPGSLPPSQAAAKQDVKVFSEDGTSKVVEILADMTARDLCQLLVYKSHCVDDNSWTLVEHHPHLGLERCLEDHELVVQVESTMASESKFLFRKNYAKYEFFKNPMNFFPEQMVTWCQQSNGSQTQLLQNFLNSSSCPEIQGFLHVKELGKKSWKKLYVCLRRSGLYCSTKGTSKEPRHLQLLADLEDSNIFSLIAGRKQYNAPTDHGLCIKPNKVRNETKELRLLCAEDEQTRTCWMTAFRLLKYGMLLYQNYRIPQQRKALLSPFSTPVRSVSENSLVAMDFSGQTGRVIENPAEAQSAALEEGHAWRKRSTRMNILGSQSPLHPSTLSTVIHRTQHWFHGRISREESHRIIKQQGLVDGLFLLRDSQSNPKAFVLTLCHHQKIKNFQILPCEDDGQTFFSLDDGNTKFSDLIQLVDFYQLNKGVLPCKLKHHCIRVAL

SEQ ID NO: 305920 - protein, 114 aa, Artificial Sequence
  derived and/or modified sequence
MQAAGPLFRSKDKVEQTPRSQQDPAGPGLPAQSDRLANHQEDDVDLEALVNDMNASLESLYSACSMQSDTVPLLQNGQHARSQPRASGPPRSIQPQVSPRQRVQRSQPVHILAV

SEQ ID NO: 305921 - DNA, 1767 bp, Artificial Sequence
  derived and/or modified sequence
atgcaggccgccggccccctgttcagaagcaaggacaaggtggagcagacccccagaagccagcaggaccccgccggccccggcctgcccgcccagagcgacagactggccaaccaccaggaggacgacgtggacctggaggccctggtgaacgacatgaacgccagcctggagagcctgtacagcgcctgcagcatgcagagcgacaccgtgcccctgctgcagaacggccagcacgccagaagccagcccagagccagcggcccccccagaagcatccagccccaggtgagccccagacagagagtgcagagaagccagcccgtgcacatcctggccgtgagaagactgcaggaggaggaccagcagttcagaaccagcagcctgcccgccatccccaaccccttccccgagctgtgcggccccggcagcccccccgtgctgacccccggcagcctgccccccagccaggccgccgccaagcaggacgtgaaggtgttcagcgaggacggcaccagcaaggtggtggagatcctggccgacatgaccgccagagacctgtgccagctgctggtgtacaagagccactgcgtggacgacaacagctggaccctggtggagcaccacccccacctgggcctggagagatgcctggaggaccacgagctggtggtgcaggtggagagcaccatggccagcgagagcaagttcctgttcagaaagaactacgccaagtacgagttcttcaagaaccccatgaacttcttccccgagcagatggtgacctggtgccagcagagcaacggcagccagacccagctgctgcagaacttcctgaacagcagcagctgccccgagatccagggcttcctgcacgtgaaggagctgggcaagaagagctggaagaagctgtacgtgtgcctgagaagaagcggcctgtactgcagcaccaagggcaccagcaaggagcccagacacctgcagctgctggccgacctggaggacagcaacatcttcagcctgatcgccggcagaaagcagtacaacgcccccaccgaccacggcctgtgcatcaagcccaacaaggtgagaaacgagaccaaggagctgagactgctgtgcgccgaggacgagcagaccagaacctgctggatgaccgccttcagactgctgaagtacggcatgctgctgtaccagaactacagaatcccccagcagagaaaggccctgctgagccccttcagcacccccgtgagaagcgtgagcgagaacagcctggtggccatggacttcagcggccagaccggcagagtgatcgagaaccccgccgaggcccagagcgccgccctggaggagggccacgcctggagaaagagaagcaccagaatgaacatcctgggcagccagagccccctgcaccccagcaccctgagcaccgtgatccacagaacccagcactggttccacggcagaatcagcagagaggagagccacagaatcatcaagcagcagggcctggtggacggcctgttcctgctgagagacagccagagcaaccccaaggccttcgtgctgaccctgtgccaccaccagaagatcaagaacttccagatcctgccctgcgaggacgacggccagaccttcttcagcctggacgacggcaacaccaagttcagcgacctgatccagctggtggacttctaccagctgaacaagggcgtgctgccctgcaagctgaagcaccactgcatcagagtggccctgtag

SEQ ID NO: 305922 - DNA, 345 bp, Artificial Sequence
  derived and/or modified sequence
atgcaggccgccggccccctgttcagaagcaaggacaaggtggagcagacccccagaagccagcaggaccccgccggccccggcctgcccgcccagagcgacagactggccaaccaccaggaggacgacgtggacctggaggccctggtgaacgacatgaacgccagcctggagagcctgtacagcgcctgcagcatgcagagcgacaccgtgcccctgctgcagaacggccagcacgccagaagccagcccagagccagcggcccccccagaagcatccagccccaggtgagccccagacagagagtgcagagaagccagcccgtgcacatcctggccgtgtag

SEQ ID NO: 305923 - DNA, 1767 bp, Artificial Sequence
  derived and/or modified sequence
atgcaggctgcaggacccttgtttcgctctaaggataaggtggaacagacacctaggtctcagcaggaccccgccggccctggactcccagctcagtctgataggctcgcaaaccatcaggaggatgacgttgaccttgaagcacttgttaacgatatgaatgccagccttgaatccttgtacagcgcctgctcaatgcagtctgacacagttccccttctgcagaatggacagcatgccaggtcacaacctcgggccagtggcccccccaggtctattcaacctcaagtgtcccctaggcaaagagttcagcgctcccagcctgtgcatatcctcgccgtgaggaggctccaagaagaagaccagcagtttagaacgtcttctcttcctgcaattccaaaccccttcccagaactgtgcggcccgggcagtccaccagtcttaacccccggctctctgcccccctcacaagctgctgccaagcaagatgtaaaggtgttctccgaggacggtactagtaaagttgtggaaattctcgccgacatgactgccagagacctgtgccagctcctcgtctacaaatcccattgcgtggacgataatagctggaccctggtagaacaccacccgcacctaggactggagcggtgcctcgaggaccatgagctggtcgtccaggtggagtctaccatggcttccgaatctaaatttctcttcagaaagaactatgccaagtatgagttctttaagaatccaatgaatttcttccctgagcaaatggtgacctggtgccaacaatctaatggttcccagacacagctcctacaaaacttcctgaactcttcttcatgtcctgagatccaaggatttctccatgtgaaagaactcggtaagaaatcctggaagaaactgtacgtgtgcctgcggaggagcgggttgtattgttctaccaaggggacttccaaagagcctcgacacctgcaactcctggcggacctcgaggattctaatattttctcactgatcgcaggccgaaaacaatataacgctcccactgaccatggcctgtgtattaagcccaacaaggtaagaaacgagactaaggagcttagattgctctgcgctgaggatgaacagacccgaacgtgctggatgacagcctttcggctgctgaaatatggcatgctcctgtaccagaattatcgaattcctcagcagagaaaagccctcctcagccccttctcaacacctgtgcggtctgtcagtgagaatagtctggtggcaatggactttagtgggcagaccgggcgcgtgatcgaaaatcccgctgaggctcagtccgctgccctcgaggaaggccatgcatggcgcaaacgctctaccaggatgaacatcctgggatcgcaaagcccccttcacccttctacattgtccactgtgatacaccgcactcagcactggttccatggcaggatctcacgggaagaatctcacaggattataaagcagcaaggattggttgatggattgttcctactccgggattcacagtcaaaccccaaagcttttgtcttgacactctgtcaccatcagaagattaaaaatttccagatacttccatgtgaagacgacggccagacctttttttctctggacgatggcaacactaaatttagtgaccttattcagctggttgatttctatcagctaaataagggcgtgctgccttgcaaactgaaacaccactgcatccgagtggctttgtag

SEQ ID NO: 305924 - DNA, 345 bp, Artificial Sequence
  derived and/or modified sequence
atgcaggcggctggcccccttttcaggtctaaagacaaggtggagcagacccctcggagccagcaggaccccgctggccctggactccccgcccaatcagacaggctagctaatcaccaagaagatgatgtggatcttgaagcactcgtgaacgacatgaatgcttcattagaatccttatactcagcgtgcagtatgcagtccgacacagtgccactacttcagaatggacagcacgccaggtcacagcctcgggcaagcggaccacctaggtcgatccagccgcaagtcagtcctaggcaacgggtccagcggtcccaacccgtacacatcttggcggtatag

SEQ ID NO: 305925 - DNA, 1767 bp, Artificial Sequence
  derived and/or modified sequence
atgcaggcggccgggcccttgttccgatctaaggacaaggtagagcagactccacgctctcagcaggatccagccggcccaggactccctgctcagtctgacaggctagccaatcaccaggaagacgacgtcgacctggaagccctggtcaatgacatgaatgcctcccttgaatccctatattccgcttgttccatgcagagtgataccgtgcccttattgcagaatggacagcatgcaagaagccagcctcgcgctagtggcccccctcgctccatacagccacaggtaagtcctcgtcagcgtgtgcagagatcccagccagtccacatcctggccgtccgtcgactgcaggaagaggaccagcagttccgcacttcctccttgcctgccattccaaacccattccccgaactctgtggcccaggtagtccgccagtcttaactccggggtccttgcctccatcccaggctgccgccaagcaggatgtgaaggtattctctgaagatgggacatctaaagtagtagagatcctcgctgatatgacagcccgagacttgtgccaactgttggtgtacaaaagccattgtgtggacgacaatagttggaccctcgtggaacaccaccctcacctgggcttggagagatgtttggaggatcacgagctcgtcgtgcaagttgagtcaactatggcgagtgagagcaaatttctattccgaaaaaattatgccaaatacgagtttttcaagaacccaatgaatttttttcccgagcagatggtgacctggtgccagcagtccaacggctcccagacccagctcttgcagaacttcctcaactcctcttcctgtccagaaattcagggctttttacacgttaaagagttagggaaaaagagttggaaaaagctgtacgtgtgcctgcgccgctcaggattgtattgcagcacaaaggggaccagtaaagaaccacgccatttacagctacttgcagacctggaggactccaacatctttagcctgattgccggaaggaaacagtataatgcacctacagaccacggattgtgcataaaacctaataaggtgcgaaacgagactaaagagctgcgcctcctctgtgccgaagatgagcagactagaacctgttggatgaccgcatttcgtctactcaagtacggaatgttgctctaccagaattaccgcatcccccagcaacggaaagccctcctcagtcctttttccacccccgtcaggtcagtgagcgagaactcgctggtggcaatggacttctccggccaaacgggaagggtcatcgagaacccagctgaagcccagtctgccgcattggaggagggccatgcttggcgcaagcgctctaccagaatgaacatcttgggaagccagtcacccctccaccctagtactctgagtactgtgatccatcggacacagcattggttccatggtaggatttcccgcgaggagagccatcgaattattaaacagcaaggattggttgatggattattcttgcttagggacagccagtctaaccctaaggcctttgtgctcactctgtgtcaccaccagaagatcaaaaactttcagatcctgccttgtgaagacgacggacagaccttcttttctttggatgatgggaacacaaaattttctgacctaatacagctcgtcgacttctaccagttgaataaaggagttctaccctgtaaactcaaacaccactgcatccgagttgcactgtag

SEQ ID NO: 305926 - DNA, 5432 bp, Artificial Sequence
  derived and/or modified sequence
ggcagccgggcgccccgcggggctctccgcgctgcgttcccgacccctggggggaggtgtggagtccaagcggtgcattcttgaaccatcttgtcagacgccggcggctcgcgggctgtggcgggggctgcggtcaaggccgcgctcctgggggccgccgcctgggagggtgggcgcccaggcgtccctgcagccccgggtgctccgactgcgcggcggggccgcggcgcgcgcgcccgggcgtccgggcgtccgggacagtggtgccagacactcccaaatcccgagccggcccagcctcgtacggaggaccttttttttggttctgttggtgacccgttagccgccgctggggcctaacaccaagttgagggctcgcggattagccgcccgccagccgtggaaatgtgataagagcggtaccgtttgcagaaggaaatttctgatgcaactcttcgcctttgctgattgcctctccaaacgcctgcctgacgactgccttggagcatgtgcgttatggaaattaggctttggcgctgaccacaatgctgagcaggaagcagcagctgcaggcccagtgactggtagctcagtgaccagcagcccagtgaccggcagccaggtcctcacctgggtcctctcagtgaagccagggtggccgccccagcagacagtgctacagagccaactcctgacaggttctgaaaatattgtgcacagggcaggctgaggacacagccacgtgatacccactgtagagagagggagagagagacctcctatgcaagctgccggccctctgttccgtagtaaggacaaggtggagcagacacctcgcagtcaacaagacccggcaggaccaggactccccgcacagtctgaccgacttgcgaatcaccaggaggatgatgtggacctggaagccctggtgaacgatatgaatgcatccctggagagcctgtactcggcctgcagcatgcagtcagacacggtgcccctcctgcagaatggccagcatgcccgcagccagcctcgggcttcaggccctcctcggtccatccagccacaggtgtccccgaggcagagggtgcagcgctcccagcctgtgcacatcctcgctgtcaggcgccttcaggaggaagaccagcagtttagaacctcatctctgccggccatccccaatccttttcctgaactctgtggccctgggagcccccctgtgctcacgccgggttctttacctccgagccaggccgccgcaaagcaggatgttaaagtctttagtgaagatgggacaagcaaagtggtggagattctagcagacatgacagccagagacctgtgccaattgctggtttacaaaagtcactgtgtggatgacaacagctggacactagtggagcaccacccgcacctaggattagagaggtgcttggaagaccatgagctggtggtccaggtggagagtaccatggccagtgagagtaaatttctattcaggaagaattacgcaaaatacgagttctttaaaaatcccatgaatttcttcccagaacagatggttacttggtgccagcagtcaaatggcagtcaaacccagcttttgcagaattttctgaactccagtagttgtcctgaaattcaagggtttttgcatgtgaaagagctgggaaagaaatcatggaaaaagctgtatgtgtgtttgcggagatctggcctttattgctccaccaagggaacttcaaaggaacccagacacctgcagctgctggccgacctggaggacagcaacatcttctccctgatcgctggcaggaagcagtacaacgcccctacagaccacgggctctgcataaagccaaacaaagtcaggaatgaaactaaagagctgaggttgctctgtgcagaggacgagcaaaccaggacgtgctggatgacagcgttcagactcctcaagtatggaatgctcctttaccagaattaccgaatccctcagcagaggaaggccttgctgtccccgttctcgacgccagtgcgcagtgtctccgagaactccctcgtggcaatggatttttctgggcaaacaggacgcgtgatagagaatccggcagaggcccagagcgcagccctggaggagggccacgcctggaggaagcgaagcacacggatgaacatcctaggtagccaaagtcccctccacccttctaccctaagtacagtgattcacaggacacagcactggtttcacgggaggatctccagggaggaatcccacaggatcattaaacagcaagggctcgtggatgggctttttctcctccgtgacagccagagtaatccaaaggcatttgtactcacactgtgtcatcaccagaaaattaaaaatttccagatcttaccttgcgaggacgacgggcagacgttcttcagcctagatgacgggaacaccaaattctctgacctgatccagctggttgacttttaccagctgaacaaaggagtcctgccttgcaaactcaagcaccactgcatccgagtggccttatgaccgcagatgtcctctcggctgaagactggaggaagtgaacactggagtgaagaagcggtctgtgcgttggtgaagaacacacatcgattctgcacctggggacccagagcgagatgggtttgttcggtgccagccgaccaagattgactagtttgttggacttaaacgacgatttgctgctgtgaacccagcagggtcgcctccctctgcatcggccaaattggggagggcatggaagatccagcggaaagttgaaaataaactggaatgatcatcttggcttgggccgcttaggaacaagaaccggagagaagtgattggaaatgaactcttgccctggaataatcttgacaattaaaactgatatgtttactttttttgtattgatcacttttttgcactccttctttgttttcaatattgtattcagcctattgtaggagggggatgtggcgtttcaactcatataatacagaaagagttttgaatgggcagatttcaaactgaatatgggtccccaaatgttcccagagggtcctccacaccctctgccgactaccacggtgtggattcagctcccaaatgacaaacccagcccttcccagtatacttgaaaagctttcttgttaaaataaaaggtgtcactgtggtaggcatttggcatattttgtggactcagtcaagcaaccacagtctgttaatcatttctctatgctcagatgtcagatcctcttgttattagtgtgtcttgttctgcacagtgcaggagactttattcctttggaaaattcactgttccacaaacagcaggctgaatggcctcgcctctagattgacgtgggccagcctccttgagacacacctggcacccgtcatcggccagcggtggatgctgcataatccacctgggtacttcagccttgcgtttccacagccttcagcctgttctagaacgatcactgccttacccctgctgctgcagtggtgtgagtcgtttcacggctgatgtccctcgggggattaaaggatctaaagagaaaatggcacctggttgtcttcgtgctgtgtctcatgggtttccatagtgataaagacaaggaaacgctgcaggggccacaggcacaggctgatatttaaagatctttgcttgcagccctccgtcctgctgaaaacccccataagccagtgaacacagagcagctagaggctcctcctctgctggcttagggtcagaagtacctcacagtggttgtggacatggaagagttttgtcaacacaacactttgtccccgctccgggagatgagtcagatggtggcttgagttgtcacttggtcccctccgcccctcgggtggccccctttgccacgtccccttagcttagtgatcaggtgtgagagtggccatttccttacctttgatccctgtaaagcagaaaggactcctttgacaggcgacaaactactgtggtgagcagaatgatttcctttttcaagacaacacctgcctggcttctattaatgtgtgctggccatgatattgccccaaatccgccccactgaagtgttccctaaggaacagcatttctctgctcctcagtcaacccccgtagcctagagcagtgtcacaagcttcagtaaggccagtcagctggaagtcagtctaccgtatagtaacactgtatgtcagtctacagaccacactctagttgttttccatgaaaggtatacaaatgaagaattttctagcaaaacatgtttttaaccatcagtgctcaattgcattttcttcctttcgcagccagtcagtctttcaaactattgacagtaagataattctcacgttcacacctggtggcaggcttcactgtagggacggacattgcagttacaccacgattccttcctcttcactggctcgaggtaaacccttttcaaggaaaaacaactctaggatttcttttttctgtgtacgtagaccagtcccatcagtgtataatctctctctcacacgcctctctccaatagacagcttgtatttgcagtatttcatatttataaatatgcgtttatttaaaaggagaacaaaagcttgactctgattcacagttttgtatgtagctggtttgacgtagtcttttgtattttccctgccgaagtgaattgttggagaatgtaaaccgcctccacgtggcggcagacttcctaaggccccagctcgctggcctcgcgctgggcggctgggaattccacctgagaacaagtcccgcaaaccggggacggaaggacatttgacttttatttttgtatttaattgacatgaatgtaaaggggacagctcagggttgttttggagcctgttgactttgtatctctgcctgtgattttcttttctaaatgaaactccatgtagcaaccaggacgaagttgagaaggaaaacgccaaatgctttggttattagagtttaataggtaagctctgttacactaggtgttagagttccagaatgttcttttgtttgctaaaccttgaagaaacatgtgcctcagcctagatgttttgtcttctcttttctgcacttaatacctgacagtatgaccgatctctgcgcctttctgggggcgggcaagctggcggtagatttgtgatgtcacagtgcaaactgcagtgactgtaaattggcctggcgtgtataaacgttttcagggaatgcagaaggtattaatgaagagacaaaacctttattccatgtgctttgcttcattctgtacatagctctttggctcgtgaacctaattgtaaactttcaggtatttttgtacaaataagggactgatgttctgtttcttgtaattagaaataaacattaatacagtgttcttca

SEQ ID NO: 305927 - DNA, 733 bp, Artificial Sequence
  derived and/or modified sequence
cgagctgcggccgggcgggctcggcgctcggagacccggtggagcccaaagtttccgcgcagcccctgggtggcggcagcgccggcggcgcggggcgcccgggacagtcttgagcgccggcctcgccccgcggggacccgcgcccgccgccggccacgccgagtgtcgcccgcagccacgcggaggcggcggggagccgcgcgcggcaggtgctgcagcgcagtaaatgtaatttgaagaaggcagaaggaacccatggctttagccggctgcccagattcctttttgcaccatccgtactaccaggttctgaaaatattgtgcacagggcaggctgaggacacagccacgtgatacccactgtagagagagggagagagagacctcctatgcaagctgccggccctctgttccgtagtaaggacaaggtggagcagacacctcgcagtcaacaagacccggcaggaccaggactccccgcacagtctgaccgacttgcgaatcaccaggaggatgatgtggacctggaagccctggtgaacgatatgaatgcatccctggagagcctgtactcggcctgcagcatgcagtcagacacggtgcccctcctgcagaatggccagcatgcccgcagccagcctcgggcttcaggccctcctcggtccatccagccacaggtgtccccgaggcagagggtgcagcgctcccagcctgtgcacatcctcgctgtcag

SEQ ID NO: 305928 - DNA, 4656 bp, Artificial Sequence
  derived and/or modified sequence
atgcaagctgccggccctctgttccgtagtaaggacaaggtggagcagacacctcgcagtcaacaagacccggcaggaccaggactccccgcacagtctgaccgacttgcgaatcaccaggaggatgatgtggacctggaagccctggtgaacgatatgaatgcatccctggagagcctgtactcggcctgcagcatgcagtcagacacggtgcccctcctgcagaatggccagcatgcccgcagccagcctcgggcttcaggccctcctcggtccatccagccacaggtgtccccgaggcagagggtgcagcgctcccagcctgtgcacatcctcgctgtcaggcgccttcaggaggaagaccagcagtttagaacctcatctctgccggccatccccaatccttttcctgaactctgtggccctgggagcccccctgtgctcacgccgggttctttacctccgagccaggccgccgcaaagcaggatgttaaagtctttagtgaagatgggacaagcaaagtggtggagattctagcagacatgacagccagagacctgtgccaattgctggtttacaaaagtcactgtgtggatgacaacagctggacactagtggagcaccacccgcacctaggattagagaggtgcttggaagaccatgagctggtggtccaggtggagagtaccatggccagtgagagtaaatttctattcaggaagaattacgcaaaatacgagttctttaaaaatcccatgaatttcttcccagaacagatggttacttggtgccagcagtcaaatggcagtcaaacccagcttttgcagaattttctgaactccagtagttgtcctgaaattcaagggtttttgcatgtgaaagagctgggaaagaaatcatggaaaaagctgtatgtgtgtttgcggagatctggcctttattgctccaccaagggaacttcaaaggaacccagacacctgcagctgctggccgacctggaggacagcaacatcttctccctgatcgctggcaggaagcagtacaacgcccctacagaccacgggctctgcataaagccaaacaaagtcaggaatgaaactaaagagctgaggttgctctgtgcagaggacgagcaaaccaggacgtgctggatgacagcgttcagactcctcaagtatggaatgctcctttaccagaattaccgaatccctcagcagaggaaggccttgctgtccccgttctcgacgccagtgcgcagtgtctccgagaactccctcgtggcaatggatttttctgggcaaacaggacgcgtgatagagaatccggcagaggcccagagcgcagccctggaggagggccacgcctggaggaagcgaagcacacggatgaacatcctaggtagccaaagtcccctccacccttctaccctaagtacagtgattcacaggacacagcactggtttcacgggaggatctccagggaggaatcccacaggatcattaaacagcaagggctcgtggatgggctttttctcctccgtgacagccagagtaatccaaaggcatttgtactcacactgtgtcatcaccagaaaattaaaaatttccagatcttaccttgcgaggacgacgggcagacgttcttcagcctagatgacgggaacaccaaattctctgacctgatccagctggttgacttttaccagctgaacaaaggagtcctgccttgcaaactcaagcaccactgcatccgagtggccttatgaccgcagatgtcctctcggctgaagactggaggaagtgaacactggagtgaagaagcggtctgtgcgttggtgaagaacacacatcgattctgcacctggggacccagagcgagatgggtttgttcggtgccagccgaccaagattgactagtttgttggacttaaacgacgatttgctgctgtgaacccagcagggtcgcctccctctgcatcggccaaattggggagggcatggaagatccagcggaaagttgaaaataaactggaatgatcatcttggcttgggccgcttaggaacaagaaccggagagaagtgattggaaatgaactcttgccctggaataatcttgacaattaaaactgatatgtttactttttttgtattgatcacttttttgcactccttctttgttttcaatattgtattcagcctattgtaggagggggatgtggcgtttcaactcatataatacagaaagagttttgaatgggcagatttcaaactgaatatgggtccccaaatgttcccagagggtcctccacaccctctgccgactaccacggtgtggattcagctcccaaatgacaaacccagcccttcccagtatacttgaaaagctttcttgttaaaataaaaggtgtcactgtggtaggcatttggcatattttgtggactcagtcaagcaaccacagtctgttaatcatttctctatgctcagatgtcagatcctcttgttattagtgtgtcttgttctgcacagtgcaggagactttattcctttggaaaattcactgttccacaaacagcaggctgaatggcctcgcctctagattgacgtgggccagcctccttgagacacacctggcacccgtcatcggccagcggtggatgctgcataatccacctgggtacttcagccttgcgtttccacagccttcagcctgttctagaacgatcactgccttacccctgctgctgcagtggtgtgagtcgtttcacggctgatgtccctcgggggattaaaggatctaaagagaaaatggcacctggttgtcttcgtgctgtgtctcatgggtttccatagtgataaagacaaggaaacgctgcaggggccacaggcacaggctgatatttaaagatctttgcttgcagccctccgtcctgctgaaaacccccataagccagtgaacacagagcagctagaggctcctcctctgctggcttagggtcagaagtacctcacagtggttgtggacatggaagagttttgtcaacacaacactttgtccccgctccgggagatgagtcagatggtggcttgagttgtcacttggtcccctccgcccctcgggtggccccctttgccacgtccccttagcttagtgatcaggtgtgagagtggccatttccttacctttgatccctgtaaagcagaaaggactcctttgacaggcgacaaactactgtggtgagcagaatgatttcctttttcaagacaacacctgcctggcttctattaatgtgtgctggccatgatattgccccaaatccgccccactgaagtgttccctaaggaacagcatttctctgctcctcagtcaacccccgtagcctagagcagtgtcacaagcttcagtaaggccagtcagctggaagtcagtctaccgtatagtaacactgtatgtcagtctacagaccacactctagttgttttccatgaaaggtatacaaatgaagaattttctagcaaaacatgtttttaaccatcagtgctcaattgcattttcttcctttcgcagccagtcagtctttcaaactattgacagtaagataattctcacgttcacacctggtggcaggcttcactgtagggacggacattgcagttacaccacgattccttcctcttcactggctcgaggtaaacccttttcaaggaaaaacaactctaggatttcttttttctgtgtacgtagaccagtcccatcagtgtataatctctctctcacacgcctctctccaatagacagcttgtatttgcagtatttcatatttataaatatgcgtttatttaaaaggagaacaaaagcttgactctgattcacagttttgtatgtagctggtttgacgtagtcttttgtattttccctgccgaagtgaattgttggagaatgtaaaccgcctccacgtggcggcagacttcctaaggccccagctcgctggcctcgcgctgggcggctgggaattccacctgagaacaagtcccgcaaaccggggacggaaggacatttgacttttatttttgtatttaattgacatgaatgtaaaggggacagctcagggttgttttggagcctgttgactttgtatctctgcctgtgattttcttttctaaatgaaactccatgtagcaaccaggacgaagttgagaaggaaaacgccaaatgctttggttattagagtttaataggtaagctctgttacactaggtgttagagttccagaatgttcttttgtttgctaaaccttgaagaaacatgtgcctcagcctagatgttttgtcttctcttttctgcacttaatacctgacagtatgaccgatctctgcgcctttctgggggcgggcaagctggcggtagatttgtgatgtcacagtgcaaactgcagtgactgtaaattggcctggcgtgtataaacgttttcagggaatgcagaaggtattaatgaagagacaaaacctttattccatgtgctttgcttcattctgtacatagctctttggctcgtgaacctaattgtaaactttcaggtatttttgtacaaataagggactgatgttctgtttcttgtaattagaaataaacattaatacagtgttcttcattttc

SEQ ID NO: 305929 - DNA, 1767 bp, Artificial Sequence
  derived and/or modified sequence
atgcaggccgccggccccctcttccgcagcaaggacaaggtggagcagacccccaggagccagcaggaccctgctggccctggcctgcctgcccagagcgaccggctggccaaccaccaggaggatgatgtggacctggaggccctggtgaatgacatgaatgccagcctggagagcctgtacagcgcctgcagcatgcagagcgacacagtgcccctgctgcagaatggccagcacgcccggagccagccccgggccagcggccccccaagaagcatccagccccaggtgagcccccggcagagggtgcagaggagccagcctgtgcacatcctggccgtgcggcggctgcaggaggaggaccagcagttccgcaccagcagcctgcctgccatccccaaccccttccctgagctgtgtggccctggcagcccccctgtgctgaccccaggcagcctgccccccagccaggccgccgccaagcaggatgtgaaggtgttttctgaagatggcaccagcaaggtggtggagatcctggccgacatgacagcccgggacctgtgccagctgctggtgtacaagagccactgtgtggatgacaacagctggaccctggtggagcaccacccccacctgggcctggagcgctgcctggaggaccacgagctggtggtgcaggtggagagcaccatggccagcgagagcaagttcctgttcaggaagaactatgccaagtatgagttcttcaagaaccccatgaacttcttccctgagcagatggtgacctggtgccagcagagcaatggcagccagacccagctgctgcagaacttcctgaacagcagcagctgcccagagatccagggcttcctgcacgtgaaggagctgggcaagaagtcctggaagaagctgtatgtgtgcctgcggcgcagcggcctgtactgcagcaccaagggcaccagcaaggagcccaggcacctgcagctgctggccgacctggaggacagcaacatcttcagcctgattgctggcaggaagcagtacaatgcccccacagaccacggcctgtgcatcaagcccaacaaggtgagaaatgagaccaaggagctgcggctgctgtgtgccgaggatgagcagaccaggacctgctggatgacagccttccggctgctgaagtatggcatgctgctgtaccagaactaccgcatcccccagcagaggaaggccctgctgagccccttcagcacccctgtgcgctctgtgtctgagaacagcctggtggccatggacttcagcggccagacaggccgggtgattgagaacccagctgaggcccagagcgctgccctggaggagggccacgcctggaggaagaggagcaccaggatgaacatcctgggcagccagagccccctgcaccccagcaccctgagcaccgtcatccacaggacccagcactggttccacggccgcatcagccgggaggagagccaccgcatcatcaagcagcagggcctggtggatggcctcttcctgctgcgggacagccagagcaaccccaaggcctttgtgctgaccctgtgccaccaccagaagatcaagaacttccagatcctgccctgtgaagatgatggccagaccttcttcagcctggatgatggcaacaccaagttcagtgacctgatccagctggtggacttctaccagctgaacaagggcgtgctgccctgcaagctgaagcaccactgcatccgggtggccctgtag

SEQ ID NO: 305930 - DNA, 345 bp, Artificial Sequence
  derived and/or modified sequence
atgcaggccgccggccccctcttccgcagcaaggacaaggtggagcagacccccaggagccagcaggaccctgctggccctggcctgcctgcccagagcgaccggctggccaaccaccaggaggatgatgtggacctggaggccctggtgaatgacatgaatgccagcctggagagcctgtacagcgcctgcagcatgcagagcgacacagtgcccctgctgcagaatggccagcacgcccggagccagccccgggccagcggccccccaagaagcatccagccccaggtgagcccccggcagagggtgcagaggagccagcctgtgcacatcctggccgtgtag

SEQ ID NO: 305931 - DNA, 1767 bp, Artificial Sequence
  derived and/or modified sequence
atgcaggccgccggccccctgttccggagcaaggacaaggtggagcaaacgccacgcagtcagcaggacccagccggccctgggttacctgcacagagcgatcgcctggccaatcaccaggaggacgacgtggatctagaagcactggtgaatgacatgaacgcctccctcgagtccttgtatagcgcctgttccatgcagtcagacacggtgccactcctccagaacggacagcacgcccggagccagccaagagcttccgggcccccccgttctatccagccccaagtgtctccccgccaaagggtgcagcggtcacagccagtccatattctggcggtccgccgactgcaggaggaggaccagcagtttcgtacaagcagtctgccggcaatcccaaaccctttcccagagctgtgcggaccgggaagcccgcctgtgctgacccctggatccttgcctccctctcaggcagcagctaagcaagacgtcaaggtgttctcagaggatgggacaagcaaggtcgtggaaattttagcagacatgacggctcgtgatctctgccagctgctcgtgtataagtcacactgtgtggacgacaatagttggactcttgtggagcaccacccgcaccttggcctggaacgctgcttagaagaccatgagcttgttgtgcaggttgaatctaccatggccagcgagtcaaaattcttgtttcgcaaaaactacgctaaatacgagtttttcaagaatcccatgaatttcttccctgaacaaatggttacttggtgtcagcagtccaatgggagtcaaacccagctgctccaaaacttcctcaattccagctcctgtcctgagatccaaggctttctgcacgtaaaggagcttggaaagaagtcatggaaaaagctctacgtgtgtttacggcgatcaggactttattgcagcaccaagggcacttcaaaggaaccgcgccacttgcagctcctggctgacctggaagactctaacattttctctcttattgcagggcgcaagcagtataatgctcctacggatcacggtctttgtattaaaccaaacaaggtgcgcaatgaaacaaaagaactaaggttattgtgtgcagaggacgagcagacccggacctgttggatgaccgccttccgactactgaaatatggcatgctgctttatcagaattataggatcccgcaacagaggaaggccctgctgagcccattcagtacaccagtgaggtcggtaagtgagaactcactggtggccatggatttctctggccagaccgggagagtgattgagaaccccgctgaggcacagagtgctgctctcgaggagggacacgcatggcgcaagaggagcacacgcatgaacatcttaggctcccaatctcctctgcatccatcgaccctgtcgacagtgatacatcggacccagcactggttccatgggcgcataagtcgcgaagaaagtcatcgaatcataaaacagcaggggcttgtggacggacttttcctgctaagagactcccagtcgaatcccaaggctttcgtcctgactctctgccaccatcagaagatcaaaaattttcagatcctgccatgtgaggatgatggacagacttttttctccctggacgatggaaacactaagttttcggacctcatacagctggtggacttctaccaactcaataagggggttcttccatgtaaactaaagcatcactgcatccgggtagcactgtag

SEQ ID NO: 305932 - DNA, 345 bp, Artificial Sequence
  derived and/or modified sequence
atgcaggccgccggccccctgttccggagcaaggacaaggtggagcaaacccctcgttctcaacaggatcccgcaggtcccggtttaccagcacaaagcgaccgcctggctaatcaccaggaagatgatgtggacctcgaggctttagtgaacgatatgaacgccagtctggaaagcctgtacagcgcgtgttccatgcaatctgacacggtgcccctccttcagaacgggcagcacgccagaagtcaacctcgcgcatcgggtcctcctcgctcaatccagccgcaggtgtccccccggcagcgggtacagagaagccaacccgtccatatattggccgtgtag

SEQ ID NO: 305933 - DNA, 1767 bp, Artificial Sequence
  derived and/or modified sequence
atgcaggccgccggccccctgttccggagcaaggacaaggtggagcaaacacccaggtctcagcaggatccggccggcccagggttgccagctcagagcgacaggctggccaaccatcaggaagacgacgtggatctggaagcgctagtgaacgatatgaacgcttccctggaaagtctctacagcgcttgctctatgcaatctgacactgtccctttgttgcagaacgggcaacacgcacgctctcagcctagggcaagcggccctccaaggagcattcagccgcaggtgagtcctcgacagagagtgcagagaagccagcccgtccatatactagctgtcagacggttacaggaagaggaccagcagttcagaacaagttccctgccagcgatacctaatcccttccctgagctgtgcggccccggatccccacctgtactgacccccggatccctgcccccgagccaagccgccgcaaagcaggacgtgaaagtctttagtgaagacgggacctctaaggtcgtagaaattctcgcagatatgaccgctcgcgatttgtgtcagttactggtctacaagtcccactgcgtcgacgacaatagctggaccctggtagaacaccatccgcacctggggctcgagcgttgcctggaagatcatgaattggtagtccaggtggagagcaccatggctagcgaatctaaatttttgttccgaaagaactacgctaaatatgagttctttaaaaaccccatgaatttcttccctgagcagatggtaacgtggtgtcagcaatccaatggcagtcaaactcagctgctgcagaatttcctgaatagcagctcgtgccccgagatccagggctttctccatgtaaaggaactaggaaagaaaagctggaaaaaactgtacgtttgccttagaaggtccggactttactgctctactaaaggaacttcgaaagaaccgagacatctgcagctcctggcagatcttgaggattctaatatctttagtctcatcgcaggccgcaagcagtacaacgcgcccacagaccatggactgtgtatcaagcctaacaaggtgagaaacgaaaccaaggaactgcgcctgctctgtgccgaagacgagcagacccggacctgctggatgacagccttccgactcctgaaatatggcatgctgttgtaccagaactacagaattccgcagcagaggaaagccttgctcagccccttctcaactcccgtgaggtctgtttcggaaaattcccttgtagccatggatttctcaggtcagactggcagggtgatcgagaaccctgctgaggcacagtccgctgctctcgaggagggccacgcttggagaaagcggtctacccggatgaatattctcggatctcagtcaccgctgcacccatccacgctgagtaccgtgatccatagaacccaacattggtttcatggcaggattagccgagaggaatctcaccggattatcaaacaacaggggctggtggacggtttgtttctcctccgtgattcccagagcaatcctaaagcctttgtcctcactctgtgccaccaccagaaaatcaagaacttccagatcctcccctgcgaggatgacggccaaacatttttctctttagacgacggtaataccaagttctcagaccttatccagcttgtggatttttaccagctaaacaaaggggtgctgccatgcaagctcaagcatcattgcatcagggtggcactgtag

SEQ ID NO: 305934 - DNA, 1767 bp, Artificial Sequence
  derived and/or modified sequence
atgcaggctgccggtccactcttccgctccaaagataaggtggagcagacgcccaggagccagcaggatccagcagggcctggactccccgcacaatccgatcgcctggccaatcaccaggaagatgatgtggaccttgaagcgctggtgaatgatatgaacgccagcctcgaaagtctatattcagcctgcagcatgcagtccgataccgtcccactgctgcagaacggacagcatgctagatcgcagccccgagcaagcggcccacctcgaagcatccagccacaagtgtccccaagacagagggttcagagaagccagccggtccatatcttggctgttagaaggctgcaggaggaggaccagcagtttaggacgagcagtctccctgcaattcccaatccttttccagagttatgtggacctggctcaccgccagtgttgaccccgggttccctgccgccaagccaggccgcagccaagcaggatgtgaaagtcttcagcgaagacgggaccagcaaggtcgtagaaatccttgcagacatgacagccagggacctgtgccagctgctggtgtataaatcccattgcgtggatgataacagctggaccctggtcgagcaccacccccacttaggtctggagagatgcttggaagaccacgagctcgtcgtccaggtagagagcactatggcatctgaatctaagtttctcttcagaaagaactacgccaagtacgagttctttaagaacccaatgaatttttttcctgagcaaatggtaacttggtgccagcaatctaacggttctcaaacccagctcctgcagaatttcttaaattcttcttcctgtccagagatccagggattcctgcatgtgaaggaactcggcaagaagtcttggaagaagttgtatgtatgcctgagaaggagcggactgtactgctccaccaagggtacctccaaggaacctaggcacctgcagttgctggccgacctcgaggactccaacatatttagcttgatcgctggcaggaagcaatacaacgcaccaacggaccatggactgtgcatcaaacctaacaaagtgaggaacgaaacaaaagaattgaggctgttgtgcgcagaggacgaacagactcgtacgtgttggatgactgcattcaggttgttgaagtatggtatgctcctctatcagaattataggatacctcaacagcggaaagccttgctgagccctttctcaacacctgtgcgcagtgtttcggaaaactcactggtagccatggattttagcgggcaaaccgggcgtgtcattgagaatcctgcagaggctcaatccgcagcgctagaagaaggccacgcatggaggaagaggtctacgaggatgaacattctgggctcacagtctcctctgcatccgtctacgttgtctactgttatccaccggacacagcattggttccacggtaggatctcaagagaggaatcccaccggattattaaacagcagggccttgtcgatggactgtttttgctcagggactcccagagcaacccgaaggcattcgtgctgacattgtgccaccatcaaaaaatcaagaacttccagatcctcccttgtgaggatgacggacaaaccttctttagcctggacgacggaaatactaaattctctgacctcatacaactggtcgacttctatcagctgaacaagggcgtattaccctgcaagttaaagcaccattgcataagggtggcattgtag

SEQ ID NO: 305935 - DNA, 345 bp, Artificial Sequence
  derived and/or modified sequence
atgcaagcagctggccctcttttccgctctaaggataaggttgaacagacgccacgttcacagcaggatccagccggacctggtctccccgcacagagcgatagactagccaatcaccaggaagatgacgttgaccttgaggcactcgtaaacgatatgaacgctagcttggaatctctgtactcagcttgctcgatgcagagtgacacagttccccttctgcagaatggacaacatgccagatcacagcctcgagcaagtgggccaccaagatccatccaaccgcaagtgtcaccacggcagcgagttcagaggtcccagcccgtgcatatattggccgtctag

SEQ ID NO: 305936 - DNA, 1767 bp, Artificial Sequence
  derived and/or modified sequence
atgcaggcagcaggccctctgttcagatcaaaggataaggttgaacagacccccagaagccaacaagatccagctggccctggacttccagcgcaatctgataggttagccaaccatcaggaggatgatgtggacctggaagccctggtgaacgatatgaacgcttcactggagtcactgtattcggcctgcagtatgcaatccgatacggtcccactgctgcaaaacggacagcatgctcgtagtcagccacgcgcaagcggccctccacggtcaatccagcctcaggtgagtcccaggcagcgcgtacagaggtctcaacccgtacacatcttggccgtccgccgactacaggaagaagatcagcagttccggacctctagcctccccgctatccccaatccttttccagaactttgtggacccggttctccacctgtgctgacgccaggttcactgcctccgtcccaggctgctgcaaagcaagatgtgaaggtcttttctgaggacgggacctcaaaagtggtcgaaatactcgcggatatgacagcacgggacctgtgccagctgctggtctacaagtcccactgtgtcgacgataatagctggaccctggtggaacatcatccccatcttgggcttgagagatgtctcgaagaccatgagctggtagtccaggttgagagcacaatggcttcagagtcaaaattcctcttccggaagaactacgccaaatatgaattcttcaagaaccccatgaacttctttcccgagcagatggtgacttggtgccagcagagtaatgggtctcagacccagcttctgcagaacttcctgaattctagttcctgtccagagatacaaggatttttgcacgttaaggagcttgggaaaaaaagctggaaaaagctgtacgtgtgtctacgccgttcagggctatattgttccaccaagggtacttctaaggagccccgacacctgcaattgctcgccgaccttgaagacagcaacatcttttctcttatagcagggaggaagcaatacaacgcacccactgaccacggactctgcatcaagcctaataaggtgaggaatgagaccaaggaactgcggcttctctgcgccgaggatgaacagaccaggacatgctggatgactgcattccgattactaaagtacggaatgctcctctaccagaattacagaatcccgcaacaaagaaaagctctgctgtcacccttctctactcccgtacggagtgtaagcgagaactctctggtcgcaatggatttctccggacagacaggtagggtgattgagaacccagccgaagctcagagtgccgcactcgaagaagggcacgcttggcgaaaacggagcaccagaatgaacatcctcggtagtcagtccccactgcatcctagcaccctgagcaccgtgatacacagaactcagcactggtttcacggcagaatttcaagggaagagtcacacagaataatcaagcagcagggcttggtggacggtttgtttttgctgagggactcccaaagcaatccaaaagcttttgttctgaccttatgccaccatcagaagatcaagaactttcaaattctaccctgcgaggacgacggccagactttcttctccctcgacgatgggaacactaagttttctgatcttatccagctggtggatttctaccagctaaataagggcgtcctcccatgtaaattgaaacaccactgcattagagtcgcgctgtag

SEQ ID NO: 305937 - DNA, 381 bp, Artificial Sequence
  derived and/or modified sequence
atgaacatcctgggcagccagagccccctgcaccccagcaccctgagcaccgtgatccacagaacccagcactggttccacggcagaatcagcagagaggagagccacagaatcatcaagcagcagggcctggtggacggcctgttcctgctgagagacagccagagcaaccccaaggccttcgtgctgaccctgtgccaccaccagaagatcaagaacttccagatcctgccctgcgaggacgacggccagaccttcttcagcctggacgacggcaacaccaagttcagcgacctgatccagctggtggacttctaccagctgaacaagggcgtgctgccctgcaagctgaagcaccactgcatcagagtggccctgtag

SEQ ID NO: 305938 - DNA, 381 bp, Artificial Sequence
  derived and/or modified sequence
atgaatattctgggatcacagtctcccttgcatccctctaccctttcgaccgtgatccatcggacacagcactggtttcacggacggatctcgcgtgaggagagccacaggataatcaagcagcaaggactggtggacggcctcttcctgcttcgggatagccagtctaaccctaaagcttttgtgttaacattgtgccaccaccagaagattaagaatttccaaatcctcccctgtgaggacgacggccagacttttttctctttagacgacggtaataccaaattttctgatcttatccaacttgttgatttttaccagcttaataaaggagttcttccttgtaagctcaaacatcactgtattagggtggctttatag

SEQ ID NO: 305939 - DNA, 381 bp, Artificial Sequence
  derived and/or modified sequence
atgaacatcctgggcagccagagccccctgcaccccagcaccctgagcaccgtcatccacaggacccagcactggttccacggccgcatcagccgggaggagagccaccgcatcatcaagcagcagggcctggtggatggcctcttcctgctgcgggacagccagagcaaccccaaggcctttgtgctgaccctgtgccaccaccagaagatcaagaacttccagatcctgccctgtgaagatgatggccagaccttcttcagcctggatgatggcaacaccaagttcagtgacctgatccagctggtggacttctaccagctgaacaagggcgtgctgccctgcaagctgaagcaccactgcatccgggtggccctgtag

SEQ ID NO: 305940 - DNA, 381 bp, Artificial Sequence
  derived and/or modified sequence
atgaacatcctgggcagccagagccccctgcaccccagcaccctgtccacagtaatacataggactcagcattggtttcatggtcgtatttctcgcgaagaaagccatcgcataataaagcagcagggactagtggatgggctatttctactgagagactctcagagcaatcccaaggctttcgtgcttacactctgtcaccatcagaagattaaaaacttccagatcctgccatgtgaagacgacggtcagacctttttctccctcgacgacggtaatactaaattctcagatctcatacagctcgtcgacttttaccagctaaataagggagtgttaccttgcaaattgaaacaccactgcattcgagtcgctctgtag

SEQ ID NO: 305941 - DNA, 381 bp, Artificial Sequence
  derived and/or modified sequence
atgaacattctgggctctcagtcccccctgcacccttccaccctctcaactgttatccacagaacccagcactggtttcacggaagaattagccgcgaggaaagtcaccggatcattaagcagcaaggacttgtagacggtctctttttgttgcgagactcccagtccaacccgaaggcctttgtgctgacattatgtcatcaccagaagattaagaatttccagattttaccctgtgaggacgacggccagactttcttctccttagacgacgggaatactaagttttcggatctcattcagctggtcgatttttatcagttaaacaagggggtgctaccttgcaaactcaagcaccactgcattagggtggctctttag

SEQ ID NO: 305942 - DNA, 555 bp, Artificial Sequence
  derived and/or modified sequence
atgcccgtgaagggcgccagcagcctgctgttcctgcccctgccccccagcgcctggcagctgtgcctgctgagcaagagaagagtgcaccccatcagaacccccctgcccttccacagctggatcaaggccctggtgatcagcaaccagaaggtgcccgagagagagagacccgagggcaccggcgtgctgagcgacggctgcctgggccagagccaggagggcgagcccctgctgagcccccccgccctggcccacttccccctgcacgccagatgctgcggcagcagctgggcctggcccggcagcgccggcgaggccatcagaatggtgagcggcgcccccttcctgtgcttcctggacggcctggacggcctgccctgcagcagccccatggccgccctgcccgcccccatggccgccctgcccgccagaagacagagacaggagcacatcgagggcggcagccagggctgcggcgtgagaagccccgccccctgcagaggcaagcccggcagcgccaccagcagcaccctgagactgtgccccgcctag

SEQ ID NO: 305943 - DNA, 189 bp, Artificial Sequence
  derived and/or modified sequence
atgtgcggcagctactacggcaactactacggcgaccacggctacggctgttgtggttatgaggggttaggctatggttatggctctctccgctgcggatactcttcatgttgtgggtacgggcacgggtacggatcccgatttttctgtggctgcgggtatggctgcggctcgggctattattactag

SEQ ID NO: 305944 - DNA, 1287 bp, Artificial Sequence
  derived and/or modified sequence
aaagctggacgaggcagccggacccgtctgcgctcgagcatggagacggagcgcctgggagggcacgtccggggcgctggagacgccaggcccgagtagcttctccatggagcctgcccagagcggtcccttctcgcaggattcgccccaagtcctgtgcggctgctgagagcgctccttgctctgtaaagtggatgtcaggtggatctatgtttctgaaggaacaaagactcaaagaaggcaccgccaaggaagtttgagacgcgggagaatgcaggctgcgtgctggtacgtgcttttcctcctgcagcccaccgtctacttgagttttcaaagtaagaaaattacaaaacaagctaacagaggtttgtcttcttcctagagtgggcaagatctttagaaccacaactcaggtttgacttggtcacatgtgccaatttaacgaacggtggaaagtcagaacttctgaaatcaggaagcagcaaatccacactaaagcacatatggacagaaagcagcaaagacttgtctatcagccgactcctgtcacagacttttcgtggcaaagagaatgatacagatttggacctgagatatgacaccccagaaccttattctgagcaagacctctgggactggctgaggaactccacagaccttcaagagcctcggcccagggccaagagaaggcccattgttaaaacgggcaagtttaagaaaatgtttggatggggcgattttcattccaacatcaaaacagtgaagctgaacctgttgataactgggaaaattgtagatcatggcaatgggacatttagtgtttatttcaggcataattcaactggtcaagggaatgtatctgtcagcttggtaccccctacaaaaatcgtggaatttgacttggcacaacaaaccgtgattgatgccaaagattccaagtcttttaattgtcgcattgaatatgaaaaggttgacaaggctaccaagaacacactctgcaactatgacccttcaaaaacctgttaccaggagcaaacccaaagtcatgtatcctggctctgctccaagccctttaaggtgatctgtatttacatttccttttatagtacagattataaactggtacagaaagtgtgccctgactacaactaccacagtgacacaccttactttccctcgggatgaaggtgaacatgggggtgagactgaagcctgaggaattaaaggtcatatgacagggctgttacctcaaagaagaaggtcacatctgttgcctggaatgtgtct

SEQ ID NO: 305945 - protein, 388 aa, Artificial Sequence
  derived and/or modified sequence
MTASVLLHPRWIEPTVMFLYDNGGGLVADELNKNMEGAAAAAAAAAAAAAAGAGGGGFPHPAAAAAGGNFSVAAAAAAAAAAAANQCRNLMAHPAPLAPGAASAYSSAPGEAPPSAAAAAAAAAAAAAAAAAASSSGGPGPAGPAGAEAAKQCSPCSAAAQSSSGPAALPYGYFGSGYYPCARMGPHPNAIKSCAQPASAAAAAAFADKYMDTAGPAAEEFSSRAKEFAFYHQGYAAGPYHHHQPMPGYLDMPVVPGLGGPGESRHEPLGLPMESYQPWALPNGWNGQMYCPKEQAQPPHLWKSTLPDVVSHPSDASSYRRGRKKRVPYTKVQLKELEREYATNKFITKDKRRRISATTNLSERQVTIWFQNRRVKEKKVINKLKTTS

SEQ ID NO: 305946 - DNA, 2514 bp, Artificial Sequence
  derived and/or modified sequence
actggggtcttctccatgcggctcgggctatgacagcctccgtgctcctccacccccgctggatcgagcccaccgtcatgtttctctacgacaacggcggcggcctggtggccgacgagctcaacaagaacatggaaggggcggcggcggctgcagcagcggctgcagcggcggcggctgccggggccgggggcgggggcttcccccacccggcggctgcggcggcagggggcaacttctcggtggcggcggcggccgcggctgcggcggcggccgcggccaaccagtgccgcaacctgatggcgcacccggcgcccttggcgccaggagccgcgtccgcctacagcagcgcccccggggaggcgcccccgtcggctgccgccgctgctgccgcggctgccgctgcagccgccgccgccgccgccgcgtcgtcctcgggaggtcccggcccggcgggcccggcgggcgcagaggccgccaagcaatgcagcccctgctcggcagcggcgcagagctcgtcggggcccgcggcgctgccctatggctacttcggcagcggctactacccgtgcgcccgcatgggcccgcaccccaacgccatcaagtcgtgcgcgcagcccgcctcggccgccgccgccgccgccttcgcggacaagtacatggataccgccggcccagctgccgaggagttcagctcccgcgctaaggagttcgccttctaccaccagggctacgcagccgggccttaccaccaccatcagcccatgcctggctacctggatatgccagtggtgccgggcctcgggggccccggcgagtcgcgccacgaacccttgggtcttcccatggaaagctaccagccctgggcgctgcccaacggctggaacggccaaatgtactgccccaaagagcaggcgcagcctccccacctctggaagtccactctgcccgacgtggtctcccatccctcggatgccagctcctataggagggggagaaagaagcgcgtgccttataccaaggtgcaattaaaagaacttgaacgggaatacgccacgaataaattcattactaaggacaaacggaggcggatatcagccacgacgaatctctctgagcggcaggtcacaatctggttccagaacaggagggttaaagagaaaaaagtcatcaacaaactgaaaaccactagttaatggattaaaaatagagcaagaaggcaacttgaagaaacgcttcagaactcgttgctttgcccagataatgataataatgcttaataataattgaagaatgggaaagagaaagagacagagactggcattttcctctcccgaaggagatctctttctctttaatggaatctacaactgttttaaaactttaagaaaggtaaagactgccagttcttccgccaaccccatcagcccagcccgttaaatgtcaaacgtcaacccccaaaatacgcaatttcagataagttacgcagttactgaaatcttgtaagtatttaagtgatcgttacattttaggacactgcgttagatggtaataatctggaagttggttacaaacgcaagaggccattgtaaacatctgcttgtccttcttaggtcgccattccctttgcatgttaagcgtctgctcaggtaaatcttagtgaaattcctaccgttgttgtacgttctgcaaaacattttatgtatagatttagaggggaaacgagaaggtactgaaataatgatcttggaatatttgctgtgaagggagaaagggagagaaaactcttctgaggatcatttgtcttggtagtatagtaaaaccaaccagctgaacctttcaggctacaagagaacccgggtcggtaatgtctttttaagaataatttttaattgcttataacaagcatattttgtggcatttgaactatatttactgctccaatatccgttattttccaaaggattttgtatctttttgaaaatgtttacatcatcagatgatccacagaattcactttatgtgagatctcccgagagtttccatcccaacatgatggactttggtttgaacacaattcgttttttcatttgaattggcatttcccaatatttgctaaacatttgctggagaaatcatttttcttttttcttttttagaaaactcagaatgaaaattcattcccctgaaatatttaggtgtctatattctatattttgatctattaagggattagtatttttccatgtttattgtgttatcagagtgcattagaaagattagtgattcatcttcacagcacatttttaatcaagcagttatttcaaccagcacattcgttttgttcatattcactatagaatgatatcttgtaaataaagacattcagcacactgtgaaaatgtatttgtgcacctgctttttaaatatttctactaaaaatgaaaaaaaaaaacccttagacctgtagatagtgatatcgtaatattaattgttaataaaatagtcactgcc

SEQ ID NO: 305947 - DNA, 225 bp, Artificial Sequence
  derived and/or modified sequence
atgaaatttcaggaatgccatagcgaggtgatgcgtcatggacaaaaaatataccccagtcaccatcgtattgagatggctgtggaaattgctagcctgaagtgccagcacagcagcatcaatcaatctccaacaagaaagaattccaactctaccacaggatggcttctgtgggacctgctcatgggcatcggtaactccggatccaacgtggtcctgacctag

SEQ ID NO: 305948 - DNA, 1167 bp, Artificial Sequence
  derived and/or modified sequence
atgacggcctcagttctgctccaccctaggtggattgagcccacggtcatgtttctgtacgataatggcggagggcttgttgccgacgagttgaacaagaacatggaaggggccgcggccgcagcagcggccgccgccgcagcagccgcggcaggggcggggggtggaggatttccacatcctgctgcagccgccgctgggggcaatttttccgttgctgcagccgctgcagccgccgctgcagccgcagccaatcaatgccggaatctgatggcccacccagcccctctcgctcctggagccgcctcggcatactcctctgcccccggagaagcaccgccctcagctgcggccgcagccgccgccgcggccgcagcagcagctgccgctgctgcggcaagtagttctggtggacctggtccagcgggccctgctggagcagaggcggccaagcaatgctctccttgtagcgccgccgctcaaagctcctcagggcctgctgccctaccatatggctatttcggctcaggctactatccatgtgcacgaatgggacctcatccaaatgccatcaagtcatgcgcccagccagcgtcagccgccgccgccgcagcctttgcagataaatacatggacacagccggaccagctgcagaggagttctctagccgtgcgaaggagtttgccttctatcatcaggggtacgcggccgggccataccaccaccatcaacccatgccggggtacctcgatatgcccgttgtacctggcctagggggcccgggggaatccaggcacgagcccttagggctgccaatggaaagctaccaaccatgggcccttcccaatgggtggaacggtcaaatgtactgccccaaagaacaagcccagccaccccatctgtggaagtctaccttgccggacgtcgtatcccaccccagcgacgcatcctcgtataggcgtgggagaaagaaaagggtgccctacacaaaggtgcagttgaaggagctcgagagagagtacgccaccaataaatttatcacaaaggacaaacgtagacggatctccgctaccacaaatttgtccgagcggcaggtgactatatggtttcaaaaccggagggtcaaggaaaaaaaggtgatcaacaagctgaagactaccagctag

SEQ ID NO: 305949 - DNA, 4376 bp, Artificial Sequence
  derived and/or modified sequence
actggggtcttctccatgcggctcgggctatgacagcctccgtgctcctccacccccgctggatcgagcccaccgtcatgtttctctacgacaacggcggcggcctggtggccgacgagctcaacaagaacatggaaggggcggcggcggctgcagcagcggctgcagcggcggcggctgccggggccgggggcgggggcttcccccacccggcggctgcggcggcagggggcaacttctcggtggcggcggcggccgcggctgcggcggcggccgcggccaaccagtgccgcaacctgatggcgcacccggcgcccttggcgccaggagccgcgtccgcctacagcagcgcccccggggaggcgcccccgtcggctgccgccgctgctgccgcggctgccgctgcagccgccgccgccgccgccgcgtcgtcctcgggaggtcccggcccggcgggcccggcgggcgcagaggccgccaagcaatgcagcccctgctcggcagcggcgcagagctcgtcggggcccgcggcgctgccctatggctacttcggcagcggctactacccgtgcgcccgcatgggcccgcaccccaacgccatcaagtcgtgcgcgcagcccgcctcggccgccgccgccgccgccttcgcggacaagtacatggataccgccggcccagctgccgaggagttcagctcccgcgctaaggagttcgccttctaccaccagggctacgcagccgggccttaccaccaccatcagcccatgcctggctacctggatatgccagtggtgccgggcctcgggggccccggcgagtcgcgccacgaacccttgggtcttcccatggaaagctaccagccctgggcgctgcccaacggctggaacggccaaatgtactgccccaaagagcaggcgcagcctccccacctctggaagtccactctgcccgacgtggtctcccatccctcggatgccagctcctataggagggggagaaagaagcgcgtgccttataccaaggtgcaattaaaagaacttgaacgggaatacgccacgaataaattcattactaaggacaaacggaggcggatatcagccacgacgaatctctctgagcggcaggtcacaatctggttccagaacaggagggttaaagagaaaaaagtcatcaacaaactgaaaaccactagttaatggattaaaaatagagcaagaaggcaacttgaagaaacgcttcagaactcgttgctttgcccagataatgataataatgcttaataataattgaagaatgggaaagagaaagagacagagactggcattttcctctcccgaaggagatctctttctctttaatggaatctacaactgttttaaaactttaagaaaggtaaagactgccagttcttccgccaaccccatcagcccagcccgttaaatgtcaaacgtcaacccccaaaatacgcaatttcagataagttacgcagttactgaaatcttgtaagtatttaagtgatcgttacattttaggacactgcgttagatggtaataatctggaagttggttacaaacgcaagaggccattgtaaacatctgcttgtccttcttaggtcgccattccctttgcatgttaagcgtctgctcaggtaaatcttagtgaaattcctaccgttgttgtacgttctgcaaaacattttatgtatagatttagaggggaaacgagaaggtactgaaataatgatcttggaatatttgctgtgaagggagaaagggagagaaaactcttctgaggatcatttgtcttggtagtatagtaaaaccaaccagctgaacctttcaggctacaagagaacccgggtcggtaatgtctttttaagaataatttttaattgcttataacaagcatattttgtggcatttgaactatatttactgctccaatatccgttattttccaaaggattttgtatctttttgaaaatgtttacatcatcagatgatccacagaattcactttatgtgagatctcccgagagtttccatcccaacatgatggactttggtttgaacacaattcgttttttcatttgaattggcatttcccaatatttgctaaacatttgctggagaaatcatttttcttttttcttttttagaaaactcagaatgaaaattcattcccctgaaatatttaggtgtctatattctatattttgatctattaagggattagtatttttccatgtttattgtgttatcagagtgcattagaaagattagtgattcatcttcacagcacatttttaatcaagcagttatttcaaccagcacattcgttttgttcatattcactatagaatgatatcttgtaaataaagacattcagcacactgtgaaaatgtatttgtgcacctgctttttaaatatttctactaaaaatgaaaaaaaaaaacccttagacctgtagatagtgatatcgtaatattaattgttaataaaatagtcactgccattaaaatctgcagaaaatactctttactttcctatgctaaatgtgcactgcacagaaagaaaaggagcaggtttatcttatataaaccaaggaccattctttattattattcagtacttcttttgctaccaaatttttaagaaaagggagaaatccctcataactaaaatcctaaaaaatgataagtgcttcaaggagattaaagtgtcaggtattacaaaagggagagaaaagaaaggaggaagagatagtatgaattcccaggctccctgtggaaaatgaaaaccagttgttttgtagcagcaatgcctaggctgtcgtattttaaaatctgctgttgggtctgcatgtgtctgagagggcaggttttgatatttgttgaaatgacaggactacgaaaggccttaaaccttgaccttgacgaaaaaaaagacaatttgtgaccttgacttttgacagctcatgaattggccttagctggattagtagatcaagggcgccacctcgcgttgacaagcctccttgtaattcttcaaccaagggaatcaagagctcttacctccttgactttagagattcagtactcaattatttggctccagctggagcaaatttgaatatatgtaaattatacatgtccctgtatatatgtaaatatatataatatgtgtacacatgtatacatttgcatattagtgcttgtgtgtgcttgtatatatatttgtagaatctgtacagatatcatatcattaattgctaatgacgcaagatattgtaatttaaggtgatttctagaattgaggtacaaaatgtactttacaagatgaagccttgttccttttctctaatggccaaatttgatttgtcttcacagtggcttgctctgcatcagatttctgcagatctgctttaaagctgtacatttttgttacagtctaagatgtgttcttaaatcaccattccttcctggtcctcaccctccagggtggtctcacactgtaattagagctattgaggagtctttacagcaaattaagattcagatgccttgctaagtctagagttctagagttatgtttcagaaagtctaagaaacccacctcttgagaggtcagtaaagaggacttaatatttcatatctacaaaatgaccacaggattggatacagaacgagagttatcctggataactcagagctgagtactgctccagggtggtgtgcaatcttatattgatgcttgtgaatctgccatttgatttgtaggataaataaatatgtttaatattaacaacttccatcaaaactataataataatattatatctactgttgacctctaacaacaatcaggtgctgtattcagagtcataaagaatacatatgtatgtttgtatatttaatatacacataggataatgtgtttttgtcaaatctatgctatgcgcatatgtattaaaatgttggtggaatcagtagccgtgggatgcagaattgtgagatgcaggctaattttatctttacgttagaggaaagtaatagtgaatggaagaaccagattcatcattttatggaaaataatattgattggttacaaaagtggctgccggaaacctctccaacctctcctgaggactcacaacttctttatagatgagaattacgaaagagtctctaaagctgtctcaaaaacaggctggtgttgaaacatacatatcgaaaggtctcgagaaattcaattatattttgctgccctgaggattttcactccacttgtggaaacaaatgataatgttgcttcagacccacctctccacctcttgttccaaacagtactccatttccaaatgagctgccatcaag

SEQ ID NO: 305950 - DNA, 1167 bp, Artificial Sequence
  derived and/or modified sequence
atgacagcctctgtgctgctgcacccccgctggattgagcccaccgtgatgttcctgtatgacaatggaggcggcctggtggctgatgagctgaacaagaacatggagggcgctgctgctgctgctgctgctgctgctgctgctgctgctgctggagctgggggcggcggcttcccccaccctgctgctgctgctgctgggggcaacttctctgtggccgctgctgctgctgctgctgctgctgctgctgccaaccagtgcaggaacctgatggcccacccagcccccctggcccctggagctgccagcgcctacagcagcgcccctggagaggcccctccttctgctgctgctgctgctgctgctgctgctgctgctgctgctgctgctgctgctgccagcagcagcggcggccctggccctgctggccctgctggagctgaggccgccaagcagtgcagcccctgcagcgctgctgcccagagcagcagcggccctgctgccctgccctacggctacttcggcagcggctactacccctgtgccaggatgggcccccaccccaatgccatcaagagctgtgcccagcctgccagcgctgctgctgctgctgcctttgctgacaagtacatggacacagctggccctgctgctgaggagttcagcagccgggccaaggagtttgccttctaccaccagggctacgccgccggcccctaccaccaccaccagcccatgcctggctacctggacatgcctgtggtgcccggcctgggcggccctggagagagcagacatgagcccctgggcctgcccatggagagctaccagccctgggccctgcccaacggctggaatggccagatgtactgccccaaggagcaggcccagcccccccacctgtggaagagcaccctgcctgatgtggtgagccaccccagtgatgccagcagctaccgccggggcaggaagaagagggtgccctacaccaaggtgcagctgaaggagctggagcgggagtatgccaccaacaagttcatcaccaaggacaagagaagacgcatcagcgccaccaccaacctgtctgagcggcaggtgaccatctggttccagaacagaagagtgaaggagaagaaggtgatcaacaagctgaagaccaccagctag

SEQ ID NO: 305951 - DNA, 1167 bp, Artificial Sequence
  derived and/or modified sequence
atgaccgccagcgtgctgctgcacccccggtggatcgagcccaccgttatgttcttatatgataacgggggtggcctggtggctgacgagctcaacaagaatatggagggtgcagctgccgcggcagccgcagcagctgcagctgctgcagcgggggctggcggagggggtttccctcaccccgccgccgccgccgccggcggcaatttctctgtggccgcagccgctgctgcggctgctgccgctgctgccaaccagtgtaggaacctgatggcccaccccgctccattggctcctggggctgcctcagcttattcatcagcccctggagaagcaccgccgagtgcagctgccgctgctgctgcagccgctgcagccgcagcagctgccgcagccgctagctcctctggaggacccggtcctgcaggtccggcaggcgctgaagccgccaaacaatgcagtccatgcagcgcagccgcccaaagttcatctgggcctgcagcactcccttatggctattttggaagtggctactatccttgtgcgcggatgggacctcaccctaatgccatcaaatcgtgcgcccagcccgcctctgccgccgctgccgccgcttttgcagacaagtacatggatacggctggcccagctgcagaggagttcagcagccgtgctaaggaattcgccttttatcatcagggttatgccgctgggccttaccaccaccaccagcctatgcccggttacttggatatgcccgtcgtacctggactggggggacctggcgaatcgcgccacgagccactggggctgccgatggaatcataccagccctgggcgctgcctaatggttggaatggacagatgtattgcccaaaggagcaggctcaaccaccccatctgtggaagtccaccttgccagatgtggtgtcccacccctcggatgcctctagctaccgcaggggccggaagaagcgcgtaccgtacacgaaggttcagctcaaggagctggaacgggagtatgcgaccaataaatttattacaaaggacaaaaggagacgtatctccgcgactactaacctttccgaaagacaagtgaccatttggttccaaaacaggcgggtaaaggaaaagaaggtgattaataagttgaaaaccacatcctag

SEQ ID NO: 305952 - DNA, 1167 bp, Artificial Sequence
  derived and/or modified sequence
atgaccgctagcgtcctcttgcaccctcggtggattgagcctacagtcatgttcctctatgacaacggaggcggattggtggctgacgagcttaacaagaacatggagggggcagccgctgccgcagcggcagcggctgccgctgctgctgcaggggcaggtgggggtgggttcccacaccccgctgccgctgcagccggtggcaatttttccgttgcggctgctgctgcagccgcagcggctgctgctgccaaccaatgtaggaaccttatggcccatccggctccgctggctcccggagctgcatcagcttattctagtgcccctggagaagctcccccaagcgcggctgctgccgcagctgcagcagccgcagctgctgccgctgcggcagcggctagtagtagtggcggacccggaccagccggtccagcaggcgctgaagcagccaaacagtgtagtccttgctcagcggcagcacagtcctcttcgggtccagccgctttgccctatggttacttcgggtctggctattacccctgcgctaggatgggtcctcacccgaacgctatcaaatcctgcgcccagccagcctctgctgccgcagcggcagccttcgcggacaagtatatggatactgccggacccgcagccgaggagttctctagccgagcaaaggaatttgcattttatcaccaggggtatgctgctgggccttaccatcatcaccagcctatgccaggctatcttgacatgcccgtcgtgccagggcttgggggtcccggagagtcgcgtcacgagcctctgggcctgcccatggaatcctatcaaccttgggctttaccaaacggttggaacggccagatgtattgtcccaaggaacaggcgcaacctccccatttatggaagagcacactgcctgacgttgtgtcccacccaagcgatgcctcttcctatcgccgtgggcgtaagaagagagtaccttacaccaaggtgcaactaaaagaactggagagggaatatgctactaacaagttcatcacgaaggacaaaaggaggagaatttctgctactacaaatctgagtgagaggcaggtcacaatatggtttcagaaccggagggtgaaggagaaaaaggtcatcaataaactcaaaactacatcatag

SEQ ID NO: 305953 - DNA, 1167 bp, Artificial Sequence
  derived and/or modified sequence
atgaccgccagcgtgctgctgcaccccagatggatcgagcccaccgtgatgttcctgtacgacaacggcggcggcctggtggccgacgagctgaacaagaacatggagggcgccgccgccgccgccgccgccgccgccgccgccgccgccgccggcgccggcggcggcggcttcccccaccccgccgccgccgccgccggcggcaacttcagcgtggccgccgccgccgccgccgccgccgccgccgccgccaaccagtgcagaaacctgatggcccaccccgcccccctggcccccggcgccgccagcgcctacagcagcgcccccggcgaggccccccccagcgccgccgccgccgccgccgccgccgccgccgccgccgccgccgccgccgccgccagcagcagcggcggccccggccccgccggccccgccggcgccgaggccgccaagcagtgcagcccctgcagcgccgccgcccagagcagcagcggccccgccgccctgccctacggctacttcggcagcggctactacccctgcgccagaatgggcccccaccccaacgccatcaagagctgcgcccagcccgccagcgccgccgccgccgccgccttcgccgacaagtacatggacaccgccggccccgccgccgaggagttcagcagcagagccaaggagttcgccttctaccaccagggctacgccgccggcccctaccaccaccaccagcccatgcccggctacctggacatgcccgtggtgcccggcctgggcggccccggcgagagcagacacgagcccctgggcctgcccatggagagctaccagccctgggccctgcccaacggctggaacggccagatgtactgccccaaggagcaggcccagcccccccacctgtggaagagcaccctgcccgacgtggtgagccaccccagcgacgccagcagctacagaagaggcagaaagaagagagtgccctacaccaaggtgcagctgaaggagctggagagagagtacgccaccaacaagttcatcaccaaggacaagagaagaagaatcagcgccaccaccaacctgagcgagagacaggtgaccatctggttccagaacagaagagtgaaggagaagaaggtgatcaacaagctgaagaccaccagctag

SEQ ID NO: 305954 - protein, 257 aa, Artificial Sequence
  derived and/or modified sequence
MSGHKCSYPWDLQDRYAQDKSVVNKMQQKYWETKQAFIKATGKKEDEHVVASDADLDAKLELFHSIQRTCLDLSKAIVLYQKRICFLSQEENELGKFLRSQGFQDKTRAGKMMQATGKALCFSSQQRLALRNPLCRFHQEVETFRHRAISDTWLTVNRMEQCRTEYRGALLWMKDVSQELDPDLYKQMEKFRKVQTQVRLAKKNFDKLKMDVCQKVDLLGASRCNLLSHMLATYQLAWDQWQGPRNLKVLTKMTCCC

SEQ ID NO: 305955 - protein, 512 aa, Artificial Sequence
  derived and/or modified sequence
MSGHKCSYPWDLQDRYAQDKSVVNKMQQKYWETKQAFIKATGKKEDEHVVASDADLDAKLELFHSIQRTCLDLSKAIVLYQKRICFLSQEENELGKFLRSQGFQDKTRAGKMMQATGKALCFSSQQRLALRNPLCRFHQEVETFRHRAISDTWLTVNRMEQCRTEYRGALLWMKDVSQELDPDLYKQMEKFRKVQTQVRLAKKNFDKLKMDVCQKVDLLGASRCNLLSHMLATYQTTLLHFWEKTSHTMAAIHESFKGYQPYEFTTLKSLQDPMKKLVEKEEKKKINQQESTDAAVQEPSQYLQNICLEMKANSDIKMLQKGKEGQQIGILISLEEENQRKESSSFKTEDGKSILSALDKGSTHTACSGPIDELLDMKSEEGACLGPVAGTPEPEGADKDDLLLLSEIFNASSLEEGEFSKEWAAVFGDGQVKEPVPTMALGEPDPKAQTGSGFLPSQLLDQNMKDLQASLQEPAKAASDLTAWFSLFADLDPLSNPDAVGKTDKEHELLNA

SEQ ID NO: 305956 - protein, 162 aa, Artificial Sequence
  derived and/or modified sequence
MSGHKCSYPWDLQDRYAQDKSVVNKMQQKYWETKQAFIKATGKKEDEHVVASDADLDAKLELFHSIQRTCLDLSKAIVLYQKRICFLSQEENELGKFLRSQGFQDKTRAGKMMQATGKALCFSSQQRLALRNPLCRFHQEVETFRHRAISDTWLTVNRMEQC

SEQ ID NO: 305957 - DNA, 1539 bp, Artificial Sequence
  derived and/or modified sequence
atgagcggccacaagtgctcgtacccctgggacctgcaggaccgctatgcccaagacaagagcgtagttaacaaaatgcagcaaaagtattgggaaacaaagcaggcttttatcaaagctactgggaaaaaggaagacgaacatgtcgtggcgtctgacgccgatctggatgcaaagctcgagcttttccacagcatccagcggacatgtctggatctgtctaaagctatagtactctaccaaaaacggatctgcttcttgagtcaggaggaaaacgagcttggcaagttccttcgcagccaggggttccaagataaaacaagggccgggaagatgatgcaggcaaccgggaaagccttgtgcttcagttcccagcagcgcctggctctgagaaatccactgtgccgcttccaccaggaggtggagactttccgacaccgtgctatctccgacacgtggctgacagtgaacagaatggagcagtgccgcacggaatatcgcggagccctgctttggatgaaggacgtgtcacaagaactggacccagacttgtataaacagatggagaagttcaggaaggtccagacccaggtgaggcttgcaaaaaagaacttcgataaattgaaaatggatgtgtgccagaaggtggacctattaggagcgtctcgctgcaaccttctcagccacatgcttgccacgtaccaaactactctgctgcatttttgggagaagacatcccacacaatggcagccattcacgaatccttcaagggctaccagccatatgaattcaccaccctgaaaagcctgcaagaccccatgaagaagctggtggagaaagaagaaaagaagaagattaatcagcaggagtcaactgacgcagctgtccaagaaccctctcagtatctacagaatatttgtctggaaatgaaggcaaactccgatatcaagatgttgcagaagggcaaagagggacagcaaatagggattctgatcagcttggaggaggagaaccagcgcaaggagtcctcttcttttaaaactgaggacgggaaaagcatcctgtccgcactcgacaaggggtccacccatacagcctgctccggccctatcgacgagctgctcgacatgaagagtgaggagggtgcatgcctgggccctgtggcaggcacaccagagcctgaaggggcagataaggatgaccttctgctgctctctgaaattttcaacgcctcaagtttggaggagggcgaatttagcaaagaatgggctgctgttttcggagatgggcaggtaaaagaacctgtcccgacaatggcccttggagaaccagacccaaaagcacagacagggagcggcttcctgccatcacagctcttggatcagaatatgaaggatctccaagccagtcttcaggagcccgccaaagccgcatctgatcttacggcttggtttagtctgtttgctgatctggatcccctctcaaatccagatgctgttggaaagacggataaggagcatgaactgctaaatgcttag

SEQ ID NO: 305958 - DNA, 1539 bp, Artificial Sequence
  derived and/or modified sequence
atgtcaggacacaaatgcagttatccctgggacttacaggatcgatatgctcaagataagtcagttgtaaataagatgcaacagaaatattgggagacgaagcaggcctttattaaagccacagggaagaaggaagatgaacatgttgttgcctctgacgcggacctggatgccaagctagagctgtttcattcaattcagagaacctgtctggacttatcgaaagcaattgtactctatcaaaagaggatatgtttcttgtctcaagaagaaaacgaactgggaaaatttcttcgatcccaaggtttccaagataaaaccagagcaggaaagatgatgcaagcgacaggaaaggccctctgcttttcttcccagcaaaggttggccttacgaaatcctttgtgtcgatttcaccaagaagtggagacttttcggcatcgggccatctcagatacttggctgacggtgaaccgcatggaacagtgcaggacggaatatagaggagcactattatggatgaaggacgtgtctcaggagcttgatccagacctctacaagcaaatggagaagttcaggaaggtacaaacacaagtgcgccttgcaaaaaaaaactttgacaaattgaagatggatgtttgtcaaaaagtggatcttcttggagcgagcagatgcaatctcttgtctcacatgctagcaacataccagaccactctgcttcatttttgggagaaaacttctcacactatggcagccatccatgagagtttcaaaggttatcaaccatatgaatttactactttaaagagcttacaagaccctatgaaaaaattagttgagaaagaagagaagaagaaaatcaaccagcaggaaagtacagatgcagccgtgcaggagccgagccaatatttacagaatatttgcctcgagatgaaagcaaattcagatattaagatgctacagaaagggaaagaaggccagcaaattggcatattaatttcattagaggaagaaaaccagcgcaaggaatcctctagttttaagactgaagatggaaaaagtattttatctgccttagacaaaggctctacacatactgcatgctcaggacccatagatgaactattagacatgaaatctgaggaaggtgcttgcctgggaccagtggcagggaccccggaacctgaaggtgctgacaaagatgacctgctgctgttgagtgagatcttcaatgcttcctccttggaagagggcgagttcagcaaagagtgggccgctgtgtttggagacggccaagtgaaggagccagtgcccactatggccctgggagagccagaccccaaggcccagacaggctcaggtttccttccttcgcagcttttagaccaaaatatgaaagacttacaggcctcgctacaagaacctgctaaggctgcctcagacctgactgcctggttcagcctcttcgctgacctcgacccactctcaaatcctgatgctgttgggaaaaccgataaagaacacgaattgctcaatgcatga

SEQ ID NO: 305959 - DNA, 1539 bp, Artificial Sequence
  derived and/or modified sequence
atgagcggccacaagtgcagctacccctgggacctgcaggacagatatgcccaggacaagtctgtggtgaacaagatgcagcagaagtactgggagaccaagcaggccttcatcaaggccaccgggaagaaggaggatgagcacgtggtggccagtgatgctgacctggatgccaagctggagctgttccacagcatccagaggacctgcctggacctgagcaaggccatcgtgctgtaccagaagaggatctgcttcctgagccaggaggagaatgagctgggcaagttcctgcggagccagggcttccaggacaagaccagggctgggaagatgatgcaggccaccgggaaggccctgtgcttcagcagccagcagaggctggccctgaggaaccccctgtgccgcttccaccaggaggtggagaccttccgccaccgggccatcagtgacacctggctgactgtgaacaggatggagcagtgcaggacagagtacagaggagccctgctgtggatgaaggatgtgtcccaggagctggaccctgacctgtacaagcagatggagaagttcaggaaggtgcagacccaggtgcggctggccaagaagaactttgacaagctgaagatggatgtgtgccagaaggtggacctgctgggcgccagccgctgcaacctgctgagccacatgctggccacctaccagaccaccctgctgcacttctgggagaagaccagccacaccatggccgccatccacgagagcttcaagggctaccagccctatgagttcaccaccctgaagagcctgcaggaccccatgaagaagctggtggagaaggaggagaagaagaagatcaaccagcaggagagcacagatgctgctgtgcaggagcccagccagtacctgcagaacatctgcctggagatgaaggccaacagcgacatcaagatgctgcagaagggcaaggagggccagcagatcggcatcctgatcagcctggaggaggagaaccagaggaaggagagcagcagcttcaagacagaagatggcaagagcatcctgagcgccctggacaagggcagcacccacacagcctgcagcggccccattgatgagctgctggacatgaagtctgaggagggcgcctgcctgggccctgtggccggcaccccagagcctgagggcgctgacaaggatgacctgctgctgctgtctgagatcttcaatgccagcagcctggaggagggggagttcagcaaggagtgggccgctgtgtttggagatggccaggtgaaggagcctgtgcccaccatggccctgggggagccagaccccaaggcccagacaggcagcggcttcctgcccagccagctgctggaccagaacatgaaggacctgcaggccagcctgcaggagcccgccaaggccgccagtgacctgacagcctggttcagcctgtttgctgacctggaccccctgagcaacccagatgctgtgggcaagacagacaaggagcacgagctgctgaatgcctag

SEQ ID NO: 305960 - DNA, 1539 bp, Artificial Sequence
  derived and/or modified sequence
atgagcggccacaagtgcagctacccctgggacctgcaggaccggtatgctcaggacaaaagcgtcgtcaacaaaatgcagcaaaaatactgggaaactaagcaagcatttattaaagctacaggcaagaaagaagatgagcacgttgtcgccagcgacgccgacctcgacgctaagctggagctgttccattccattcagagaacatgcctcgacttgtccaaggcaatcgtcctgtaccaaaagcgtatttgctttctctctcaggaggagaatgaactgggcaaatttctgagatcgcagggttttcaagacaagactcgtgccggcaaaatgatgcaagcgacaggcaaggcactctgcttctctagccagcagagacttgccctccggaatccactctgtcgattccaccaggaagtggaaacgttccgtcatagagccattagcgatacatggctcaccgtgaaccgaatggaacaatgccggactgaatatcgcggggcactcctttggatgaaagacgtaagtcaggaactagatcctgacctctacaagcaaatggagaaatttcggaaggtgcagacacaggtgcggttagccaaaaagaacttcgacaagctcaagatggacgtttgtcagaaagtggatttgttgggcgcttctcgctgcaacctcttgagccacatgctggccacatatcaaactaccctgctgcacttctgggagaaaacatcacatacaatggctgccatccatgagagtttcaaagggtaccaaccttatgaattcaccaccctcaaaagcctccaggatcccatgaaaaaactggtggaaaaagaagagaaaaagaagatcaatcagcaggaaagcaccgacgccgccgtgcaggaacccagccagtacttacagaacatctgcctggaaatgaaggccaacagtgacatcaaaatgttgcagaaaggaaaggagggccagcaaattggcattctcatcagcctagaagaggagaaccagagaaaggaatctagttctttcaagacagaagacgggaaatctattctgtccgcacttgataagggttccacacatactgcatgttcaggaccaattgatgagcttctcgatatgaagtctgaggagggtgcctgcttaggacccgttgccggcacccccgagccagaaggtgccgacaaggatgatttgcttcttctgtcggagatttttaatgcatctagtttggaggaaggagagttctccaaggaatgggctgctgtgttcggcgacggccaagtgaaggaacctgtgccaacgatggctctgggtgaacccgacccaaaagcacagacagggagtggattcttacccagccagctgctggaccagaacatgaaagacctgcaagctagtctgcaagagcccgccaaggctgctagtgacctcactgcctggttttccctgttcgccgatcttgatcctctgtcaaatcctgacgctgtgggcaagactgacaaggagcacgagttactcaacgcgtag

SEQ ID NO: 305961 - DNA, 1539 bp, Artificial Sequence
  derived and/or modified sequence
atgagtggacataaatgctcatacccctgggacctccaggataggtacgcccaagacaagtccgtggttaacaagatgcaacagaagtactgggagacgaagcaagcatttattaaggccacgggcaaaaaggaagacgagcatgttgtcgcatccgatgcggatctggatgccaagctcgagctcttccactcaatacagcgcacttgcctggatctgtcaaaggcaattgtgctgtatcagaagcgaatctgctttctaagtcaggaagaaaacgagctgggcaagttcttgagaagccaggggtttcaggacaagactagagccggtaaaatgatgcaggctactggtaaggctttgtgtttcagcagtcagcagcgcctcgccctgcgcaaccccctttgtcgttttcaccaggaagtggagacctttcgccatagagctatcagcgatacatggctaaccgtgaaccggatggaacagtgtagaaccgaataccgcggagcgctgctgtggatgaaagatgtctcccaggagttggatcctgacttgtacaagcagatggagaagttccggaaagtccagactcaagttagattggccaagaagaatttcgacaaattgaaaatggatgtctgtcagaaagtggatctcctgggtgcttcccggtgtaatctgctgtcacacatgcttgccacctaccagacgaccctgctgcatttctgggagaagacatcccacactatggcagctattcatgagtcctttaagggatatcagccttatgagttcactaccctcaaaagtctgcaggacccaatgaagaaattggttgagaaggaggaaaaaaaaaaaattaatcagcaggaatcaaccgacgccgctgtccaggagccaagtcaatatcttcagaacatatgcctggagatgaaagctaattcagatatcaagatgcttcagaagggtaaagaggggcaacagatcggcatactaattagtctggaggaagaaaaccagcggaaggaaagctccagcttcaagacggaagatggcaaatccattttatcagctctcgacaaaggctccacgcacacggcttgttctggcccaatcgacgagttgttagatatgaagtcagaagagggcgcttgtctgggtcctgtagcgggaacacctgagccggaaggagcggataaggacgacctcctgctgttgtcagagatattcaacgcctctagtctagaggaaggagagttctcaaaagagtgggcagctgtctttggggatggccaggttaaggaaccagttcccaccatggcactgggggagcctgacccaaaggctcagactgggtctggcttcctcccgtctcagctgttggaccaaaatatgaaggatttgcaggcatctctgcaagaaccagccaaagcggcttccgaccttaccgcatggtttagtctctttgctgacctcgaccctctgtccaatcccgacgccgtgggtaaaaccgataaggaacacgagctccttaatgcctag

SEQ ID NO: 305962 - DNA, 1539 bp, Artificial Sequence
  derived and/or modified sequence
atgagcggccacaagtgcagctacccctgggacctgcaggacagatacgcccaggacaagagcgtggtgaacaagatgcagcagaagtactgggagaccaagcaggccttcatcaaggccaccggcaagaaggaggacgagcacgtggtggccagcgacgccgacctggacgccaagctggagctgttccacagcatccagagaacctgcctggacctgagcaaggccatcgtgctgtaccagaagagaatctgcttcctgagccaggaggagaacgagctgggcaagttcctgagaagccagggcttccaggacaagaccagagccggcaagatgatgcaggccaccggcaaggccctgtgcttcagcagccagcagagactggccctgagaaaccccctgtgcagattccaccaggaggtggagaccttcagacacagagccatcagcgacacctggctgaccgtgaacagaatggagcagtgcagaaccgagtacagaggcgccctgctgtggatgaaggacgtgagccaggagctggaccccgacctgtacaagcagatggagaagttcagaaaggtgcagacccaggtgagactggccaagaagaacttcgacaagctgaagatggacgtgtgccagaaggtggacctgctgggcgccagcagatgcaacctgctgagccacatgctggccacctaccagaccaccctgctgcacttctgggagaagaccagccacaccatggccgccatccacgagagcttcaagggctaccagccctacgagttcaccaccctgaagagcctgcaggaccccatgaagaagctggtggagaaggaggagaagaagaagatcaaccagcaggagagcaccgacgccgccgtgcaggagcccagccagtacctgcagaacatctgcctggagatgaaggccaacagcgacatcaagatgctgcagaagggcaaggagggccagcagatcggcatcctgatcagcctggaggaggagaaccagagaaaggagagcagcagcttcaagaccgaggacggcaagagcatcctgagcgccctggacaagggcagcacccacaccgcctgcagcggccccatcgacgagctgctggacatgaagagcgaggagggcgcctgcctgggccccgtggccggcacccccgagcccgagggcgccgacaaggacgacctgctgctgctgagcgagatcttcaacgccagcagcctggaggagggcgagttcagcaaggagtgggccgccgtgttcggcgacggccaggtgaaggagcccgtgcccaccatggccctgggcgagcccgaccccaaggcccagaccggcagcggcttcctgcccagccagctgctggaccagaacatgaaggacctgcaggccagcctgcaggagcccgccaaggccgccagcgacctgaccgcctggttcagcctgttcgccgacctggaccccctgagcaaccccgacgccgtgggcaagaccgacaaggagcacgagctgctgaacgcctag

SEQ ID NO: 305963 - protein, 134 aa, Artificial Sequence
  derived and/or modified sequence
MSGHKCYPWDLQDRYAQDKSVVNKMQQKYWETKQAFIKATGKKEDEHVVASDADLDAKLELFHSIQRTCLDLSKAIVLYQKRICFLSQEENELGKFLRSQGFQDKTRAGKMMQATGKALCFSSQQRLALRNPLC

SEQ ID NO: 305964 - protein, 1125 aa, Artificial Sequence
  derived and/or modified sequence
MWNRYFVFYLLLLSAFTSQTVSGQRKKGPKSNLLARKSDVQGSICFIDIVFIVDSSESSKIALFDKQKDFVDSLSDKIFQLTPGRSLEYDIKLAALQFSSSVQIDPPFSSWKDLQTFKQKVKSMNLIGQGTFSYYAISNATRLLKREGRKDGVKVVLLMTDGIDHPKNPDVQSISEDARISGISFITIALSTVVNEAKLRLISGDSSSEPTLLLSDPTLVDKIQDRLDILFEKKCERKICECEKGDPGDPGPPGTHGNPGIKGERGPKGNPGNAQKGEAGERGPGGIPGYKGDKGERGECGKPGIKGDKGSPGPYGPKGPRGIQGITGPPGDPGPKGFQGNKGEPGPPGPYGSPGAPGIGQQGIKGERGQEGRPGAPGPIGVGEPGQPGPRGPEGVPGERGLPGEGFPGPKGEKGSEGPTGPQGLQGLSIKGEKGDIGPVGPQGPMGIPGIGSQGEQGIQGPIGPPGPQGPAGQGLPGSKGEVGQMGPTGPRGPVGIGVQGPKGEPGSIGLPGQPGVPGEDGAAGKKGEAGLPGARGPEGPPGKGQPGPKGDEGKKGSKGNQGQRGLPGPEGPKGEPGIMGPFGMPGTSIPGPPGPKGDRGGPGIPGFKGEPGLSIRGPKGVQGPRGPVGAPGLKGDGYPGVPGPRGLPGPPGPMGLRGVGDTGAKGEPGVRGPPGPSGPRGVGTQGPKGDTGQKGLPGPPGPPGYGSQGIKGEQGPQGFPGPKGTMGHGLPGQKGEHGERGDVGKKGDKGEIGEPGSPGKQGLQGPKGDLGLTKEEIIKLITEICGCGPKCKETPLELVFVIDSSESVGPENFQIIKNFVKTMADRVALDLATARIGIINYSHKVEKVANLKQFSSKDDFKLAVDNMQYLGEGTYTATALQAANDMFEDARPGVKKVALVITDGQTDSRDKEKLTEVVKNASDTNVEIFVIGVVKKNDPNFEIFHKEMNLIATDPEHVYQFDDFFTLQDTLKQKLFQKICEDFDSYLVQIFGSSSPQPGFGMSGEELSESTPEPQKEISESLSVTRDQDEDDKAPEPTWADDLPATTSSEATTTPRPLLSTPVDGAEDPRCLEALKPGNCGEYVVRWYYDKQVNSCARFWFSGCNGSGNRFNSEKECQETCIQG

SEQ ID NO: 305965 - protein, 80 aa, Artificial Sequence
  derived and/or modified sequence
ATTSSEATTTPRPLLSTPVDGAEDPRCLEALKPGNCGEYVVRWYYDKQVNSCARFWFSGCNGSGNRFNSEKECQETCIQG

SEQ ID NO: 305966 - DNA, 3378 bp, Artificial Sequence
  derived and/or modified sequence
atgtggaacagatacttcgtgttctacctgctgctgctgagcgccttcaccagccagaccgtgagcggccagagaaagaagggccccaagagcaacctgctggccagaaagagcgacgtgcagggcagcatctgcttcatcgacatcgtgttcatcgtggacagcagcgagagcagcaagatcgccctgttcgacaagcagaaggacttcgtggacagcctgagcgacaagatcttccagctgacccccggcagaagcctggagtacgacatcaagctggccgccctgcagttcagcagcagcgtgcagatcgacccccccttcagcagctggaaggacctgcagaccttcaagcagaaggtgaagagcatgaacctgatcggccagggcaccttcagctactacgccatcagcaacgccaccagactgctgaagagagagggcagaaaggacggcgtgaaggtggtgctgctgatgaccgacggcatcgaccaccccaagaaccccgacgtgcagagcatcagcgaggacgccagaatcagcggcatcagcttcatcaccatcgccctgagcaccgtggtgaacgaggccaagctgagactgatcagcggcgacagcagcagcgagcccaccctgctgctgagcgaccccaccctggtggacaagatccaggacagactggacatcctgttcgagaagaagtgcgagagaaagatctgcgagtgcgagaagggcgaccccggcgaccccggcccccccggcacccacggcaaccccggcatcaagggcgagagaggccccaagggcaaccccggcaacgcccagaagggcgaggccggcgagagaggccccggcggcatccccggctacaagggcgacaagggcgagagaggcgagtgcggcaagcccggcatcaagggcgacaagggcagccccggcccctacggccccaagggccccagaggcatccagggcatcaccggcccccccggcgaccccggccccaagggcttccagggcaacaagggcgagcccggcccccccggcccctacggcagccccggcgcccccggcatcggccagcagggcatcaagggcgagagaggccaggagggcagacccggcgcccccggccccatcggcgtgggcgagcccggccagcccggccccagaggccccgagggcgtgcccggcgagagaggcctgcccggcgagggcttccccggccccaagggcgagaagggcagcgagggccccaccggcccccagggcctgcagggcctgagcatcaagggcgagaagggcgacatcggccccgtgggcccccagggccccatgggcatccccggcatcggcagccagggcgagcagggcatccagggccccatcggcccccccggcccccagggccccgccggccagggcctgcccggcagcaagggcgaggtgggccagatgggccccaccggccccagaggccccgtgggcatcggcgtgcagggccccaagggcgagcccggcagcatcggcctgcccggccagcccggcgtgcccggcgaggacggcgccgccggcaagaagggcgaggccggcctgcccggcgccagaggccccgagggcccccccggcaagggccagcccggccccaagggcgacgagggcaagaagggcagcaagggcaaccagggccagagaggcctgcccggccccgagggccccaagggcgagcccggcatcatgggccccttcggcatgcccggcaccagcatccccggcccccccggccccaagggcgacagaggcggccccggcatccccggcttcaagggcgagcccggcctgagcatcagaggccccaagggcgtgcagggccccagaggccccgtgggcgcccccggcctgaagggcgacggctaccccggcgtgcccggccccagaggcctgcccggcccccccggccccatgggcctgagaggcgtgggcgacaccggcgccaagggcgagcccggcgtgagaggcccccccggccccagcggccccagaggcgtgggcacccagggccccaagggcgacaccggccagaagggcctgcccggcccccccggcccccccggctacggcagccagggcatcaagggcgagcagggcccccagggcttccccggccccaagggcaccatgggccacggcctgcccggccagaagggcgagcacggcgagagaggcgacgtgggcaagaagggcgacaagggcgagatcggcgagcccggcagccccggcaagcagggcctgcagggccccaagggcgacctgggcctgaccaaggaggagatcatcaagctgatcaccgagatctgcggctgcggccccaagtgcaaggagacccccctggagctggtgttcgtgatcgacagcagcgagagcgtgggccccgagaacttccagatcatcaagaacttcgtgaagaccatggccgacagagtggccctggacctggccaccgccagaatcggcatcatcaactacagccacaaggtggagaaggtggccaacctgaagcagttcagcagcaaggacgacttcaagctggccgtggacaacatgcagtacctgggcgagggcacctacaccgccaccgccctgcaggccgccaacgacatgttcgaggacgccagacccggcgtgaagaaggtggccctggtgatcaccgacggccagaccgacagcagagacaaggagaagctgaccgaggtggtgaagaacgccagcgacaccaacgtggagatcttcgtgatcggcgtggtgaagaagaacgaccccaacttcgagatcttccacaaggagatgaacctgatcgccaccgaccccgagcacgtgtaccagttcgacgacttcttcaccctgcaggacaccctgaagcagaagctgttccagaagatctgcgaggacttcgacagctacctggtgcagatcttcggcagcagcagcccccagcccggcttcggcatgagcggcgaggagctgagcgagagcacccccgagccccagaaggagatcagcgagagcctgagcgtgaccagagaccaggacgaggacgacaaggcccccgagcccacctgggccgacgacctgcccgccaccaccagcagcgaggccaccaccacccccagacccctgctgagcacccccgtggacggcgccgaggaccccagatgcctggaggccctgaagcccggcaactgcggcgagtacgtggtgagatggtactacgacaagcaggtgaacagctgcgccagattctggttcagcggctgcaacggcagcggcaacagattcaacagcgagaaggagtgccaggagacctgcatccagggctag

SEQ ID NO: 305967 - DNA, 3378 bp, Artificial Sequence
  derived and/or modified sequence
atgtggaatcgttattttgttttctacctcctcctgctgagtgcctttacaagccagaccgtgagcggtcagcgtaagaaaggtcctaagtcgaacctcctcgcccggaaatcagatgtacaggggagtatttgttttattgatatcgtgtttatcgttgatagctcagagagttccaagatcgcactgttcgataaacaaaaggatttcgtcgatagcctcagcgacaagatcttccaactgacccccggacgatccttggagtacgatataaaacttgctgccctgcaattcagttcctccgttcagatagatccccctttctcaagctggaaggacctccaaacctttaagcagaaggtaaaaagcatgaacttgattgggcagggaacgttcagttactacgcaattagtaatgcaacccgcctgctgaagcgagaagggcgaaaagacggtgttaaggtcgtgttactaatgacagacggcattgatcatcccaaaaatccagatgtgcaaagcattagcgaggacgcgagaatttccggaattagctttataactattgcattaagtaccgtcgtcaacgaagccaagctcagactcatttcgggagattcaagcagtgaacctacgttgctcttgtctgatcctactcttgtggataaaatccaagataggctggacattctgttcgaaaagaaatgcgagaggaaaatctgtgagtgtgagaaaggagacccaggcgaccccggtccaccagggacacacggcaatccaggaatcaagggggagcgtggccccaagggcaatcctggtaacgcccagaagggcgaagcaggcgagcgcggcccaggaggcattcccgggtataaaggggacaaaggcgagcgcggcgagtgtggcaagccagggatcaagggagataagggcagccccgggccctatggaccaaagggtcctaggggtatacagggcattactggccctccaggggatcccggccccaaggggtttcaagggaataaaggcgagcccggtccaccgggaccctacggatcgcccggggcaccaggcattggacaacagggaatcaaaggggagcgcgggcaagagggaaggcccggagcccccggcccaattggtgtaggcgaacccggacagcccgggcctagaggtcccgagggcgttcccggagagcgcggtctccccggggagggctttccagggcccaaaggtgagaagggatctgagggaccaacaggccctcagggcctgcagggcctgtccattaagggagaaaagggagatattgggccggtcggcccacagggcccaatggggatcccaggcattggctcacagggtgaacaggggattcaggggccgattggcccccccggtccccaaggccccgctggccagggtctccccgggtccaagggggaggtgggacaaatgggaccaacagggcctcgtggccccgtaggcatcggagttcaggggccaaagggagagccagggagcattgggctcccaggacaacccggggtgcctggcgaggacggtgcagccggaaagaagggagaggcaggtctcccgggggctcgcggtccagaaggtccaccgggaaagggacaacccggaccaaagggtgatgaaggcaaaaaggggtcaaaaggaaaccagggccagcgcggcctgcctggccccgagggccccaaaggggagccaggtatcatgggcccattcgggatgcctggcacttcgatcccaggcccacctgggccaaagggggatagggggggtcccggcattcccggattcaagggtgagccaggattgtcaatcagaggacccaaaggtgtgcagggacccagggggccagttggggctccaggcttgaaaggggacggctacccaggggtgcccggtccacgaggtctacccggtccccccggaccaatgggcttgaggggggtcggggatactggcgccaaaggcgagccgggagtcagagggcccccaggcccgagtggccctcgcggcgtggggacccagggcccaaagggagacactgggcagaaaggcctgcccgggcctccaggtccgccaggatacggtagccaaggcatcaaaggggagcagggccctcagggtttcccaggccccaaagggacaatgggacacggcctgccaggccaaaagggcgagcatggggaaaggggggatgtcggtaaaaagggtgacaaaggagagattggcgagcctggatctcccggtaaacaaggactacaaggccctaagggcgatctaggattaactaaggaggagataatcaaactaatcaccgagatctgcggttgcgggccaaaatgcaaagagaccccattagaattggtgttcgtcatcgatagctcagagtccgttgggccagagaacttccagatcattaagaactttgtgaaaactatggcagatcgggtcgcactcgacctggcaaccgcgagaatcggcatcataaactactctcacaaggtcgaaaaggtagcgaatctcaagcagttcagctccaaagatgactttaagctagctgtagataacatgcagtacttgggggaggggacgtacacagcaacggctttgcaggcagccaatgatatgtttgaagacgcaagacccggggtcaaaaaagtggctctggtaatcactgatggtcagactgattcccgggataaagaaaagctgacagaagtcgtgaaaaatgcttcagatactaatgtggagatctttgtgataggggtagtaaagaagaacgatcccaatttcgaaatctttcacaaggaaatgaacctgattgccacagaccccgagcacgtgtaccagttcgacgacttttttactctgcaggacactctgaagcaaaagctgtttcagaagatctgcgaagatttcgatagctacttggtgcagatcttcggtagttcttccccgcaaccaggattcggaatgagtggggaggagttatcggagtccacgcccgaaccgcaaaaagaaataagcgaaagcctgtccgtgacaagggatcaagatgaggacgataaggcgcctgagcccacatgggcagatgaccttcccgccaccacatcaagtgaggcaaccaccaccccacgacccctcttgtcaacacccgtggatggcgccgaagatcctcgctgtctggaggctctaaaacctggcaattgtggtgagtacgtggtccgttggtattatgataagcaggtgaattcttgtgccagattttggttctcaggatgcaacggaagtggcaaccggttcaattccgaaaaagagtgtcaagaaacatgcatccaaggatag

SEQ ID NO: 305968 - DNA, 3378 bp, Artificial Sequence
  derived and/or modified sequence
atgtggaaccgctactttgtgttctacctgctgctgctgagcgccttcaccagccagacagtgtctggccagaggaagaagggccccaagagcaacctgctggccaggaagagtgatgtgcagggcagcatctgcttcattgatattgtgttcatcgtggacagcagcgagagcagcaagatcgccctgtttgacaagcagaaggactttgtggacagcctgagtgacaagatcttccagctgaccccaggccgcagcctggagtatgacatcaagctggccgccctgcagttcagcagctctgtgcagattgacccccccttcagctcctggaaggacctgcagaccttcaagcagaaggtgaagtccatgaacctgattggccagggcaccttctcctactatgccatcagcaatgccacccggctgctgaagcgggagggcaggaaggatggagtgaaggtggtgctgctgatgacagatggcatcgaccaccccaagaacccagatgtgcagagcatcagtgaagatgcccgcatcagcggcatctccttcatcaccatcgccctgagcacagtggtgaatgaggccaagctgcggctcatcagcggggacagcagcagcgagcccaccctgctgctgagtgaccccaccctggtggacaagatccaggaccggctggacatcctgtttgagaagaagtgtgagaggaagatctgtgaatgtgagaagggggaccccggggaccccggccccccaggcacccacggcaaccctggcatcaagggggagcggggccccaagggcaaccctggaaatgcccagaagggggaggccggggagcggggccctgggggcatccctggctacaagggggacaagggggagagaggagaatgtgggaagccaggcatcaagggggacaagggcagccctggcccctacggccccaagggcccccggggcatccagggcatcactggacctcctggggaccccggccccaagggcttccagggcaacaagggggagcccggccccccaggcccctacggcagccctggggcccctggcatcggccagcagggcatcaagggggagcggggccaggagggccggcctggggcccctggccccatcggcgtgggggagcccggccagcccggcccccggggccctgagggcgtgcctggagagcggggcctgcctggagagggcttccctggccccaagggggagaagggcagcgagggccccaccggcccccagggcctgcagggcctgagcatcaagggggagaagggggacatcggccctgtgggcccccagggccccatgggcatccctggcatcggcagccagggcgagcagggcatccagggccccatcggccccccaggcccccagggccctgctggccagggcctgcccggcagcaagggggaggtgggccagatgggccccaccggcccccggggccctgtgggcattggagtgcagggccccaagggggagcccggcagcatcggcctgcccggccagcccggggtgcctggagaagatggagctgctgggaagaagggggaggccggcctgcccggggcccggggccctgagggccccccaggcaagggccagcccggccccaagggagatgagggcaagaagggcagcaaaggaaaccagggccagaggggcctgcccggccctgagggccccaagggggagcccggcatcatgggccccttcggcatgcctggcaccagcatccctggccccccaggccccaagggggacagaggaggccctggcatccctggcttcaagggggagcccggcctgagcatccggggccccaagggcgtgcagggcccccggggccctgtgggcgcccctggcctgaagggagatggctacccaggagtgcccggcccccggggcctgcccggccccccaggccccatgggcctgcggggcgtgggggacacaggagccaagggggagcccggggtgcggggccccccaggccccagcggcccccggggcgtgggcacccagggccccaagggggacaccggccagaagggcctgcccggccccccaggccccccaggctacggcagccagggcatcaagggggagcagggcccccagggcttccctggccccaagggcaccatgggccacggcctgcccggccagaagggggagcacggggagagaggagatgtgggcaagaagggggacaagggggagattggagagcccggcagccctgggaagcagggcctgcagggccccaagggggacctgggcctgaccaaggaggagatcatcaagctgatcacagagatctgtggctgcggccccaagtgcaaggagacccccctggagctggtgtttgtgattgacagcagcgagagcgtgggccctgagaacttccagatcatcaagaactttgtgaagaccatggctgacagagtggccctggacctggccacagccagaattggcatcatcaactacagccacaaggtggagaaggtggccaacctgaagcagttcagcagcaaggatgacttcaagctggccgtggacaacatgcagtacctgggggagggcacctacacagccacagccctgcaggccgccaatgacatgtttgaagatgcccggcctggggtgaagaaggtggccctggtgatcacagatggccagacagacagccgggacaaggagaagctgacagaggtggtgaagaatgccagtgacaccaacgtggagatcttcgtcatcggcgtggtgaagaagaatgaccccaactttgagatcttccacaaggagatgaacctgattgccacagatcctgagcacgtgtaccagtttgatgacttcttcaccctgcaggacaccctgaagcagaagctgttccagaagatctgtgaggactttgacagctacctggtgcagatcttcggcagcagcagcccccagcccggcttcggcatgtctggagaggagctgtctgagagcaccccagagccccagaaggagatcagcgagagcctgtctgtgacccgggaccaggatgaagatgacaaggcccctgagcccacctgggcagatgacctgcctgccaccaccagcagcgaggccaccaccaccccccggcccctgctgagcacccctgtggatggagctgaggacccccgctgcctggaggccctgaagccaggcaactgtggggagtatgtggtgcgctggtactatgacaagcaggtgaacagctgtgcccgcttctggttcagcggctgcaatggcagcggcaaccgcttcaacagcgagaaggagtgccaggagacctgcatccagggctag

SEQ ID NO: 305969 - DNA, 3378 bp, Artificial Sequence
  derived and/or modified sequence
atgtggaaccggtacttcgtgttctacctgctgctgctgagcgcctttacgtcgcagacagtaagcggacagaggaagaaagggccaaagtccaaccttttagcacgcaaatctgatgtccaggggtcaatttgctttattgacatcgtgttcattgtggattcctcggaaagctccaagattgccctgtttgacaagcagaaggactttgttgattctctctcagacaaaatcttccagctcacacctggaagatcacttgaatacgacatcaagctagcggcattgcagtttagtagcagcgtgcaaattgatcctccgttctcaagttggaaggacctacaaacattcaagcagaaagtgaaaagcatgaatcttatcggccaaggaacattcagttactatgccatttcgaatgccacccggctcttgaagagggaggggcggaaggacggggtgaaggtggtgctgctaatgacagacggaatagaccacccaaaaaatcccgacgtgcagagtatctccgaagacgctcggatctctggaatcagcttcattactatcgcactctctactgtcgtgaatgaagcaaaactgaggttgatttcaggggacagtagttctgagcctaccctcctgctgtcagacccaacactggtagacaaaattcaggataggctagatatactgtttgaaaagaagtgcgaacggaaaatatgtgagtgcgaaaagggcgacccaggtgacccaggaccccctgggacgcacggaaatcctgggatcaaaggcgaaagaggacctaaaggcaatcccggcaatgctcagaaaggagaggccggcgagcgtggacccggtgggatcccgggctataaaggcgacaagggagagcgtggcgagtgtgggaagccggggataaagggggataagggttctcccgggccttatgggccgaagggaccacggggtattcaggggattacagggccacctggggatccaggaccgaaaggctttcagggaaacaagggagagccaggccctccagggccgtacgggagtccaggagcccccggtatcggccaacaaggaataaaaggcgaacgggggcaagagggacgtccaggcgcgcccggtcccatcggggttggagagcccggccagccaggccctcgcggccctgaaggagtccctggcgagagaggcttacctggcgagggattccctggaccaaagggagaaaaaggctccgagggacccaccggaccccagggactgcagggtctgagtatcaagggtgagaagggggatattggaccagtgggtcctcagggccctatgggtatcccaggcatcgggtctcaaggagagcagggcattcagggtcctatcggtcctccaggaccccaaggtcccgcagggcagggtctgccaggaagcaagggggaggtcggccagatggggcccaccggtccccgcggaccggtggggattggagtgcaggggcccaaaggcgaaccggggtctataggacttcccggacagcctggcgtcccaggagaagatggcgcggctggaaagaagggcgaagctgggctgccaggcgctagagggcccgagggtcctccgggaaagggccaaccaggccctaagggggatgaaggaaaaaaaggatcaaaaggcaaccaaggacagcgtggacttcctggaccagaaggaccaaagggtgagccagggattatgggcccatttgggatgcccggcaccagtatcccagggccacccgggccaaaaggcgacagaggcgggcctggtatccctggattcaaaggcgaacctggcctaagcattagaggccctaaaggagtccagggcccccgcggcccagtgggcgcacctggattaaagggggacggataccccggagtgcccggccctcggggactgcccggtccccctggacctatgggcctgcgtggtgtgggtgatacaggagctaagggagagcctggagtcaggggtccccccggccctagtggcccgagaggagttggcacacagggacctaagggggacaccggccagaaggggttgccaggtcccccaggcccacccgggtacggatctcaagggattaagggcgagcagggccctcagggtttccctggacccaagggaacgatgggacatggcttacctgggcaaaaaggggagcacggcgagcgaggagatgttgggaaaaagggggataagggagaaataggcgaacccggttcccctgggaagcaagggttgcaaggacccaagggtgaccttggacttaccaaagaagaaataattaagctcatcacagagatttgcggttgtggccctaaatgcaaggaaacaccactggagctcgtttttgtaattgattcttctgaaagtgtgggccctgagaatttccagatcattaagaactttgtgaaaaccatggctgaccgagttgcactggatctggcgacggcgagaattgggattataaactactcgcataaagttgaaaaagttgccaacctgaaacagtttagctccaaggacgatttcaaactggctgtcgataacatgcagtacctgggcgagggcacctacactgccactgccctgcaggcggctaatgatatgttcgaagatgcgaggcccggggtgaaaaaggtggcattggtaatcactgacggccagaccgattcacgggacaaagagaaactcacagaagtggttaaaaacgcgagtgacacgaatgtcgagatctttgtgatcggagtcgtaaaaaagaatgacccgaattttgagatttttcacaaagagatgaacctaatagcaaccgacccagagcatgtatatcagttcgacgatttcttcaccttgcaggacacccttaaacagaagttgttccaaaagatatgtgaggactttgattcttatctggtccaaatctttgggtcctcatccccccagccggggtttggaatgtctggagaggagctctcagagtccacacctgagcctcagaaagaaataagcgagtccttgagcgttactagggatcaggatgaggacgataaagctccagaaccaacttgggccgatgatctaccagctaccaccagcagcgaagcgaccactactcccaggccactcttgagcacgccagtggatggcgccgaagacccgaggtgcctagaggccctgaaacctggcaactgtggcgaatacgtcgtgcggtggtattatgacaagcaggtgaattcttgcgcacgtttttggttcagtggatgtaatggctcaggaaatagatttaactccgaaaaagaatgtcaggagacctgtatccagggctag

SEQ ID NO: 305970 - DNA, 3378 bp, Artificial Sequence
  derived and/or modified sequence
atgtggaacagatatttcgttttttacttgctgttactgtccgcatttacttcccagacagttagcgggcagcggaaaaaaggtccgaagtccaaccttctggccagaaaatcggacgtgcaggggagtatctgttttatcgatattgttttcatagtggatagctcagaatctagtaaaatcgcccttttcgataaacaaaaggatttcgtggattccctctcagacaagatcttccagctgactcccggtcgttctctcgaatatgacatcaagttggcagccctgcaattctcctcgtccgtacagatagacccacccttttcctcgtggaaggacttacagaccttcaagcagaaggtaaagagtatgaatctgatcggccagggtaccttttcgtactatgccatttctaatgccaccagactgctgaagagagaagggagaaaggatggggtcaaggtggtgctgctgatgacggatggcattgatcaccctaaaaacccggacgtccagagcatctctgaggacgccagaatctccggaatcagtttcattacaatcgccttatctactgttgtaaacgaagctaagctaagactcattagtggggatagctccagtgagccaaccttgttactcagcgatcccactctggtggacaaaattcaggataggctggacatcctcttcgagaagaagtgcgagagaaaaatttgcgagtgtgagaagggcgatcccggtgatccagggcctcctggaacacacgggaatcccggaattaaaggcgagcgcggtcccaaaggcaaccctggaaacgcacaaaagggagaggcgggtgagcgagggcctggtgggatacctggatataaaggagataagggagagagaggcgagtgtggcaagcctgggatcaaaggagacaagggctctcccggtccctatgggcctaaaggccctcgcggtattcagggcataacaggcccacctggcgaccctggtcctaagggcttccagggtaacaagggggaaccaggtccccctggaccttacggtagccccggagccccaggcatcggacagcaagggatcaagggcgaacgcggtcaggagggacgcccaggcgcacccggacccattggggtgggcgagccaggacaaccaggtcctagaggcccagagggggtcccaggagaacgcggtttgcctggggagggctttcccggacccaaaggggagaaaggctcagagggaccaacagggccacagggcctgcaagggctatctattaaaggagaaaaaggagacattggtccagtggggccacaggggcctatgggcatccccggtatcgggagtcagggcgagcagggaatccagggccctatcggccctccgggaccacagggtccggctggacagggactccccggtagcaaaggtgaagtgggtcaaatgggaccaaccggtccccgtggtcctgttggcatcggcgtccaagggccaaaaggagagccagggtcaattgggcttccaggacagccaggagtccctggagaggacggggcagcaggtaagaagggggaagccggacttcccggagcgagaggtccggaggggccacccggaaagggccagcccggaccgaaaggggacgagggtaagaagggcagcaaggggaatcaggggcagagggggctgcctgggcctgaaggccctaagggggagccgggtattatgggcccttttggaatgccgggaactagtatccctggccctcccggacctaagggtgaccgtggagggccagggattcctggctttaagggggaacccggactatcaatccggggtccaaagggcgtgcagggaccaagaggaccagttggcgctccgggtctgaagggggacggctatccaggagtacccggtccccgtggcctgccagggcctccaggccctatgggactgcggggtgtcggagacactggagcaaaaggggaaccaggcgttaggggccctcccggacctagtggcccacgtggggtagggacccaaggaccaaagggagacaccggccaaaagggccttccaggccctcctggtcccccaggatacgggtcccaggggattaagggggaacaggggccacagggctttccaggcccaaagggcacaatgggtcacggacttcccggtcagaagggcgaacacggggaacgcggagatgtggggaagaagggcgataagggcgaaatcggtgaacctggttctcctggcaagcagggcctccaaggcccaaagggcgatctcggtctcaccaaggaggagattataaagcttatcaccgagatctgtgggtgtggtccaaaatgtaaggagacgcctttagagttggttttcgtcatagactctagcgagagcgttggccctgagaattttcagatcatcaaaaattttgtgaaaacgatggctgatagggttgcactggatcttgctactgccaggatcggcatcataaattacagtcacaaggtcgaaaaggtagctaacctaaagcaattttccagcaaggatgacttcaagctcgcggtggacaatatgcagtacctgggtgagggaacttataccgcgactgccctgcaggctgcaaacgacatgttcgaagatgctaggcccggagtgaaaaaggtggcgctggtgatcaccgatggacagacagattcccgcgacaaggagaaattaactgaagtcgtgaaaaacgcctcagatactaatgtcgagattttcgtcattggcgtcgtaaaaaagaacgaccccaacttcgaaatcttccacaaagagatgaacctcattgcaacagatccagagcatgtctaccagttcgatgacttttttactctgcaagacacgctgaagcagaagctttttcagaagatttgcgaagactttgacagttatcttgtccagatcttcgggtcgtcctctccccagccagggtttggcatgtccggagaggaactctccgagtccactccagagccacagaaggagatcagcgagtctctgagtgttacaagggaccaagacgaagacgacaaggcgcctgagccaacatgggctgacgatttgcccgcaacaactagttctgaggcaactaccacccctcgaccactgctgtccactccggtggacggcgctgaggaccctagatgcctggaagctctcaagccaggaaactgcggtgaatacgtagttaggtggtattacgacaaacaggtaaacagttgcgcccgattttggttttccggttgcaacggtagcggtaatagattcaacagtgaaaaagagtgccaagagacgtgcatccagggatag

SEQ ID NO: 305971 - DNA, 4277 bp, Artificial Sequence
  derived and/or modified sequence
cagaacagaacaatatcaaatagctaacttcacccccaaccacagtccttgctgttggcatttactcaactagtctttaattcctgtttgacaaactttataaggtgctacaagacagatgatttttcaccatctaccataatgtggaacagatattttgtcttctatctcctgcttttgtcagcgtttacgagtcaaacagtatccggacaaagaaagaaaggaccaaaatcaaatttgcttgcaaggaaaagtgatgtccagggctccatttgtttcatagatattgtcttcatcgtggacagctctgaaagttctaaaattgccctctttgataaacagaaagattttgtggatagcttgagtgacaagattttccaattgactcctggtcgctccttggaatatgacatcaaactggcagcccttcagtttagcagctctgtccaaattgatccacctttttcttcctggaaggacctgcagacatttaagcagaaggtcaagtctatgaatttaatagggcaaggtaccttctcttattatgccatttccaatgccactaggctacttaagagagaagggcgtaaggatggtgtgaaagtggttttgctgatgactgatggcatcgaccatccaaagaatccagatgttcaaagtatttctgaagatgccagaatttcaggaatatcatttatcaccattgcactttctacggtagtcaatgaagccaaacttcgtttgatttctggggattcatccagtgaacccactttactgttgagtgatccaacccttgtagataaaattcaagatcgtctggatatcttatttgaaaagaagtgtgaacgcaagatttgtgaatgtgagaagggagatccaggtgatccagggcctcctggtacacatggaaatccaggtatcaaaggtgagcgaggaccaaaaggaaacccgggcaacgctcaaaaaggagaagctggagaaagaggtccagggggaattcctgggtacaagggtgacaagggtgaacgtggggaatgtggtaaaccagggataaaaggtgacaagggatccccagggccatatggaccaaagggacccagaggaattcagggaattactggacctccaggagacccaggcccaaaggggtttcaaggcaataagggtgagccaggtcctcctggtccttatggttctccaggagctcctggaattggacagcaaggtattaagggagaaagaggccaagaaggaagaccgggagctccaggacccattggagttggtgagcctggacagccaggtccccgtggtcctgagggagtaccaggagagaggggcttacccggagaaggatttccaggaccaaagggtgaaaaaggttctgaaggaccaactggcccacagggattacaaggcctgtcaatcaaaggggagaagggggatataggacctgtgggaccccaaggaccaatgggtatccctggaatcgggagtcaaggggaacagggaatccaaggtcctattggtccacctggtccacaagggcccgcaggacagggcttacctggttccaagggagaagtaggccaaatgggacctacaggccctcgaggaccagtgggaattggagtacaaggtccaaagggagagccaggctcaatagggctcccaggacaaccaggagtaccaggagaagatggagctgcagggaagaagggagaagcggggcttccgggagcaagaggcccagaaggaccacctggaaaaggacagcctggccccaagggtgacgaaggcaagaaagggagcaaaggaaatcaaggacagaggggacttccagggcccgaaggaccaaagggtgaaccgggcattatgggcccttttggaatgcctggaacatcaattcctggaccacctgggccaaagggagatagaggaggacctgggatacctggatttaagggagaacctggactttctattcgaggaccaaagggtgtccaaggccctcggggaccagtgggtgctccaggactcaaaggtgatggctatcctggtgtgcctggacctcgtggattaccaggaccccctgggccgatgggtttacgtggagtgggagacactggagcaaagggagagcctggggtcagaggccctccaggtccttctgggcctcggggcgtaggaacccaagggccaaagggtgatactgggcagaaaggcttgcctggccctcctggcccccctggctatggatcacagggaattaaaggggaacaaggaccacaaggcttcccaggcccaaagggcacaatgggccatggcctcccaggccagaagggagagcacggagaacggggcgatgtgggaaagaaaggtgataaaggagaaattggagagcctggatctccaggaaaacagggtttacaaggacccaaaggagacctaggacttacaaaagaagaaattatcaaacttattacagaaatatgtggttgtgggcccaaatgcaaagagactccactagagctggtgtttgtgatcgacagctcagaaagcgtggggccagagaactttcagatcattaaaaattttgtgaagactatggctgaccgggttgctctggaccttgccacggcccgcataggcataatcaactatagccataaggtggagaaggtggctaatttgaagcagttctccagcaaggatgacttcaagttggctgtggacaacatgcagtatctgggggaaggcacatacacagccactgctctgcaagcagccaacgacatgtttgaagatgcaaggccaggtgtaaaaaaagtggccttggtcatcactgatggacagacagattctcgtgataaagagaaactgacagaggtggtgaagaatgccagtgacaccaatgtggagatatttgtgataggggtggtgaagaaaaatgatcccaactttgaaatattccacaaagaaatgaatctaattgctactgacccagagcatgtttaccagtttgatgatttctttaccctgcaagacaccctgaagcaaaaattgtttcaaaaaatttgtgaggattttgattcctatctcgttcaaatttttggttcatcgtcacctcaacctggatttgggatgtcaggggaagaactcagtgaatctactccagagcctcaaaaagaaatttctgagtcattgagtgtcaccagagaccaggatgaagatgataaggctccagagccaacgtgggctgatgatctgcctgccactacctcatctgaggccaccaccacccccaggccactgctcagcacccctgtggatggggcagaggatcctagatgtttggaagccttgaagcctggaaactgtggtgaatatgtggttcgatggtattatgacaaacaggtcaactcttgtgcccgattttggttcagtggctgtaatggctcaggaaatagattcaacagtgaaaaggaatgtcaagaaacctgcattcaaggatgagcaagtaaattggcctgtctctatcaaaagcatagaactccctaatttccacatattcacccaatacaaatacagcactatatttgagtgtatactgagtatttacaacttatacatgtaattgaattctcactacagccctaggatgtacatattattaaccacttatataggtaagaaagctgaggctctgagaagtttagtaacttgtcaactgtcacccaactaaaaagtttcagagctgaggatttagacttagagctgtgtaacttcaatacacagactctatctacttcacaacctgcaatgtgattctgattcctttaattcctgttgtatgtactatgtcagctcaaacccctacccctgtccctgcccatacctccacccactcacctccctaacctccttatgtccctcgcagtagcaagatgtaggtgataggaaggacttcggtgtgagaattagaaatgatgtaaatgtttacgcaggagtgctgggataggagtcgggatggtgagggtagttagatttttgcctcacttgccctgaaagtggtaatagggagaaaccaatctgaattacaattacttaaatgtatcacagactgtcactttgtattcctccaacatgtttggtaacaagtgtttaatgtatgttaaaacaaagaaggtttttatacccttccattaaaatatgtcagtgggcccttccattttatggagtggaatgggaaggcccttgacagccaggaacca

SEQ ID NO: 305972 - protein, 334 aa, Artificial Sequence [sequence omitted]

SEQ ID NO: 305973 - DNA, 243 bp, Artificial Sequence
  derived and/or modified sequence
gccaccaccagcagcgaggccaccaccacccccagacccctgctgagcacccccgtggacggcgccgaggaccccagatgcctggaggccctgaagcccggcaactgcggcgagtacgtggtgagatggtactacgacaagcaggtgaacagctgcgccagattctggttcagcggctgcaacggcagcggcaacagattcaacagcgagaaggagtgccaggagacctgcatccagggctag

SEQ ID NO: 305974 - DNA, 243 bp, Artificial Sequence
  derived and/or modified sequence
gccactacttcaagcgaggctaccactacccccaggcctttgctgtccacccctgttgacggggctgaagacccaaggtgtctggaagcgctgaaacctggaaactgcggtgaatacgtggtgcgttggtattacgataagcaggttaactcatgcgcccgcttttggttctccggatgcaatggatctggcaatcggtttaactcagagaaggaatgccaggagacttgtattcaaggatag

SEQ ID NO: 305975 - DNA, 243 bp, Artificial Sequence
  derived and/or modified sequence
gccaccaccagcagcgaggccaccaccaccccccggcccctgctgagcacccctgtggatggagctgaggacccccgctgcctggaggccctgaagccaggcaactgtggggagtatgtggtgcgctggtactatgacaagcaggtgaacagctgtgcccgcttctggttcagcggctgcaatggaagtggcaaccgcttcaacagcgagaaggagtgccaggagacctgcatccagggctag

SEQ ID NO: 305976 - DNA, 243 bp, Artificial Sequence
  derived and/or modified sequence
gccaccaccagcagcgaggccaccaccaccccccggcccctgctgtctacgcctgttgacggcgccgaagacccccgatgtttggaggctttaaaacctggaaattgcggcgaatatgttgttaggtggtactacgacaagcaagtcaacagctgtgccaggttttggttctctggatgcaacgggagcgggaatagattcaacagcgagaaggagtgccaggagacctgtatccagggatag

SEQ ID NO: 305977 - DNA, 243 bp, Artificial Sequence
  derived and/or modified sequence
gccaccacctctagtgaggcgactaccacaccacgcccactcctcagcactccggtggatggagctgaggaccccaggtgcctagaagcgctcaagcccggtaactgcggggagtacgtggtgcggtggtactatgacaaacaagtgaactcatgtgcccgattctggtttagcggatgcaatggttcggggaatcgattcaactctgagaaggagtgtcaggaaacatgtatacagggctag

SEQ ID NO: 305978 - DNA, 700 bp, Artificial Sequence
  derived and/or modified sequence
gccactacctcatctgaggccaccaccacccccaggccactgctcagcacccctgtggatggggcagaggatcctagatgtttggaagccttgaagcctggaaactgtggtgaatatgtggttcgatggtattatgacaaacaggtcaactcttgtgcccgattttggttcagtggctgtaatggctcaggaaatagattcaacagtgaaaaggaatgtcaagaaacctgcattcaaggatgagcaagtctaccctcattcaattcaacagtgcaaaaaagagcactcacggaagaaggagatggaagaatagccatcttggcagaaataatgatatgtataatttttttatttaattaaaattgtattatgtaatatttgatactacaaaagataatgcaacatgtttgtcaattttttttattatactttaagttttagggtacatgtgcacaaagtacaggtttgttacatatgtattcatgtgccatgttggtgtgctgcacccattaactcgtcatttaacattaggtatatttcctaatgctatccctccccactcccccgccaccccacaacaggccctggtgtgtgatgttccccttcctgtgtccatgtgttctcattgttcaactcccacctatgagtgagaacatgcggtgtttggttttttgtccttgtgacagtttgctgagaatga

SEQ ID NO: 305979 - DNA, 303 bp, Artificial Sequence
  derived and/or modified sequence
atgactcactccggctggcagggaagcggaggagccggacccggccctcgtgccccagccagatcacgctgccggccaggcctgccttcgctaccctgccgccctaatcccttggaagctagaggatgtggaagtgctctgcgtccttgggatctcgccgccaggacgccaatcccttgcttttgtgatcattcatgggctcttggcaagttactgggtccaaagcggcgtgagggacgcaaagggtccgaacgaagacgacggggacccggaggccagcagccgcagcccgcggaagagtag

SEQ ID NO: 305980 - protein, 713 aa, Artificial Sequence
  derived and/or modified sequence
MWNRYFVFYLLLLSAFTSQTVSGQRKKGPKSNLLARKSDVQGSICFIDIVFIVDSSESSKIALFDKQKDFVDSLSDKIFQLTPGRSLEYDIKLAALQFSSSVQIDPPFSSWKDLQTFKQKVKSMNLIGQGTFSYYAISNATRLLKREGRKDGVKVVLLMTDGIDHPKNPDVQSISEDARISGISFITIALSTVVNEAKLRLISGDSSSEPTLLLSDPTLVDKIQDRLEMLFEIQCERKICECEKGDPGDPGPPGTHGNPGIKGERGPKGNPGNAQKGEAGERGPGGIPGYKGDKGERGECGKPGIKGDKGSPGPYGPKGPRGIQGITGPPGDPGPKGFQGNKGEPGPPGPYGSPGAPGIGQQGIKGERGQEGRPGAPGPIGVGEPGQPGPRGPEGVPGERGLPGEGFPGPKGEKGSEGPTGPQGLQGLSIKGEKGDIGPVGPQGPMGIPGIGSQGEQGIQGPIGPPGPQGPAGQGLPGSKGEVGQMGPTGPRGPVGIGVQGPKGEPGSIGLPGQPGVPGEDGAAGKKGEAGLPGARGPEGPPGKGQPGPKGDEGKKGSKGNQGQRGLPGPEGPKGEPGIMGPFGMPGTSIPGPPGPKGDRGGPGIPGFKGEPGLSIRGPKGVQGPRGPVGAPGLKGDGYPGVPGPRGLPGPPGPMGLRGVGDTGAKTLNTSHGLEDPSCPDCSFCHFSLAADIQPKWPALLQLIPASGTRQDG

SEQ ID NO: 305981 - DNA, 2142 bp, Artificial Sequence
  derived and/or modified sequence
atgtggaacagatacttcgtgttctacctgctgctgctgagcgccttcaccagccagaccgtgagcggccagagaaagaagggccccaagagcaacctgctggccagaaagagcgacgtgcagggcagcatctgcttcatcgacatcgtgttcatcgtggacagcagcgagagcagcaagatcgccctgttcgacaagcagaaggacttcgtggacagcctgagcgacaagatcttccagctgacccccggcagaagcctggagtacgacatcaagctggccgccctgcagttcagcagcagcgtgcagatcgacccccccttcagcagctggaaggacctgcagaccttcaagcagaaggtgaagagcatgaacctgatcggccagggcaccttcagctactacgccatcagcaacgccaccagactgctgaagagagagggcagaaaggacggcgtgaaggtggtgctgctgatgaccgacggcatcgaccaccccaagaaccccgacgtgcagagcatcagcgaggacgccagaatcagcggcatcagcttcatcaccatcgccctgagcaccgtggtgaacgaggccaagctgagactgatcagcggcgacagcagcagcgagcccaccctgctgctgagcgaccccaccctggtggacaagatccaggacagactggagatgctgttcgagatccagtgcgagagaaagatctgcgagtgcgagaagggcgaccccggcgaccccggcccccccggcacccacggcaaccccggcatcaagggcgagagaggccccaagggcaaccccggcaacgcccagaagggcgaggccggcgagagaggccccggcggcatccccggctacaagggcgacaagggcgagagaggcgagtgcggcaagcccggcatcaagggcgacaagggcagccccggcccctacggccccaagggccccagaggcatccagggcatcaccggcccccccggcgaccccggccccaagggcttccagggcaacaagggcgagcccggcccccccggcccctacggcagccccggcgcccccggcatcggccagcagggcatcaagggcgagagaggccaggagggcagacccggcgcccccggccccatcggcgtgggcgagcccggccagcccggccccagaggccccgagggcgtgcccggcgagagaggcctgcccggcgagggcttccccggccccaagggcgagaagggcagcgagggccccaccggcccccagggcctgcagggcctgagcatcaagggcgagaagggcgacatcggccccgtgggcccccagggccccatgggcatccccggcatcggcagccagggcgagcagggcatccagggccccatcggcccccccggcccccagggccccgccggccagggcctgcccggcagcaagggcgaggtgggccagatgggccccaccggccccagaggccccgtgggcatcggcgtgcagggccccaagggcgagcccggcagcatcggcctgcccggccagcccggcgtgcccggcgaggacggcgccgccggcaagaagggcgaggccggcctgcccggcgccagaggccccgagggcccccccggcaagggccagcccggccccaagggcgacgagggcaagaagggcagcaagggcaaccagggccagagaggcctgcccggccccgagggccccaagggcgagcccggcatcatgggccccttcggcatgcccggcaccagcatccccggcccccccggccccaagggcgacagaggcggccccggcatccccggcttcaagggcgagcccggcctgagcatcagaggccccaagggcgtgcagggccccagaggccccgtgggcgcccccggcctgaagggcgacggctaccccggcgtgcccggccccagaggcctgcccggcccccccggccccatgggcctgagaggcgtgggcgacaccggcgccaagaccctgaacaccagccacggcctggaggaccccagctgccccgactgcagcttctgccacttcagcctggccgccgacatccagcccaagtggcccgccctgctgcagctgatccccgccagcggcaccagacaggacggctag

SEQ ID NO: 305982 - DNA, 2142 bp, Artificial Sequence
  derived and/or modified sequence
atgtggaaccgctattttgtattttatctccttcttcttagcgctttcacaagtcagacggtgagcggccaaaggaaaaaaggtcccaagagcaatctactagccagaaagtctgacgtacaggggagcatttgttttatagacatcgtttttatcgtggatagttcagagtcttctaagatcgctctgttcgacaagcaaaaagactttgttgactccctcagcgacaagattttccaactgacacctggtcggtcccttgagtatgacattaaacttgccgccttacagtttagtagcagcgttcagattgacccgcctttttcgagctggaaggatctccaaacatttaagcaaaaggtaaaatcaatgaatttgatcggccaaggtaccttcagttactacgctatatccaatgcaacccgcctgttaaagcgagaaggtcgcaaggatggcgtcaaggttgtgctgctgatgacagacggcatcgatcaccctaaaaatcccgatgtccagtcaatttcagaggacgctagaatttcaggtatttcgttcatcacaatcgctctgtctactgtggttaatgaagctaagttgcgcctgatatccggggacagctcttctgaacccactcttcttctttccgatcctactctggtggataagatccaagacagacttgagatgttgtttgagatacagtgtgagcgcaaaatatgtgaatgtgaaaaaggcgatcccggggacccgggacctcccgggactcacggcaatcccgggatcaagggggagcggggccccaagggaaatcctgggaacgcgcaaaagggggaagctggcgagcgaggccctgggggcatccccggatacaaaggagataaaggggaaaggggcgagtgtgggaagcccggtatcaaaggcgataaagggtcccctggaccttatgggccgaaaggcccaaggggcattcaggggataaccggaccccccggtgaccctggaccaaaagggttccagggtaataagggtgagccaggacctccggggccatacgggtccccaggggcccctggtattggtcagcagggcatcaaaggtgagagggggcaggaaggacgtcctggggctccaggtcccatcggagtgggtgagcctggccagccaggaccacgggggcccgagggcgtgcctggagaacgggggttgcctggtgagggtttccccgggccaaagggtgaaaaaggcagcgagggacctacaggcccacagggcctgcagggtctgagtatcaagggagaaaagggcgatatcggaccagtgggtcctcagggacccatgggtatacccggcattggatcacaaggagagcaaggcatccagggccccatcggaccacccggcccccagggtcccgctggccaggggctccctggatcaaaaggagaggttgggcagatgggccccaccggtccaagaggccctgtgggaataggggtgcaagggcccaagggtgagccggggtccataggtcttccaggacagcccggagtgccaggcgaggacggcgccgccggaaaaaagggagaagctgggctgccaggcgcccgcggacctgaagggcccccagggaaaggacagcccggcccaaaaggtgatgaaggcaagaaggggagcaaaggaaaccaaggccagaggggcctgcctggccctgaaggacctaagggagaacccggcatcatggggcccttcggaatgcccggcacaagcatccccgggccacctgggcctaaaggcgaccggggcgggcccgggatccccggctttaaaggggagcctggtctcagtatcagaggaccaaaaggtgtgcaggggcccaggggcccggtgggggccccaggcctgaagggcgacggttaccctggcgtgccaggccctcggggtctgccgggccctccgggccccatgggtctgcgcggcgtgggggatacaggcgccaagactctgaatacatcacacggcctagaggacccctcctgtccagactgtagcttctgccacttttctctcgccgcagatatacagcccaaatggcccgcccttctccagctcatccctgcctccggaacgagacaagacggctag

SEQ ID NO: 305983 - DNA, 2142 bp, Artificial Sequence
  derived and/or modified sequence
atgtggaaccgctactttgtgttctacctgctgctgctgagcgccttcaccagccagacagtgtctggccagaggaagaagggccccaagagcaacctgctggccaggaagagtgatgtgcagggcagcatctgcttcattgatattgtgttcatcgtggacagcagcgagagcagcaagatcgccctgtttgacaagcagaaggactttgtggacagcctgagtgacaagatcttccagctgaccccaggccgcagcctggagtatgacatcaagctggccgccctgcagttcagcagctctgtgcagattgacccccccttcagctcctggaaggacctgcagaccttcaagcagaaggtgaagtccatgaacctgattggccagggcaccttctcctactatgccatcagcaatgccacccggctgctgaagcgggagggcaggaaggatggagtgaaggtggtgctgctgatgacagatggcatcgaccaccccaagaacccagatgtgcagagcatcagtgaagatgcccgcatcagcggcatctccttcatcaccatcgccctgagcacagtggtgaatgaggccaagctgcggctcatcagcggggacagcagcagcgagcccaccctgctgctgagtgaccccaccctggtggacaagatccaggaccggctggagatgctgtttgagatccagtgtgagaggaagatctgtgaatgtgagaagggggaccccggggaccccggccccccaggcacccacggcaaccctggcatcaagggggagcggggccccaagggcaaccctggaaatgcccagaagggggaggccggggagcggggccctgggggcatccctggctacaagggggacaagggggagagaggagaatgtgggaagccaggcatcaagggggacaagggcagccctggcccctacggccccaagggcccccggggcatccagggcatcactggacctcctggggaccccggccccaagggcttccagggcaacaagggggagcccggccccccaggcccctacggcagccctggggcccctggcatcggccagcagggcatcaagggggagcggggccaggagggccggcctggggcccctggccccatcggcgtgggggagcccggccagcccggcccccggggccctgagggcgtgcctggagagcggggcctgcctggagagggcttccctggccccaagggggagaagggcagcgagggccccaccggcccccagggcctgcagggcctgagcatcaagggggagaagggggacatcggccctgtgggcccccagggccccatgggcatccctggcatcggcagccagggcgagcagggcatccagggccccatcggccccccaggcccccagggccctgctggccagggcctgcccggcagcaagggggaggtgggccagatgggccccaccggcccccggggccctgtgggcattggagtgcagggccccaagggggagcccggcagcatcggcctgcccggccagcccggggtgcctggagaagatggagctgctgggaagaagggggaggccggcctgcccggggcccggggccctgagggccccccaggcaagggccagcccggccccaagggagatgagggcaagaagggcagcaaaggaaaccagggccagaggggcctgcccggccctgagggccccaagggggagcccggcatcatgggccccttcggcatgcctggcaccagcatccctggccccccaggccccaagggggacagaggaggccctggcatccctggcttcaagggggagcccggcctgagcatccggggccccaagggcgtgcagggcccccggggccctgtgggcgcccctggcctgaagggagatggctacccaggagtgcccggcccccggggcctgcccggccccccaggccccatgggcctgcggggcgtgggggacacaggagccaagaccctgaacaccagccacggcctggaggaccccagctgcccagactgcagcttctgccacttcagcctggccgctgacatccagcccaagtggccagccctgctgcagctgatcccagccagcggcacccggcaggacggctag

SEQ ID NO: 305984 - DNA, 2142 bp, Artificial Sequence
  derived and/or modified sequence
atgtggaaccggtacttcgtgttctacctgctgctgctgagcgcctttacttcccagaccgtcagtggccagcgaaaaaaaggccccaagagtaatcttctggcgcggaagtctgacgtgcagggatcaatctgcttcatagacatagtgttcatagtggattccagcgagtcgagcaagattgctttgttcgataaacagaaagactttgtggattccctatccgataagattttccagctgactccaggccgatccctcgaatacgatataaaactcgcagccctgcagttttcaagttccgttcaaatagaccccccgttctcctcctggaaagatctgcagacctttaaacagaaggtgaaaagtatgaacctcatcggccaggggactttttcgtattacgctatatccaacgctactaggctgctgaaacgagaaggccggaaggacggagtgaaggttgtactgctcatgactgatggcatcgaccatccaaagaatcctgatgttcagtccatatcagaagatgcccggatctccggcatttccttcataacaatcgccctcagtaccgttgttaacgaggccaagctgagattaatttccggcgatagctctagcgaacccactttattgctctccgatcctaccctggtggataaaatccaggataggctagagatgttattcgagatccaatgtgaaagaaagatttgtgaatgtgaaaaaggcgacccaggagaccctggtccacccggaacacacgggaatcctggcataaaaggagaacgagggccaaagggcaatccaggcaacgcacaaaagggagaggccggggagcgtggtccaggaggtataccaggatacaagggtgataagggtgagcgtggagagtgcggcaaacccggaatcaagggggacaaaggttcacccgggccatatgggcctaagggccctagaggcatccagggaattacaggacctcctggagacccaggcccaaaagggttccaaggtaacaagggagaacccggtccccccggtccttacgggtcccctggggcgcccgggatcggccaacaaggcattaaaggggagagaggtcaagagggaaggcctggcgcgcccggacccatcggggtcggcgaacccggccagccaggccctcgagggcctgagggtgtcccaggcgagcggggactaccgggcgaaggttttcccggtccaaaaggagagaaaggctcggaaggacccactggccctcagggcctgcaggggttaagcattaagggagagaaaggagatatcgggcctgtggggccacagggcccgatgggcatccctgggattggaagccagggggagcagggtatccaggggcccatcggtccccccgggccacaaggcccagctggccagggcctccctgggtctaaaggggaagtcgggcagatgggcccaactggaccacgcggtcctgtgggcataggggtgcagggtccgaagggagagcctggcagtattggactccctggacagcccggtgtccccggggaagacggcgccgccggaaagaagggggaagcaggtcttcctggagcccgcggccctgagggccctcccggaaaggggcaacctggccccaagggggacgaaggcaagaagggaagtaaagggaatcagggtcagaggggtttaccagggcctgagggacccaaaggagaaccaggcataatggggccctttggtatgcctggcacctctattccaggccctcctggccccaagggtgacagagggggccctggcattcctggatttaaaggagaacccggcctgtcgattagaggccccaagggtgtacagggtccacgtggaccagtgggtgcacctggattgaagggggatggctaccccggagtaccagggcctcgcggcctgccaggcccgcctgggcctatgggcctgagaggggtcggtgacacaggcgctaagacactgaatacaagtcacgggctggaggaccctagctgcccagactgcagtttctgtcactttagcctggccgccgatatccagcccaaatggccagcacttctgcagctgatcccagctagtggaaccagacaggacgggtag

SEQ ID NO: 305985 - DNA, 2142 bp, Artificial Sequence
  derived and/or modified sequence
atgtggaatcggtacttcgtcttctacctgctcttgttgtctgcattcactagccagactgtatccggccagagaaaaaagggtccaaaatcaaacctattagccaggaagagcgatgtgcagggttccatctgcttcattgacatcgtcttcatcgtagatagctcggagtctagtaagatagcgctattcgacaagcagaaggactttgtggatagcctgtccgacaagatcttccaactaactcccggaaggagccttgaatacgacatcaagctcgccgctctccagttcagcagctcagtccagatcgatccccctttctcttcgtggaaggacctgcagacattcaagcaaaaggtcaaaagcatgaatttaatcggacagggtacattctcctattacgccatctctaatgccacccgtctactgaagcgtgaagggagaaaggacggagtgaaggttgtgcttctgatgacagacgggatcgatcaccccaagaaccctgatgtccagagtatatccgaggacgcgagaatatcaggcatttctttcatcacgatcgcactgtcgacagtggtgaatgaggcaaagctgaggctcattagtggcgacagcagtagtgaacctaccttgctcctgtctgaccctaccctggtggataaaattcaggataggctcgagatgctcttcgagattcagtgtgagcgcaagatctgcgaatgcgagaaaggagatccgggtgatcccggtccacctgggacccacggcaacccaggcatcaaaggagagcgtgggccaaaaggcaaccctgggaacgcccagaagggagaagcaggcgaaaggggtcctggagggattccgggatacaagggtgacaaaggcgaacgcggagagtgcgggaagcccggtatcaagggcgataaaggttccccgggaccatacggcccaaaggggccacgcggaatacaggggatcactgggcctccaggtgatcctgggcctaaaggctttcagggaaacaagggggaacctggccctcctggcccatacgggagtccaggagcgccaggcatcgggcagcagggcattaagggggagcgtggccaggaaggtagacctggcgctcctgggcctatcggcgtcggtgagcccggtcagcccggaccgaggggcccagaaggcgtgcccggagagcgtggactgccgggagaggggttccccggtcccaaaggagagaaggggtctgagggacctacagggccacagggactgcagggcctgtccatcaaaggtgaaaagggggacattgggcctgttgggcctcaaggcccaatggggattcctggcattgggtcacagggtgagcaaggcattcaaggcccaatcggcccaccagggcctcagggcccagctggacaaggcctgcccggaagtaaaggcgaagtcgggcagatgggccctaccggaccacgcggacccgtgggaattggtgtgcaaggcccaaagggcgaacctggctctatcgggctgcccggacaacccggagtacccggagaggacggtgctgctggtaagaaaggggaagctggccttccaggcgcacggggtcctgagggcccaccaggcaagggacagccagggcctaaaggagacgagggcaaaaaaggaagcaaagggaatcagggccaacggggactcccaggtcctgaggggccaaaaggagagccaggaatcatggggcctttcggcatgccaggcacttccattccaggaccaccaggcccaaaaggggaccggggtggtcccggtatacctggctttaaaggggaacccggtcttagcattagggggccaaagggggtccaaggacccaggggcccagtaggcgctcctggcctaaagggtgacggatacccaggagtccccggtccccgtggattgccgggaccgccaggcccaatggggttgcggggagtcggggatacaggagctaaaactctgaacacatcccatgggcttgaagacccaagctgcccagactgctcgttttgtcatttctctctggccgctgacatccaacctaagtggccagccctattacaacttatcccagctagtgggaccaggcaggacggctag

SEQ ID NO: 305986 - DNA, 2259 bp, Artificial Sequence
  derived and/or modified sequence
taacttcacccccaaccacagtccttgctgttggcatttactcaactagtctttaattcctgtttgacaaactttataaggtgctacaagacagatgatttttcaccatctaccataatgtggaacagatattttgtcttctatctcctgcttttgtcagcgtttacgagtcaaacagtatccggacaaagaaagaaaggaccaaaatcaaatttgcttgcaaggaaaagtgatgtccagggctccatttgtttcatagatattgtcttcatcgtggacagctctgaaagttctaaaattgccctctttgataaacagaaagattttgtggatagcttgagtgacaagattttccaattgactcctggtcgctccttggaatatgacatcaaactggcagcccttcagtttagcagctctgtccaaattgatccacctttttcttcctggaaggacctgcagacatttaagcagaaggtcaagtctatgaatttaatagggcaaggtaccttctcttattatgccatttccaatgccactaggctacttaagagagaagggcgtaaggatggtgtgaaagtggttttgctgatgactgatggcatcgaccatccaaagaatccagatgttcaaagtatttctgaagatgccagaatttcaggaatatcatttatcaccattgcactttctacggtagtcaatgaagccaaacttcgtttgatttctggggattcatccagtgaacccactttactgttgagtgatccaacccttgtagataaaattcaagatcgtctggaaatgctatttgaaattcagtgtgaacgcaagatttgtgaatgtgagaagggagatccaggtgatccagggcctcctggtacacatggaaatccaggtatcaaaggtgagcgaggaccaaaaggaaacccgggcaacgctcaaaaaggagaagctggagaaagaggtccagggggaattcctgggtacaagggtgacaagggtgaacgtggggaatgtggtaaaccagggataaaaggtgacaagggatccccagggccatatggaccaaagggacccagaggaattcagggaattactggacctccaggagacccaggcccaaaggggtttcaaggcaataagggtgagccaggtcctcctggtccttatggttctccaggagctcctggaattggacagcaaggtattaagggagaaagaggccaagaaggaagaccgggagctccaggacccattggagttggtgagcctggacagccaggtccccgtggtcctgagggagtaccaggagagaggggcttacccggagaaggatttccaggaccaaagggtgaaaaaggttctgaaggaccaactggcccacagggattacaaggcctgtcaatcaaaggggagaagggggatataggacctgtgggaccccaaggaccaatgggtatccctggaatcgggagtcaaggggaacagggaatccaaggtcctattggtccacctggtccacaagggcccgcaggacagggcttacctggttccaagggagaagtaggccaaatgggacctacaggccctcgaggaccagtgggaattggagtacaaggtccaaagggagagccaggctcaatagggctcccaggacaaccaggagtaccaggagaagatggagctgcagggaagaagggagaagcggggcttccgggagcaagaggcccagaaggaccacctggaaaaggacagcctggccccaagggtgacgaaggcaagaaagggagcaaaggaaatcaaggacagaggggacttccagggcccgaaggaccaaagggtgaaccgggcattatgggcccttttggaatgcctggaacatcaattcctggaccacctgggccaaagggagatagaggaggacctgggatacctggatttaagggagaacctggactttctattcgaggaccaaagggtgtccaaggccctcggggaccagtgggtgctccaggactcaaaggtgatggctatcctggtgtgcctggacctcgtggattaccaggaccccctgggccgatgggtttacgtggagtgggagacactggagcaaagactttgaacacttcccatggccttgaagatccttcatgccccgactgcagcttctgtcatttctccctggctgccgacattcagccaaaatggcctgccctacttcagctcattcctgcatcagggactcgccaggatggctga

SEQ ID NO: 305987 - DNA, 1005 bp, Artificial Sequence
  derived and/or modified sequence
atgtggaacagatacttcgtgttctacctgctgctgctgagcgccttcaccagccagaccgtgagcggccagagaaagaagggccccaagagcaacctgctggccagaaagagcgacgtgcagggcagcatctgcttcatcgacatcgtgttcatcgtggacagcagcgagagcagcaagatcgccctgttcgacaagcagaaggacttcgtggacagcctgagcgacaagatcttccagctgacccccggcagaagcctggagtacgacatcaagctggccgccctgcagttcagcagcagcgtgcagatcgacccccccttcagcagctggaaggacctgcagaccttcaagcagaaggtgaagagcatgaacctgatcggccagggcaccttcagctactacgccatcagcaacgccaccagactgctgaagagagagggcagaaaggacggcgtgaaggtggtgctgctgatgaccgacggcatcgaccaccccaagaaccccgacgtgcagagcatcagcgaggacgccagaatcagcggcatcagcttcatcaccatcgccctgagcaccgtggtgaacgaggccaagctgagactgatcagcggcgacagcagcagcgagcccaccctgctgctgagcgaccccaccctggtggacaagatccaggacagactggagatgctgttcgagatccagtgcgagagaaagatctgcgagtgcgagaagggcgaccccggcgaccccggcccccccggcacccacggcaaccccggcatcaagggcgagagaggccccaagggcaaccccggcaacgcccagaagggcgaggccggcgagagaggccccggcggcatccccggctacaagggcgacaagcagtacagcagagaggacagagaggtggagcacaacaacgagaagtacgtggcctgcctgctgcccagccccgccctgctgcagcagagcagcctgacccaccacggcacctgcagccactag

SEQ ID NO: 305988 - DNA, 1005 bp, Artificial Sequence
  derived and/or modified sequence
atgtggaacaggtacttcgtgttttatttgttacttctatccgcattcacatctcagaccgtgtcaggacagaggaaaaaagggccgaaatctaatctgctggctcgtaagtcagatgtccaaggcagcatctgcttcatcgatatcgtgttcatcgtggattcctcggagagcagcaagattgctctgttcgacaaacaaaaggactttgtagattcactgtcagataaaattttccaactcaccccaggacgatccctcgagtatgacatcaagctagctgctctgcagttctcttcctccgtccagatagacccgccgtttagcagttggaaggatttacagacctttaagcagaaagtgaaaagtatgaacctcataggccagggaaccttctcttactatgcaattagtaacgctacccgactcctcaaacgggaggggcgaaaagatggtgtaaaggttgtactgcttatgactgatggcatcgatcaccctaaaaaccccgatgttcagtccatatcagaggatgcacgcatttccggaattagctttattaccattgctttgagcaccgttgttaacgaagctaaattaaggctgataagcggagactcatcctctgagccgaccctacttttatctgaccctactctcgtggataagatacaggatcgcctggagatgctgtttgagatacaatgcgagcgcaagatctgtgaatgtgaaaaaggcgatcctggcgatcctgggccaccaggcacacacgggaatcccgggatcaaaggggagaggggacctaagggcaatccgggaaacgcgcagaagggcgaggccggggaacgagggcccggcgggatccctggctacaagggtgataaacaatatagtcgtgaggaccgcgaagtagagcataataatgagaagtacgttgcttgcctgctacctagcccagcgctgcttcagcagagcagcctcactcaccacggtacctgttcccattag

SEQ ID NO: 305989 - DNA, 1005 bp, Artificial Sequence
  derived and/or modified sequence
atgtggaaccgctactttgtgttctacctgctgctgctgagcgccttcaccagccagacagtgtctggccagaggaagaagggccccaagagcaacctgctggccaggaagagtgatgtgcagggcagcatctgcttcattgatattgtgttcatcgtggacagcagcgagagcagcaagatcgccctgtttgacaagcagaaggactttgtggacagcctgagtgacaagatcttccagctgaccccaggccgcagcctggagtatgacatcaagctggccgccctgcagttcagcagctctgtgcagattgacccccccttcagctcctggaaggacctgcagaccttcaagcagaaggtgaagtccatgaacctgattggccagggcaccttctcctactatgccatcagcaatgccacccggctgctgaagcgggagggcaggaaggatggagtgaaggtggtgctgctgatgacagatggcatcgaccaccccaagaacccagatgtgcagagcatcagtgaagatgcccgcatcagcggcatctccttcatcaccatcgccctgagcacagtggtgaatgaggccaagctgcggctcatcagcggggacagcagcagcgagcccaccctgctgctgagtgaccccaccctggtggacaagatccaggaccggctggagatgctgtttgagatccagtgtgagaggaagatctgtgaatgtgagaagggggaccccggggaccccggccccccaggcacccacggcaaccctggcatcaagggggagcggggccccaagggcaaccctggaaatgcccagaagggggaggccggggagcggggccctgggggcatccctggctacaagggggacaagcagtacagcagagaagatcgggaggtggagcacaacaatgagaagtatgtggcctgcctgctgcccagccctgccctgctgcagcagagcagcctgacccaccacggcacctgcagccactag

SEQ ID NO: 305990 - DNA, 1005 bp, Artificial Sequence
  derived and/or modified sequence
atgtggaaccggtacttcgtgttctacctgctgctgctgagcgccttcaccagccagactgtctcgggccagcgcaagaaaggaccaaagtcgaacttgcttgccaggaaaagcgacgttcagggctctatttgttttatcgacatagtgtttatcgtggacagtagcgagtcttccaaaattgcactttttgataagcaaaaagattttgtggatagtctatccgataagatatttcagctcactccaggaaggtctttagagtacgacattaagcttgctgccttacagttcagcagttctgttcagatagatccccctttctcaagctggaaagacctgcagactttcaaacaaaaggttaagagtatgaatctgattggccaaggaacgtttagttactacgcaattagtaacgctacacgactcttaaagagggaaggccgcaaggatggggtaaaggtagtccttctgatgactgacggaattgatcaccctaaaaatcccgacgtgcagtctataagtgaggacgcacgtatctccggcatctcttttattactattgcgctgtcaactgtcgttaacgaggcgaaacttagactgatctctggagatagtagttccgaacccactttactcttgagcgacccaacccttgtggataagatacaagatcgcctggaaatgctgttcgagatacagtgtgaacgaaagatttgtgagtgtgaaaaaggtgatcccggggaccccggccctcctgggacacacgggaatccaggaattaaaggcgaacgaggccctaaagggaaccctggtaacgcacaaaaaggagaggctggcgaaagaggccccggcggtatacctggctacaagggagacaaacagtacagtcgagaggatcgcgaagtggaacacaataacgagaagtatgtagcatgcttgctgccctcgccagcactgctgcagcaatctagcttgactcaccacggaacttgtagccactag

SEQ ID NO: 305991 - DNA, 1005 bp, Artificial Sequence
  derived and/or modified sequence
atgtggaataggtactttgtattctatctgctcctactttccgccttcaccagccagacagttagtgggcagcggaagaaggggcctaagagcaacctgctggcacggaaaagtgatgtccaggggtctatttgctttattgatatcgtgttcattgtggattcatcagagagcagcaaaatcgcactgttcgataaacaaaaagattttgtggattcgctttcagacaaaatcttccagctgaccccgggtaggagtcttgaatatgatatcaagctggcagcactccagttttctagtagtgttcagatcgaccctccattttctagttggaaggatctgcagacctttaagcagaaggtgaaatccatgaatctgattggacagggaaccttcagctattacgcaatctcgaacgctactcggttgctcaagcgtgagggccgaaaggacggcgtcaaggtggttctcctaatgaccgacggaatcgatcacccaaaaaacccagatgtgcagagcatatctgaagacgcccgaataagcggcattagtttcatcaccatagctttgagtaccgtggtgaacgaagccaagctgagactaatatctggcgacagcagctctgagcctactcttctgctctctgacccaacattagtggacaagattcaggaccggctcgaaatgctctttgaaatccagtgtgaaaggaagatttgtgagtgcgaaaagggtgatccgggagaccccggacctcctggaactcatggcaatcctggaatcaagggagagcggggtcccaaagggaacccagggaacgcccaaaagggcgaggctggcgagcgcggtcccggagggattccaggctacaagggcgataaacagtacagccgcgaagaccgcgaagtggaacataataacgaaaagtacgtagcctgccttcttccgtcccctgccctcctgcagcagtcctcattaactcaccacgggacatgctctcactag

SEQ ID NO: 305992 - DNA, 1122 bp, Artificial Sequence
  derived and/or modified sequence
taacttcacccccaaccacagtccttgctgttggcatttactcaactagtctttaattcctgtttgacaaactttataaggtgctacaagacagatgatttttcaccatctaccataatgtggaacagatattttgtcttctatctcctgcttttgtcagcgtttacgagtcaaacagtatccggacaaagaaagaaaggaccaaaatcaaatttgcttgcaaggaaaagtgatgtccagggctccatttgtttcatagatattgtcttcatcgtggacagctctgaaagttctaaaattgccctctttgataaacagaaagattttgtggatagcttgagtgacaagattttccaattgactcctggtcgctccttggaatatgacatcaaactggcagcccttcagtttagcagctctgtccaaattgatccacctttttcttcctggaaggacctgcagacatttaagcagaaggtcaagtctatgaatttaatagggcaaggtaccttctcttattatgccatttccaatgccactaggctacttaagagagaagggcgtaaggatggtgtgaaagtggttttgctgatgactgatggcatcgaccatccaaagaatccagatgttcaaagtatttctgaagatgccagaatttcaggaatatcatttatcaccattgcactttctacggtagtcaatgaagccaaacttcgtttgatttctggggattcatccagtgaacccactttactgttgagtgatccaacccttgtagataaaattcaagatcgtctggaaatgctatttgaaattcagtgtgaacgcaagatttgtgaatgtgagaagggagatccaggtgatccagggcctcctggtacacatggaaatccaggtatcaaaggtgagcgaggaccaaaaggaaacccgggcaacgctcaaaaaggagaagctggagaaagaggtccagggggaattcctgggtacaagggtgacaagcaatattctagggaagacagggaagtagagcataataatgaaaaatatgtagcatgcttgctgccaagcccggctctcctacagcagtcctcgctaactcatcatggcacctgttcccactaa

SEQ ID NO: 305993 - DNA, 372 bp, Artificial Sequence
  derived and/or modified sequence
atgagcagcggcggcagccctggctgcctgcggctggccgagggctgccccaaccaccgggcctgggtgcgctggaacagacggcagccccacagcgccttcctgattgccagccacctgttcctgtctgtgctggtgtggttcaacagcttccagggcctggagctggagagcgagaaccccaggcacctgctgtggaatgtgtgcctggtggtgctggtgtgccccagcagcagcctggcctgccgcttccaggtgtaccagaggaccttctgcagcgtggagagccacaggaccaagaggaagatcctgcagctgtttgccaacatcctgccctacctgtacaagcagccctacaccaagaagcactag

SEQ ID NO: 305994 - DNA, 3420 bp, Artificial Sequence
  derived and/or modified sequence
ctgcccgggctgcagccgcgcctgcgggcagccgaggcgaggcgctccggtagcgtggggaggtttcctagcaactctctgccctgagtgcacccggctacccgcaggtctggagccccccggggggccagagcaggaccacccctctcccgcccatcgccggcctcgcctctctcgcatcctagccgtgtgcaccccagagcgcgccagcaactcgggctctggactgcgggacgcctgagccgcgcactgaggcgaaaaggacaagggcacgcagcccccgccccgcgaagccgggctccggcacctcgcggaacctcccctcctgcgctcgcagccgcaggccccactccccgccagggagggagcggcgatgcctcgctctgtgcctgcgggtgtcggcgggtgcttctagggcgctcccagagccgcctccccctgttgctggcatcccgagcttcctcccttgccagccaggacgctgccgacttgtctttgcccgctgctccgcagacggggctgcaaagctgcaactaatggtgttggcctccctgcccacctgtggaagcaactgcgctgattgatgcgccacagacttttttcccctcgacctcgccggcgtcccctcccacagatccagcatcacccagtgaatgtacattagggtggtttcccccccagcttcgggctttgtttgggtttgattgtgtttggctcttcgctaagctgatttatgcagcagaagccccaccggctggagagaaacaaaagctcttttctttgtcccggagcaggctgcggagcccttgcagagccctctctccagtcgccgccggggcccttggccgtcgaaggaggtcttgggctggcacgaagagctgcccggccagagcatcccggccagaagacaatagatgtgcatcttcaaatgcagcatcctgtgccaggtgccttgcgctgggtccagaatgtggatggtgtgttcaagaggatttcatttcaggtggatcaagaagtgaacgttgtgatattgtttccaatttaataagcaaaggctgctcagttgattcaatagaatacccatctgtgcatgttataatacccactgaaaatgaaattaatacccaggtgacaccaggagaagtgtctatccagctgcgtccaggagccgaagctaattttatgctgaaagttcatcctctgaagaaatatcctgtggatctttattatcttgttgatgtctcagcatcaatgcacaataatatagaaaaattaaattccgttggaaacgatttatctagaaaaatggcatttttctcccgtgactttcgtcttggatttggctcatacgttgataaaacagtttcaccatacattagcatccaccccgaaaggattcataatcaatgcagtgactacaatttagactgcatgcctccccatggatacatccatgtgctgtctttgacagagaacatcactgagtttgagaaagcagttcatagacagaagatctctggaaacatagatacaccagaaggaggttttgacgccatgcttcaggcagctgtctgtgaaagtcatatcggatggcgaaaagaggctaaaagattgctgctggtgatgacagatcagacgtctcatctcgctcttgatagcaaattggcaggcatagtggtgcccaatgacggaaactgtcatctgaaaaacaacgtctatgtcaaatcgacaaccatggaacacccctcactaggccaactttcagagaaattaatagacaacaacattaatgtcatctttgcagttcaaggaaaacaatttcattggtataaggatcttctacccctcttgccaggcaccattgctggtgaaatagaatcaaaggctgcaaacctcaataatttggtagtggaagcctatcagaagctcatttcagaagtgaaagttcaggtggaaaaccaggtacaaggcatctattttaacattaccgccatctgtccagatgggtccagaaagccaggcatggaaggatgcagaaacgtgacgagcaatgatgaagttcttttcaatgtaacagttacaatgaaaaaatgtgatgtcacaggaggaaaaaactatgcaataatcaaacctattggttttaatgaaaccgctaaaattcatatacacagaaactgcagctgtcagtgtgaggacaacagaggacctaaaggaaagtgtgtagatgaaacttttctagattccaagtgtttccagtgtgatgagaataaatgtcattttgatgaagatcagttttcttctgagagttgcaagtcacacaaggatcagcctgtttgcagtggtcgaggagtttgtgtttgtgggaaatgttcatgtcacaaaattaagcttggaaaagtgtatggaaaatactgtgaaaaggatgacttttcttgtccatatcaccatggaaatctgtgtgctgggcatggagagtgtgaagcaggcagatgccaatgcttcagtggctgggaaggtgatcgatgccagtgcccttcagcagcagcccagcactgtgtcaattcaaagggccaagtgtgcagtggaagaggcacgtgtgtgtgtggaaggtgtgagtgcaccgatcccaggagcatcggccgcttctgtgaacactgccccacctgttatacagcctgcaaggaaaactggaattgtatgcaatgccttcaccctcacaatttgtctcaggctatacttgatcagtgcaaaacctcatgtgctctcatggaacaacagcattatgtcgaccaaacttcagaatgtttctccagcccaagctacttgagaatatttttcatcattttcatagttacattcttgattgggttgcttaaagtcctgatcattagacaggtgatactacaatggaatagtaataaaattaagtcctcatcagattacagagtgtcagcctcaaaaaaggataagttgattctgcaaagtgtttgcacaagagcagtcacctaccgacgtgagaagcctgaagaaataaaaatggatatcagcaaattaaatgctcatgaaactttcaggtgcaacttctaaaaaaagatttttaaacacttaatgggaaactggaattgttaataattgctcctaaagattataattttaaaagtcacaggaggagacaaattgctcacggtcatgccagttgctggttgtacactcgaacgaagactgacaagtatcctcatcatgatgtgactcacatagctgctgactttttcagagaaaaatgtgtcttactactgtttgagactagtgtcgttgtagcactttactgtaatatataacttatttagatcagcatagaatgtagatcctctgaagagcactgattacactttacaggtacctgttatccctacgcttccc

SEQ ID NO: 305995 - protein, 634 aa, Artificial Sequence
  derived and/or modified sequence
MLKVHPLKKYPVDLYYLVDVSASMHNNIEKLNSVGNDLSRKMAFFSRDFRLGFGSYVDKTVSPYISIHPERIHNQCSDYNLDCMPPHGYIHVLSLTENITEFEKAVHRQKISGNIDTPEGGFDAMLQAAVCESHIGWRKEAKRLLLVMTDQTSHLALDSKLAGIVVPNDGNCHLKNNVYVKSTTMEHPSLGQLSEKLIDNNINVIFAVQGKQFHWYKDLLPLLPGTIAGEIESKAANLNNLVVEAYQKLISEVKVQVENQVQGIYFNITAICPDGSRKPGMEGCRNVTSNDEVLFNVTVTMKKCDVTGGKNYAIIKPIGFNETAKIHIHRNCSCQCEDNRGPKGKCVDETFLDSKCFQCDENKCHFDEDQFSSESCKSHKDQPVCSGRGVCVCGKCSCHKIKLGKVYGKYCEKDDFSCPYHHGNLCAGHGECEAGRCQCFSGWEGDRCQCPSAAAQHCVNSKGQVCSGRGTCVCGRCECTDPRSIGRFCEHCPTCYTACKENWNCMQCLHPHNLSQAILDQCKTSCALMEQQHYVDQTSECFSSPSYLRIFFIIFIVTFLIGLLKVLIIRQVILQWNSNKIKSSSDYRVSASKKDKLILQSVCTRAVTYRREKPEEIKMDISKLNAHETFRCNF

SEQ ID NO: 305996 - protein, 118 aa, Artificial Sequence
  derived and/or modified sequence
MRWALLVLLAFLSPASQKSSNLEGRTKSVTRQTGSSAEITCDLTVTNTFYIHWYLHQEGKAPQRLLYYDVSTARDVLESGLSPGKYYTHTPRRWSWILRLQNLIENDSGVYYCATWDR

SEQ ID NO: 305997 - DNA, 357 bp, Artificial Sequence
  derived and/or modified sequence
atgagatgggccctgctggtgctgctggccttcctgagccccgccagccagaagagcagcaacctggagggcagaaccaagagcgtgaccagacagaccggcagcagcgccgagatcacctgcgacctgaccgtgaccaacaccttctacatccactggtacctgcaccaggagggcaaggccccccagagactgctgtactacgacgtgagcaccgccagagacgtgctggagagcggcctgagccccggcaagtactacacccacacccccagaagatggagctggatcctgagactgcagaacctgatcgagaacgacagcggcgtgtactactgcgccacctgggacagatag

SEQ ID NO: 305998 - DNA, 357 bp, Artificial Sequence
  derived and/or modified sequence
atgagatgggctttgctggtccttctcgcttttctttctcccgctagccaaaagtcgtccaatctggagggacgcacaaaaagcgtaacccggcagactggaagcagtgccgaaattacatgcgacctgaccgttacgaatactttttacatccattggtatttgcaccaggaggggaaggcgccccagagactcctttattacgacgttagcacggcgcgagacgtgctggaaagtggactgtctcccggaaaatactacactcacactcctcggcgatggtcttggattcttcggctgcagaacctcatcgagaatgattctggagtatattactgtgctacgtgggatagatag

SEQ ID NO: 305999 - DNA, 357 bp, Artificial Sequence
  derived and/or modified sequence
atgcgctgggccctgctggtgctgctggccttcctgagccctgccagccagaagagcagcaacctggagggccgcaccaagtctgtgacccggcagacaggcagcagcgctgagatcacctgtgacctgactgtgaccaacaccttctacatccactggtacctgcaccaggagggcaaggccccccagaggctgctgtactatgatgtgtccacagccagagatgtgctggagagcggcctgagccctgggaagtactacacccacaccccccggcgctggagctggatcctgcggctgcagaacctgattgaaaatgacagcggcgtgtactactgtgccacctgggacagatag

SEQ ID NO: 306000 - DNA, 357 bp, Artificial Sequence
  derived and/or modified sequence
atgcggtgggccctgctggtgctgctggccttcctgagccccgcctcacagaaatcttcgaatctggagggccgtacgaagagcgtaactcgtcagactgggagcagcgctgagataacatgtgatctgactgtgactaacactttttacatacattggtatttgcatcaggaaggcaaggccccccagcgcctgctgtactatgacgtctccaccgcccgcgacgttctcgagagtgggctgtcccctggtaagtattacactcacactcctagaaggtggtcctggatccttcgcctgcagaacctcatcgagaatgacagcggggtgtattactgtgcaacatgggaccgctag

SEQ ID NO: 306001 - DNA, 357 bp, Artificial Sequence
  derived and/or modified sequence
atgcggtgggctctcctggtgctcttggcctttctctcacccgctagtcagaagtcgtcgaacctggaaggcaggaccaagagtgtgacacgacagacagggtcttctgccgagatcacgtgcgatctcaccgtcaccaatactttttacatacattggtacctgcatcaggaaggcaaggctccccaacgccttctctattatgatgtctctaccgcccgagacgtgctcgaatctggtctctcaccgggaaaatactatactcatacgcccaggcgctggtcttggatcttacggctgcagaatctaattgagaacgactcaggcgtttactactgcgccacttgggatcgatag

SEQ ID NO: 306002 - DNA, 537 bp, Artificial Sequence
  derived and/or modified sequence
cttgggagtcccctaagacacatcttcagtcacttctctctgcctgtgtctcaggaaaccagctcctcctactgtcttctgtgctagggatcacttccttgttgagtggggcctgagttttaagaggatcttctgctcctcttcatctggtccgtttccttccaaggcccccgagaggaaggcatgcggtgggccctactggtgcttctagctttcctgtctcctgccagtcagaaatcttccaacttggaagggagaacgaagtcagtcaccaggcagactgggtcatctgctgaaatcacttgcgatcttactgtaacaaataccttctacatccactggtacctacaccaggaggggaaggccccacagcgtcttctgtactatgacgtctccaccgcaagggatgtgttggaatcaggactcagtccaggaaagtattatactcatacacccaggaggtggagctggatattgagactgcaaaatctaattgaaaatgattctggggtctattactgtgccacctgggacagg

SEQ ID NO: 306003 - protein, 211 aa, Artificial Sequence [sequence omitted]

SEQ ID NO: 306004 - protein, 53 aa, Artificial Sequence
  derived and/or modified sequence
MRTLACLLLLGCGYLAHVLAEEAEIPREVIERLARSQIHSIRDLQRLLEIDSV

SEQ ID NO: 306005 - DNA, 2809 bp, Artificial Sequence
  derived and/or modified sequence
acgcgcgccctgcggagcccgcccaactccggcgagccgggcctgcgcctactcctcctcctcctctcccggcggcggctgcggcggaggcgccgactcggccttgcgcccgccctcaggcccgcgcgggcggcgcagcgaggccccgggcggcgggtggtggctgccaggcggctcggccgcgggcgctgcccggccccggcgagcggagggcggagcgcggcgccggagccgagggcgcgccgcggagggggtgctgggccgcgctgtgcccggccgggcggcggctgcaagaggaggccggaggcgagcgcggggccggcggtgggcgcgcagggcggctcgcagctcgcagccggggccgggccaggcgtccaggcaggtgatcggtgtggcggcggcggcggcggcggccccagactccctccggagttcttcttggggctgatgtccgcaaatatgcagaattaccggccgggtcgctcctgaagccagcgcggggagcgagcgcggcggcggccagcaccgggaacgcaccgaggaagaagcccagcccccgccctccgccccttccgtccccaccccctacccggcggcccaggaggctccccgcgctgcgggcgcgcactccctgtttctcctcctcctggctggcgctgcctgcctctccgcactcactgctcgcgccgggcgcgctccgccagctccgtgctccccgcgccaccctcctccgggccgcgctccctaagggatggtactgaatttcgccgccacaggagaccggctggagcgcccgccccgcggcctcgcctctcctccgagcagccagcgcctcgggacgcgatgaggaccttggcttgcctgctgctcctcggctgcggatacctcgcccatgttctggccgaggaagccgagatcccccgcgaggtgatcgagaggctggcccgcagtcagatccacagcatccgggacctccagcgactcctggagatagactccgtagggagtgaggattctttggacaccagcctgagagctcacggggtccatgccactaagcatgtgcccgagaagcggcccctgcccattcggaggaagagaagcatcgaggaagctgtccccgctgtctgcaagaccaggacggtcatttacgagattcctcggagtcaggtcgaccccacgtccgccaacttcctgatctggcccccgtgcgtggaggtgaaacgctgcaccggctgctgcaacacgagcagtgtcaagtgccagccctcccgcgtccaccaccgcagcgtcaaggtggccaaggtggaatacgtcaggaagaagccaaaattaaaagaagtccaggtgaggttagaggagcatttggagtgcgcctgcgcgaccacaagcctgaatccggattatcgggaagaggacacgggaaggcctagggagtcaggtaaaaaacggaaaagaaaaaggttaaaacccacctaaagcagccaaccagatgtgaggtgaggatgagccgcagccctttcctgggacatggatgtacatggcgtgttacattcctgaacctactatgtacggtgctttattgccagtgtgcggtctttgttctcctccgtgaaaaactgtgtccgagaacactcgggagaacaaagagacagtgcacatttgtttaatgtgacatcaaagcaagtattgtagcactcggtgaagcagtaagaagcttccttgtcaaaaagagagagagagaaagagagagagaaaacaaaaccacaaatgacaaaaacaaaacggactcacaaaaatatctaaactcgatgagatggagggtcgccccgtgggatggaagtgcagaggtctcagcagactggatttctgtccgggtggtcacaggtgcttttttgccgaggatgcagagcctgctttgggaacgactccagaggggtgctggtgggctctgcaggggcccgcaggaagcaggaatgtcttggaaaccgccacgcgaactttagaaaccacacctcctcgctgtagtatttaagcccatacagaaaccttcctgagagccttaagtggtttttttttttgtttttgttttgttttttttttttttgtttttttttttttttttttacaccataaagtgattattaagctttcctttttactctttggctagctttttttttttttttttttttttaattatctcttggatgacatttacaccgataacacacaggctgctgtaactgtcaggacagtgcgacggtatttttcctagcaagatgcaaactaatgagatgtattaaaataaacatggtatacctacctatgcatcatttcctaaatgtttctggctttgtgtttctcccttaccctgctttatttgttaatttaagccattttgaaagaactatgcgtcaaccaatcgtacgccgtccctgcggcacctgccccagagcccgtttgtggctgagtgacaacttgttccccgcagtgcacacctagaatgctgtgttcccacgcggcacgtgagatgcattgccgcttctgtctgtgttgttggtgtgccctggtgccgtggtggcggtcactccctctgctgccagtgtttggacagaacccaaattctttatttttggtaagatattgtgctttacctgtattaacagaaatgtgtgtgtgtggtttgtttttttgtaaaggtgaagtttgtatgtttacctaatattacctgttttgtatacctgagagcctgctatgttctttttttgttgatccaaaattaaaaaaaaaaataccaccaacaaaa

SEQ ID NO: 306006 - DNA, 1308 bp, Artificial Sequence
  derived and/or modified sequence
tccgcaaatatgcagaattaccggccgggtcgctcctgaagccagcgcggggagcgagcgcggcggcggccagcaccgggaacgcaccgaggaagaagcccagcccccgccctccgccccttccgtccccaccccctacccggcggcccaggaggctccccgcgctgcgggcgcgcactccctgtttctcctcctcctggctggcgctgcctgcctctccgcactcactgctcgcgccgggcgcgctccgccagctccgtgctccccgcgccaccctcctccgggccgcgctccctaagggatggtactgaatttcgccgccacaggagaccggctggagcgcccgccccgcggcctcgcctctcctccgagcagccagcgcctcgggacgcgatgaggaccttggcttgcctgctgctcctcggctgcggatacctcgcccatgttctggccgaggaagccgagatcccccgcgaggtgatcgagaggctggcccgcagtcagatccacagcatccgggacctccagcgactcctggagatagactccgtagggagtgaggattctttggacaccagcctgagagctcacggggtccatgccactaagcatgtgcccgagaagcggcccctgcccattcggaggaagagaagcatcgaggaagctgtccccgctgtctgcaagaccaggacggtcatttacgagattcctcggagtcaggtcgaccccacgtccgccaacttcctgatctggcccccgtgcgtggaggtgaaacgctgcaccggctgctgcaacacgagcagtgtcaagtgccagccctcccgcgtccaccaccgcagcgtcaaggtggccaaggtggaatacgtcaggaagaagccaaaattaaaagaagtccaggtgaggttagaggagcatttggagtgcgcctgcgcgaccacaagcctgaatccggattatcgggaagaggacacgggaaggcctagggagtcaggtaaaaaacggaaaagaaaaaggttaaaacccacctaaagcagccaaccagatgtgaggtgaggatgagccgcagccctttcctgggacatggatgtacatggcgtgttacattcctgaacctactatgtacggtgctttattgccagtgtgcggtctttgttctcctccgtgaaaaactgtgtccgagaacactcgggagaacaaagagacagtgcacatttgtttaatgtgacatcaaagcaagtattgtagcactcggtgaagcagtaagaagcttccttgtcaaaaagagagagagagaaagagagagagaaa

SEQ ID NO: 306007 - protein, 196 aa, Artificial Sequence
  derived and/or modified sequence
MRTLACLLLLGCGYLAHVLAEEAEIPREVIERLARSQIHSIRDLQRLLEIDSVGSEDSLDTSLRAHGVHATKHVPEKRPLPIRRKRSIEEAVPAVCKTRTVIYEIPRSQVDPTSANFLIWPPCVEVKRCTGCCNTSSVKCQPSRVHHRSVKVAKVEYVRKKPKLKEVQVRLEEHLECACATTSLNPDYREEDTDVR

SEQ ID NO: 306008 - DNA, 2740 bp, Artificial Sequence
  derived and/or modified sequence
acgcgcgccctgcggagcccgcccaactccggcgagccgggcctgcgcctactcctcctcctcctctcccggcggcggctgcggcggaggcgccgactcggccttgcgcccgccctcaggcccgcgcgggcggcgcagcgaggccccgggcggcgggtggtggctgccaggcggctcggccgcgggcgctgcccggccccggcgagcggagggcggagcgcggcgccggagccgagggcgcgccgcggagggggtgctgggccgcgctgtgcccggccgggcggcggctgcaagaggaggccggaggcgagcgcggggccggcggtgggcgcgcagggcggctcgcagctcgcagccggggccgggccaggcgtccaggcaggtgatcggtgtggcggcggcggcggcggcggccccagactccctccggagttcttcttggggctgatgtccgcaaatatgcagaattaccggccgggtcgctcctgaagccagcgcggggagcgagcgcggcggcggccagcaccgggaacgcaccgaggaagaagcccagcccccgccctccgccccttccgtccccaccccctacccggcggcccaggaggctccccgcgctgcgggcgcgcactccctgtttctcctcctcctggctggcgctgcctgcctctccgcactcactgctcgcgccgggcgcgctccgccagctccgtgctccccgcgccaccctcctccgggccgcgctccctaagggatggtactgaatttcgccgccacaggagaccggctggagcgcccgccccgcggcctcgcctctcctccgagcagccagcgcctcgggacgcgatgaggaccttggcttgcctgctgctcctcggctgcggatacctcgcccatgttctggccgaggaagccgagatcccccgcgaggtgatcgagaggctggcccgcagtcagatccacagcatccgggacctccagcgactcctggagatagactccgtagggagtgaggattctttggacaccagcctgagagctcacggggtccatgccactaagcatgtgcccgagaagcggcccctgcccattcggaggaagagaagcatcgaggaagctgtccccgctgtctgcaagaccaggacggtcatttacgagattcctcggagtcaggtcgaccccacgtccgccaacttcctgatctggcccccgtgcgtggaggtgaaacgctgcaccggctgctgcaacacgagcagtgtcaagtgccagccctcccgcgtccaccaccgcagcgtcaaggtggccaaggtggaatacgtcaggaagaagccaaaattaaaagaagtccaggtgaggttagaggagcatttggagtgcgcctgcgcgaccacaagcctgaatccggattatcgggaagaggacacggatgtgaggtgaggatgagccgcagccctttcctgggacatggatgtacatggcgtgttacattcctgaacctactatgtacggtgctttattgccagtgtgcggtctttgttctcctccgtgaaaaactgtgtccgagaacactcgggagaacaaagagacagtgcacatttgtttaatgtgacatcaaagcaagtattgtagcactcggtgaagcagtaagaagcttccttgtcaaaaagagagagagagaaagagagagagaaaacaaaaccacaaatgacaaaaacaaaacggactcacaaaaatatctaaactcgatgagatggagggtcgccccgtgggatggaagtgcagaggtctcagcagactggatttctgtccgggtggtcacaggtgcttttttgccgaggatgcagagcctgctttgggaacgactccagaggggtgctggtgggctctgcaggggcccgcaggaagcaggaatgtcttggaaaccgccacgcgaactttagaaaccacacctcctcgctgtagtatttaagcccatacagaaaccttcctgagagccttaagtggtttttttttttgtttttgttttgttttttttttttttgtttttttttttttttttttacaccataaagtgattattaagctttcctttttactctttggctagctttttttttttttttttttttttaattatctcttggatgacatttacaccgataacacacaggctgctgtaactgtcaggacagtgcgacggtatttttcctagcaagatgcaaactaatgagatgtattaaaataaacatggtatacctacctatgcatcatttcctaaatgtttctggctttgtgtttctcccttaccctgctttatttgttaatttaagccattttgaaagaactatgcgtcaaccaatcgtacgccgtccctgcggcacctgccccagagcccgtttgtggctgagtgacaacttgttccccgcagtgcacacctagaatgctgtgttcccacgcggcacgtgagatgcattgccgcttctgtctgtgttgttggtgtgccctggtgccgtggtggcggtcactccctctgctgccagtgtttggacagaacccaaattctttatttttggtaagatattgtgctttacctgtattaacagaaatgtgtgtgtgtggtttgtttttttgtaaaggtgaagtttgtatgtttacctaatattacctgttttgtatacctgagagcctgctatgttctttttttgttgatccaaaattaaaaaaaaaaataccaccaacaaaa

SEQ ID NO: 306009 - DNA, 2305 bp, Artificial Sequence
  derived and/or modified sequence
ttcttggggctgatgtccgcaaatatgcagaattaccggccgggtcgctcctgaagccagcgcggggagcgagcgcggcggcggccagcaccgggaacgcaccgaggaagaagcccagcccccgccctccgccccttccgtccccaccccctacccggcggcccaggaggctccccgcgctgcgggcgcgcactccctgtttctcctcctcctggctggcgctgcctgcctctccgcactcactgctcgcgccgggcgcgctccgccagctccgtgctccccgcgccaccctcctccgggccgcgctccctaagggatggtactgaatttcgccgccacaggagaccggctggagcgcccgccccgcggcctcgcctctcctccgagcagccagcgcctcgggacgcgatgaggaccttggcttgcctgctgctcctcggctgcggatacctcgcccatgttctggccgaggaagccgagatcccccgcgaggtgatcgagaggctggcccgcagtcagatccacagcatccgggacctccagcgactcctggagatagactccgtagggagtgaggattctttggacaccagcctgagagctcacggggtccatgccactaagcatgtgcccgagaagcggcccctgcccattcggaggaagagaagcatcgaggaagctgtccccgctgtctgcaagaccaggacggtcatttacgagattcctcggagtcaggtcgaccccacgtccgccaacttcctgatctggcccccgtgcgtggaggtgaaacgctgcaccggctgctgcaacacgagcagtgtcaagtgccagccctcccgcgtccaccaccgcagcgtcaaggtggccaaggtggaatacgtcaggaagaagccaaaattaaaagaagtccaggtgaggttagaggagcatttggagtgcgcctgcgcgaccacaagcctgaatccggattatcgggaagaggacacggatgtgaggtgaggatgagccgcagccctttcctgggacatggatgtacatggcgtgttacattcctgaacctactatgtacggtgctttattgccagtgtgcggtctttgttctcctccgtgaaaaactgtgtccgagaacactcgggagaacaaagagacagtgcacatttgtttaatgtgacatcaaagcaagtattgtagcactcggtgaagcagtaagaagcttccttgtcaaaaagagagagagagaaagagagagagaaaacaaaaccacaaatgacaaaaacaaaacggactcacaaaaatatctaaactcgatgagatggagggtcgccccgtgggatggaagtgcagaggtctcagcagactggatttctgtccgggtggtcacaggtgcttttttgccgaggatgcagagcctgctttgggaacgactccagaggggtgctggtgggctctgcaggggcccgcaggaagcaggaatgtcttggaaaccgccacgcgaactttagaaaccacacctcctcgctgtagtatttaagcccatacagaaaccttcctgagagccttaagtggtttttttttttgtttttgttttgttttttttttttttgtttttttttttttttttttacaccataaagtgattattaagctttcctttttactctttggctagctttttttttttttttttttttttaattatctcttggatgacatttacaccgataacacacaggctgctgtaactgtcaggacagtgcgacggtatttttcctagcaagatgcaaactaatgagatgtattaaaataaacatggtatacctacctatgcatcatttcctaaatgtttctggctttgtgtttctcccttaccctgctttatttgttaatttaagccattttgaaagaactatgcgtcaaccaatcgtacgccgtccctgcggcacctgccccagagcccgtttgtggctgagtgacaacttgttccccgcagtgcacacctagaatgctgtgttcccacgcggcacgtgagatgcattgccgcttctgtctgtgttgttggtgtgccctggtgccgtggtggcggtcactccctctgctgccagtgtttggacagaacccaaattctttatttttggtaagatattgtgctttacctgtattaacagaaatgtgtgtgtgtggtttgtttttttgtaaaggtgaagtttgtatgtttacctaatattacctgttttgtatacctgagagcctgctatgttctttttttgttgatccaaaattaaaaaaaaaaataccaccaacaaaa

SEQ ID NO: 306010 - DNA, 564 bp, Artificial Sequence
  derived and/or modified sequence
cggccggagcgccggggcgggggcggggaccggctctctggccctttttggcgcagcagctctgggcgctgcccgctgccgccgctggggcccgagagaggcgagccggcgacggcggcgcttctgcggcggcctcctccctccccacccggtgccgcaggattgcagctggcactggagggtgggcaagctcgagggaggggcgcggagccccggcgcggagccgggcgcggggctttgatggatttagctgcttgcgcgagcgcgtgtgtgctccctgccgcggcggcggcgcccgggccctgccgggtccgcacgaaccccgagcgcttccgaggagaccggctggagcgcccgccccgcggcctcgcctctcctccgagcagccagcgcctcgggacgcgatgaggaccttggcttgcctgctgctcctcggctgcggatacctcgcccatgttctggccgaggaagccgagatcccccgcgaggtgatcgagaggctggcccgcagtcagatccacagcatccgggacctccagcgactcctggagatagactccgtag

SEQ ID NO: 306011 - protein, 756 aa, Artificial Sequence
  derived and/or modified sequence
MWGRRRKLRRLNDVTISTCHASAKVGTRLMFDHNGKIIQKTPYPRPRGTTVSVQQLFSTLPVRHKEFQRNIKKEYAKMVQVLHAYCIISAGIRVSCTNQLGQGKRQPVVCTGGSPSIKENIGSVFGQKQLQSLIPFVQLPPSDSVCEEYGLSCSDALHNLFYISGFISQCTHGVGRSSTDRQFFFINRRPCDPAKVCRLVNEVYHMYNRHQYPFVVLNISVDSECVDINVTPDKRQILLQEEKLLLAVLKTSLIGMFDSDVNKLNVSQQPLLDVEGNLIKMHAADLEKPMVEKQDQSPSLRTGEEKKDVSISRLREAFSLRHTTENKPHSPKTPEPRRSPLGQKRGMLSSSTSGAISDKGVLRPQKEAVSSSHGPSDPTDRAEVEKDSGHGSTSVDSEGFSIPDTGSHCSSEYAASSPGDRGSQEHVDSQEKAPKTDDSFSDVDCHSNQEDTGCKFRVLPQPTNLATPNTKRFKKEEILSSSDICQKLVNTQDMSASQVDVAVKINKKVVPLDFSMSSLAKRIKQLHHEAQQSEGEQNYRKFRAKICPGENQAAEDELRKEISKTMFAEMEIIGQFNLGFIITKLNEDIFIVDQHATDEKYNFEMLQQHTVLQGQRLIAPQTLNLTAVNEAVLIENLEIFRKNGFDFVIDENAPVTERAKLISLPTSKNWTFGPQDVDELIFMLSDSPGVMCRPSRVKQMFASRACRKSVMIGTALNTSEMKKLITHMGEMDHPWNCPHGRPTMRHIANLGVISQN

SEQ ID NO: 306012 - DNA, 2271 bp, Artificial Sequence
  derived and/or modified sequence
atgtggggcagaagaagaaagctgagaagactgaacgacgtgaccatcagcacctgccacgccagcgccaaggtgggcaccagactgatgttcgaccacaacggcaagatcatccagaagaccccctaccccagacccagaggcaccaccgtgagcgtgcagcagctgttcagcaccctgcccgtgagacacaaggagttccagagaaacatcaagaaggagtacgccaagatggtgcaggtgctgcacgcctactgcatcatcagcgccggcatcagagtgagctgcaccaaccagctgggccagggcaagagacagcccgtggtgtgcaccggcggcagccccagcatcaaggagaacatcggcagcgtgttcggccagaagcagctgcagagcctgatccccttcgtgcagctgccccccagcgacagcgtgtgcgaggagtacggcctgagctgcagcgacgccctgcacaacctgttctacatcagcggcttcatcagccagtgcacccacggcgtgggcagaagcagcaccgacagacagttcttcttcatcaacagaagaccctgcgaccccgccaaggtgtgcagactggtgaacgaggtgtaccacatgtacaacagacaccagtaccccttcgtggtgctgaacatcagcgtggacagcgagtgcgtggacatcaacgtgacccccgacaagagacagatcctgctgcaggaggagaagctgctgctggccgtgctgaagaccagcctgatcggcatgttcgacagcgacgtgaacaagctgaacgtgagccagcagcccctgctggacgtggagggcaacctgatcaagatgcacgccgccgacctggagaagcccatggtggagaagcaggaccagagccccagcctgagaaccggcgaggagaagaaggacgtgagcatcagcagactgagagaggccttcagcctgagacacaccaccgagaacaagccccacagccccaagacccccgagcccagaagaagccccctgggccagaagagaggcatgctgagcagcagcaccagcggcgccatcagcgacaagggcgtgctgagaccccagaaggaggccgtgagcagcagccacggccccagcgaccccaccgacagagccgaggtggagaaggacagcggccacggcagcaccagcgtggacagcgagggcttcagcatccccgacaccggcagccactgcagcagcgagtacgccgccagcagccccggcgacagaggcagccaggagcacgtggacagccaggagaaggcccccaagaccgacgacagcttcagcgacgtggactgccacagcaaccaggaggacaccggctgcaagttcagagtgctgccccagcccaccaacctggccacccccaacaccaagagattcaagaaggaggagatcctgagcagcagcgacatctgccagaagctggtgaacacccaggacatgagcgccagccaggtggacgtggccgtgaagatcaacaagaaggtggtgcccctggacttcagcatgagcagcctggccaagagaatcaagcagctgcaccacgaggcccagcagagcgagggcgagcagaactacagaaagttcagagccaagatctgccccggcgagaaccaggccgccgaggacgagctgagaaaggagatcagcaagaccatgttcgccgagatggagatcatcggccagttcaacctgggcttcatcatcaccaagctgaacgaggacatcttcatcgtggaccagcacgccaccgacgagaagtacaacttcgagatgctgcagcagcacaccgtgctgcagggccagagactgatcgccccccagaccctgaacctgaccgccgtgaacgaggccgtgctgatcgagaacctggagatcttcagaaagaacggcttcgacttcgtgatcgacgagaacgcccccgtgaccgagagagccaagctgatcagcctgcccaccagcaagaactggaccttcggcccccaggacgtggacgagctgatcttcatgctgagcgacagccccggcgtgatgtgcagacccagcagagtgaagcagatgttcgccagcagagcctgcagaaagagcgtgatgatcggcaccgccctgaacaccagcgagatgaagaagctgatcacccacatgggcgagatggaccacccctggaactgcccccacggcagacccaccatgagacacatcgccaacctgggcgtgatcagccagaactag

SEQ ID NO: 306013 - DNA, 2271 bp, Artificial Sequence
  derived and/or modified sequence
atgtggggaagaaggcggaagctgcgccggctgaatgacgtgactatctctacctgtcacgcaagtgcaaaggttggtacccgattgatgttcgaccataatgggaaaatcatccagaagaccccatacccaagaccccggggaactaccgtgtcagtccagcagcttttcagtacgttgcccgtgcggcacaaagagttccagagaaatatcaagaaagagtacgcgaagatggtgcaggtactccacgcttattgcataatcagcgctgggatccgggtgtcgtgtacaaatcagctaggccaaggaaagcggcagccagtggtgtgcacgggaggaagtcccagtatcaaggaaaacattggctctgtgttcggacagaagcagttgcagtctctgattcctttcgtccaacttcccccttctgattcagtgtgcgaggagtacggccttagctgctcagatgctcttcataacctgttttacatttcaggctttatctcacagtgcacacacggggtgggcaggagtagcacagatagacaattcttcttcatcaataggagaccatgcgatcccgcaaaggtctgcagactcgtcaatgaggtttaccacatgtacaatcgacaccagtatccattcgtcgtcctgaatatcagcgtggattctgaatgcgtcgatattaacgtgacacccgataaacgacagattttgcttcaggaggagaagctcttgcttgctgtcttaaagaccagcctaatcggaatgtttgactctgatgtcaataagctaaacgtgtcccagcaaccattgttggatgtggagggcaatttgatcaaaatgcacgcggcagatttagaaaaacctatggtcgaaaagcaggatcaaagcccctcgctaagaactggagaggaaaaaaaggatgtgagcatttctcggctcagagaagcgttctctctacgccacactactgagaataagccccactcccccaaaacacccgagcctagacgcagtccgttgggacagaaacgtggaatgttgtcttcttcaacgtctggcgctatatctgataaaggagtcctccggccccaaaaggaggcggtgtcatcatcccatgggcctagcgacccaaccgaccgggctgaggttgaaaaggacagtgggcatggatcaacttccgttgattctgaggggttctcgatccccgacacaggtagccattgttcatcagagtatgctgcgtcttccccgggagacagggggagccaggagcatgtcgatagtcaggaaaaagcccccaagactgacgactctttctcagatgtcgactgtcacagtaaccaggaagatacgggctgtaagtttcgagtattacctcaaccaaccaacctggctacaccaaatacaaagcgtttcaagaaggaggagatcctttcctcatctgacatttgccagaagctcgtgaatacacaagacatgtccgcgagccaggtcgatgtggccgttaaaattaataaaaaagtagtgcctttggacttctcgatgagctctctggccaagaggatcaagcaacttcatcatgaagcacaacagtccgagggggagcaaaactaccggaagtttcgggccaagatctgtcccggcgagaaccaggctgcggaggacgaattgagaaaagaaatatccaagaccatgttcgccgagatggagatcattggccaatttaatctcggcttcatcataaccaagctcaacgaggacatcttcatagtggatcagcatgccaccgatgaaaagtataattttgaaatgctgcaacaacacacggtattgcaaggccaacgactaattgcacctcaaactctgaatctaaccgcagttaacgaagcagttctcatagagaacctggagattttcagaaaaaatggatttgattttgtaattgacgagaatgccccggtgaccgagagagccaaacttatcagcctgcccaccagcaagaattggactttcgggccacaggatgtcgacgagctcatatttatgctctcagactcccccggcgtcatgtgtcggcccagcagagttaagcaaatgttcgcgtctagagcctgccggaaatccgtgatgattgggacagccctgaatacaagcgagatgaaaaaattgattacccacatgggagagatggaccatccctggaattgtccccatggtaggccaaccatgagacacatcgcaaaccttggcgtaatctcccagaactag

SEQ ID NO: 306014 - DNA, 2271 bp, Artificial Sequence
  derived and/or modified sequence
atgtggggcagaagaaggaagctgcggcggctgaatgatgtgaccatcagcacctgccacgccagcgccaaggtgggcacccggctgatgtttgaccacaacgggaagatcatccagaagaccccctacccccggccccggggcaccaccgtgtctgtgcagcagctgttcagcaccctgcctgtgcgccacaaggagttccagaggaacatcaagaaggagtatgccaagatggtgcaggtgctgcacgcctactgcatcatctctgctggcatccgggtgtcctgcaccaaccagctgggccagggcaagaggcagcctgtggtgtgcacaggaggcagccccagcatcaaggaaaatattggctctgtgtttggccagaagcagctgcagagcctcatcccctttgtgcagctgccccccagcgacagcgtgtgtgaggagtatggcctgagctgcagtgatgccctgcacaacctcttctacatcagcggcttcatcagccagtgcacccacggcgtgggccgcagcagcacagaccggcagttcttcttcatcaacagaagaccctgtgaccctgccaaggtgtgccgcctggtgaatgaggtgtaccacatgtacaacagacaccagtacccctttgtggtgctgaacatctctgtggacagtgaatgtgtggacatcaacgtgaccccagacaagaggcagatcctgctgcaggaggagaagctgctgctggccgtgctgaagaccagcctcatcggcatgtttgacagtgatgtgaacaagctgaatgtgtcccagcagcccctgctggatgtggagggcaacctgatcaagatgcatgctgctgacctggagaagcccatggtggagaagcaggaccagagccccagcctgaggactggagaggagaagaaggatgtgtccatcagccggctgcgggaggccttcagcctgcggcacaccacagagaacaagccccacagccccaagaccccagagcccaggaggagccccctgggccagaagaggggcatgctgagcagcagcaccagcggggccatcagtgacaagggcgtgctgcggccccagaaggaggccgtgagcagcagccacggccccagcgaccccacagacagagctgaggtggagaaggacagcggccacggcagcacctctgtggacagcgagggcttcagcatcccagacaccggcagccactgcagcagtgaatatgctgccagcagccctggggaccggggcagccaggagcacgtggacagccaggagaaggcccccaagacagatgacagcttcagtgatgtggactgccacagcaaccaggaggacaccggctgcaagttccgggtgctgccccagcccaccaacctggccacccccaacaccaagcgcttcaagaaggaggagatcctgagcagcagtgacatctgccagaagctggtgaacacccaggacatgtctgccagccaggtggatgtggccgtgaagatcaacaagaaggtggtgcccctggacttctccatgagcagcctggccaagaggatcaagcagctgcaccacgaggcccagcagagcgagggggagcagaactacaggaagttccgggccaagatctgccctggagagaaccaggccgcagaagatgagctgaggaaggagatcagcaagaccatgtttgctgagatggagatcatcggccagttcaacctgggcttcatcatcaccaagctgaatgaagacatcttcatcgtggaccagcacgccacagatgagaagtacaactttgagatgctgcagcagcacacagtgctgcagggccagaggctcatcgccccccagaccctgaacctgacagctgtgaatgaagctgtgctgattgagaacctggagatcttcaggaagaatggatttgattttgtgattgatgaaaatgcccctgtgacagagcgggccaagctgatcagcctgcccaccagcaagaactggaccttcggcccccaggatgtggatgagctgatcttcatgctgagtgacagccctggggtgatgtgccggcccagccgggtgaagcagatgtttgccagccgggcctgcaggaagtctgtgatgattggaacagccctgaacaccagcgagatgaagaagctgatcacccacatgggagagatggaccacccctggaactgcccccacggccggcccaccatgaggcacatcgccaacctgggcgtcatcagccagaactag

SEQ ID NO: 306015 - DNA, 2271 bp, Artificial Sequence
  derived and/or modified sequence
atgtggggccggcggcggaagctgcggcggctgaacgacgtgaccatttccacatgccatgcctcagcgaaagtcggcacccggctcatgttcgaccacaatggaaaaatcatacaaaagactccctatccaagaccaagaggaaccacagtctccgtacaacagcttttcagcacgcttccagtaagacacaaggaatttcagaggaatataaagaaagagtacgccaagatggtacaggtgttgcatgcttactgtataatttccgctgggatcagggtatcttgcactaaccagttaggtcagggcaagcggcagcccgtggtgtgtaccgggggaagtccaagtataaaggagaacatcggatcggtcttcggacaaaaacagttacagtctctgatcccatttgtgcagctgccgccttccgattccgtttgcgaagaatatggattgagttgtagcgacgcccttcacaacctgttttacattagtggctttatctcccagtgcacacatggcgtgggccggtccagtactgaccgccaatttttttttattaatcgccgcccatgcgaccctgccaaggtgtgcaggctggtgaatgaggtataccatatgtataaccgacatcaatacccattcgttgtgctaaatatctccgtggactctgagtgcgtagacattaacgtgacgcccgataagcgccaaattttgctgcaggaagagaagctactcctggccgtgctgaagaccagcctgattgggatgttcgactccgacgtcaataaattaaacgtgtcgcaacagcccctcctggacgtagaaggcaacctgattaaaatgcacgccgccgatctggagaagcccatggtggaaaagcaggatcagtcccctagtctccgcacaggagaagagaaaaaagacgtctccatctctagactccgcgaagccttctcacttcgccacacaacagagaacaaaccacacagcccaaagactcccgagcccagaaggtctcctctaggccagaaaagaggtatgctgtctagctcaacctcaggcgccattagtgataagggggtgttacgcccacagaaggaggcagtctccagtagtcacggcccctctgacccaactgacagggctgaggtggagaaggatagcggccacggctctacatctgtggatagcgaaggcttttccattcccgatactgggagccactgctcaagtgaatatgctgctagctcacccggtgatcgtggatcccaagagcatgttgattcacaggagaaggctcccaagacagacgacagcttctccgacgttgattgtcactccaatcaggaggatacgggatgtaaattccgggtgctgccacagccaacaaatctcgccacacctaacacaaagagattcaagaaggaggaaatcctgagctcaagcgacatctgccagaagctggtgaacacccaggacatgtcggcctctcaggtggatgtggctgttaagattaataagaaagtcgtgccactcgatttcagtatgagctccctcgcgaagaggataaagcagctccaccacgaggctcagcagtcagaaggtgaacagaactaccggaagttccgcgccaagatatgcccaggcgaaaatcaagcagcggaggatgagctgcgcaaagagatcagtaaaacaatgttcgccgagatggaaattatcggccagttcaacctcgggtttataataacaaaactgaacgaagacattttcattgttgaccaacatgccactgacgagaagtacaattttgagatgctgcagcagcacacggttctccaagggcagagactcatcgctccccagactctgaaccttacagcagtcaacgaggccgtgcttatcgagaatctggagatttttagaaaaaatgggtttgacttcgtaatagatgagaacgcccctgtcacagagcgggcgaaactgataagcctaccaacgagcaagaattggactttcgggcctcaggatgtcgatgagctcatcttcatgctatccgacagccccggcgtaatgtgccggccgtccagggtcaaacagatgttcgccagccgggcgtgtaggaaatctgttatgattgggactgcattgaatacttcagagatgaaaaagctgatcacacacatgggggaaatggatcatccatggaactgccctcacggaaggccgaccatgcggcacatcgccaatttaggggtcatctcacagaactag

SEQ ID NO: 306016 - DNA, 2271 bp, Artificial Sequence
  derived and/or modified sequence
atgtggggacgtcggagaaagctgagacggctgaacgacgtgaccatctcaacctgccatgcgtctgctaaggtgggcacgagacttatgtttgaccacaatggcaagatcattcagaaaactccatatcctaggcccaggggcaccacagtgagtgtgcaacagctgttctctactctgccggtcagacacaaagaatttcagcgcaacatcaaaaaggagtacgctaaaatggtgcaagttctccatgcttactgcattatctcggcaggtatcagagtgtcttgtacaaaccagctggggcagggtaaacgccagcctgtggtgtgtaccggagggtccccaagtatcaaggagaatatcgggagcgtttttggacagaagcaactccagtcgctgattccgtttgtgcagctcccgccatcagatagcgtgtgcgaagagtacggattaagctgcagcgatgctcttcacaatctgttttatatctcgggcttcatcagccaatgcacccatggggtcggtagaagttccaccgaccgtcagttttttttcattaatagaagaccttgtgatcctgctaaagtttgccggttggtcaatgaagtttatcatatgtataatcggcatcagtatccctttgttgtgctgaatatatcggttgacagcgagtgtgtggatatcaacgtgacccctgataagagacaaatactgcttcaggaggaaaaactgctgctggctgtgctgaaaacgtcattgatcgggatgtttgactctgacgttaataaactcaatgtgtcccagcagcctttgctggacgttgagggaaatctcattaaaatgcacgcggcagacctggagaaacctatggtggagaagcaggaccagtcccctagcttacgcactggggaagagaagaaggacgtatccatctctaggctgcgggaggcttttagtttgcgacataccactgagaataaaccccattcgcctaagacccccgagcctagaagatccccgcttgggcagaagcgcggaatgttgtcctcgagcacatccggggcaatcagcgataagggagttctcagaccacagaaggaagcagtgagttcatctcatggccctagcgatcctacagaccgcgcagaggtggagaaagattccggccacggctctacctcggtggatagcgaagggttctctatccctgacacaggatctcactgctcatccgaatacgcggcaagctcgcccggagataggggttcccaggagcacgtggatagccaggagaaggcgccaaagactgacgacagttttagcgacgtagactgccacagtaaccaggaagacacaggctgtaagtttagagtcttgccacaaccaaccaatctcgcaacccccaacactaagcgatttaaaaaagaagagatactgtcatctagcgacatatgccaaaagttggtcaacacccaggacatgtccgcgagccaagtggatgtcgctgtgaaaatcaataagaaggtcgtccctttggatttttcgatgtcgtcactggccaagcgcattaaacagctgcatcatgaagcgcagcaatcagaaggggaacagaactatcgaaaatttcgagctaaaatctgccctggagaaaatcaggccgcagaggacgaactacggaaagaaatatccaaaaccatgtttgccgagatggaaattataggacagttcaaccttgggttcataattacaaagctcaacgaggatatattcattgtcgatcagcacgccactgacgagaagtacaacttcgagatgcttcagcagcacactgtcctgcagggacaaaggcttattgcccctcagactctgaacctcacagcagtcaatgaggcggtccttattgaaaatcttgagatttttcgcaaaaatggctttgactttgtcatcgacgagaacgctccagtcacggagcgggctaagctcatctcactgcctacctctaaaaattggacctttggtcctcaagatgttgacgaactcattttcatgctctctgactccccgggtgttatgtgccggccaagtagggtaaagcagatgttcgcgtccagagcgtgcagaaagtctgtgatgatcggaacagctttgaacacctcagaaatgaaaaaactcatcacccacatgggagagatggaccatccctggaattgcccccacggacgtccgactatgaggcacatcgcgaatctgggtgtaatttcacagaactag

SEQ ID NO: 306017 - DNA, 2271 bp, Artificial Sequence
  derived and/or modified sequence
atgtggggtagaagaagaaaacttcgaaggcttaacgatgtcaccatttctacctgccacgcatcggcgaaggttggaactcgactgatgtttgatcacaatgggaaaattatccagaaaaccccctacccccgccccagagggaccacagtcagcgtgcagcagttattttccacactacctgtgcgccataaggaatttcaaaggaatattaagaaggagtatgccaaaatggtccaggtcttacatgcatactgtatcatttcagcaggcatccgtgtaagttgcaccaatcagcttggacaaggaaaacgacagcctgtggtatgcacaggtggaagccccagcataaaggaaaatatcggctctgtgtttgggcagaagcagttgcaaagcctcattccttttgttcagctgccccctagtgactccgtgtgtgaagagtacggtttgagctgttccgatgctctgcataatcttttttacatctcaggtttcatttcacaatgcacgcatggagttggaaggagttcaacagacagacagtttttctttatcaaccggcggccttgtgacccagcaaaggtctgcagactcgtgaatgaggtctaccacatgtataatcgacaccagtatccatttgttgttcttaacatttctgttgattcagaatgcgttgatatcaatgttactccagataaaaggcaaattttgctacaagaggaaaagcttttgttggcagttttaaagacctctttgataggaatgtttgatagtgatgtcaacaagctaaatgtcagtcagcagccactgctggatgttgaaggtaacttaataaaaatgcatgcagcggatttggaaaagcccatggtagaaaagcaggatcaatccccttcattaaggactggagaagaaaaaaaagacgtgtccatttccagactgcgagaggccttttctcttcgtcacacaacagagaacaagcctcacagcccaaagactccagaaccaagaaggagccctctaggacagaaaaggggtatgctgtcttctagcacttcaggtgccatctctgacaaaggcgtcctgagacctcagaaagaggcagtgagttccagtcacggacccagtgaccctacggacagagcggaggtggagaaggactcggggcacggcagcacttccgtggattctgaggggttcagcatcccagacacgggcagtcactgcagcagcgagtatgcggccagctccccaggggacaggggctcgcaggaacatgtggactctcaggagaaagcgcctaaaactgacgactctttttcagatgtggactgccattcaaaccaggaagataccggatgtaaatttcgagttttgcctcagccaactaatctcgcaaccccaaacacaaagcgttttaaaaaagaagaaattctttccagttctgacatttgtcaaaagttagtaaatactcaggacatgtcagcctctcaggttgatgtagctgtgaaaattaataagaaagttgtgcccctggacttttctatgagttctttagctaaacgaataaagcagttacatcatgaagcacagcaaagtgaaggggaacagaattacaggaagtttagggcaaagatttgtcctggagaaaatcaagcagccgaagatgaactaagaaaagagataagtaaaacgatgtttgcagaaatggaaatcattggtcagtttaacctgggatttataataaccaaactgaatgaggatatcttcatagtggaccagcatgccacggacgagaagtataacttcgagatgctgcagcagcacaccgtgctccaggggcagaggctcatagcacctcagactctcaacttaactgctgttaatgaagctgttctgatagaaaatctggaaatatttagaaagaatggctttgattttgttatcgatgaaaatgctccagtcactgaaagggctaaactgatttccttgccaactagtaaaaactggaccttcggaccccaggacgtcgatgaactgatcttcatgctgagcgacagccctggggtcatgtgccggccttcccgagtcaagcagatgtttgcctccagagcctgccggaagtcggtgatgattgggactgctcttaacacaagcgagatgaagaaactgatcacccacatgggggagatggaccacccctggaactgtccccatggaaggccaaccatgagacacatcgccaacctgggtgtcatttctcagaactga

SEQ ID NO: 306018 - protein, 469 aa, Artificial Sequence
  derived and/or modified sequence
MFSEQAAQRAHTLLSPPSANNATFARVPVATYTNSSQPFRLGERSFSRQYAHIYATRLIQMRPFLENRAQQHWGSGVGVKKLCELQPEEKCCVVGTLFKAMPLQPSILREVSEEHNLLPQPPRSKYIHPDDELVLEDELQRIKLKGTIDVSKLVTGTVLAVFGSVRDDGKFLVEDYCFADLAPQKPAPPLDTDRFVLLVSGLGLGGGGGESLLGTQLLVDVVTGQLGDEGEQCSAAHVSRVILAGNLLSHSTQSRDSINKAKYLTKKTQAASVEAVKMLDEILLQLSASVPVDVMPGEFDPTNYTLPQQPLHPCMFPLATAYSTLQLVTNPYQATIDGVRFLGTSGQNVSDIFRYSSMEDHLEILEWTLRVRHISPTAPDTLGCYPFYKTDPFIFPECPHVYFCGNTPSFGSKIIRGPEDQTVLLVTVPDFSATQTACLVNLRSLACQPISFSGFGAEDDDLGGLGLGP

SEQ ID NO: 306019 - protein, 148 aa, Artificial Sequence
  derived and/or modified sequence
MFSEQAAQRAHTLLSPPSANNATFARVPVATYTNSSQPFRLGERSFSRQYAHIYATRLIQMRPFLENRAQQHWGSGVGVKKLCELQPEEKCCVVGTLFKAMPLQPSILREVSEEHNLLPQPPRSKYIHPDDELVLEDELQRIKLKGTI

SEQ ID NO: 306020 - protein, 220 aa, Artificial Sequence
  derived and/or modified sequence
MFSEQAAQRAHTLLSPPSANNATFARVPVATYTNSSQPFRLGERSFSRQYAHIYATRLIQMRPFLENRAQQHWGSGVGVKKLCELQPEEKCCVVGTLFKAMPLQPSILREVSEEHNLLPQPPRSKYIHPDDELVLEDELQRIKLKGTIDVSKLVTGTVLAVFGSVRDDGKFLVEDYCFADLAPQKPAPPLDTDRFVLLVSGLGLGGGGGESLLGTQLLVD

SEQ ID NO: 306021 - protein, 155 aa, Artificial Sequence
  derived and/or modified sequence
MFSEQAAQRAHTLLSPPSANNATFARVPVATYTNSSQPFRLGERSFSRQYAHIYATRLIQMRPFLENRAQQHWGSGVGVKKLCELQPEEKCCVVGTLFKAMPLQPSILREVSEEHNLLPQPPRSKYIHPDDELVLEDELQRIKLKGTIDVSKLVT

SEQ ID NO: 306022 - DNA, 1410 bp, Artificial Sequence
  derived and/or modified sequence
atgtttagtgagcaggctgcccagagagcacacacgctgctttcccccccttctgctaataatgccacatttgctagggtgcctgtggcgacatacacaaactcttctcagccctttagactgggcgagcggtcattttctagacagtatgctcacatctatgccactcgcttaatccagatgaggcctttccttgagaaccgcgctcaacaacactgggggagtggcgtaggcgtgaagaagctatgcgagctgcagcctgaggagaagtgctgtgtggtggggactttatttaaggctatgccgcttcagccgtctatcttgcgggaagtgagcgaagaacacaacttactgccccagccaccgagaagcaaatacatccatcccgatgacgaactggtactcgaagatgaattgcagcggatcaagttaaaagggaccatagatgtaagtaaactagttacgggcacagttctggccgtgtttggctccgttcgggatgacggcaagtttcttgtcgaagactactgctttgccgaccttgccccgcagaaacccgcccccccacttgacaccgataggtttgtactcctggtgtcaggtctcggcctaggaggaggaggcggagaatccttgctgggaacacagctgttggtggacgtagtgacaggccagctaggggatgagggggagcaatgttctgcagcacacgtgagccgcgttatcctagctggcaatctgctgagccactccactcaaagccgtgattccataaataaggcgaagtacttgacaaagaaaacacaggctgcttccgtcgaggcagttaaaatgctcgatgaaatcttattacagttgtctgcctctgtgcctgtggatgtaatgccaggagaatttgaccccacaaactatacccttccgcagcagcccctgcatccatgcatgtttccgctggcgactgcttacagtacactgcagctggttaccaacccgtatcaggcaactattgatggcgtccggttcctgggcacgtcggggcaaaacgtgtcggatatcttcaggtattcctccatggaggaccacctggaaattttagagtggacgctccgagtacggcatataagtcccactgcccccgacactttagggtgttatcccttttacaagaccgacccctttatttttccagagtgcccccacgtgtatttctgcggcaacactccttctttcggctcaaagatcatcaggggtcccgaggaccagaccgtgctgctggttaccgttccagatttcagcgccacacagaccgcttgcctagtgaatctgaggtcccttgcctgtcagcctatttcattttccgggttcggcgctgaagatgacgatttgggtggcctgggattggggccctag

SEQ ID NO: 306023 - DNA, 1410 bp, Artificial Sequence
  derived and/or modified sequence
atgttttctgaacaggctgctcaacgggcccatacccttctttctcctccgtccgctaataacgctaccttcgctcgagtgcctgtagcaacatacaccaactcctctcagccctttagactgggtgaaagaagcttttccagacaatatgctcatatctatgcaacccgcctgattcagatgcggccgtttcttgagaatcgagcacaacagcactgggggtctggcgttggggtgaagaagctgtgtgaactccaacctgaggagaagtgctgcgtggtgggaaccctgtttaaagccatgcccctccagccctcaatcttgagagaggtgtccgaggagcacaatctcctgccacagccgcctaggagcaagtacatccaccccgacgatgaattggtcttggaagacgagttacagaggattaagctgaaaggtacaattgatgtgtccaagctggtgaccggaaccgtcttggccgtcttcggctcggttcgcgacgacgggaagttcctggtcgaggactactgcttcgccgacttggccccacagaagcctgccccgccactggataccgataggttcgttctgctcgtgagcggactgggactaggcgggggcggcggggagtcactgttgggaacccagcttctggtcgacgtggtgaccggccagctaggggatgagggcgaacaatgtagcgcagcccatgtttctcgcgttatcctggcgggtaatctcctgagccactctacccagtcaagggactccataaacaaagcgaagtatctgacaaaaaaaactcaggccgcttcagtggaagccgttaaaatgctggatgaaatactcctgcagctgagcgctagtgtcccagtagatgtgatgccaggagaatttgatcccaccaactacacattgccccaacagcccctccacccttgcatgttcccactagcaacagcctattcaaccctacagctggtcactaatccataccaggcgacaatagacggcgttagatttctgggtacaagtggccagaacgtctcggacatctttcgatactcctcaatggaagatcacctggaaattctagagtggacccttcgcgtgagacacatctctccaaccgcccccgatacattagggtgctaccccttctataagacagatcctttcatatttccggagtgtccacatgtctacttttgcggcaacacccctagcttcggatctaagataattcgcggcccagaggatcagacagtcctgcttgtaaccgttccagatttttctgctacccaaactgcttgtctggtgaaccttagatcgttagcttgccagcctatcagtttcagcggcttcggcgctgaggatgatgacctgggcggcctgggactgggcccatag

SEQ ID NO: 306024 - DNA, 1410 bp, Artificial Sequence
  derived and/or modified sequence
atgttttctgagcaggccgcccagagggcccacaccctgctgagcccccccagcgccaacaatgccacctttgcccgggtgcctgtggccacctacaccaacagcagccagcccttccggctgggggagaggagcttcagccggcagtatgcccacatctatgccaccaggctcatccagatgaggcccttcctggagaacagagcccagcagcactggggcagcggcgtgggcgtgaagaagctgtgtgagctgcagcctgaggagaagtgctgcgtggtgggcaccctcttcaaggccatgcccctgcagcccagcatcctgcgggaggtgtctgaggagcacaacctgctgccccagcccccaagaagcaagtacatccacccagatgatgagctggtgctggaggatgagctgcagaggatcaagctgaagggcaccattgatgtgtccaagctggtgactggaacagtgctggccgtgtttggatctgtgagagatgatggcaagttcctggtggaggactactgctttgctgacctggccccccagaagccagccccacccctggacacagacagatttgtgctgctggtgtctggcctgggcctgggcggcggcggcggggagagcctgctgggcacccagctgctggtggatgtggtgacaggccagctgggagatgaaggagagcagtgcagcgctgcccacgtgtccagggtcatcctggccggcaacctgctgagccacagcacccagagccgggacagcatcaacaaggccaagtacctgaccaagaagacccaggccgcctctgtggaggccgtgaagatgctggatgagatcctgctgcagctgagcgcctctgtgcctgtggatgtgatgcctggagaatttgaccccaccaactacaccctgccccagcagcccctgcacccctgcatgttccccctggccacagcctacagcaccctgcagctggtgaccaacccctaccaggccaccattgatggagtgcgcttcctgggcaccagcggccagaatgtgtctgacatcttccgctacagctccatggaggaccacctggagatcctggagtggaccctgcgggtgcgccacatcagccccacagccccagacaccctgggctgctaccccttctacaagacagaccccttcatcttcccagaatgtccccacgtgtacttctgtggcaacacccccagctttggcagcaagatcatccggggccctgaggaccagacagtgctgctggtgacagtgcctgacttcagcgccacccagacagcctgcctggtgaacctgcggagcctggcctgccagcccatctccttcagcggctttggagcagaagatgatgacctgggcggcctgggcctgggcccctag

SEQ ID NO: 306025 - DNA, 1410 bp, Artificial Sequence
  derived and/or modified sequence
atgttcagcgagcaggccgcccagcgggcccacaccctgctgagccctccttcagccaacaacgctactttcgccagagtcccggtggcaacctacacaaactcgagccagccctttcgtctcggagaaagatcattcagccggcaatacgcccacatctacgcaacccgcctgatccagatgagaccatttctggaaaatcgggcacaacagcactggggtagcggtgtgggagtgaaaaagctctgcgaattgcagcctgaggagaaatgttgtgtggttggaacgctgtttaaagcgatgcccctgcagcccagcattctgagagaggttagtgaggaacacaacctcctgccacaaccacccagatctaagtacatccatccggatgatgagctggtgctggaggacgagctgcagagaatcaaactgaagggaacaatagatgtgtcgaagcttgtaactggcacagtcctcgcggtttttgggagcgttcgggacgacgggaagttcctggtggaggactattgctttgctgaccttgctcctcagaagccagcccccccacttgacaccgatcgcttcgtactgctggtcagcgggctaggcctcggtggtggaggcggggagagtctgttaggaactcaattattggtcgacgtggtgactggacagttaggagatgagggcgaacaatgcagtgctgcgcatgtatctcgcgtcattcttgcaggcaatctgctcagccacagtacacaaagccgcgatagtattaataaggccaagtacctcactaagaagacccaggcagccagtgtggaggccgtaaaaatgttggatgagatattgcttcagctcagtgctagtgtacccgttgacgtgatgcccggtgaattcgatcccacaaattacaccctgcctcagcagccattacatccatgcatgtttcccttagcaacggcctattccaccttgcagcttgtaaccaatccataccaggctacgatcgacggggtccgctttttaggcaccagtgggcagaacgtgtccgacatctttcgttactcctccatggaggatcacctggaaattttggagtggacgctgcgtgtaagacacatatctccgacagctcctgacactttggggtgctatcccttctataaaaccgacccctttatctttccagagtgcccccatgtctacttttgcggcaatacacccagtttcggttcaaaaatcattaggggtcccgaagaccagactgtcctcctcgttaccgtgccagatttcagcgctacgcagacagcttgtttggttaatctcaggagccttgcgtgccagccaatttctttcagcggcttcggcgccgaagacgatgacttagggggtctgggcctggggccgtag

SEQ ID NO: 306026 - DNA, 1410 bp, Artificial Sequence
  derived and/or modified sequence
atgttcagcgagcaggccgcccagcgggcccacaccctgctgagccctccctccgccaacaatgcaacctttgctcgggttcctgtcgcgacatatactaatagtagccagcctttccggctgggagaacggagttttagtaggcagtacgcccacatttacgcaactaggttgattcagatgcgtccttttcttgagaaccgcgctcagcaacactgggggtctggagttggtgtgaaaaagctgtgcgaactgcaaccagaggagaaatgttgcgtggttgggaccctgttcaaagctatgcctctgcagccctcaatactcagagaggtttctgaggaacataatctccttccccagccccctagaagtaaatacatacatcctgatgatgaactggtgttagaggacgagctccagaggattaaactaaagggaactatcgacgtcagcaaactggtgaccggtaccgtgttggcggtgttcgggtctgtgcgagacgatgggaagttcctagtcgaagactattgcttcgctgacttagcccctcagaagcccgcgcccccgctcgacaccgaccgttttgtgctcttagttagcggccttggtctcggcggcggcggcggagagagtctgctcggcacacagctcctggtcgacgttgtcaccggtcaactgggcgacgagggagaacaatgtagcgctgcacatgtgagccgggtcatcttagcaggaaatttgctgagccattcgacccagtcgcgcgatagcatcaacaaagcaaagtatctgaccaagaagacacaggctgcttcagtagaggcagtcaagatgctcgatgagattctgttacagctctccgcatccgttcccgtggacgtgatgcccggtgaattcgaccccaccaattacaccttaccccagcagccacttcatccctgcatgttccctctggcaaccgcctactctactctgcagttagtcacgaacccttaccaggcaacaatcgacggggtccgcttcttagggaccagtggacagaacgtttccgatatttttcgctattccagcatggaggatcatttagagattcttgaatggacactccgcgtgaggcacatctccccgaccgctcctgacaccctgggttgctacccattctacaagaccgatccgtttatatttcctgagtgcccacacgtgtatttttgcggtaatactccttcttttggtagtaaaattatcagaggtcctgaagaccagacagtcctgctcgtgacagttcccgacttctctgcaacccagactgcatgtctcgtgaatcttagatccctggcttgtcaacccatctctttcagtggctttggcgccgaagacgatgacctgggtggccttggtctgggaccttag

SEQ ID NO: 306027 - DNA, 2158 bp, Artificial Sequence
  derived and/or modified sequence
gagtggggtccagggaaacggggtcagctgggggtggcagttccaggccgcgaggccgggctcctgggtcggtgggctggtgtcttggcggacgtcccgcagctgccgcgtggatccgagccggggcacccgccgtgactgggacagcccccagggcgctctcggccccatcccgagtagcgcggcctggctgctgccgccatcaagcacgttcgagccaaaagctcctaacgagtcactcgttagacacgtgtgcggagcctgtgtcccaggccagtgctgtcccgtggagatagattgcaagccgctagggaattttttaactttctagtgccggagagctggatggaggcagatcgggaattccatttggggcaaactgaacttgattgagaccctggtagttgtccagatggaacaggacacctgagtctagggttcgggaagaactccagatgggacaaacactcctagctttccttttctctttttggatgaccgctacaggtatcctttgggtgcagtgagacaccaggagagctgctgctttgggggatggacaggggcagcaggaatgcctttgtgttttcgcagtgaacctccttggcctgggcgaagctgtgtggaccaagcaagtcaggagtgtggccatgttttctgagcaggctgcccagagggcccacactctactgtccccaccatcagccaacaatgccacctttgcccgggtgccagtggcaacctacaccaactcctcacaacccttccggctaggagagcgcagctttagccggcagtatgcccacatttatgccacccgcctcatccaaatgagacccttcctggagaaccgggcccagcagcactggggcagtggagtgggagtgaagaagctgtgtgaactgcagcctgaggagaagtgctgtgtggtgggcactctgttcaaggccatgccgctgcagccctccatcctgcgggaggtcagcgaggagcacaacctgctcccccagcctcctcggagtaaatacatacacccagatgacgagctggtcttggaagatgaactgcagcgtatcaaactaaaaggcaccattgacgtgtcaaagctggttacggggactgtcctggctgtgtttggctccgtgagagacgacgggaagtttctggtggaggactattgctttgctgaccttgctccccagaagcccgcacccccacttgacacagataggtttgtgctactggtgtccggcctgggcctgggtggcggtggaggcgagagcctgctgggcacccagctgctggtggatgtggtgacggggcagcttggggacgaaggggagcagtgcagcgccgcccacgtctcccgggttatcctcgctggcaacctcctcagccacagcacccagagcagggattctatcaataaggccaaatacctcaccaagaaaacccaggcagccagcgtggaggctgttaagatgctggatgagatcctcctgcagctgagcgcctcagtgcccgtggacgtgatgccaggcgagtttgatcccaccaattacacgctcccccagcagcccctccacccctgcatgttcccgctggccactgcctactccacgctccagctggtcaccaacccctaccaggccaccattgatggagtcagatttttggggacatcaggacagaacgtgagtgacattttccgatacagcagcatggaggatcacttggagatcctggagtggaccctgcgggtccgtcacatcagccccacagcccctgacactctaggttgttaccccttctacaaaactgacccgttcatcttcccagagtgcccgcatgtctacttttgtggcaacacccccagctttggctccaaaatcatccgaggtcctgaggaccagacagtgctgttggtgactgtccctgacttcagtgccacgcagaccgcctgccttgtgaacctgcgcagcctggcctgccagcccatcagcttctcgggcttcggggcagaggacgatgacctgggaggcctggggctgggcccctgactcaaaaaagtggttttgaccagagaggcccagatggaggctgttcattccctgcagtgtcggcattgtaaataaagcctgagcacttgctgatgcga

SEQ ID NO: 306028 - DNA, 556 bp, Artificial Sequence
  derived and/or modified sequence
agtggtcggcgggatgaggcgcctggtgacggacggggcgaggagggcagcgattgtgaacctccttggcctgggcgaagctgtgtggaccaagcaagtcaggagtgtggccatgttttctgagcaggctgcccagagggcccacactctactgtccccaccatcagccaacaatgccacctttgcccgggtgccagtggcaacctacaccaactcctcacaacccttccggctaggagagcgcagctttagccggcagtatgcccacatttatgccacccgcctcatccaaatgagacccttcctggagaaccgggcccagcagcactggggcagtggagtgggagtgaagaagctgtgtgaactgcagcctgaggagaagtgctgtgtggtgggcactctgttcaaggccatgccgctgcagccctccatcctgcgggaggtcagcgaggagcacaacctgctcccccagcctcctcggagtaaatacatacacccagatgacgagctggtcttggaagatgaactgcagcgtatcaaactaaaaggcaccatt

SEQ ID NO: 306029 - DNA, 765 bp, Artificial Sequence
  derived and/or modified sequence
gcggcgggaagagcccgggaagcttagtggggaagcgtctcttgatgggtgaacctccttggcctgggcgaagctgtgtggaccaagcaagtcaggagtgtggccatgttttctgagcaggctgcccagagggcccacactctactgtccccaccatcagccaacaatgccacctttgcccgggtgccagtggcaacctacaccaactcctcacaacccttccggctaggagagcgcagctttagccggcagtatgcccacatttatgccacccgcctcatccaaatgagacccttcctggagaaccgggcccagcagcactggggcagtggagtgggagtgaagaagctgtgtgaactgcagcctgaggagaagtgctgtgtggtgggcactctgttcaaggccatgccgctgcagccctccatcctgcgggaggtcagcgaggagcacaacctgctcccccagcctcctcggagtaaatacatacacccagatgacgagctggtcttggaagatgaactgcagcgtatcaaactaaaaggcaccattgacgtgtcaaagctggttacggggactgtcctggctgtgtttggctccgtgagagacgacgggaagtttctggtggaggactattgctttgctgaccttgctccccagaagcccgcacccccacttgacacagataggtttgtgctactggtgtccggcctgggcctgggtggcggtggaggcgagagcctgctgggcacccagctgctggtggat

SEQ ID NO: 306030 - DNA, 1659 bp, Artificial Sequence
  derived and/or modified sequence
gggatgcggcgcgccgcgcgggtgagacatcggtatccaggcacgataaatttccaagtggacacaatgtctggtgtcaactacagctgttctccttcttttcccagtatcctttgggtgcagtgagacaccaggagagctgctgctttgggggatggacaggggcagcaggaatgcctttgtgttttcgcagtgaacctccttggcctgggcgaagctgtgtggaccaagcaagtcaggagtgtggccatgttttctgagcaggctgcccagagggcccacactctactgtccccaccatcagccaacaatgccacctttgcccgggtgccagtggcaacctacaccaactcctcacaacccttccggctaggagagcgcagctttagccggcagtatgcccacatttatgccacccgcctcatccaaatgagacccttcctggagaaccgggcccagcagcactggggcagtggagtgggagtgaagaagctgtgtgaactgcagcctgaggagaagtgctgtgtggtgggcactctgttcaaggccatgccgctgcagccctccatcctgcgggaggtcagcgaggagcacaacctgctcccccagcctcctcggagtaaatacatacacccagatgacgagctggtcttggaagatgaactgcagcgtatcaaactaaaaggcaccattgacgtgtcaaagctggttacggggactgtcctggctgtgtttggctccgtgagagacgacgggaagtttctggtggaggactattgctttgctgaccttgctccccagaagcccgcacccccacttgacacagataggtttgtgctactggtgtccggcctgggcctgggtggcggtggaggcgagagcctgctgggcacccagctgctggtggatgtggtgacggggcagcttggggacgaaggggagcagtgcagcgccgcccacgtctcccgggttatcctcgctggcaacctcctcagccacagcacccagagcagggattctatcaataaggccaaatacctcaccaagaaaacccaggcagccagcgtggaggctgttaagatgctggatgagatcctcctgcagctgagcgcctcagtgcccgtggacgtgatgccaggcgagtttgatcccaccaattacacgctcccccagcagcccctccacccctgcatgttcccgctggccactgcctactccacgctccagctggtcaccaacccctaccaggccaccattgatggagtcagatttttggggacatcaggacagaacgtgagtgacattttccgatacagcagcatggaggatcacttggagatcctggagtggaccctgcgggtccgtcacatcagccccacagcccctgacactctaggttgttaccccttctacaaaactgacccgttcatcttcccagagtgcccgcatgtctacttttgtggcaacacccccagctttggctccaaaatcatccgaggtcctgaggaccagacagtgctgttggtgactgtccctgacttcagtgccacgcagaccgcctgccttgtgaacctgcgcagcctggcctgccagcccatcagcttctcgggcttcggggcagaggacgatgacctgggaggcctggggctgggcccctga

SEQ ID NO: 306031 - DNA, 665 bp, Artificial Sequence
  derived and/or modified sequence
cacagttggactcaccacatctcctgtacttcgtagccctaggtggctagtggcataagacacaaaaatctcagctctcctggagcttatggtctagttggagcaggcagacaatacatttaaaatatacagtttgttagaagtgaacctccttggcctgggcgaagctgtgtggaccaagcaagtcaggagtgtggccatgttttctgagcaggctgcccagagggcccacactctactgtccccaccatcagccaacaatgccacctttgcccgggtgccagtggcaacctacaccaactcctcacaacccttccggctaggagagcgcagctttagccggcagtatgcccacatttatgccacccgcctcatccaaatgagacccttcctggagaaccgggcccagcagcactggggcagtggagtgggagtgaagaagctgtgtgaactgcagcctgaggagaagtgctgtgtggtgggcactctgttcaaggccatgccgctgcagccctccatcctgcgggaggtcagcgaggagcacaacctgctcccccagcctcctcggagtaaatacatacacccagatgacgagctggtcttggaagatgaactgcagcgtatcaaactaaaaggcaccattgacgtgtcaaagctggttacgg

SEQ ID NO: 306032 - DNA, 1410 bp, Artificial Sequence
  derived and/or modified sequence
atgttcagcgagcaagcggctcagagagcccatacgctcctttcccctccatccgctaataatgctacttttgccagagttccggttgccacctatactaactcaagccagccattcaggctaggtgagaggtcctttagcaggcagtacgcacatatttacgctactcgcctcatccagatgcggccattcttggagaacagagcacagcagcactggggatccggcgtgggcgtcaaaaagctgtgcgaactgcaacccgaagaaaagtgttgcgtggttgggacactcttcaaggcgatgccgctgcagcctagtatcctccgggaagtcagtgaagagcataacctgctgccccaacctccacggagtaagtacatccatccggacgatgagcttgttctcgaggatgagcttcagagaataaaacttaaagggaccatagatgtatctaagctggtcacagggacagttctcgcagtgttcggttccgtgcgagatgacggtaagtttctcgtcgaggattactgcttcgccgacctggcacctcaaaaaccggctccccctctggacacagacaggtttgtgctgctggtatcaggtttgggcctgggcggaggcggtggggaatccctgctgggcacacagcttctagtagatgttgtgaccggacagcttggagatgagggcgagcaatgtagcgctgcccatgtctccagagtgatcctcgctggtaatttactgtctcatagcactcagagccgcgattcgataaataaagccaagtaccttaccaaaaaaacccaggccgcatcagttgaggctgtgaaaatgctggacgaaatcctgctgcagctgtccgcctctgtgcccgtcgacgtgatgcctggcgaattcgaccccactaactatactctgcctcaacaacctctgcatccctgtatgtttcctctagctactgcctatagcaccctgcagcttgtcaccaacccttatcaagccactatcgacggcgtccgattcctgggaacaagcgggcagaatgtctctgacatttttcggtacagtagcatggaggaccatctggaaattcttgagtggacacttagagtcagacacatctctccaacggccccagataccctaggatgctaccccttctacaaaacggatcccttcatctttccagagtgtccacatgtgtacttctgtggcaacacaccctccttcggctcgaaaatcattagggggccagaggaccagactgtgctgctggtcacggttcccgattttagcgctacgcagacagcttgcctcgtgaacctccgaagtctggcatgccagcctatttcattcagtggtttcggtgcggaggacgacgatctcgggggactcggccttggcccatag

SEQ ID NO: 306033 - DNA, 1410 bp, Artificial Sequence
  derived and/or modified sequence
atgttttctgagcaggcagcccagagggcacacactctcctgtcccctccgagcgccaacaacgcaacgttcgccagggttcctgtcgctacttatactaattcatctcagcctttcaggctcggtgaaaggagcttctcacgacagtacgctcacatttacgccactcggctcatccagatgcgaccctttctggagaatcgggctcagcagcactggggtagtggcgtgggggttaagaaactctgcgaacttcaaccagaagaaaaatgctgtgtggtcggtactctcttcaaggccatgccccttcagccatccattctgagggaagttagcgaggaacataaccttctcccccagccccctcgatcaaagtacattcatcccgacgatgaattggtgttggaagatgaactgcagcgcattaaactgaaaggcaccatcgacgtgtcgaagttggtgacgggtacagtactggcagtgtttgggtccgtccgggacgatggcaaatttttggtggaagattactgcttcgcggatctggctccccagaaacctgcgccacctctagatacagacagattcgtgctgctagtgtcaggactcgggttggggggtggtggcggtgagagcctccttggtacccagctgttggtcgatgttgtgacgggccagctcggcgatgagggggagcagtgcagcgcggctcatgtatctcgggtgatcctcgccggaaatcttttgtcccattcaacccagagccgggactccatcaacaaagcgaaatacttgaccaaaaaaacacaagctgccagcgtcgaagccgtcaagatgttagacgaaatcctcctacagctgagcgcaagcgtgccagtggacgtcatgcctggtgaatttgaccctacgaattacaccctgccccaacagccactgcacccatgcatgttccccttagctacggcgtactcaactctccagttagtgaccaacccataccaggctaccatcgacggggtgagattccttggcacttctggacagaatgtttcggacatcttccggtatagtagtatggaggaccaccttgaaattcttgagtggaccttgcgcgtcaggcacatctcacccacagccccagacacactcggctgttacccattttataaaaccgatcccttcattttcccggaatgccctcatgtgtacttttgcggtaatacacctagctttgggtccaaaattattcgtggtcccgaggatcaaaccgtccttctggtgaccgtgcctgatttctcagccacacagacggcctgtcttgtaaatctgagaagcttggcatgccagcccatctctttcagcgggttcggcgctgaagacgatgatcttggcggactgggtttgggtccctag

SEQ ID NO: 306034 - DNA, 1410 bp, Artificial Sequence
  derived and/or modified sequence
atgttcagcgagcaggccgcccagagagcccacaccctgctgagcccccccagcgccaacaacgccaccttcgccagagtgcccgtggccacctacaccaacagcagccagcccttcagactgggcgagagaagcttcagcagacagtacgcccacatctacgccaccagactgatccagatgagacccttcctggagaacagagcccagcagcactggggcagcggcgtgggcgtgaagaagctgtgcgagctgcagcccgaggagaagtgctgcgtggtgggcaccctgttcaaggccatgcccctgcagcccagcatcctgagagaggtgagcgaggagcacaacctgctgccccagccccccagaagcaagtacatccaccccgacgacgagctggtgctggaggacgagctgcagagaatcaagctgaagggcaccatcgacgtgagcaagctggtgaccggcaccgtgctggccgtgttcggcagcgtgagagacgacggcaagttcctggtggaggactactgcttcgccgacctggccccccagaagcccgccccccccctggacaccgacagattcgtgctgctggtgagcggcctgggcctgggcggcggcggcggcgagagcctgctgggcacccagctgctggtggacgtggtgaccggccagctgggcgacgagggcgagcagtgcagcgccgcccacgtgagcagagtgatcctggccggcaacctgctgagccacagcacccagagcagagacagcatcaacaaggccaagtacctgaccaagaagacccaggccgccagcgtggaggccgtgaagatgctggacgagatcctgctgcagctgagcgccagcgtgcccgtggacgtgatgcccggcgagttcgaccccaccaactacaccctgccccagcagcccctgcacccctgcatgttccccctggccaccgcctacagcaccctgcagctggtgaccaacccctaccaggccaccatcgacggcgtgagattcctgggcaccagcggccagaacgtgagcgacatcttcagatacagcagcatggaggaccacctggagatcctggagtggaccctgagagtgagacacatcagccccaccgcccccgacaccctgggctgctaccccttctacaagaccgaccccttcatcttccccgagtgcccccacgtgtacttctgcggcaacacccccagcttcggcagcaagatcatcagaggccccgaggaccagaccgtgctgctggtgaccgtgcccgacttcagcgccacccagaccgcctgcctggtgaacctgagaagcctggcctgccagcccatcagcttcagcggcttcggcgccgaggacgacgacctgggcggcctgggcctgggcccctag

SEQ ID NO: 306035 - protein, 923 aa, Artificial Sequence
  derived and/or modified sequence
MEEGNNNEEVIHLNNFHCHRGQEWINLRDGPITISDSSDEERIPMLVTPAPQQHEEEDLDDDVILTETNKPQRSRPNLIKPAAQWQDLKRLGEERPKKSRAAFESDKSSYFSVCNNPLFDSGAQDDSEDDYGEFLDLGPPGISEFTKPSGQTEREPKPGPSHNQAANDIVNPRSEQKVIILEEGSLLYTESDPLETQNQSSEDSETELLSNLGESAALADDQAIEEDCWLDHPYFQSLNQQPREITNQVVPQERQPEAELGRLLFQHEFPGPAFPRPEPQQGGISGPSSPQPAHPLGEFEDQQLASDDEEPGPAFPMQESQEPNLENIWGQEAAEVDQELVELLVKETEARFPDVANGFIEEIIHFKNYYDLNVLCNFLLENPDYPKREDRIIINPSSSLLASQDETKLPKIDFFDYSKLTPLDQRCFIQAADLLMADFKVLSSQDIKWALHELKGHYAITRKALSDAIKKWQELSPETSGKRKKRKQMNQYSYIDFKFEQGDIKIEKRMFFLENKRRHCRSYDRRALLPAVQQEQEFYEQKIKEMAEHEDFLLALQMNEEQYQKDGQLIECRCCYGEFPFEELTQCADAHLFCKECLIRYAQEAVFGSGKLELSCMEGSCTCSFPTSELEKVLPQTILYKYYERKAEEEVAAAYADELVRCPSCSFPALLDSDVKRFSCPNPHCRKETCRKCQGLWKEHNGLTCEELAEKDDIKYRTSIEEKMTAARIRKCHKCGTGLIKSEGCNRMSCRCGAQMCYLCRVSINGYDHFCQHPRSPGAPCQECSRCSLWTDPTEDDEKLIEEIQKEAEEEQKRKNGENTFKRIGPPLEKPVEKVQRVEALPRPVPQNLPQPQMPPYAFAHPPFPLPPVRPVFNNFPLNMGPIPAPYVPPLPNVRVNYDFGPIHMPLEHNLPMHFGPQPRHRF

SEQ ID NO: 306036 - protein, 678 aa, Artificial Sequence
  derived and/or modified sequence
MEEGNNNEEVIHLNNFHCHRGQEWINLRDGPITISDSSDEERIPMLVTPAPQQHEEEDLDDDVILTETNKPQRSRPNLIKPAAQWQEAAEVDQELVELLVKETEARFPDVANGFIEEIIHFKNYYDLNVLCNFLLENPDYPKREDRIIINPSSSLLASQDETKLPKIDFFDYSKLTPLDQRCFIQAADLLMADFKVLSSQDIKWALHELKGHYAITRKALSDAIKKWQELSPETSGKRKKRKQMNQYSYIDFKFEQGDIKIEKRMFFLENKRRHCRSYDRRALLPAVQQEQEFYEQKIKEMAEHEDFLLALQMNEEQYQKDGQLIECRCCYGEFPFEELTQCADAHLFCKECLIRYAQEAVFGSGKLELSCMEGSCTCSFPTSELEKVLPQTILYKYYERKAEEEVAAAYADELVRCPSCSFPALLDSDVKRFSCPNPHCRKETCRKCQGLWKEHNGLTCEELAEKDDIKYRTSIEEKMTAARIRKCHKCGTGLIKSEGCNRMSCRCGAQMCYLCRVSINGYDHFCQHPRSPGAPCQECSRCSLWTDPTEDDEKLIEEIQKEAEEEQKRKNGENTFKRIGPPLEKPVEKVQRVEALPRPVPQNLPQPQMPPYAFAHPPFPLPPVRPVFNNFPLNMGPIPAPYVPPLPNVRVNYDFGPIHMPLEHNLPMHFGPQPRHRF

SEQ ID NO: 306037 - DNA, 2772 bp, Artificial Sequence
  derived and/or modified sequence
atggaggagggtaacaataacgaggaagtgatccatctgaacaattttcactgccatcgagggcaagagtggataaacctgagagacggcccgataacaatttcggattcttcggatgaagaacggatccccatgttagtcaccccagctccccagcagcacgaagaggaggacctggacgatgacgttatcctgactgaaactaataagccacagagaagtcggccgaacctgataaaacccgccgcccagtggcaggaccttaagcgcctcggtgaagaacgccctaagaagtctagagccgctttcgagtcagacaaaagctcctacttcagcgtgtgcaacaaccccctgttcgactctggcgcacaggatgatagcgaagacgactatggcgaattccttgatctggggcctcccggcatcagtgaatttaccaaaccctccggacagactgagcgggaacctaagccaggcccgtctcataaccaggccgcaaatgatatagttaacccgcggtcggaacaaaaggtgataattctggaagagggctcattactttacaccgagagtgacccacttgaaacgcagaatcagagcagcgaagatagcgaaaccgagctactctcaaacctcggggaatctgctgcactggctgatgatcaggccatcgaggaagactgctggctagaccacccgtacttccagagcttgaatcagcagccccgagagattaccaaccaagtcgtaccccaggagcgccagccagaggctgagctcggccgcttgctgtttcagcacgagtttcccggaccagccttccctcgcccggagcctcagcagggcggaataagcggtccatcaagcccacagccggctcaccctcttggggaattcgaggatcagcagctagctagtgatgatgaggaacccggaccagctttccccatgcaagagagccaggaaccaaacttggagaacatttggggccaggaggccgctgaggtggaccaggagctggtggaactcctcgttaaggaaaccgaggccagattccccgatgtggctaatgggttcatagaggaaataattcacttcaaaaattactatgatctgaacgttttgtgcaatttcctcctggagaatcctgactacccaaaaagagaagaccgaatcatcatcaaccccagttcaagtcttctcgcttcgcaggacgaaactaagcttcccaagatcgacttcttcgactatagtaagctgacccctctggaccagcggtgcttcattcaggccgccgatctcctgatggccgacttcaaggtgctgtcaagccaggacatcaaatgggccctgcatgagctcaaagggcattacgccattacacggaaggctttgtcggatgctattaaaaagtggcaagaactgtcacctgagacctccggcaagcgaaagaagcgtaaacagatgaaccaatacagctatatagatttcaagtttgaacaaggcgacatcaagattgagaaacgaatgttcttcctggaaaataagcggcgccactgccggtcctatgacagaagggccttattaccagccgtgcagcaggagcaggaattttacgagcagaagatcaaggaaatggcggagcatgaagacttcctcctagcactgcaaatgaacgaggaacaatatcaaaaggacggtcagctgatcgagtgtaggtgttgttatggcgaatttccattcgaggagctcacacagtgcgctgatgcgcacctgttctgcaaagagtgtcttatcagatacgcacaggaggctgtcttcgggtcagggaaactcgagctatcgtgtatggaaggttcctgcacctgttccttccctactagcgaattagaaaaggttctgccacagacaattctgtacaagtattatgaacgcaaggcagaggaagaggtggccgctgcctacgccgatgagctggtgcgctgtccctcttgctccttccctgccctgttggacagcgacgttaagcgctttagttgccctaatccacactgtagaaaggaaacatgcagaaaatgccagggcctgtggaaagaacacaacgggctgacttgcgaagagctggcagagaaggatgacattaaatatcgcacgtccatcgaagagaaaatgacagctgcccgtattcgaaaatgccataaatgcggcacagggcttatcaaatctgaaggctgcaaccgcatgtcctgtaggtgcggtgcccagatgtgttatctgtgtcgcgtgtccatcaacggatatgatcacttctgtcagcaccctcgctcgccgggggcaccatgccaggagtgctcccgatgttcattgtggaccgaccccacggaagacgatgaaaagttgatcgaagagatccagaaagaggctgaagaggagcaaaagaggaagaacggcgaaaatacctttaagcgtatcgggcccccactcgagaagcccgtggaaaaggtacagcgtgtcgaggccttacctaggccagtgcctcagaacttgcctcaacctcagatgccaccctatgcttttgcacatcctccatttccactgcccccggttcgccccgtgtttaacaattttccccttaatatggggcctatccccgccccttatgtgcctcctcttccaaatgttcgtgtcaattacgacttcggccccatacacatgcccctggaacacaacctaccgatgcactttggccctcagccgagacacagattctag

SEQ ID NO: 306038 - DNA, 63 bp, Artificial Sequence
  derived and/or modified sequence
atggaggaggggaacaacaacgaagaggtgattcacctcaataattttcactgccataggtag

SEQ ID NO: 306039 - DNA, 2037 bp, Artificial Sequence
  derived and/or modified sequence
atggaagaagggaacaataatgaagaggtgatccaccttaataattttcattgtcacagaggacaggaatggattaacctgcgcgatggaccaatcacaatatctgattcctcagatgaagagcgtattcccatgctggtgacacctgcacctcagcagcatgaggaggaagatctggacgacgacgtgatactaactgaaacgaacaagcctcagcgctcaaggcctaacctgatcaagccagctgctcaatggcaggaagcagcagaagtggatcaggagttggtggaattactggtaaaggagacagaagccagattccccgacgtggccaatggctttatcgaagagattatccactttaaaaactattatgacctcaatgtgctctgcaacttcctcctggagaacccggattatcctaagagagaagataggattatcatcaacccatccagttctcttctcgctagtcaggatgagacaaagctgccaaagattgactttttcgactattcgaagttaactccactggaccagaggtgttttatacaagcagctgatctccttatggccgatttcaaggtcctgagttcacaggatatcaaatgggctctgcacgagctcaagggtcactatgcgatcacacggaaggcactgtctgacgcgatcaagaaatggcaggaactcagccctgagacatctggaaagagaaagaagcgcaagcagatgaatcagtactcatatattgattttaaattcgaacagggagatattaagatcgaaaagagaatgttctttctcgagaataaacggagacactgccgatcatatgatcggcgcgccctgctgccagcagttcaacaagagcaggagttctatgagcagaaaattaaggaaatggctgaacatgaggacttcctgctagctctccaaatgaatgaggaacagtatcagaaagacggccagctgatcgaatgtcgctgttgttacggggagttcccttttgaagaactaacccagtgcgctgatgcccacctcttctgcaaggaatgtttgattagatatgctcaggaggccgttttcggctctggtaagctcgagctgagctgcatggaggggagttgtacctgcagctttcctacaagtgagctagagaaggtcctcccacagaccatcctgtataaatactacgagcggaaggcggaagaggaagtagcggctgcgtatgctgatgagctggtccgatgtccatcctgctctttccccgccctgctcgatagcgacgtcaagaggttttcatgcccaaaccctcactgtcggaaggaaacctgccggaagtgccagggcctgtggaaagagcataacggattgacctgtgaggagctggctgagaaagatgatatcaagtatagaacctctatcgaagagaaaatgacggcggcccgcatccggaaatgccataagtgcggtactggtctcatcaaatccgaaggatgtaatcggatgagctgtagatgcggcgcccagatgtgctacttgtgtagggttagtatcaacggctacgatcacttttgtcaacacccaagatctcccggtgcgccctgtcaggagtgttctcgctgctcattatggacagatccaaccgaagacgatgaaaagctgatcgaggagatccagaaagaagccgaagaggaacaaaaaaggaagaatggggagaatacgtttaagcgaatcggaccaccattagaaaaacccgtagaaaaggtccagagggtggaagccctgcccagaccagttccccagaacttgccacagccccaaatgcctccttatgctttcgctcacccccccttccccctgcctccagtccggcccgtatttaacaactttcctctgaatatgggacccatccctgccccctatgtgcctcctcttccaaatgttcgcgttaactacgactttgggcccatccacatgccactggaacataatctgccaatgcacttcggacctcagccaagacacagattttag

SEQ ID NO: 306040 - DNA, 2772 bp, Artificial Sequence
  derived and/or modified sequence
atggaggagggcaacaacaatgaggaggtgatccacctgaacaacttccactgccaccggggccaggagtggatcaacctgagagatggccccatcaccatcagtgacagcagtgatgaggagcgcatccccatgctggtgaccccagccccccagcagcacgaggaggaggacctggatgatgatgtgatcctgacagagaccaacaagccccagaggagccggcccaacctgatcaagccagctgcccagtggcaggacctgaagaggctgggggaggagcggcccaagaagagcagagctgcctttgaaagtgacaagagcagctacttctctgtgtgcaacaaccccctgtttgattctggggcccaggatgattctgaagatgattatggagagttcctggacctgggccccccaggcatcagcgagttcaccaagcccagcggccagacagagcgggagcccaagccaggccccagccacaaccaggccgccaatgacatcgtgaaccccaggtctgagcagaaggtgatcatcctggaggagggcagcctgctgtacacagaaagtgaccccctggagacccagaaccagagcagcgaggacagcgagacagagctgctgagcaacctgggggagagcgctgccctggctgatgaccaggccatcgaggaggactgctggctggaccacccctacttccagagcctgaaccagcagccccgggagatcaccaaccaggtggtgccccaggagcggcagcctgaggccgagctgggccgcctgctcttccagcacgagttccctggccctgccttccccaggcctgagccccagcagggcggcatcagcggccccagcagcccccagcctgcccaccccctgggggagtttgaggaccagcagctggccagtgatgatgaggagcccggccctgccttccccatgcaggagagccaggagcccaacctggagaacatctggggccaggaggccgctgaggtggaccaggagctggtggagctgctggtgaaggagacagaggcccgcttcccagatgtggccaacggcttcatcgaggagatcatccacttcaagaactactatgacctgaatgtgctgtgcaacttcctgctggagaacccagactaccccaagagagaagatcgcatcatcatcaaccccagcagcagcctgctggccagccaggatgagaccaagctgcccaagattgacttctttgactacagcaagctgacccccctggaccagcgctgcttcatccaggccgctgacctgctgatggctgacttcaaggtgctgagcagccaggacatcaagtgggccctgcacgagctgaagggccactacgccatcaccaggaaggccctgagtgatgccatcaagaagtggcaggagctgagccctgagaccagcggcaagaggaagaagaggaagcagatgaaccagtacagctacatcgacttcaagtttgagcagggcgacatcaagattgagaagaggatgttcttcctggagaacaagagaagacactgccgctcctatgacagaagagccctgctgcctgctgtgcagcaggagcaggagttctatgagcagaagatcaaggagatggccgagcacgaggacttcctgctggccctgcagatgaatgaggagcagtaccagaaggatggccagctgattgaatgtcgctgctgctacggggagttcccctttgaggagctgacccagtgtgctgatgcccacctgttctgcaaggagtgcctgatccgctatgcccaggaggccgtgtttggaagtggcaagctggagctgagctgcatggagggcagctgcacctgcagcttccccaccagcgagctggagaaggtgctgccccagaccatcctgtacaagtactatgaaaggaaggccgaggaggaggtggccgccgcctatgcagatgagctggtgcgctgccccagctgcagcttccctgccctgctggacagtgatgtgaagcgcttcagctgccccaacccccactgcaggaaggagacctgcaggaagtgccagggcctgtggaaggagcacaacggcctgacctgtgaggagctggccgagaaggatgacatcaagtaccgcaccagcattgaggagaagatgacagctgcccgcatcaggaagtgccacaagtgtggcaccggcctcatcaagtctgagggctgcaacaggatgagctgccgctgtggggcccagatgtgctacctgtgccgggtgtccatcaatggctatgaccacttctgccagcaccccaggagccctggggccccctgccaggagtgcagccgctgcagcctgtggacagaccccacagaagatgatgagaagctgattgaggagatccagaaggaggccgaggaggagcagaagaggaagaatggagagaacaccttcaagagaattggcccccccctggagaagcctgtggagaaggtgcagagggtggaggccctgcccaggcctgtgccccagaacctgccccagccccagatgccaccctatgcctttgcccacccccccttccccctgccccctgtgcggcctgtgttcaacaacttccccctgaacatgggccccatcccagccccctacgtgccccccctgcccaacgtgcgggtgaactatgactttggccccatccacatgcccctggagcacaacctgcccatgcacttcggcccccagcccaggcaccgcttctag

SEQ ID NO: 306041 - DNA, 63 bp, Artificial Sequence
  derived and/or modified sequence
atggaggagggcaacaacaatgaggaggtgatccacctgaacaacttccactgccacaggtag

SEQ ID NO: 306042 - DNA, 2037 bp, Artificial Sequence
  derived and/or modified sequence
atggaggagggcaacaacaatgaggaggtgatccacctgaacaacttccactgccaccggggccaggagtggatcaacctgagagatggccccatcaccatcagtgacagcagtgatgaggagcgcatccccatgctggtgaccccagccccccagcagcacgaggaggaggacctggatgatgatgtgatcctgacagagaccaacaagccccagaggagccggcccaacctgatcaagccagctgcccagtggcaggaggccgctgaggtggaccaggagctggtggagctgctggtgaaggagacagaggcccgcttcccagatgtggccaacggcttcatcgaggagatcatccacttcaagaactactatgacctgaatgtgctgtgcaacttcctgctggagaacccagactaccccaagcgggaggaccgcatcatcatcaaccccagcagcagcctgctggccagccaggatgagaccaagctgcccaagattgacttctttgactacagcaagctgacccccctggaccagcgctgcttcatccaggccgctgacctgctgatggctgacttcaaggtgctgagcagccaggacatcaagtgggccctgcacgagctgaagggccactacgccatcaccaggaaggccctgagtgatgccatcaagaagtggcaggagctgagccctgagaccagcggcaagaggaagaagaggaagcagatgaaccagtacagctacatcgacttcaagtttgagcagggcgacatcaagattgagaagaggatgttcttcctggagaacaagaggaggcactgccgctcctatgaccggcgggccctgctgcctgctgtgcagcaggagcaggagttctatgagcagaagatcaaggagatggccgagcacgaggacttcctgctggccctgcagatgaatgaggagcagtaccagaaggatggccagctgattgagtgccgctgctgctatggagagttcccctttgaggagctgacccagtgtgctgatgcccacctgttctgcaaggaatgtctcatccgctatgcccaggaggccgtgtttggcagcggcaagctggagctgagctgcatggagggcagctgcacctgcagcttccccaccagcgagctggagaaggtgctgccccagaccatcctgtacaagtactatgaaaggaaggccgaggaggaggtggccgccgcctatgcagatgagctggtgcgctgccccagctgcagcttccctgccctgctggacagtgatgtgaagcgcttcagctgccccaacccccactgcaggaaggagacctgcaggaagtgccagggcctgtggaaggagcacaacggcctgacctgtgaggagctggccgagaaggatgacatcaagtaccgcaccagcattgaggagaagatgacagctgcccgcatcaggaagtgccacaagtgtggcaccggcctcatcaagtctgagggctgcaacaggatgagctgccgctgtggggcccagatgtgctacctgtgccgggtgtccatcaatggctatgaccacttctgccagcaccccaggagccctggggccccctgccaggagtgcagccgctgcagcctgtggacagaccccacagaagatgatgagaagctgattgaggagatccagaaggaggccgaggaggagcagaagaggaagaatggagagaacaccttcaagagaattggcccccccctggagaagcctgtggagaaggtgcagagggtggaggccctgcccaggcctgtgccccagaacctgccccagccccagatgccaccctatgcctttgcccacccccccttccccctgccccctgtgcggcctgtgttcaacaacttccccctgaacatgggccccatcccagccccctacgtgccccccctgcccaacgtgcgggtgaactatgactttggccccatccacatgcccctggagcacaacctgcccatgcacttcggcccccagcccaggcaccgcttctag

SEQ ID NO: 306043 - DNA, 2772 bp, Artificial Sequence
  derived and/or modified sequence
atggaggagggcaacaacaacgaggaggtgatccacctgaacaacttccactgtcataggggccaagaatggatcaatctgagggatgggcctatcacaatctcagacagcagcgacgaagaaaggatccccatgctggttacgcctgccccccagcaacatgaggaagaggatttggacgatgatgtgattttaaccgaaactaataaaccccagcgaagtcgtccaaacctgatcaagcctgcagcccagtggcaagaccttaagcgccttggtgaggaaagacccaaaaaaagtagagctgcctttgaaagcgacaagtcaagctacttctctgtgtgcaataatcccctcttcgattcaggcgctcaggacgacagcgaggacgactacggcgaatttcttgacctcggccctccaggtattagcgagttcaccaagccgtcagggcagacagagcgcgagccaaagcctggtccctcgcataaccaggctgccaatgacatagtgaacccccgttctgagcagaaggtgataatcctggaggaaggcagcctgctgtataccgagagcgatcctttggagacgcagaaccaatctagcgaagacagtgagaccgaattactatcaaatctgggtgagagtgccgcactcgcagacgatcaagctatcgaggaggattgctggctagaccacccatatttccaaagtctgaaccagcagcctcgtgaaatcacgaaccaagttgtcccacaagagcggcagccagaggccgagttagggcggctgctgtttcaacacgagttccccggcccagcttttcctaggcctgagcctcagcagggcgggatatcggggccgtcgtcaccccagccagctcaccctttgggcgagtttgaagaccaacaactggctagtgacgacgaagagcctggtcctgcgtttccaatgcaggagagccaggaaccaaacctcgaaaacatctggggacaggaggctgctgaggtggatcaagaattagtcgaattactggtgaaagagacggaagcccgcttcccagacgtggcaaatggattcatcgaggagatcatacacttcaagaactactacgatttaaacgtactctgtaattttttgctcgaaaaccctgattatcctaaaagggaagataggattatcattaacccgtcctcctctctgcttgcctcgcaggatgagaccaaactgcccaaaatcgatttcttcgattacagtaagctgacgccattggatcaaagatgtttcattcaggccgccgatcttcttatggctgacttcaaggtgctctcatcccaggacattaagtgggcacttcatgagttaaagggtcactatgccatcacccggaaagccctctcagatgcgatcaaaaagtggcaagagttgagtcctgagacttctgggaaacgcaagaagcggaagcaaatgaatcagtacagctatatagattttaaattcgagcagggggacattaagatcgagaagcggatgttcttcctggaaaacaaaaggaggcattgccgcagctacgacagaagagcactgttacccgctgtgcagcaggagcaggaattttacgagcagaagattaaagaaatggctgagcatgaagactttcttcttgcactgcagatgaacgaggagcaatatcagaaagacgggcaactcatagagtgtcgttgctgttatggtgaattcccattcgaggagctgacgcaatgcgccgatgcacatctgttttgtaaagagtgtctcattagatacgctcaagaggctgtcttcggttccggaaagctggagttgagttgcatggaaggatcatgcacttgttcctttccaacttccgagctagaaaaagtgcttcctcaaactatcctctacaagtattatgagagaaaagccgaggaggaggtagctgccgcctatgccgacgagctggtgcggtgcccttcatgtagtttcccagccttactcgattcagatgtgaagagattttcttgtccaaacccccattgcaggaaagaaacgtgtagaaagtgtcagggtctctggaaagagcacaacgggctgacttgtgaagagctagccgaaaaagatgatattaaatatcggacgtctatcgaggagaagatgactgctgcacgaattaggaaatgtcacaaatgcggcacaggtttaattaagtccgagggatgcaacagaatgtcttgtcgatgtggggctcaaatgtgctatctgtgccgagtgtcaattaacggttacgatcatttttgccagcatccaaggagtccaggcgccccatgccaagagtgtagccggtgctctttatggacagatccgacagaggacgatgaaaaactgattgaagaaatacagaaagaagccgaagaagagcagaaacgcaagaatggggagaacacctttaagaggattggtcctcctctagagaaacctgtggagaaggtacaaagagtggaggccttacccagacccgtaccccaaaatctgccccagcctcagatgccaccatacgctttcgcccatcccccattcccactaccgcccgtgcggccggtgttcaataatttcccgttgaacatgggacctattcctgcaccctacgtgcctccattgcccaacgtgcgcgtgaattatgatttcggccctattcacatgcctttggaacacaatctgccaatgcatttcggtccccagccaagacacagattttag

SEQ ID NO: 306044 - DNA, 63 bp, Artificial Sequence
  derived and/or modified sequence
atggaggagggcaacaacaacgaggaggtgatccacctgaacaactttcattgccacaggtag

SEQ ID NO: 306045 - DNA, 2037 bp, Artificial Sequence
  derived and/or modified sequence
atggaggagggcaacaacaacgaggaggtgatccacctgaacaacttccactgtcacaggggacaagaatggataaatctcagggacggtcccatcactatctcagacagcagtgatgaggagcgcataccaatgctggtcactccagccccccagcagcacgaggaggaggatttggatgatgacgtcattttgacggaaaccaacaagccacagagatcaaggcccaacttaatcaaaccagccgcacagtggcaggaagccgccgaggtggatcaggaactcgttgagttactcgtaaaggagacagaagctcggtttcctgacgtggcgaatgggttcatcgaagagattattcattttaagaattattatgacctcaatgttctctgtaactttttgttggagaaccccgattatccaaagcgcgaagatcgcataatcatcaatcctagttccagtctgcttgcgtcgcaagatgaaacaaagctaccgaagatagactttttcgactactctaaacttacccctctcgaccagcgctgcttcattcaggctgctgacttattaatggccgattttaaggtgttaagctcgcaggatatcaaatgggcactgcatgaactcaaaggccactacgctatcaccaggaaagctctctctgatgctatcaagaaatggcaagagcttagcccagaaactagcgggaagcggaagaagcgtaaacagatgaatcaatatagctacatagacttcaagtttgaacagggcgacatcaaaatcgagaaaagaatgtttttcctggaaaataaacgacggcactgtcggtcgtacgatcggcgggctctgcttccagcagtccagcaagaacaggaattttacgagcagaaaattaaggagatggctgagcatgaagactttcttttagccctgcagatgaacgaagagcaataccaaaaggacggccagcttatagagtgtcgttgctgctatggtgagttcccatttgaagaattaacccagtgcgcagacgcccatctgttctgtaaggagtgcctgatccgttacgcccaggaagctgtcttcggatctggaaagcttgagctgagctgcatggagggttcctgtacatgtagttttccgacatcagagctcgaaaaggttctgcctcagaccatactctataaatactatgaaaggaaggcggaagaggaagttgcggcagcttacgccgatgaacttgtgcggtgcccgtcatgctccttccccgctctgctcgacagcgatgtgaaacgattttcttgtcctaatcctcattgccggaaagagacttgcagaaagtgccaaggcttatggaaggagcataatgggcttacgtgcgaggagctcgctgaaaaggacgacataaagtaccgcacctccatcgaagagaaaatgaccgccgcccgaatacggaaatgccacaagtgcggaacgggccttattaaaagtgaaggatgtaatagaatgagctgtcgatgtggcgcacagatgtgttatttatgcagggtctcaattaatggttatgaccatttctgccagcaccctaggagccccggcgccccctgtcaagaatgttctcgctgtagcctctggaccgatcctacagaggacgatgagaagcttatcgaagagatccaaaaagaggccgaggaagaacaaaaacgtaaaaatggagagaatacctttaagagaattggcccacccctagagaagccagtcgaaaaggtgcagagggtcgaggctctgccacgtccagtgccccagaatctgccacagccacagatgccgccatatgcgtttgcacatcccccatttccactccctcctgtgcggccggtgtttaataacttccctctgaacatgggtccaataccagccccatacgtcccacctcttcctaacgtgcgcgtcaactacgacttcgggccaattcatatgcctctggaacacaatcttcccatgcactttggccctcagccccgccacagattctag

SEQ ID NO: 306046 - DNA, 2772 bp, Artificial Sequence
  derived and/or modified sequence
atggaggaagggaacaacaacgaagaagtgatacacttgaataactttcactgtcatcgcggacaggaatggatcaacctcagagatgggccaatcactatttccgattccagtgatgaggagcggatccctatgttagtcaccccggcaccccaacaacacgaggaagaagacctggacgacgatgtaattctcactgagacgaacaagccgcagcgcagtcggcctaatttaattaaacccgcagcgcagtggcaggatctcaagcgccttggtgaagaacggcctaagaaaagcagagctgccttcgaatccgataagagcagttacttttcagtctgcaataacccattgtttgattccggtgcgcaggacgattccgaagacgattatggcgagtttttggatctcggtccaccaggtatcagtgagttcaccaagccaagtggccagactgagcgcgagcctaagccaggcccttctcacaatcaagctgccaacgatatcgtgaatcctaggtcggaacaaaaggtgataatcttggaagagggatccttactctatactgagtctgatcctctggaaactcagaaccagtcctccgaggactctgagacggagctcctctctaatctcggtgaaagcgcagcactggcagatgaccaagctatagaggaggattgctggctggatcacccatacttccagtcactgaaccagcagcccagggagattacgaatcaggtcgtacctcaggagcggcagcctgaggcagaattggggagactcctgttccagcatgaatttcctggacctgctttccccagacctgagccccagcaaggagggataagcggcccttctagcccccaacctgcacaccccttgggggagttcgaggatcagcagctggcttcggatgacgaggagcctgggcctgctttccccatgcaggagagtcaggagcccaacctggaaaatatttggggccaggaggccgctgaggttgatcaggagctggtggagctcctcgtgaaagagacggaagccagattccctgacgtggccaacggcttcatcgaggagattatccactttaaaaactattatgacttaaacgtgctttgtaacttccttctggaaaacccagattacccgaagcgcgaggaccggattattataaatccatctagctcgctgctcgctagccaggacgaaaccaagttgcctaagattgacttctttgactattcaaagctgactccgctcgaccagcgatgtttcatccaggctgctgatttgctgatggccgatttcaaggtgctcagtagccaggatatcaaatgggcactacacgaattgaaggggcattacgccataacacgtaaagccctctcagatgcgatcaagaagtggcaagagctgagcccagaaacaagcggcaaacggaagaaaagaaaacagatgaatcagtattcttacatcgattttaagttcgagcaaggagacattaaaatcgagaagcgcatgttctttttggaaaataaaagacgccattgtaggagctacgatagacgagcactgctaccagccgttcagcaggagcaagagttttacgagcagaagattaaagagatggctgagcacgaggatttcttgctggcccttcagatgaatgaagagcagtaccagaaagatgggcagttaatcgaatgtagatgttgttacggagaatttccttttgaagaacttacacagtgcgctgatgcacacctcttttgcaaagaatgtctaatccggtatgcgcaggaagcagtgtttggaagcggaaagctggagctatcctgtatggaggggagttgtacgtgtagctttcccacgtcagaactggaaaaggtcttgccccagactatcctgtacaagtattatgagcgcaaggctgaagaagaagtggcagcggcatacgcagatgagcttgtgcgatgtccctcatgctcttttccagcgttattggactctgacgtgaagcggttttcctgcccgaatccacattgtagaaaagaaacgtgtcggaagtgccagggattgtggaaggagcataacggtctcacatgcgaggaattagcggagaaagacgacataaagtaccgcacctctatcgaagaaaagatgaccgccgcaaggattagaaagtgtcataagtgtggaactggcctcattaagtctgaaggctgtaaccggatgtcatgtagatgcggggctcagatgtgctacctgtgcagagtgtctatcaatggctacgatcacttctgtcagcacccacggagtcccggagccccatgtcaggagtgctcaagatgctctctctggaccgaccctactgaggacgatgagaagctcattgaagaaatccagaaagaggctgaggaagagcagaagcgtaaaaatggggaaaatactttcaaacgaatcggtccccctctggagaagcccgtggagaaagtgcagcgcgtggaggcactacctagacctgtccctcagaatttaccccagccccaaatgcccccatatgcattcgcacatccaccgtttcctctgccacccgtgagacccgtgtttaacaactttccattgaacatgggccctatccctgccccatatgtgccacccctacccaatgtccgagtaaattatgacttcgggccaattcatatgccgttggaacacaacctgcccatgcatttcggcccacaacctcggcatcgattttag

SEQ ID NO: 306047 - DNA, 63 bp, Artificial Sequence
  derived and/or modified sequence
atggaggaaggcaacaataatgaagaggtgatccacttgaacaattttcactgtcacagatag

SEQ ID NO: 306048 - DNA, 2037 bp, Artificial Sequence
  derived and/or modified sequence
atggaggagggcaacaataacgaggaggtcatacatctcaataacttccactgtcacagaggacaggagtggatcaaccttagggatggccctattactatttcggacagttctgacgaggaacgcatcccaatgctcgtgacgcctgctccacaacagcatgaggaagaggatcttgacgacgatgtgatactcacagaaaccaataagcctcaacgaagtagaccaaatttgattaaacctgccgctcagtggcaggaggcagctgaagtggaccaggaactggtagagctgctggttaaagagacagaggccagattccccgacgtagccaatggattcattgaagagattattcacttcaagaactactacgaccttaatgttctgtgcaatttcctactagaaaaccccgactacccgaagagagaggataggattattatcaatccttccagcagcctcctcgcaagccaggacgaaactaaactccccaagatagattttttcgattattcaaagctgacgcctttagatcaaagatgcttcattcaagctgccgacctcttgatggcggacttcaaggtcctgtcgtcccaggacattaagtgggcattgcatgaactcaagggccattacgccatcacacggaaagccctgtccgacgccattaaaaagtggcaagagctgtcccctgaaacttcagggaagcggaagaagcgcaagcagatgaatcagtatagttacatcgatttcaaattcgagcagggcgacataaaaatcgaaaaacgaatgttcttcctcgagaataaacgacgacactgccggagttatgataggcgcgctctgttgccagccgtacagcaagaacaggagttttacgaacagaagataaaggaaatggccgaacatgaggactttttacttgccctacagatgaacgaagaacagtaccagaaagacggccagctaatcgagtgtcggtgttgttacggagaattcccctttgaagagctcacccagtgcgctgacgcacacctgttttgtaaggagtgtctgatcaggtatgcccaggaagcagtttttggttctggtaagctggaactctcatgtatggaggggagctgcacttgttcctttcccactagtgagctagagaaggttcttccgcagactatactctataagtactatgagaggaaagccgaagaagaggttgccgctgcatatgctgacgagctagtcaggtgtcccagctgttccttccctgctctactggatagcgatgtcaagcggtttagctgcccaaatccccactgccgtaaggagacctgtaggaaatgccagggcctgtggaaagagcacaatggcctgacgtgtgaagaactcgctgaaaaggatgacataaaatatcgtacctccatagaggagaaaatgactgccgctaggattcgtaaatgtcataagtgtggaactggcctgatcaagagtgaggggtgcaaccgtatgtcctgccggtgtggcgctcaaatgtgctacctgtgtagggtctcaataaatggctatgaccatttttgtcagcatccacgctcccccggtgctccatgtcaagagtgttccaggtgcagtctgtggaccgacccaaccgaagacgatgagaagctgatcgaggagatccaaaaagaggcagaggaagaacaaaagagaaagaatggagagaacactttcaagcggataggaccacctttagaaaaaccggtcgagaaagtgcagagggtggaggctctcccccgacctgtgccccaaaacctgcctcagccacagatgcctccctacgcatttgctcatccgccttttcccctacctccagtacggccagttttcaataacttcccattgaacatgggcccaattcccgctccgtatgtacctcctctgcctaacgttagggtcaattacgattttggcccaatccatatgcctctggagcataacctgccaatgcacttcggcccacagccccgacatcggttttag

SEQ ID NO: 306049 - DNA, 3293 bp, Artificial Sequence
  derived and/or modified sequence
agtacccggagtgcctctatggttcttcctgtccttagtcgggagggggcgctgtgcgcaggcgcgaggtgacgccgcggcagggccggaaggagtgcagcggctgccacggagctcgcagctgcggcttctgaggagtaagcggcgcggtagcgaaggccgccgaacctgcctggctagccggcgacttgagtgacgattcttttgaaacagatggtcaccatgtttagatattagcagtcccatatatgcatgtctgcatttgaaaatggaagagggaaacaacaatgaagaggtaattcacttgaacaactttcactgccatcggggacaagagtggatcaatctccgagatgggcccatcaccatatctgactcctcagatgaggaaaggattccaatgctggtcaccccagctcctcagcagcatgaagaagaggacctggatgatgatgtcatcctgacagaaacaaataaacctcagagatcacgacccaatctcatcaaaccagctgcccagtggcaagatctgaaaaggttgggagaagaaaggcctaaaaagtctagagcagcatttgaatcagataagagcagctatttttcagtgtgtaacaacccattgtttgattctggggcacaggatgattctgaggatgactacggtgaatttctggatcttgggcctcctggaatctctgaattcactaagccaagtggccaaacagaaagagaacccaagcctggaccgagtcataaccaagcagcaaatgacattgtcaaccccagatcagagcagaaagtcatcatcttggaagaaggtagccttctttacacagaaagcgatcctttggaaactcagaaccagtcatccgaagactcagagacagagctgttatcaaatctaggagagtcagctgctctagcagatgatcaggccatcgaagaagactgctggttagatcatccttacttccagtctctgaaccaacagccccgtgaaataacaaaccaggtcgttcctcaggaacggcagcctgaagcagaactgggccgcttgttgtttcagcatgaattcccagggcccgcttttccaaggccggaaccccagcaaggtgggatttcaggcccctcttctcctcagcctgcccatcctctaggagagtttgaagaccagcagttagcaagtgatgatgaagagccaggtccagcctttccaatgcaagaatctcaagagcccaatttggaaaacatttgggggcaagaagctgcagaggtagatcaagagctcgttgaactactagtgaaagaaacggaagcaagatttccagatgtagcaaatgggtttattgaggaaataattcattttaagaattattatgatctgaatgtactttgtaattttcttctggaaaacccagattatccaaagagagaagacagaatcattataaatcccagtagcagtctgctggccagccaagatgagacaaagttgcctaaaatagacttttttgactattctaaattgacccctcttgaccagcgctgcttcatccaagctgctgacctcctcatggccgacttcaaagtgctcagtagtcaggacatcaagtgggccctgcacgagctcaaaggacactatgcaatcacccgaaaggccttgtctgatgccattaaaaaatggcaggagctgtcaccagaaaccagtggaaaaaggaagaagagaaaacaaatgaaccagtattcttacattgatttcaagtttgaacaaggtgacataaaaatagaaaagaggatgttctttcttgaaaataagcgacgacattgtaggtcctatgaccgacgtgctctccttccagctgtgcaacaagagcaggagttctatgagcagaaaatcaaagagatggcagagcatgaagactttttgcttgccctacagatgaatgaagaacagtatcaaaaggatggccagctgattgagtgtcgctgctgctatggggaatttccattcgaggagctgacgcagtgcgcagatgctcacttgttctgcaaagagtgtctcatcagatatgcccaagaggcagtctttggatctggaaagttggagctcagctgcatggaaggcagctgcacgtgttcgttcccaaccagtgagctggagaaggtgctcccccagaccatcctgtataagtactatgagcgaaaagccgaggaggaggttgcggcagcctacgccgacgagcttgtcaggtgcccgtcctgtagctttccggctctgttggacagtgatgtgaagaggttcagctgtcctaatcctcactgccgaaaggaaacctgtaggaagtgtcagggactctggaaagaacataatggcctcacctgtgaagagctggctgaaaaagacgacatcaagtaccgtacctctattgaagaaaaaatgactgctgcccgcattagaaaatgccacaagtgtgggactggcctcatcaaatctgaaggctgcaaccgcatgtcttgccgctgtggtgcccagatgtgctacctctgtcgagtttctattaatggatatgaccatttctgccaacatccccgctcaccaggagccccttgccaggagtgttcaagatgctctctctggaccgatcccactgaagatgatgagaagcttattgaggaaatccagaaggaggctgaagaggaacagaaaagaaagaatggagagaacaccttcaaacgcattggacccccgctggagaagcctgtggagaaggtgcagagggtggaggccctcccgaggcccgttccgcagaacctgccacagccacagatgccaccctatgccttcgcgcacccacccttccccctgcctcccgtgcggcctgtgttcaacaacttcccactcaacatggggcctatcccagccccgtacgtgccccctctgcccaacgtgcgggtcaactatgacttcggtcccatccacatgcccctggagcacaacctgcccatgcactttggcccccagccgcggcatcgcttctgatggccccgaatccccattgagcagcacaaagcccgtttggggtaggagtgtggatggagaaccctcccccaaggctggtgtctgtaccattgcatcctaagtcagcttgaagggtaggctggttttcttcccacccctttcctagaagggctactgctcctggaagagtggacggatccataataaagacgtcccaaatggtggagttcggagagagctgcgatgtgaactgcccctcccctcgcatccccca

SEQ ID NO: 306050 - DNA, 2286 bp, Artificial Sequence
  derived and/or modified sequence
aggagtgcagcggctgccacggagctcgcagctgcggcttctgaggagtaagcggcgcggtagcgaaggccgccgaacctgcctggctagccggcgacttgagtgacgattcttttgaaacagatggtcaccatgtttagatattagcagtcccatatatgcatgtctgcatttgaaaatggaagagggaaacaacaatgaagaggtaattcacttgaacaactttcactgccatcggggacaagagtggatcaatctccgagatgggcccatcaccatatctgactcctcagatgaggaaaggattccaatgctggtcaccccagctcctcagcagcatgaagaagaggacctggatgatgatgtcatcctgacagaaacaaataaacctcagagatcacgacccaatctcatcaaaccagctgcccagtggcaagaagctgcagaggtagatcaagagctcgttgaactactagtgaaagaaacggaagcaagatttccagatgtagcaaatgggtttattgaggaaataattcattttaagaattattatgatctgaatgtactttgtaattttcttctggaaaacccagattatccaaagagagaagacagaatcattataaatcccagtagcagtctgctggccagccaagatgagacaaagttgcctaaaatagacttttttgactattctaaattgacccctcttgaccagcgctgcttcatccaagctgctgacctcctcatggccgacttcaaagtgctcagtagtcaggacatcaagtgggccctgcacgagctcaaaggacactatgcaatcacccgaaaggccttgtctgatgccattaaaaaatggcaggagctgtcaccagaaaccagtggaaaaaggaagaagagaaaacaaatgaaccagtattcttacattgatttcaagtttgaacaaggtgacataaaaatagaaaagaggatgttctttcttgaaaataagcgacgacattgtaggtcctatgaccgacgtgctctccttccagctgtgcaacaagagcaggagttctatgagcagaaaatcaaagagatggcagagcatgaagactttttgcttgccctacagatgaatgaagaacagtatcaaaaggatggccagctgattgagtgtcgctgctgctatggggaatttccattcgaggagctgacgcagtgcgcagatgctcacttgttctgcaaagagtgtctcatcagatatgcccaagaggcagtctttggatctggaaagttggagctcagctgcatggaaggcagctgcacgtgttcgttcccaaccagtgagctggagaaggtgctcccccagaccatcctgtataagtactatgagcgaaaagccgaggaggaggttgcggcagcctacgccgacgagcttgtcaggtgcccgtcctgtagctttccggctctgttggacagtgatgtgaagaggttcagctgtcctaatcctcactgccgaaaggaaacctgtaggaagtgtcagggactctggaaagaacataatggcctcacctgtgaagagctggctgaaaaagacgacatcaagtaccgtacctctattgaagaaaaaatgactgctgcccgcattagaaaatgccacaagtgtgggactggcctcatcaaatctgaaggctgcaaccgcatgtcttgccgctgtggtgcccagatgtgctacctctgtcgagtttctattaatggatatgaccatttctgccaacatccccgctcaccaggagccccttgccaggagtgttcaagatgctctctctggaccgatcccactgaagatgatgagaagcttattgaggaaatccagaaggaggctgaagaggaacagaaaagaaagaatggagagaacaccttcaaacgcattggacccccgctggagaagcctgtggagaaggtgcagagggtggaggccctcccgaggcccgttccgcagaacctgccacagccacagatgccaccctatgccttcgcgcacccacccttccccctgcctcccgtgcggcctgtgttcaacaacttcccactcaacatggggcctatcccagccccgtacgtgccccctctgcccaacgtgcgggtcaactatgacttcggtcccatccacatgcccctggagcacaacctgcccatgcactttggcccccagccgcggcatcgcttctgatggccccgaatccccattgagcagcacaaagcccgtttggggtaggagtgtggatggagaaccctccccca

SEQ ID NO: 306051 - DNA, 2772 bp, Artificial Sequence
  derived and/or modified sequence
atggaggagggcaacaacaacgaggaggtgatccacctgaacaacttccactgccacagaggccaggagtggatcaacctgagagacggccccatcaccatcagcgacagcagcgacgaggagagaatccccatgctggtgacccccgccccccagcagcacgaggaggaggacctggacgacgacgtgatcctgaccgagaccaacaagccccagagaagcagacccaacctgatcaagcccgccgcccagtggcaggacctgaagagactgggcgaggagagacccaagaagagcagagccgccttcgagagcgacaagagcagctacttcagcgtgtgcaacaaccccctgttcgacagcggcgcccaggacgacagcgaggacgactacggcgagttcctggacctgggcccccccggcatcagcgagttcaccaagcccagcggccagaccgagagagagcccaagcccggccccagccacaaccaggccgccaacgacatcgtgaaccccagaagcgagcagaaggtgatcatcctggaggagggcagcctgctgtacaccgagagcgaccccctggagacccagaaccagagcagcgaggacagcgagaccgagctgctgagcaacctgggcgagagcgccgccctggccgacgaccaggccatcgaggaggactgctggctggaccacccctacttccagagcctgaaccagcagcccagagagatcaccaaccaggtggtgccccaggagagacagcccgaggccgagctgggcagactgctgttccagcacgagttccccggccccgccttccccagacccgagccccagcagggcggcatcagcggccccagcagcccccagcccgcccaccccctgggcgagttcgaggaccagcagctggccagcgacgacgaggagcccggccccgccttccccatgcaggagagccaggagcccaacctggagaacatctggggccaggaggccgccgaggtggaccaggagctggtggagctgctggtgaaggagaccgaggccagattccccgacgtggccaacggcttcatcgaggagatcatccacttcaagaactactacgacctgaacgtgctgtgcaacttcctgctggagaaccccgactaccccaagagagaggacagaatcatcatcaaccccagcagcagcctgctggccagccaggacgagaccaagctgcccaagatcgacttcttcgactacagcaagctgacccccctggaccagagatgcttcatccaggccgccgacctgctgatggccgacttcaaggtgctgagcagccaggacatcaagtgggccctgcacgagctgaagggccactacgccatcaccagaaaggccctgagcgacgccatcaagaagtggcaggagctgagccccgagaccagcggcaagagaaagaagagaaagcagatgaaccagtacagctacatcgacttcaagttcgagcagggcgacatcaagatcgagaagagaatgttcttcctggagaacaagagaagacactgcagaagctacgacagaagagccctgctgcccgccgtgcagcaggagcaggagttctacgagcagaagatcaaggagatggccgagcacgaggacttcctgctggccctgcagatgaacgaggagcagtaccagaaggacggccagctgatcgagtgcagatgctgctacggcgagttccccttcgaggagctgacccagtgcgccgacgcccacctgttctgcaaggagtgcctgatcagatacgcccaggaggccgtgttcggcagcggcaagctggagctgagctgcatggagggcagctgcacctgcagcttccccaccagcgagctggagaaggtgctgccccagaccatcctgtacaagtactacgagagaaaggccgaggaggaggtggccgccgcctacgccgacgagctggtgagatgccccagctgcagcttccccgccctgctggacagcgacgtgaagagattcagctgccccaacccccactgcagaaaggagacctgcagaaagtgccagggcctgtggaaggagcacaacggcctgacctgcgaggagctggccgagaaggacgacatcaagtacagaaccagcatcgaggagaagatgaccgccgccagaatcagaaagtgccacaagtgcggcaccggcctgatcaagagcgagggctgcaacagaatgagctgcagatgcggcgcccagatgtgctacctgtgcagagtgagcatcaacggctacgaccacttctgccagcaccccagaagccccggcgccccctgccaggagtgcagcagatgcagcctgtggaccgaccccaccgaggacgacgagaagctgatcgaggagatccagaaggaggccgaggaggagcagaagagaaagaacggcgagaacaccttcaagagaatcggcccccccctggagaagcccgtggagaaggtgcagagagtggaggccctgcccagacccgtgccccagaacctgccccagccccagatgcccccctacgccttcgcccacccccccttccccctgccccccgtgagacccgtgttcaacaacttccccctgaacatgggccccatccccgccccctacgtgccccccctgcccaacgtgagagtgaactacgacttcggccccatccacatgcccctggagcacaacctgcccatgcacttcggcccccagcccagacacagattctag

SEQ ID NO: 306052 - DNA, 63 bp, Artificial Sequence
  derived and/or modified sequence
atggaggagggcaacaacaacgaggaggtgatccacctgaacaacttccactgccacagatag

SEQ ID NO: 306053 - DNA, 2037 bp, Artificial Sequence
  derived and/or modified sequence
atggaggagggcaacaacaacgaggaggtgatccacctgaacaacttccactgccacagaggccaggagtggatcaacctgagagacggccccatcaccatcagcgacagcagcgacgaggagagaatccccatgctggtgacccccgccccccagcagcacgaggaggaggacctggacgacgacgtgatcctgaccgagaccaacaagccccagagaagcagacccaacctgatcaagcccgccgcccagtggcaggaggccgccgaggtggaccaggagctggtggagctgctggtgaaggagaccgaggccagattccccgacgtggccaacggcttcatcgaggagatcatccacttcaagaactactacgacctgaacgtgctgtgcaacttcctgctggagaaccccgactaccccaagagagaggacagaatcatcatcaaccccagcagcagcctgctggccagccaggacgagaccaagctgcccaagatcgacttcttcgactacagcaagctgacccccctggaccagagatgcttcatccaggccgccgacctgctgatggccgacttcaaggtgctgagcagccaggacatcaagtgggccctgcacgagctgaagggccactacgccatcaccagaaaggccctgagcgacgccatcaagaagtggcaggagctgagccccgagaccagcggcaagagaaagaagagaaagcagatgaaccagtacagctacatcgacttcaagttcgagcagggcgacatcaagatcgagaagagaatgttcttcctggagaacaagagaagacactgcagaagctacgacagaagagccctgctgcccgccgtgcagcaggagcaggagttctacgagcagaagatcaaggagatggccgagcacgaggacttcctgctggccctgcagatgaacgaggagcagtaccagaaggacggccagctgatcgagtgcagatgctgctacggcgagttccccttcgaggagctgacccagtgcgccgacgcccacctgttctgcaaggagtgcctgatcagatacgcccaggaggccgtgttcggcagcggcaagctggagctgagctgcatggagggcagctgcacctgcagcttccccaccagcgagctggagaaggtgctgccccagaccatcctgtacaagtactacgagagaaaggccgaggaggaggtggccgccgcctacgccgacgagctggtgagatgccccagctgcagcttccccgccctgctggacagcgacgtgaagagattcagctgccccaacccccactgcagaaaggagacctgcagaaagtgccagggcctgtggaaggagcacaacggcctgacctgcgaggagctggccgagaaggacgacatcaagtacagaaccagcatcgaggagaagatgaccgccgccagaatcagaaagtgccacaagtgcggcaccggcctgatcaagagcgagggctgcaacagaatgagctgcagatgcggcgcccagatgtgctacctgtgcagagtgagcatcaacggctacgaccacttctgccagcaccccagaagccccggcgccccctgccaggagtgcagcagatgcagcctgtggaccgaccccaccgaggacgacgagaagctgatcgaggagatccagaaggaggccgaggaggagcagaagagaaagaacggcgagaacaccttcaagagaatcggcccccccctggagaagcccgtggagaaggtgcagagagtggaggccctgcccagacccgtgccccagaacctgccccagccccagatgcccccctacgccttcgcccacccccccttccccctgccccccgtgagacccgtgttcaacaacttccccctgaacatgggccccatccccgccccctacgtgccccccctgcccaacgtgagagtgaactacgacttcggccccatccacatgcccctggagcacaacctgcccatgcacttcggcccccagcccagacacagattctag

SEQ ID NO: 306054 - protein, 20 aa, Artificial Sequence
  derived and/or modified sequence
MEEGNNNEEVIHLNNFHCHR

SEQ ID NO: 306055 - DNA, 570 bp, Artificial Sequence
  derived and/or modified sequence
agctgcggcttctgaggagtaagcggcgcggtagcgaaggccgccgaacctgcctggctagccggcgacttgagtgacgacatcaccatcctgtggtcacctgatctcagcgtctaggtcaactttgattcctttcttcttgccctgatggccagtgacatacacagatcccatcgactctaactctgcagtcagtgtcttgtattcttctcctccccctaggccatgtttcctgactctggttctatggccatggtgaataacagctccagtctttgacagaggaagaagtttttggagccactcgttcaacaactgtgctaggcattggaaatacaactataagtaagaaaagaggccaggcacagtgacttacgactgtaatctcaccactttgcctctggaacaggacccaaggacattatcattatacagctatctgttcttttgaaacagatggtcaccatgtttagatattagcagtcccatatatgcatgtctgcatttgaaaatggaagagggaaacaacaatgaagaggtaattcacttgaacaactttcactgccatcg

SEQ ID NO: 306056 - protein, 476 aa, Artificial Sequence
  derived and/or modified sequence
MVGAMWKVIVSLVLLMPGPCDGLFRSLYRSVSMPPKGDSGQPLFLTPYIEAGKIQKGRELSLVGPFPGLNMKSYAGFLTVNKTYNSNLFFWFFPAQIQPEDAPVVLWLQGGPGGSSMFGLFVEHGPYVVTSNMTLRDRDFPWTTTLSMLYIDNPVGTGFSFTDDTHGYAVNEDDVARDLYSALIQFFQIFPEYKNNDFYVTGESYAGKYVPAIAHLIHSLNPVREVKINLNGIAIGDGYSDPESIIGGYAEFLYQIGLLDEKQKKYFQKQCHECIEHIRKQNWFEAFEILDKLLDGDLTSDPSYFQNVTGCSNYYNFLRCTEPEDQLYYVKFLSLPEVRQAIHVGNQTFNDGTIVEKYLREDTVQSVKPWLTEIMNNYKVLIYNGQLDIIVAAALTERSLMGMDWKGSQEYKKAEKKVWKIFKSDSEVAGYIRQAGDFHQVIIRGGGHILPYDQPLRAFDMINRFIYGKGWDPYVG

SEQ ID NO: 306057 - protein, 52 aa, Artificial Sequence
  derived and/or modified sequence
MVGAMWKVIVSLVLLMPGPCDGLFRSLYRSVSMPPKGDSGQPLFLTPYIEAG

SEQ ID NO: 306058 - protein, 43 aa, Artificial Sequence
  derived and/or modified sequence
MVGAMWKVIVSLVLLMPGPCDGLFRSLYRSVSMPPKGDSGQPL

SEQ ID NO: 306059 - protein, 232 aa, Artificial Sequence
  derived and/or modified sequence
MFGLFVEHGPYVVTSNMTLRDRDFPWTTTLSMLYIDNPVGTGFSFTDDTHGYAVNEDDVARDLYSALIQFFQIFPEYKNNDFYVTGESYAGKYVPAIAHLIHSLNPVREVKINLNGIAIGDGYSDPESIIGGYAEFLYQIGLLDEKQKKYFQKQCHECIEHIRKQNWFEAFEILDKLLDGDLTSDPSYFQNVTGCSNYYNFLRCTEPEDQLYYVKFLSLPEVRQAPRGESDF

SEQ ID NO: 306060 - DNA, 1431 bp, Artificial Sequence
  derived and/or modified sequence
atggtgggcgccatgtggaaggtgattgtgtcactggtcctgttgatgcccggaccatgcgacgggctcttcaggagtctgtaccgttctgtgtctatgcctccaaaaggcgactctggacaaccactgttcttaaccccatacatcgaggccggcaagattcaaaaaggacgcgaactgtctttagtcggtccgtttcctggccttaatatgaaatcgtatgcaggttttcttactgtgaacaagacctacaactccaatctgtttttctggttttttccggcccagatacaacccgaagacgctccagtagtgctctggcttcagggaggccccgggggatcttctatgttcgggctcttcgtagaacatggaccttacgtcgtgaccagcaacatgactctccgcgacagggattttccttggaccaccaccctgagcatgctgtacatcgacaatccagtgggcacagggttcagcttcactgacgacactcacggatatgcggtgaacgaagacgacgttgcacgggacttgtactcagccctgatccagttctttcagatcttcccagaatataagaataatgatttttatgttacgggagagagctacgcagggaaatatgttcctgctattgcccacctgatacactcgcttaaccctgtgcgagaggtaaaaataaatttgaatggtatcgccatcggggatggctactccgatcctgagtctatcattggcggatatgctgaatttctttaccagatcgggctgctagacgagaaacaaaaaaaatatttccaaaagcagtgtcatgagtgtatcgaacacatcagaaagcagaattggttcgaagcttttgaaatcctggataagcttcttgacggggatctgactagtgatccttcctatttccagaatgtgaccggctgtagcaattattataattttttaaggtgtactgaaccagaggatcaattgtattatgtcaagttcctgtccctgccagaggtaagacaggccatccacgtgggaaatcagactttcaacgacggcacaatcgtcgagaaatacctcagagaagacaccgtccagtcggtgaagccatggctgactgaaatcatgaacaactataaagtgttaatctacaatggacaacttgatatcatcgtggcggctgctctgaccgaacgtagtctcatggggatggattggaagggctcgcaggaatataagaaggccgaaaagaaagtgtggaagatcttcaaaagcgactccgaggtcgcagggtacattcggcaggcaggcgatttccatcaagtgatcattcgaggcggaggtcacattctgccatacgaccagccactgagggcattcgacatgatcaatcggtttatctacggaaaaggatgggatccttatgtgggctag

SEQ ID NO: 306061 - DNA, 1431 bp, Artificial Sequence
  derived and/or modified sequence
atggtgggtgcaatgtggaaggtcatagttagcctggtcctgctaatgcccggtccatgtgatggtttattccggagcctgtatcgctcagtatcaatgcctccaaaaggtgactcggggcaacccttgttcttgacaccctacattgaagctggtaaaatccagaaaggtagggagctgtctctcgtcggcccttttcccgggctgaacatgaaaagttacgccggcttccttaccgtcaataagacgtataatagcaacctgttcttctggttcttcccagcccagattcagccagaagatgcacccgtggttctgtggctgcaaggcggaccaggtgggtcttctatgttcggtctgtttgtagagcacggaccctacgtggtcacgtccaatatgactctccgagaccgtgattttccttggacaacaacactcagtatgctctacatcgacaatcccgtcggaacaggtttctcattcacagatgatacccacgggtacgccgtcaacgaagacgatgtggcccgagacctctattccgctctcatacagttcttccagatcttcccggagtataagaacaatgatttttacgtcaccggtgagtcttacgccggcaaatacgtgccagctattgcgcacttaatccactctctcaaccccgttcgcgaggtgaagatcaacctgaatggcatcgctatcggtgacggatattccgacccagaatccatcataggagggtatgccgaatttctctatcaaatcggactgctcgacgagaaacagaaaaagtactttcagaagcagtgtcacgagtgcatcgaacacattcgtaagcaaaattggttcgaagcattcgagatcttagacaagttgctcgacggagatttgacgagtgacccgtcatacttccaaaatgtcacgggttgtagcaactattataattttttacggtgtaccgagcccgaggaccagctctactacgtaaagtttctcagccttcctgaggtccgacaagccattcacgtggggaatcagacctttaatgatggcacaattgtggagaagtatctgagagaggatactgtgcaaagcgtgaagccatggcttacggaaatcatgaataattataaagtcttgatttacaacggacagctcgacataatcgtcgcggccgcgttgacggaacgttccctcatgggtatggactggaagggcagccaggaatacaagaaagctgagaagaaggtgtggaagatattcaaaagtgatagcgaggtggctggttacatcagacaggctggcgatttccatcaggtcattatccgcgggggcgggcacattttgccctacgatcagcccttacgcgccttcgacatgattaacagattcatctacggcaagggctgggatccatatgtgggttag

SEQ ID NO: 306062 - DNA, 1431 bp, Artificial Sequence
  derived and/or modified sequence
atggttggcgcaatgtggaaagtaattgtttccctcgtgctactcatgcccggcccgtgcgacgggctcttcagatccctgtaccggagcgtttcaatgccacccaagggagactccggtcagcccctgtttttgaccccgtacatcgaagccggtaaaattcagaaaggtagggagctgagcctagttggacccttccccggcctgaacatgaagagttacgctggcttcctgacagtgaacaagacctacaactccaatttgttcttctggtttttccccgctcagatccaacccgaggacgctcctgtcgtgttatggcttcaaggtggacctggcgggtcatctatgtttgggctttttgtagagcatggtccgtatgtcgtgacctccaacatgaccctgagagacagagactttccttggactactaccctcagtatgctttacatcgacaaccccgtgggaaccggttttagttttactgatgacacacatggctatgcggtgaatgaagatgatgtcgcgagggatttgtactccgctctgattcaattttttcagatatttcctgaatataagaataacgatttctatgtaactggggaatcgtacgccggcaagtatgtgcctgccatcgcgcacctaattcactcactgaatccagtaagggaggtaaaaataaacctcaatggcatcgccattggggacggttattctgacccagagagtatcattggaggatacgccgaatttctctaccagatcggactgctcgatgaaaaacagaaaaaatactttcaaaagcagtgtcacgaatgcatcgaacacatccggaagcaaaactggttcgaagccttcgagatattggacaagctcctagacggtgatttaacatccgaccctagctactttcagaatgtcaccggctgctccaattattataacttcttgcgctgcacagaaccggaggaccagctctactatgtgaaattcctttccctgcccgaggtgcgacaagctatccacgttggtaaccagacttttaacgacggaacaatagtcgaaaagtatttgcgtgaggacactgtgcagtccgtcaagccctggttaaccgaaattatgaacaattacaaggtgttgatttacaatgggcagctcgatatcatagtcgctgccgccctcaccgaacgctccttgatgggaatggactggaagggtagtcaggagtacaagaaggcagagaaaaaggtatggaaaatctttaagagcgattccgaagtagcaggctacataaggcaggccggagacttccatcaagtgatcattcgcggtggcgggcatatcttgccctatgaccagccgcttcgggccttcgatatgatcaaccggtttatctacgggaagggatgggatccttacgtgggctag

SEQ ID NO: 306063 - DNA, 159 bp, Artificial Sequence
  derived and/or modified sequence
atggttggtgcaatgtggaaggtgatcgtctctctcgtgctgttaatgcctggcccctgcgatggcctgtttcgaagcctgtaccgcagcgtgagtatgcctcccaaaggtgattctggccagcctctcttcttgactccatacatagaggctggttag

SEQ ID NO: 306064 - DNA, 132 bp, Artificial Sequence
  derived and/or modified sequence
atggttggcgcaatgtggaaggtgattgtgtctctggtgctattaatgcccgggccctgcgatggtttgttccggtcactctatcggtctgtgtctatgccacctaagggagactcggggcagcccctgtag

SEQ ID NO: 306065 - DNA, 699 bp, Artificial Sequence
  derived and/or modified sequence
atgtttgggctgtttgtcgagcacggcccctacgtggtgacctctaacatgaccttacgcgacagagatttcccatggacaacaactctcagcatgctttacatcgacaatccggtgggtactggattcagctttacagacgatacccatggatatgccgtgaatgaggacgatgtcgcaagagatctgtacagcgctctgattcagttcttccaaatttttcctgagtacaagaataatgacttttacgttaccggagaaagttacgcggggaagtacgtccccgccatagctcaccttatccactctctcaatcctgtcagggaggttaaaattaatttgaatggcatcgccatcggcgatggatattccgatccagaatcaatcatcggagggtacgccgagtttttataccaaattggacttttggacgaaaagcaaaagaagtacttccagaaacagtgtcatgagtgcattgaacatattcggaaacagaactggttcgaagcctttgaaatattagataaactgctcgacggagacctgacatctgatccatcttacttccagaatgttacgggatgttctaactactataatttcctccgctgcaccgagccagaagatcaactctactatgttaaatttctgtctctgcctgaggttcgccaggccccaagaggcgagtctgatttctag

SEQ ID NO: 306066 - DNA, 1431 bp, Artificial Sequence
  derived and/or modified sequence
atggtgggcgccatgtggaaggtgattgtgtccctggtgctgctgatgcctggcccctgtgatggcctcttccgcagcctgtacagatctgtgtccatgccacccaagggggacagcggccagcccctcttcctgaccccctacattgaagctgggaagatccagaagggccgggagctgagcctggtgggccccttccctggcctgaacatgaagagctatgccggcttcctgactgtgaacaagacctacaacagcaacctcttcttctggttcttccctgcccagatccagccagaagatgcccctgtggtgctgtggctgcagggcggccctgggggcagctccatgtttggcctgtttgtggagcacggcccctacgtggtgaccagcaacatgaccctgcgggaccgggacttcccctggaccaccaccctgtccatgctgtacatcgacaaccctgtgggcaccggcttctccttcacagatgacacccacggctatgctgtgaatgaagatgatgtggcccgggacctgtacagcgccctgatccagttcttccagatcttccctgagtacaagaacaatgacttctacgtgactggagagagctatgctgggaagtatgtgcctgccatcgcccacctgatccacagcctgaaccctgtgcgggaggtgaagatcaacctgaatggaattgccatcggagatggctacagcgaccctgagagcatcatcggcggctacgccgagttcctgtaccagatcggcctgctggatgagaagcagaagaagtacttccagaagcagtgccatgaatgtattgagcacatcaggaagcagaactggtttgaggcctttgagatcctggacaagctgctggatggagacctgaccagtgaccccagctacttccagaatgtgacaggctgcagcaactactacaacttcctgcgctgcacagagcctgaggaccagctgtactacgtgaagttcctgagcctgcctgaggtgcggcaggccatccacgtgggcaaccagaccttcaatgatggcaccatcgtggagaagtacctgagagaagatactgtgcagagcgtgaagccctggctgacagagatcatgaacaactacaaggtgctgatctacaacggccagctggacatcatcgtggccgccgccctgacagagaggagcctgatgggcatggactggaagggcagccaggagtacaagaaggccgagaagaaggtgtggaagatcttcaagagtgacagcgaggtggccggctacatccggcaggccggggacttccaccaggtgatcatccggggcggcggccacatcctgccctatgaccagcccctgcgggcctttgacatgatcaaccgcttcatctacggcaagggctgggacccctacgtgggctag

SEQ ID NO: 306067 - DNA, 159 bp, Artificial Sequence
  derived and/or modified sequence
atggtgggcgccatgtggaaggtgattgtgtccctggtgctgctgatgcctggcccctgtgatggcctcttccgcagcctgtacagatctgtgtccatgccacccaagggggacagcggccagcccctcttcctgaccccctacattgaagctggatag

SEQ ID NO: 306068 - DNA, 132 bp, Artificial Sequence
  derived and/or modified sequence
atggtgggcgccatgtggaaggtgattgtgtccctggtgctgctgatgcctggcccctgtgatggcctcttccgcagcctgtacagatctgtgtccatgccacccaagggggacagcggccagcccctgtag

SEQ ID NO: 306069 - DNA, 699 bp, Artificial Sequence
  derived and/or modified sequence
atgtttggcctgtttgtggagcacggcccctacgtggtgaccagcaacatgaccctgcgggaccgggacttcccctggaccaccaccctgtccatgctgtacatcgacaaccctgtgggcaccggcttctccttcacagatgacacccacggctatgctgtgaatgaagatgatgtggcccgggacctgtacagcgccctgatccagttcttccagatcttccctgagtacaagaacaatgacttctacgtgactggagagagctatgctgggaagtatgtgcctgccatcgcccacctgatccacagcctgaaccctgtgcgggaggtgaagatcaacctgaatggaattgccatcggagatggctacagcgaccctgagagcatcatcggcggctacgccgagttcctgtaccagatcggcctgctggatgagaagcagaagaagtacttccagaagcagtgccatgaatgtattgagcacatcaggaagcagaactggtttgaggcctttgagatcctggacaagctgctggatggagacctgaccagtgaccccagctacttccagaatgtgacaggctgcagcaactactacaacttcctgcgctgcacagagcctgaggaccagctgtactacgtgaagttcctgagcctgcctgaggtgcggcaggcccccagaggagagagtgacttctag

SEQ ID NO: 306070 - DNA, 1431 bp, Artificial Sequence
  derived and/or modified sequence
atggtgggcgccatgtggaaggtgatcgtgagcctggtgctgctgatgcccgggccatgtgatggcctgtttaggagtctataccgctcagtgtccatgcctccaaaaggcgactccggccaaccccttttcttgactccctacattgaggcaggcaaaatacagaaaggtcgggagctctcattggtggggccattccccggccttaatatgaaatcatatgcagggttcttaactgtgaataaaacctacaatagcaatctctttttctggttcttccctgcccagattcagccagaggacgcccccgtcgtgctctggttacaggggggccccgggggttcttccatgtttggtttgtttgtggagcacggcccctatgtcgttactagtaacatgacactgagggatcgcgattttccttggactaccaccctttccatgctgtacattgacaacccggtgggcacaggatttagttttactgacgatacacatggctatgcagtgaacgaggatgacgtggccagggacttgtattctgcactcattcagttctttcagatatttcctgaatacaagaataacgatttctatgttaccggcgagagctacgcagggaaatacgttcctgccattgcacacctgattcattctctcaaccctgtccgcgaggtgaagattaacttgaatgggatagccatcggcgacggttactccgacccagaatcaatcataggaggatatgcggaattcctttaccagattgggctgttggacgagaagcagaaaaagtacttccagaaacagtgtcatgaatgtattgaacacatcaggaagcaaaattggttcgaggcttttgagatattagacaagttgctcgacggggatctgacttcagaccccagctactttcagaacgtaactgggtgcagtaattattacaattttttgcgatgtaccgagccagaagaccagctgtattacgtgaaatttctctcattacctgaagtcaggcaagctattcacgtggggaaccaaacattcaatgacggaactatagtcgagaagtacctacgtgaggataccgtgcagtcagtgaagccctggttgacagaaattatgaacaactacaaagtgctcatatacaacggtcagttagatatcatagtggccgccgcactgacagagaggtccctgatggggatggattggaagggcagccaggagtataagaaggccgagaaaaaggtgtggaaaatcttcaaaagcgattctgaggtggctggctatattcggcaggcaggagacttccaccaggtgatcatccgcgggggagggcatatccttccttatgatcagcctctacgggcttttgacatgatcaaccgcttcatctacggtaaagggtgggatccctacgttgggtag

SEQ ID NO: 306071 - DNA, 1431 bp, Artificial Sequence
  derived and/or modified sequence
atggtgggcgccatgtggaaggtgatcgtgagcctggtgctgctgatgcctggcccatgcgacgggctgttccgctctctgtaccgaagcgtgtccatgcctcccaagggggacagtggccagcccctgttcctcacgccatacattgaggccggtaaaatccagaaggggagagagctgtcgctcgtaggccctttccccggattgaatatgaagagctacgcggggttcctaaccgtgaacaaaacctataactccaatctcttcttctggtttttcccggcccagattcagcctgaggacgctccagtggtgctctggctgcagggtgggcccggcggttcatcaatgttcggattgttcgtagaacatggaccatatgtcgtgaccagtaacatgaccctgcgcgatcgggactttccctggacgacgacactctctatgctgtacatcgacaaccctgtggggacaggatttagtttcaccgatgatactcatggatatgcggtcaatgaagatgatgttgcgcgggacctgtacagtgcactcattcagttttttcagattttcccagagtataaaaataacgacttctatgtcacaggagaatcttacgccggtaagtacgtgcccgccatagcacaccttatccactcactgaatccagtgcgcgaggttaaaatcaacctgaatggaatcgctataggggacggatacagcgatcccgaatctattatcgggggctatgctgaattcctctatcagattggcctcctagatgaaaaacagaagaagtactttcagaagcagtgtcatgaatgtatcgaacacattcggaaacagaactggtttgaggcttttgaaatacttgacaaactcttagatggtgacctgacctctgatcctagttacttccagaacgtgaccggttgctccaattattacaacttcttgagatgcacagaacctgaggaccaattatattacgttaagttcctcagcctgcccgaagtcaggcaggcaatccacgttgggaaccaaacttttaatgacggaacaattgtggagaagtatttgagagaggacaccgtgcagtccgtaaagccttggctgactgaaattatgaataattataaagtactgatctacaatggtcagctggacatcattgttgctgcggctctgaccgagcggagcctgatggggatggattggaaaggtagccaggagtacaaaaaggccgaaaaaaaagtctggaagatctttaagtcagactcggaagtcgccggctacatccgacaggcgggggacttccatcaagtcataatccgtggtggggggcatatcctcccatacgaccagcctttgagagcgttcgatatgattaatagatttatctatggcaagggttgggatccctacgttggatag

SEQ ID NO: 306072 - DNA, 1431 bp, Artificial Sequence
  derived and/or modified sequence
atggtgggcgccatgtggaaggtgatcgtgagcctggtgctgctgatgcccggtccctgcgatggcctcttccggtctctttatagaagtgtctcgatgccacccaaaggagacagcgggcagccactgtttcttactccatatattgaggccggtaagatccagaagggacgggagctttctctggtgggacctttccccggcctcaatatgaagagctacgcaggtttcctgacggtcaataagacttataactccaatctgtttttttggtttttccctgcgcaaatccagcctgaagatgccccagtagtactatggttgcaaggaggtccagggggttcgtcgatgtttggcctgtttgtggaacacggtccctatgttgttacctcaaatatgactctgagagatagggacttcccatggactaccaccctttctatgctttacatagacaacccagtgggtactggatttagctttacggacgatacgcatggctacgcagtcaacgaggatgacgtggcacgagatctgtattccgccctcattcagttctttcaaattttcccagaatataagaataatgatttctacgtgaccggcgagagctacgctggcaaatacgtacccgctatagcacatcttatacactccctgaacccggtgcgcgaggtcaaaataaacctcaatgggatcgcaattggagatggctacagcgacccagagtccataatcgggggatatgccgagttcctctaccagatcggcttgttagatgagaaacaaaagaagtacttccagaagcagtgccatgagtgcatagagcacattcgtaaacagaactggtttgaagctttcgagatactggacaaactgctggatggcgacctgacctctgatcctagctattttcaaaatgtgaccgggtgctcgaattactacaattttctgagatgtaccgagcccgaagaccagctgtattacgtaaagtttctgagtctgcccgaggtgagacaggctatacatgtgggaaatcagactttcaatgatggcacaatcgtcgagaagtatcttcgcgaagacactgtgcagagtgtaaaaccttggctaactgagatcatgaacaactacaaagtgctgatttataatggccagctggatatcatcgtggcggccgccttgactgagaggtccctcatgggcatggactggaagggttcccaagagtataaaaaagcagaaaaaaaggtctggaaaatctttaaatctgattcagaggtggcggggtacatccgacaggcgggcgattttcatcaggtcataattagaggaggggggcatattctgccctacgatcagcctctcagagcatttgatatgatcaacaggttcatctatggcaaaggatgggacccctatgtgggctag

SEQ ID NO: 306073 - DNA, 159 bp, Artificial Sequence
  derived and/or modified sequence
atggtgggcgccatgtggaaggtgatcgtgagcctggtgctgctgatgcccgggccctgcgacgggctctttagatctctataccgaagcgtatccatgccccccaaaggcgacagtggccagcccctgtttctgaccccttatatcgaagctggatag

SEQ ID NO: 306074 - DNA, 132 bp, Artificial Sequence
  derived and/or modified sequence
atggtgggcgccatgtggaaggtgatcgtgagcctggtgctgctgatgcccggcccctgtgacgggttattccgctcgctctacagatccgtgtccatgccccccaaaggagactcaggacagcctctctag

SEQ ID NO: 306075 - DNA, 699 bp, Artificial Sequence
  derived and/or modified sequence
atgttcggcctgttcgtggagcacggcccctacgtggtgaccagcaacatgacattgagggatagggacttcccatggactaccaccctgagcatgctgtacatcgacaatccagtgggtacaggcttctcctttacggatgacacacacggctacgctgtgaacgaggacgatgtagctagggatttgtacagtgcgctcatacagttttttcagattttccctgaatataagaataatgatttttacgtgactggcgaatcatatgcaggcaaatacgtgcctgcaatcgctcacttgatacatagcttaaaccctgtccgtgaggttaagataaacttgaacggaatcgccattggggacggttactcagacccagagagtattataggagggtatgcagagtttctgtaccaaatcggcctgttggacgagaaacaaaaaaagtactttcagaaacaatgccacgaatgcattgagcacattaggaagcagaattggttcgaggccttcgagatactcgacaaactgttagatggagatctcaccagtgacccctcctactttcagaatgtgactggctgcagtaattattacaactttctgcggtgtactgagccagaagatcagttgtattatgtgaagttcctaagcttgccagaagtcagacaggcacccaggggagagtctgacttttag

SEQ ID NO: 306076 - DNA, 1431 bp, Artificial Sequence
  derived and/or modified sequence
atggtaggcgctatgtggaaagtgatcgtgagtctggtcctcctgatgccaggcccatgtgacggcttatttagatctctttatcggtctgttagcatgcccccaaagggagattctggccagcctctgttcctgaccccttacattgaggccggtaagatccagaagggccgtgaactcagtttggtgggaccctttcccggtctgaacatgaagagctacgcgggatttctgaccgtgaataagacttacaatagcaatctgtttttctggttttttcccgcacagattcagccagaggacgctcccgtggtcctctggctacaagggggaccaggcggatctagtatgttcggccttttcgttgagcacggaccgtacgtcgtgaccagcaacatgacactccgggaccgagactttccttggaccactacgctctccatgctgtacattgacaaccctgttggcacgggcttttcatttactgacgacacccacggctacgctgtaaacgaggatgacgtagccagagacctgtactctgctttgatccagttctttcaaatctttcctgagtataagaataatgatttttatgtaaccggcgaatcctatgcgggtaaatacgtgcccgcaatcgcacatctaatccactccctgaatcctgtacgcgaggtgaagatcaacctgaacggaatcgcaattggggacggatacagtgatcccgagtccattataggcggttacgccgagttcttgtaccagatcggcctgctcgacgaaaagcagaagaaatactttcagaagcagtgccacgaatgcatcgagcacattcgaaagcaaaattggtttgaggccttcgaaatcctggataagttgctggacggtgacttaactagtgacccaagctattttcagaacgtgactggttgctccaactactataacttcttgcggtgcacggagcccgaggatcagctgtattacgtcaaatttcttagtcttcctgaagtgagacaggcaattcatgttggaaaccaaacgttcaatgacggaactattgtcgagaaatacttaagagaggataccgtgcaaagcgtgaaaccttggcttacagaaataatgaacaattacaaagttcttatttacaacggacagctggacatcatcgtggccgcagctctgacagagcgcagcctgatggggatggactggaaggggagtcaggagtataagaaggctgagaaaaaagtctggaaaatctttaagtccgatagtgaggtcgcgggttatatcagacaagcaggggattttcatcaggtgatcattcgtggaggtggtcacatcctcccctacgatcaaccgttacgagcgttcgacatgatcaacagattcatttacggcaagggctgggatccttacgtggggtag

SEQ ID NO: 306077 - DNA, 1431 bp, Artificial Sequence
  derived and/or modified sequence
atggttggagccatgtggaaagtcatcgtgtctttggtgctgctgatgccagggccatgtgatggacttttcaggtcactctatcggagcgtctccatgccacctaagggtgattcggggcagcctttgttcctaactccatacatcgaggctgggaagatccagaaagggagggagctctctttagtggggccttttccaggactgaatatgaaatcatatgccggattcttgaccgtgaacaaaacttataattccaatctatttttttggttcttcccggcacagatacaacctgaagacgcacctgtcgttttgtggctgcagggcggtccaggaggctcttctatgttcggtctctttgtggagcacgggccatacgtcgtcactagcaacatgacgcttagagaccgcgatttcccatggactactactttgtctatgctgtacattgataatcccgtgggcactggtttcagttttacagatgacactcacggctatgcggtcaacgaagacgatgtcgcgagagacctatactcagccttaatccagttctttcagatcttccccgagtataagaacaacgatttctatgtgaccggcgaaagttacgccggaaagtacgtacccgctatcgcccatctaatccactccctgaacccagtgcgggaggtgaaaatcaaccttaatggaatcgctataggagatggttattcagaccccgagagcattataggcggatatgccgaatttctttatcagatcggactccttgatgagaagcaaaaaaagtacttccagaagcagtgtcacgaatgcatagaacacattaggaagcagaattggtttgaggccttcgagattctggacaagttattggatggggacctgacttctgacccgtcctactttcagaacgtaactggctgctccaactactacaattttctgaggtgtaccgaaccggaggatcagctgtattatgttaagtttctttcgctccccgaagtgagacaggccatccacgtggggaaccagacttttaacgacggcaccattgtcgagaagtatcttagagaggacacagtacagagtgtgaaaccttggctgaccgaaatcatgaacaactataaggttctgatatacaacggacaactagatatcattgttgccgctgcactgaccgagcgcagcctgatgggcatggattggaagggatcgcaggagtacaaaaaagccgaaaagaaggtatggaagatttttaagtccgacagtgaggttgcagggtacatccgccaggccggagatttccaccaggttatcatccggggtggcggtcacattctcccgtacgatcagcctctgcgcgcttttgatatgattaacaggttcatctatggaaaaggctgggatccgtacgtgggatag

SEQ ID NO: 306078 - DNA, 1431 bp, Artificial Sequence
  derived and/or modified sequence
atggtaggcgctatgtggaaggtcatagtgtctctcgttctgctgatgccgggaccatgcgatggactatttcggtctctgtataggtcagtgtcgatgccaccaaagggcgactctgggcagcccctgtttctaacaccatatattgaagcagggaagatacagaaaggacgagaactcagcctcgtcggaccgtttccgggtctgaacatgaaatcttatgccggatttctgacagttaataaaacctataatagcaatctctttttctggttcttcccggctcaaatccagcctgaggacgctcccgtggtcctttggttgcaaggaggccctggcggaagtagcatgtttggactcttcgttgagcacggaccgtacgtggtcactagcaacatgacccttagggacagggatttcccatggacaaccaccctctccatgctctatattgacaaccctgttgggaccggcttttcatttaccgacgatacccatggctacgcggtgaacgaagatgacgtggccagggacttgtacagcgcccttatccagttctttcagatcttccccgaatacaaaaacaatgacttttacgttacaggggaaagttatgccggaaagtacgttcctgccattgcacacctcatccactctcttaacccagttcgtgaggtgaaaattaacctaaatggaatcgcgataggggacgggtactcagatcctgagagtatcatcgggggatacgctgagttcctgtaccaaatcggtctgctggatgagaaacaaaagaagtattttcagaaacaatgtcatgagtgcattgaacatatccgcaaacagaattggttcgaggcctttgaaatcctagataaactactcgatggggacctgaccagtgatcccagttacttccaaaatgtgaccggatgcagtaactactataatttccttcggtgtacagaacctgaagaccagttgtattacgtgaagttcctgtcgttacccgaggtgaggcaggccattcacgtgggcaaccaaacatttaatgacgggactatagtagagaagtaccttcgtgaagacaccgttcagtccgtaaaaccgtggctgacagaaatcatgaataactataaggtgctgatctacaatggccagctcgacataatcgtggcagccgcactcacggagagatcactgatgggaatggattggaaagggagtcaggaatacaaaaaggccgagaagaaggtgtggaaaatatttaaaagcgattcagaagttgctggctatattcggcaagccggagactttcatcaggttataatccgaggaggtggacacatcctgccttatgatcagccactgcgggcattcgacatgatcaaccgctttatatacggcaagggttgggacccgtacgtcgggtag

SEQ ID NO: 306079 - DNA, 159 bp, Artificial Sequence
  derived and/or modified sequence
atggttggcgctatgtggaaagtgattgtatcccttgtactgcttatgcctggcccatgcgatggcctctttaggtcactgtaccgctcagtcagcatgcccccaaaaggggattcaggtcaacctctgtttcttactccctatatcgaagctggatag

SEQ ID NO: 306080 - DNA, 132 bp, Artificial Sequence
  derived and/or modified sequence
atggtgggcgcaatgtggaaggtgatagtcagcctggtgttgctgatgcccggaccatgcgatggattgttcagatccctgtacaggtctgtgagcatgccacccaaaggcgattctggtcagccgctgtag

SEQ ID NO: 306081 - DNA, 699 bp, Artificial Sequence
  derived and/or modified sequence
atgttcggtctcttcgttgaacacggaccgtacgtcgtaacttcaaacatgacactcagagaccgggacttcccctggacaacaaccttgtccatgctatatatcgacaacccagtcggcacaggcttttcgttcacagatgatacccatggttatgccgtgaacgaggacgatgtagccagagatctgtattccgcgttgatccagtttttccagatcttccctgagtacaaaaataacgatttttacgtcacaggggagagctatgcgggaaaatatgtgcccgctattgctcaccttattcattctcttaatccagttcgggaagtgaagatcaatcttaatggtatagccataggcgacggctatagcgaccccgagagtataattgggggttacgcagaatttctgtaccagattgggctcctcgatgagaaacagaaaaaatactttcagaaacagtgtcacgaatgcatcgagcacattcgtaagcaaaactggttcgaggcgttcgaaatcctagacaagctgcttgacggggacctgacaagcgacccgtcgtatttccaaaacgtgaccggctgctcaaactactacaattttttaagatgcaccgaaccggaagatcagctctactatgtgaagttcctaagtctgcccgaggtgcgacaggctccgagaggtgaatctgatttctag

SEQ ID NO: 306082 - DNA, 2091 bp, Artificial Sequence
  derived and/or modified sequence
gtgactgggtggggctgcctcacttctgcctgatttgggaagcgctgcaaggacaaccggctggggtccttgcgcgccgcggctcagggaggagcaccgactgcgccgcaccctgagagatggttggtgccatgtggaaggtgattgtttcgctggtcctgttgatgcctggcccctgtgatgggctgtttcgctccctatacagaagtgtttccatgccacctaagggagactcaggacagccattatttctcaccccttacattgaagctgggaagatccaaaaaggaagagaattgagtttggtcggccctttcccaggactgaacatgaagagttatgccggcttcctcaccgtgaataagacttacaacagcaacctcttcttctggttcttcccagctcagatacagccagaagatgccccagtagttctctggctacagggtgggccgggaggttcatccatgtttggactctttgtggaacatgggccttatgttgtcacaagtaacatgaccttgcgtgacagagacttcccctggaccacaacgctctccatgctttacattgacaatccagtgggcacaggcttcagttttactgatgatacccacggatatgcagtcaatgaggacgatgtagcacgggatttatacagtgcactaattcagtttttccagatatttcctgaatataaaaataatgacttttatgtcactggggagtcttatgcagggaaatatgtgccagccattgcacacctcatccattccctcaaccctgtgagagaggtgaagatcaacctgaacggaattgctattggagatggatattctgatcccgaatcaattatagggggctatgcagaattcctgtaccaaattggcttgttggatgagaagcaaaaaaagtacttccagaagcagtgccatgaatgcatagaacacatcaggaagcagaactggtttgaggcctttgaaatactggataaactactagatggcgacttaacaagtgatccttcttacttccagaatgttacaggatgtagtaattactataactttttgcggtgcacggaacctgaggatcagctttactatgtgaaatttttgtcactcccagaggtgagacaagccatccacgtggggaatcagacttttaatgatggaactatagttgaaaagtacttgcgagaagatacagtacagtcagttaagccatggttaactgaaatcatgaataattataaggttctgatctacaatggccaactggacatcatcgtggcagctgccctgacagagcgctccttgatgggcatggactggaaaggatcccaggaatacaagaaggcagaaaaaaaagtttggaagatctttaaatctgacagtgaagtggctggttacatccggcaagcgggtgacttccatcaggtaattattcgaggtggaggacatattttaccctatgaccagcctctgagagcttttgacatgattaatcgattcatttatggaaaaggatgggatccttatgttggataaactaccttcccaaaagagaacatcagaggttttcattgctgaaaagaaaatcgtaaaaacagaaaatgtcataggaataaaaaaattatcttttcatatctgcaagatttttttcatcaataaaaattatccttgaaacaagtgagcttttgtttttggggggagatgtttactacaaaattaacatgagtacatgagtaagaattacattatttaacttaaaggatgaaaggtatggatgatgtgacactgagacaagatgtataaatgaaattttagggtcttgaataggaagttttaatttcttctaagagtaagtgaaaagtgcagttgtaacaaacaaagctgtaacatctttttctgccaataacagaagtttggcatgccgtgaaggtgtttggaaatattattggataagaatagctcaattatcccaaataaatggatgaagctataatagttttggggaaaagattctcaaatgtataaagtcttagaacaaaagaattctttgaaataaaaatattatatataaaagtaa

SEQ ID NO: 306083 - DNA, 1739 bp, Artificial Sequence
  derived and/or modified sequence
agcgctgcaaggacaaccggctggggtccttgcgcgccgcggctcagggaggagcaccgactgcgccgcgtaagtgccgcctgccctgcgtgggtcgtgccagctcagcgggacaggtcctcgcctcggtccctcggacttagggagcgcggggcagaccctgagagatggttggtgccatgtggaaggtgattgtttcgctggtcctgttgatgcctggcccctgtgatgggctgtttcgctccctatacagaagtgtttccatgccacctaagggagactcaggacagccattatttctcaccccttacattgaagctgggaagatccaaaaaggaagagaattgagtttggtcggccctttcccaggactgaacatgaagagttatgccggcttcctcaccgtgaataagacttacaacagcaacctcttcttctggttcttcccagctcagatacagccagaagatgccccagtagttctctggctacagggtgggccgggaggttcatccatgtttggactctttgtggaacatgggccttatgttgtcacaagtaacatgaccttgcgtgacagagacttcccctggaccacaacgctctccatgctttacattgacaatccagtgggcacaggcttcagttttactgatgatacccacggatatgcagtcaatgaggacgatgtagcacgggatttatacagtgcactaattcagtttttccagatatttcctgaatataaaaataatgacttttatgtcactggggagtcttatgcagggaaatatgtgccagccattgcacacctcatccattccctcaaccctgtgagagaggtgaagatcaacctgaacggaattgctattggagatggatattctgatcccgaatcaattatagggggctatgcagaattcctgtaccaaattggcttgttggatgagaagcaaaaaaagtacttccagaagcagtgccatgaatgcatagaacacatcaggaagcagaactggtttgaggcctttgaaatactggataaactactagatggcgacttaacaagtgatccttcttacttccagaatgttacaggatgtagtaattactataactttttgcggtgcacggaacctgaggatcagctttactatgtgaaatttttgtcactcccagaggtgagacaagccatccacgtggggaatcagacttttaatgatggaactatagttgaaaagtacttgcgagaagatacagtacagtcagttaagccatggttaactgaaatcatgaataattataaggttctgatctacaatggccaactggacatcatcgtggcagctgccctgacagagcgctccttgatgggcatggactggaaaggatcccaggaatacaagaaggcagaaaaaaaagtttggaagatctttaaatctgacagtgaagtggctggttacatccggcaagcgggtgacttccatcaggtaattattcgaggtggaggacatattttaccctatgaccagcctctgagagcttttgacatgattaatcgattcatttatggaaaaggatgggatccttatgttggataaactaccttcccaaaagagaacatcagaggttttcattgctgaaaagaaaatcgtaaaaacagaaaatgtcataggaataaaaaaattatcttttcatatctgcaagatttttttcatcaataaaaattatccttgaaacaa

SEQ ID NO: 306084 - DNA, 2213 bp, Artificial Sequence
  derived and/or modified sequence
gctcctttcgcttttcgctcgctgcactccaagccccggaacacccgcgtccgcacactaagggcaccaccgctctcccacctctgcgctgtcagatgtcaggcgcggaggtgctctgggcaccgaggtgctggcgaaccaaacaagtatcaccccggacgcctgcccccattccgagagagcgggcgggatggccacaggctgcaatacagtgacacgatcacagctcactgctacagcctctacctcctgggcttaatccatcctccctcctcagcctcccaagcagctgggactacaggtgattttgatatgctgctaaggtttgataagagaaatgagattcagagaacagattatattgttgaagagcttgactggaaatgatccaaacggaaacattggctcttcctggggttccagcctgctgtcttgacaggaactataccatcagctctcctgggtctcttacatgccaagtcatcctgcagatctgggactcactccgtaatcagcttgattgctgtaagttgaacacgtcagtggcatgggcaccagctgcacaaccctaggagccaccaaacacagtatattctatataaatgttgctgccaggagccccagttcaaactacaataccctgagagatggttggtgccatgtggaaggtgattgtttcgctggtcctgttgatgcctggcccctgtgatgggctgtttcgctccctatacagaagtgtttccatgccacctaagggagactcaggacagccattatttctcaccccttacattgaagctgggaagatccaaaaaggaagagaattgagtttggtcggccctttcccaggactgaacatgaagagttatgccggcttcctcaccgtgaataagacttacaacagcaacctcttcttctggttcttcccagctcagatacagccagaagatgccccagtagttctctggctacagggtgggccgggaggttcatccatgtttggactctttgtggaacatgggccttatgttgtcacaagtaacatgaccttgcgtgacagagacttcccctggaccacaacgctctccatgctttacattgacaatccagtgggcacaggcttcagttttactgatgatacccacggatatgcagtcaatgaggacgatgtagcacgggatttatacagtgcactaattcagtttttccagatatttcctgaatataaaaataatgacttttatgtcactggggagtcttatgcagggaaatatgtgccagccattgcacacctcatccattccctcaaccctgtgagagaggtgaagatcaacctgaacggaattgctattggagatggatattctgatcccgaatcaattatagggggctatgcagaattcctgtaccaaattggcttgttggatgagaagcaaaaaaagtacttccagaagcagtgccatgaatgcatagaacacatcaggaagcagaactggtttgaggcctttgaaatactggataaactactagatggcgacttaacaagtgatccttcttacttccagaatgttacaggatgtagtaattactataactttttgcggtgcacggaacctgaggatcagctttactatgtgaaatttttgtcactcccagaggtgagacaagccatccacgtggggaatcagacttttaatgatggaactatagttgaaaagtacttgcgagaagatacagtacagtcagttaagccatggttaactgaaatcatgaataattataaggttctgatctacaatggccaactggacatcatcgtggcagctgccctgacagagcgctccttgatgggcatggactggaaaggatcccaggaatacaagaaggcagaaaaaaaagtttggaagatctttaaatctgacagtgaagtggctggttacatccggcaagcgggtgacttccatcaggtaattattcgaggtggaggacatattttaccctatgaccagcctctgagagcttttgacatgattaatcgattcatttatggaaaaggatgggatccttatgttggataaactaccttcccaaaagagaacatcagaggttttcattgctgaaaagaaaatcgtaaaaacagaaaatgtcataggaataaaaaaattatcttttcatatctgcaagatttttttcatcaataaaaattatccttg

SEQ ID NO: 306085 - DNA, 528 bp, Artificial Sequence
  derived and/or modified sequence
gtcagatgtcaggcgcggaggtgctctgggcaccgaggtgctggcgaaccaaacaagtatcaccccggacgcctgcccccattccgagagagcgggcgggatggccacagatccaaacggaaacattggctcttcctggggttccagcctgctgtcttgacaggaactataccatcagctctcctgggtctcttacatgccaagtcatcctgcagatctgggactcactccgtaatcagcttgattgctgtaagttgaacacgtcagtggcatgggcaccagctgcacaaccctaggagccaccaaacacagtatattctatataaatgttgctgccaggagccccagttcaaactacaataccctgagagatggttggtgccatgtggaaggtgattgtttcgctggtcctgttgatgcctggcccctgtgatgggctgtttcgctccctatacagaagtgtttccatgccacctaagggagactcaggacagccattatttctcaccccttacattgaagctggga

SEQ ID NO: 306086 - DNA, 571 bp, Artificial Sequence
  derived and/or modified sequence
aaacaaagaaaatcaagtctgcgaggagcgagggtttgctcccctctgctccggatttgggtgtccagggtagcgggcgcggcacggcaaacaggtgattttgatatgctgctaaggtttgataagagaaatgagattcagagaacagattatattgttgaagagcttgactggaaatgatccaaacggaaacattggctcttcctggggttccagcctgctgtcttgacaggaactataccatcagctctcctgggtctcttacatgccaagtcatcctgcagatctgggactcactccgtaatcagcttgattgctgtaagttgaacacgtcagtggcatgggcaccagctgcacaaccctaggagccaccaaacacagtatattctatataaatgttgctgccaggagccccagttcaaactacaataccctgagagatggttggtgccatgtggaaggtgattgtttcgctggtcctgttgatgcctggcccctgtgatgggctgtttcgctccctatacagaagtgtttccatgccacctaagggagactcaggacagccattatt

SEQ ID NO: 306087 - DNA, 1086 bp, Artificial Sequence
  derived and/or modified sequence
ggctcagggaggagcaccgactgcgccgcaccctgagagatggttggtgccatgtggaaggtgattgtttcgctggtcctgttgatgcctggcccctgtgatgggctgtttcgctccctatacagaagtgtttccatgccacctaagggagactcaggacagccattatttctcaccccttacattgaagctgggaagatccaaaaaggaagagaattgagtttggtcggccctttcccaggactgaacatgaagagttatgccggcttcctcaccgtgaataagacttacaacagcaacctcttcttctggttcttcccagctcagatacagccagaagatgccccagtagttctctggctacagggtgggccgggaggttcatccatgtttggactctttgtggaacatgggccttatgttgtcacaagtaacatgaccttgcgtgacagagacttcccctggaccacaacgctctccatgctttacattgacaatccagtgggcacaggcttcagttttactgatgatacccacggatatgcagtcaatgaggacgatgtagcacgggatttatacagtgcactaattcagtttttccagatatttcctgaatataaaaataatgacttttatgtcactggggagtcttatgcagggaaatatgtgccagccattgcacacctcatccattccctcaaccctgtgagagaggtgaagatcaacctgaacggaattgctattggagatggatattctgatcccgaatcaattatagggggctatgcagaattcctgtaccaaattggcttgttggatgagaagcaaaaaaagtacttccagaagcagtgccatgaatgcatagaacacatcaggaagcagaactggtttgaggcctttgaaatactggataaactactagatggcgacttaacaagtgatccttcttacttccagaatgttacaggatgtagtaattactataactttttgcggtgcacggaacctgaggatcagctttactatgtgaaatttttgtcactcccagaggtgagacaagccccacgtggggaatcagacttttaa

SEQ ID NO: 306088 - DNA, 1431 bp, Artificial Sequence
  derived and/or modified sequence
atggtgggcgccatgtggaaggtgatcgtgagcctggtgctgctgatgcccggcccctgcgacggcctgttcagaagcctgtacagaagcgtgagcatgccccccaagggcgacagcggccagcccctgttcctgaccccctacatcgaggccggcaagatccagaagggcagagagctgagcctggtgggccccttccccggcctgaacatgaagagctacgccggcttcctgaccgtgaacaagacctacaacagcaacctgttcttctggttcttccccgcccagatccagcccgaggacgcccccgtggtgctgtggctgcagggcggccccggcggcagcagcatgttcggcctgttcgtggagcacggcccctacgtggtgaccagcaacatgaccctgagagacagagacttcccctggaccaccaccctgagcatgctgtacatcgacaaccccgtgggcaccggcttcagcttcaccgacgacacccacggctacgccgtgaacgaggacgacgtggccagagacctgtacagcgccctgatccagttcttccagatcttccccgagtacaagaacaacgacttctacgtgaccggcgagagctacgccggcaagtacgtgcccgccatcgcccacctgatccacagcctgaaccccgtgagagaggtgaagatcaacctgaacggcatcgccatcggcgacggctacagcgaccccgagagcatcatcggcggctacgccgagttcctgtaccagatcggcctgctggacgagaagcagaagaagtacttccagaagcagtgccacgagtgcatcgagcacatcagaaagcagaactggttcgaggccttcgagatcctggacaagctgctggacggcgacctgaccagcgaccccagctacttccagaacgtgaccggctgcagcaactactacaacttcctgagatgcaccgagcccgaggaccagctgtactacgtgaagttcctgagcctgcccgaggtgagacaggccatccacgtgggcaaccagaccttcaacgacggcaccatcgtggagaagtacctgagagaggacaccgtgcagagcgtgaagccctggctgaccgagatcatgaacaactacaaggtgctgatctacaacggccagctggacatcatcgtggccgccgccctgaccgagagaagcctgatgggcatggactggaagggcagccaggagtacaagaaggccgagaagaaggtgtggaagatcttcaagagcgacagcgaggtggccggctacatcagacaggccggcgacttccaccaggtgatcatcagaggcggcggccacatcctgccctacgaccagcccctgagagccttcgacatgatcaacagattcatctacggcaagggctgggacccctacgtgggctag

SEQ ID NO: 306089 - DNA, 159 bp, Artificial Sequence
  derived and/or modified sequence
atggtgggcgccatgtggaaggtgatcgtgagcctggtgctgctgatgcccggcccctgcgacggcctgttcagaagcctgtacagaagcgtgagcatgccccccaagggcgacagcggccagcccctgttcctgaccccctacatcgaggccggctag

SEQ ID NO: 306090 - DNA, 132 bp, Artificial Sequence
  derived and/or modified sequence
atggtgggcgccatgtggaaggtgatcgtgagcctggtgctgctgatgcccggcccctgcgacggcctgttcagaagcctgtacagaagcgtgagcatgccccccaagggcgacagcggccagcccctgtag

SEQ ID NO: 306091 - DNA, 699 bp, Artificial Sequence
  derived and/or modified sequence
atgttcggcctgttcgtggagcacggcccctacgtggtgaccagcaacatgaccctgagagacagagacttcccctggaccaccaccctgagcatgctgtacatcgacaaccccgtgggcaccggcttcagcttcaccgacgacacccacggctacgccgtgaacgaggacgacgtggccagagacctgtacagcgccctgatccagttcttccagatcttccccgagtacaagaacaacgacttctacgtgaccggcgagagctacgccggcaagtacgtgcccgccatcgcccacctgatccacagcctgaaccccgtgagagaggtgaagatcaacctgaacggcatcgccatcggcgacggctacagcgaccccgagagcatcatcggcggctacgccgagttcctgtaccagatcggcctgctggacgagaagcagaagaagtacttccagaagcagtgccacgagtgcatcgagcacatcagaaagcagaactggttcgaggccttcgagatcctggacaagctgctggacggcgacctgaccagcgaccccagctacttccagaacgtgaccggctgcagcaactactacaacttcctgagatgcaccgagcccgaggaccagctgtactacgtgaagttcctgagcctgcccgaggtgagacaggcccccagaggcgagagcgacttctag

SEQ ID NO: 306092 - protein, 80 aa, Artificial Sequence
  derived and/or modified sequence
MGSTLRKRKMYEEFLSKVSILESLEKWERLTVADALEPVQFEDGEKIVVQGEPGDDFYIITEKNLPGVVAHACNPSYLGG

SEQ ID NO: 306093 - DNA, 243 bp, Artificial Sequence
  derived and/or modified sequence
atgggttctacgttgcgcaaaagaaagatgtacgaagaattcctctctaaagtctccattctggaatctctcgaaaagtgggaacgactcaccgtcgcagacgccctggagccagttcaattcgaggatggggaaaagattgttgtgcagggagaaccaggggacgacttctacatcattacagagaagaatctgccaggcgttgtggcacacgcatgcaacccaagctatcttgggggctag

SEQ ID NO: 306094 - DNA, 243 bp, Artificial Sequence
  derived and/or modified sequence
atgggcagcaccctgaggaagaggaagatgtatgaggagttcctgagcaaggtgtccatcctggagagcctggagaagtgggagcggctgactgtggctgatgccctggagcctgtgcagtttgaagatggagagaagatcgtggtgcagggcgagcctggagatgacttctacatcatcacagagaagaacctgcccggggtggtggcccacgcctgcaaccccagctacctgggcggctag

SEQ ID NO: 306095 - DNA, 243 bp, Artificial Sequence
  derived and/or modified sequence
atgggcagcaccctgcggaagcggaagatgtacgaggagttcctgtcaaaggtctcaatcttggaatcgctggagaaatgggagaggctcaccgtagctgacgctctggagcctgtgcagtttgaggatggcgaaaagatcgtcgtacaaggcgagcctggcgacgacttttacatcatcacagaaaagaatctgcctggcgtggttgcacacgcctgtaatccttcatacctgggcggctag

SEQ ID NO: 306096 - DNA, 243 bp, Artificial Sequence
  derived and/or modified sequence
atgggctctacccttaggaaaaggaaaatgtatgaggagtttctttccaaggtgtccatcctggagtccctggaaaagtgggagcgattaaccgtggcagatgcactggagcctgtccagttcgaagatggcgagaaaatcgtcgtgcaaggcgagccgggtgatgacttctacatcatcactgagaagaacctgccaggcgtggttgcccacgcatgtaatccgtcttacctgggaggatag

SEQ ID NO: 306097 - DNA, 628 bp, Artificial Sequence
  derived and/or modified sequence
ctgtgatgtgggaggcccttcgcatgcagggtaaatccgcagggcccgtgtgggtgaaggccacatttaagggaatcaaaggatgctcagtaaggaatctggaatgaaaaagtggcatgttgggtagcccgggtgtacgtgaacggagagtgggtgaccaacatcagcgagggaggcagcttcggggagctggcgctcatctacggcacccccagggctgcgaccgtgaaagccaagacggacctcaagctctgggggatcgaccgggacagctaccggcgcatccttatgggcagcacgctgaggaaacgcaagatgtacgaggagttcctcagcaaggtctccatcctagagtccctggagaagtgggagcgtctgaccgtggcggatgcgctggagcccgtccagtttgaagatggagagaaaattgtggtccagggagagcctggggacgacttttacatcatcacggagaaaaatttgccgggtgtggtggcacatgcctgtaatcccagctacttgggaggctgaagcaggagaatcgcttgaacccgggagatggaggttgcagtgagccaagatcacaccattgcactccagcatggacaacagagtgagattccgtctc

SEQ ID NO: 306098 - DNA, 243 bp, Artificial Sequence
  derived and/or modified sequence
atgggcagcaccctgagaaagagaaagatgtacgaggagttcctgagcaaggtgagcatcctggagagcctggagaagtgggagagactgaccgtggccgacgccctggagcccgtgcagttcgaggacggcgagaagatcgtggtgcagggcgagcccggcgacgacttctacatcatcaccgagaagaacctgcccggcgtggtggcccacgcctgcaaccccagctacctgggcggctag

SEQ ID NO: 306099 - DNA, 132 bp, Artificial Sequence
  derived and/or modified sequence
atggacgaagacacgcattacgataaagtagaggatgtggtggggtcacacatcgaggacgccgtcaccttttgggcccagagcattaataggaacaaagacatcatgaagatcggttgctctctgtcctag

SEQ ID NO: 306100 - DNA, 132 bp, Artificial Sequence
  derived and/or modified sequence
atggatgaggacacccactatgacaaggtggaggatgtggtgggcagccacattgaagatgctgtgaccttctgggcccagagcatcaacagaaacaaggacatcatgaagattggctgcagcctgtcctag

SEQ ID NO: 306101 - DNA, 132 bp, Artificial Sequence
  derived and/or modified sequence
atggacgaggacacccactacgacaaggtggaggacgtggtgggctctcacatagaggacgccgtcaccttttgggcacagagcattaaccgtaacaaagacatcatgaagatcggatgctccttgagctag

SEQ ID NO: 306102 - DNA, 132 bp, Artificial Sequence
  derived and/or modified sequence
atggacgaagacacccactatgataaagttgaggatgtagtgggttcacacattgaagacgcggtgacgttttgggcccagtctattaaccggaacaaggacatcatgaagatcggatgcagcctgtcctag

SEQ ID NO: 306103 - DNA, 132 bp, Artificial Sequence
  derived and/or modified sequence
atggacgaggacacccactacgacaaggtggaggacgtggtgggcagccacatcgaggacgccgtgaccttctgggcccagagcatcaacagaaacaaggacatcatgaagatcggctgcagcctgagctag

SEQ ID NO: 306104 - protein, 94 aa, Artificial Sequence
  derived and/or modified sequence
MDEDTHYDKVEDVVGSHIEDAVTFWAQSINRNKDIMKIGCSLSEVCPQASSVLGNLDPNKIYGGLFSEDQCWYRCKVLKIISVEKCLVRYIDYG

SEQ ID NO: 306105 - protein, 43 aa, Artificial Sequence
  derived and/or modified sequence
MDEDTHYDKVEDVVGSHIEDAVTFWAQSINRNKDIMKIGCSLS

SEQ ID NO: 306106 - protein, 100 aa, Artificial Sequence
  derived and/or modified sequence
MASKSWLNFLTFLCGSAIGFLLCSQLFSILLGEKVDTQPNVLHNDPHARHSDDNGQNHLEGQMNFNADSSQHKDENTDIAENLYQKVRILCWVMTGPQNL

SEQ ID NO: 306107 - protein, 131 aa, Artificial Sequence
  derived and/or modified sequence
MASKSWLNFLTFLCGSAIGFLLCSQLFSILLGEKVDTQPNVLHNDPHARHSDDNGQNHLEGQMNFNADSSQHKDENTDIAENLYQKVRILCWVMTGPQNLEKKAKHVKATWAQRCNKVLFMSSEENKDFPA

SEQ ID NO: 306108 - DNA, 930 bp, Artificial Sequence
  derived and/or modified sequence
atggctagcaaatcctggctcaatttcctgacattcctgtgtgggagtgctattggatttctgctatgctcgcagctctttagcatcctgctgggtgagaaggtggacacccagcccaacgtgctgcacaacgatccccacgcaagacactcggacgataacggtcagaaccatttagagggacaaatgaactttaatgcagacagtagtcagcacaaggacgagaacacagatattgctgaaaatctgtatcagaaagtgaggatcctctgttgggtgatgactggaccacaaaacctggagaagaaagccaaacacgttaaagccacatgggcccagagatgcaacaaagtactgttcatgagcagcgaggagaataaagattttccggccgttggactgaagaccaaagaggggcgggaccagttgtactggaagaccatcaaggcgttccagtacgttcatgaacactatctcgaggatgccgattggtttctcaaggccgatgacgatacctatgtcattctcgacaacctgcgatggctactgtctaagtatgaccccgaagagcctatatactttggccgacgctttaagccctatgtcaagcaagggtacatgagtggcggcgcgggctacgtcctctccaaagaggccctcaagaggttcgttgacgccttcaaaacagataaatgtactcactccagttcgattgaggatcttgcattggggcgatgtatggagatcatgaacgttgaagctggggatagtcgagacaccatcgggaaggagactttccacccctttgttcccgagcatcatctgatcaagggatatctgcctcgaactttctggtattggaattacaattattatccaccagttgaagtctcattagagattctactgttatgccaatacttagattag

SEQ ID NO: 306109 - DNA, 303 bp, Artificial Sequence
  derived and/or modified sequence
atggcatctaagagctggttaaatttcctcacattcctgtgtgggtccgccatcgggtttctgctatgttcacagctcttctctatattactgggagaaaaggtcgatactcagcccaatgttctgcataatgacccacacgctcggcactccgatgataatggccaaaaccacctggagggtcagatgaatttcaatgctgacagttcccagcacaaggacgaaaacactgacatcgcagagaacctgtatcagaaagtgaggattctgtgctgggtgatgaccgggccccagaatctctag

SEQ ID NO: 306110 - DNA, 396 bp, Artificial Sequence
  derived and/or modified sequence
atggctagcaagtcttggcttaatttcctgacgtttctgtgcggcagcgctattggctttctgttgtgcagtcagctcttcagcatcctgctgggggaaaaagtggacacccagcctaacgttctccacaacgatccgcacgcccgacattccgacgataacgggcaaaaccatctggagggtcagatgaactttaatgccgattcttcccaacacaaggacgaaaatacagatatagccgagaatttatatcagaaggttcgaatcttatgctgggtgatgaccggtccacagaatcttgaaaaaaaggctaagcatgtaaaagctacttgggcccagagatgtaacaaggtgctttttatgtccagtgaagagaataaggattttcctgcctag

SEQ ID NO: 306111 - DNA, 1092 bp, Artificial Sequence
  derived and/or modified sequence
atggcgagtaagagctggctgaactttttgaccttcctctgcggttccgcaatcggattccttctctgttctcagctgtttagcatcctccttggcgaaaaggtcgacacacagccaaatgtgctgcacaatgatcctcacgcacggcactctgatgataacgggcagaatcacctcgaaggacagatgaactttaatgcagatagcagccagcacaaggacgagaataccgatattgccgaaaacctgtaccagaaggtgaggattctgtgttgggtgatgacaggtcctcagaatctcgaaaagaaggccaagcacgtgaaggcgacctgggcccaacgatgtaataaagttcttttcatgtcctccgaggagaataaggactttccagctgtcgggctgaaaacgaaggaaggcagggaccagctctattggaaaactattaaagcctttcaatatgttcatgagcattacctggaagatgcggattggtttttaaaggccgacgatgatacatatgtcatcctcgacaacctgcgctggttactaagcaaatacgacccggaagaacccatctacttcggaagacgttttaaaccctatgtcaagcagggctatatgagcggcggtgcggggtacgtgctcagcaaagaggccctcaaacgcttcgtggacgcattcaagactgataagtgtactcactcctcgtctatagaagatctggcattaggccggtgcatggaaataatgaatgtggaggcgggcgattcaagagacacgatcggaaaggaaaccttccacccatttgtgccagagcaccatctgataaaagggtacctacctagaacattctggtactggaactataactattatccccccgtggaaggccctggctgttgttccgacctcgcggtgtctttccactacgtggatagtaccactatgtacgagctcgagtatctggtttaccatcttaggccgtacgggtacctctaccgctaccaaccaacccttcccgagcggattttgaaagagataagccaggcgaacaaaaatgaggacaccaaagtcaaattaggaaacccgtag

SEQ ID NO: 306112 - DNA, 1092 bp, Artificial Sequence
  derived and/or modified sequence
atggcgagcaagtcctggttaaattttttaacttttctgtgtggctccgccatcgggtttctgttgtgctcccagctcttttccattttgcttggggagaaagtggatacccagcccaatgtcttgcacaacgacccccacgctcgccacagcgatgacaatggccaaaatcatcttgaaggacaaatgaattttaatgccgattcatctcagcacaaggatgagaataccgatatcgccgagaatctttaccagaaggtccggattctgtgttgggtcatgacgggcccccaaaatcttgagaaaaaagccaagcacgtgaaagcaacgtgggcgcagcgatgcaacaaagtgctgtttatgtccagcgaggagaacaaggatttccccgccgttggcttgaaaacaaaagaggggcgagaccagttatactggaaaactatcaaagctttccagtacgttcatgaacactatttagaggatgctgactggttcctgaaagccgacgatgatacatatgtgatcctcgataacctccggtggctgctcagtaaatacgaccctgaggaaccgatctattttggtcgccgttttaagccctatgtgaagcagggctatatgagtgggggtgctggatatgttctgtccaaggaggcattaaagagattcgttgacgcctttaagacagataagtgcactcacagctcttcaattgaagacctggccttaggccggtgcatggagataatgaatgtcgaggccggggacagccgcgacactatcggtaaggaaaccttccaccccttcgtgcctgaacatcacttaattaaggggtatctgccccggacgttctggtactggaactacaattactatccacccgtcgagggccccgggtgttgttccgacttagctgtgtctttccattatgttgactccacaacaatgtatgagcttgagtatctggtgtatcaccttagaccctacggttacctctatagatatcaaccaaccctcccagaaagaattcttaaagagattagccaggccaataagaatgaggacaccaaggtgaaactggggaacccctag

SEQ ID NO: 306113 - DNA, 930 bp, Artificial Sequence
  derived and/or modified sequence
atggccagcaagtcctggctgaacttcctgaccttcctgtgtggcagcgccatcggcttcctgctgtgcagccagctgttcagcatcctgctgggggagaaggtggacacccagcccaacgtgctgcacaatgacccccacgcccggcacagtgatgacaatggccagaaccacctggagggccagatgaacttcaatgctgacagcagccagcacaaggatgaaaatacagacattgctgaaaatctctaccagaaggtgcgcatcctgtgctgggtgatgacaggcccccagaacctggagaagaaggccaagcacgtgaaggccacctgggcccagcgctgcaacaaggtgctcttcatgagcagcgaggagaacaaggacttccctgctgtgggcctgaagaccaaggagggccgggaccagctgtactggaagaccatcaaggccttccagtatgtgcatgagcactacctggaggatgctgactggttcctgaaggcagatgatgacacctacgtgatcctggacaacctgcgctggctgctgagcaaatatgaccctgaggagcccatctacttcggccgccgcttcaagccctacgtgaagcagggctacatgtctgggggcgccggctacgtgctgagcaaggaggccctgaagagatttgtggatgccttcaagacagacaagtgcacccacagcagcagcattgaggacctggccctgggccgctgcatggagatcatgaatgtggaggccggggacagccgggacaccatcggcaaggagaccttccacccctttgtgcctgagcaccacctgatcaagggctacctgcccaggaccttctggtactggaactacaactactacccacctgtggaggtgtccctggagatcctgctgctgtgccagtacctggactag

SEQ ID NO: 306114 - DNA, 303 bp, Artificial Sequence
  derived and/or modified sequence
atggccagcaagtcctggctgaacttcctgaccttcctgtgtggcagcgccatcggcttcctgctgtgcagccagctgttcagcatcctgctgggggagaaggtggacacccagcccaacgtgctgcacaatgacccccacgcccggcacagtgatgacaatggccagaaccacctggagggccagatgaacttcaatgctgacagcagccagcacaaggatgaaaatacagacattgctgaaaatctctaccagaaggtgcgcatcctgtgctgggtgatgacaggcccccagaacctgtag

SEQ ID NO: 306115 - DNA, 396 bp, Artificial Sequence
  derived and/or modified sequence
atggccagcaagtcctggctgaacttcctgaccttcctgtgtggcagcgccatcggcttcctgctgtgcagccagctgttcagcatcctgctgggggagaaggtggacacccagcccaacgtgctgcacaatgacccccacgcccggcacagtgatgacaatggccagaaccacctggagggccagatgaacttcaatgctgacagcagccagcacaaggatgaaaatacagacattgctgaaaatctctaccagaaggtgcgcatcctgtgctgggtgatgacaggcccccagaacctggagaagaaggccaagcacgtgaaggccacctgggcccagcgctgcaacaaggtgctcttcatgagcagcgaggagaacaaggacttccctgcctag

SEQ ID NO: 306116 - DNA, 1092 bp, Artificial Sequence
  derived and/or modified sequence
atggccagcaagtcctggctgaacttcctgaccttcctgtgtggcagcgccatcggcttcctgctgtgcagccagctgttcagcatcctgctgggggagaaggtggacacccagcccaacgtgctgcacaatgacccccacgcccggcacagtgatgacaatggccagaaccacctggagggccagatgaacttcaatgctgacagcagccagcacaaggatgaaaatacagacattgctgaaaatctctaccagaaggtgcgcatcctgtgctgggtgatgacaggcccccagaacctggagaagaaggccaagcacgtgaaggccacctgggcccagcgctgcaacaaggtgctcttcatgagcagcgaggagaacaaggacttccctgctgtgggcctgaagaccaaggagggccgggaccagctgtactggaagaccatcaaggccttccagtatgtgcatgagcactacctggaggatgctgactggttcctgaaggcagatgatgacacctacgtgatcctggacaacctgcgctggctgctgagcaaatatgaccctgaggagcccatctacttcggccgccgcttcaagccctacgtgaagcagggctacatgtctgggggcgccggctacgtgctgagcaaggaggccctgaagagatttgtggatgccttcaagacagacaagtgcacccacagcagcagcattgaggacctggccctgggccgctgcatggagatcatgaatgtggaggccggggacagccgggacaccatcggcaaggagaccttccacccctttgtgcctgagcaccacctgatcaagggctacctgcccaggaccttctggtactggaactacaactactacccacctgtggagggccctggctgctgcagcgacctggccgtgtccttccactacgtggacagcaccaccatgtatgagctggagtacctggtgtaccacctgcggccctacggctacctgtaccgctaccagcccaccctgcctgagcgcatcctgaaggagatcagccaggccaacaagaatgaagacaccaaggtgaagctgggcaacccctag

SEQ ID NO: 306117 - DNA, 930 bp, Artificial Sequence
  derived and/or modified sequence
atggccagcaagagctggctgaacttcctgaccttcctgtgcggcagcgccatcggctttttgctatgctcccaattatttagcattctactgggtgagaaagtcgacactcagccgaacgttctccacaacgatccccatgccagacactccgacgacaacggtcagaaccacttggagggtcaaatgaacttcaacgctgattcctcccagcataaggatgagaacactgacatcgccgagaacctctaccagaaggtgcggattttatgttgggtgatgactgggccacaaaacttggagaaaaaagccaagcatgttaaggcgacctgggcacaaaggtgtaacaaagtcctgttcatgagtagcgaggagaacaaggattttcctgcggtgggacttaagaccaaagaaggccgggaccagctctactggaagaccatcaaagcttttcagtacgttcacgaacactatctggaggatgctgattggtttttgaaagcagatgatgacacatacgtgatcctggacaacctaagatggctcctatcaaagtatgatcccgaagaaccaatctactttggtagaagatttaagccatacgtcaagcaggggtatatgtccggaggagccgggtatgtgctgtccaaggaggccttgaagcgcttcgttgatgctttcaaaacggataaatgcacacattcgtcttcaatcgaagacctggctttgggccgctgcatggaaataatgaacgtggaggcaggcgacagcagggataccatcggcaaggagacattccacccgtttgtgcctgagcaccacctgattaagggctacctgcccaggaccttttggtactggaactacaactactacccaccggtcgaggtgagcctcgaaatcttgctgctatgccagtacctcgattag

SEQ ID NO: 306118 - DNA, 303 bp, Artificial Sequence
  derived and/or modified sequence
atggccagcaagagctggctgaacttcctgaccttcctgtgcggctctgcgataggcttccttttgtgcagccagctgttttcaattctgctgggagagaaagtggatacccagcccaatgtcctgcataatgatccccatgcccggcatagcgatgacaatggacagaatcacctggagggacaaatgaactttaacgccgattccagccagcacaaggatgaaaacactgacatagctgaaaacctctaccaaaaagttaggatcctgtgttgggtgatgactggaccccagaatctgtag

SEQ ID NO: 306119 - DNA, 396 bp, Artificial Sequence
  derived and/or modified sequence
atggccagcaagagctggctgaacttcctgaccttcctgtgcggctcggcgatagggtttctgctgtgttcacagttgttttcaatcctgctaggagagaaagtggacactcaaccgaacgttttgcacaatgacccccacgctagacacagcgatgacaatgggcaaaatcaccttgaggggcagatgaattttaacgcagactcatcccaacataaggacgagaacacagatatcgcagaaaatctctatcagaaagtccgaatcctctgttgggttatgacagggccccagaacctggaaaaaaaagccaaacatgtcaaagccacctgggcacagcgctgtaataaggtgttatttatgtcctctgaggagaacaaggacttccccgcatag

SEQ ID NO: 306120 - DNA, 1092 bp, Artificial Sequence
  derived and/or modified sequence
atggccagcaagagctggctgaacttcctgaccttcctgtgcggcagtgccatcggctttttgctatgttcccagttattctccattctcctgggcgagaaggtcgacacccagcccaatgttctgcacaacgacccgcacgcacggcactcagacgataatggccagaaccatctggagggccagatgaactttaacgcagatagttcccaacataaggatgaaaatactgatatcgccgagaatctgtaccagaaagttcggatcctgtgctgggtaatgaccgggccccaaaacctcgaaaaaaaggccaaacacgtcaaggcaacttgggcccaacggtgcaataaggtcttattcatgtctagcgaggagaataaggacttcccagccgtgggattgaagaccaaagagggacgggatcagctgtattggaagaccattaaagccttccagtacgtccacgaacattacctggaggatgccgactggttcctgaaggcagacgacgatacgtacgtaattctcgataacttgaggtggctgctgtcaaagtatgacccagaagaacctatctactttggtcgacggtttaagccgtatgttaaacagggctatatgtccggaggcgcgggttatgttttatcaaaagaggccttaaaaagatttgttgacgcctttaagaccgacaagtgtacacactcatccagcatcgaggatctcgcattgggccggtgtatggagatcatgaatgtggaggccggcgacagccgggacactattggcaaggagacattccacccttttgtgcccgaacaccatctcattaaagggtatctgccgcggacattctggtactggaactacaactactatcctccagtggaagggcctggctgctgctcggatctggccgtctccttccactatgtggacagcacgacaatgtacgagttggagtacctggtgtaccacctgcgcccttacgggtacctgtataggtatcagcccacactcccagagaggatcttaaaggaaatctcgcaagcaaataaaaatgaggacactaaagtgaaactgggcaacccgtag

SEQ ID NO: 306121 - DNA, 1092 bp, Artificial Sequence
  derived and/or modified sequence
atggccagcaagagctggctgaacttcctgaccttcctgtgcggctcagctatcggatttctattgtgcagtcagctgttctcaattctgctgggtgaaaaggtggacacccagccaaacgtgctccacaacgaccctcatgcacgacatagtgacgacaacggtcagaaccatctggaaggacagatgaactttaatgccgactcctctcagcataaagatgaaaacactgacattgctgaaaatctgtaccaaaaagtgcgcattctatgttgggtgatgaccggtccccaaaatttagagaagaaagccaagcacgtgaaggccacttgggcacagaggtgcaataaggtcttgttcatgtcaagcgaggaaaataaggatttccccgcggttggcctcaagaccaaagagggacgcgatcagctgtattggaagaccataaaggccttccagtacgtgcacgaacactatctggaagatgcagattggtttctgaaggctgacgacgatacatatgtgatcctggacaatctgcgttggctgctctctaaatatgaccccgaggagcccatttatttcgggcgcagattcaaaccttacgtaaaacagggatacatgtcaggcggagctggatatgttctctcaaaagaagcgctgaaacggttcgttgacgcctttaagaccgacaagtgtactcattctagttccattgaagacttagctcttggccgctgcatggaaataatgaacgttgaggcaggtgattcaagggatactatcgggaaggagaccttccacccttttgttccagagcaccatctcatcaagggatacttgccgcggaccttttggtactggaactataattattaccctcccgttgagggaccaggctgttgcagcgatctcgccgtctccttccactatgtagacagcacgactatgtacgagctggagtaccttgtgtaccatttgagaccctacggctatttgtatcgttatcagccaaccctacccgagagaatcctgaaggagatcagccaggcaaataaaaacgaagatacaaaggtaaaactaggcaacccgtag

SEQ ID NO: 306122 - DNA, 930 bp, Artificial Sequence
  derived and/or modified sequence
atggccagtaagagttggcttaactttcttacttttctctgcggctccgctatcggatttctgttgtgctcacagctgttcagcatcctgctgggtgagaaggtggatacccagcccaatgtgctgcacaacgatccacatgcccgacacagcgatgataatggtcaaaatcatttggaaggccagatgaatttcaacgccgactcctctcagcataaagacgaaaacacagatatcgctgaaaacctctaccagaaggtccggatactgtgctgggtgatgacaggacctcagaatctcgagaaaaaggcaaagcatgtaaaggcaacatgggcacaaagatgtaataaggtgctcttcatgtcatccgaggaaaataaagacttcccagcagtggggctgaaaacgaaagaaggaagagatcagctctattggaaaactatcaaggcgtttcagtacgtgcatgagcactatctcgaagacgctgactggttcctgaaagccgacgacgacacctacgtaattttggataatctcaggtggctactttctaaatacgacccggaagagcccatctattttggtagaaggttcaaaccctacgtgaaacagggctatatgagcgggggtgccggatacgtcttatctaaagaggccctgaaaaggtttgtcgatgccttcaaaacggataaatgtactcatagttcatccatagaggacttggctctcgggcgatgcatggaaatcatgaatgtggaagctggcgatagtcgagatacaattggaaaggagactttccacccatttgtacccgagcaccacttgattaaagggtacctccccaggactttctggtattggaactacaactattacccgccagtggaggtgagcctggagatcttattgttgtgtcagtacctagactag

SEQ ID NO: 306123 - DNA, 303 bp, Artificial Sequence
  derived and/or modified sequence
atggcctctaaatcatggctcaattttttaacttttctttgcgggagcgccattggctttctgctctgttcccagttgttttcaattctgcttggggaaaaggttgacacacaaccaaatgtgctacacaatgatccacatgctcggcattcagacgataatggacagaatcacctggaggggcaaatgaatttcaacgccgactcttcacaacataaggacgaaaacaccgatatcgccgaaaatctttatcagaaagtgagaatcctctgctgggtcatgactggcccacagaatctgtag

SEQ ID NO: 306124 - DNA, 396 bp, Artificial Sequence
  derived and/or modified sequence
atggcctccaagagttggctcaattttcttactttcctgtgtggatccgccatcggcttcctgctctgcagtcagctgtttagcattctcctcggcgagaaagtggatacccagccaaacgtcctgcacaacgatccccacgcccgtcacagcgacgataatggtcagaaccacctggagggacaaatgaattttaatgcagactcctcccaacataaagacgaaaacaccgatatcgccgagaatttgtatcaaaaagtgaggattctatgctgggtgatgactggccctcagaacctggagaaaaaggcgaaacacgtcaaggccacatgggctcagcgctgtaacaaggtgctgttcatgtcatctgaagagaataaggacttcccggcttag

SEQ ID NO: 306125 - DNA, 1092 bp, Artificial Sequence
  derived and/or modified sequence
atggcatccaagagctggctcaactttttgacttttctctgcggaagcgccatcgggttcctcctttgttcccagttgtttagcattttgctgggtgagaaggtcgacacgcagccaaatgtgctccataatgacccacacgccaggcattccgacgataatgggcagaatcacctagaaggtcagatgaactttaacgccgactccagccagcataaggacgaaaacacagatattgcagagaatctgtatcagaaagtgcgcatcctgtgctgggtgatgacgggaccccagaatctggagaagaaagcaaagcacgtgaaagccacatgggcacaaagatgcaacaaggtgctttttatgtcttctgaagaaaataaagacttcccagccgtgggtctgaagaccaaagaaggtcgcgatcagctctactggaaaacaatcaaggctttccagtacgtgcatgagcactaccttgaggatgccgactggttcctcaaggctgatgacgacacgtatgtcatactggacaacctgagatggcttctgtccaagtacgaccccgaggagccgatctatttcggtcgacgttttaagccatatgtgaagcagggatacatgagcgggggtgccggatatgtcttgagcaaagaagctttgaagaggtttgtggacgcatttaagaccgataagtgtacacactcttcatccatcgaagacctggcactgggacgctgcatggaaattatgaatgttgaggctggtgattcaagagacacgattggtaaagaaacatttcatccatttgtgcctgaacaccacctgatcaaaggatatctgcctaggactttctggtattggaactataattattatccgccagtcgaaggtcccggatgttgttcagatctagccgtttctttccactacgttgatagcaccactatgtacgaactggagtacctcgtgtaccacctacgtccatacggatatctctatagataccaacccaccctccctgaaaggatacttaaggagattagccaggcaaataaaaatgaagacacgaaagtgaagctgggcaatccctag

SEQ ID NO: 306126 - DNA, 1092 bp, Artificial Sequence
  derived and/or modified sequence
atggcttcaaaatcctggctaaacttcttgacatttctttgtgggtccgcgatcggctttctgttgtgctctcagctattttccatcctgctgggtgaaaaggtagatacccagcccaacgtactgcataatgacccacacgctcggcacagcgacgacaatgggcagaatcacctagagggccagatgaacttcaatgctgattctagtcagcacaaggatgaaaacacggatatcgctgaaaacctatatcagaaagtccggatcctgtgttgggtgatgaccgggcctcagaacctggagaaaaaagcgaaacatgtgaaagcaacctgggcacagagatgcaataaggtgcttttcatgagctcagaggaaaataaagacttccctgctgtcggcttgaaaaccaaggagggcagagaccaattgtattggaaaaccattaaagcctttcagtacgtacatgagcattatctggaggacgccgactggttcttgaaagccgacgacgacacatatgtcatcttggataatttgcggtggctgctgtctaaatatgaccccgaggagccaatctatttcgggcgtcgttttaagccttacgtaaagcagggctacatgtccggaggtgctggctatgtgctgagcaaggaggccctgaagagattcgtggatgcctttaagacagataaatgcacccactctagctcaatcgaggacctggctttaggacggtgtatggaaattatgaatgtggaagccggagactctcgggatacgatcggcaaggaaacattccacccattcgtgcctgagcaccacctcatcaaaggatatctgcctagaacattctggtactggaactataactattaccctcctgtcgaaggcccaggatgttgcagcgacctagcagtttccttccattatgtcgactctacaaccatgtacgagcttgagtaccttgtctaccacttgcgaccatacggctatctgtaccgatatcagcccacccttcctgagagaattctgaaggaaatcagccaggcaaataaaaatgaagacactaaggtgaaattgggcaacccatag

SEQ ID NO: 306127 - DNA, 930 bp, Artificial Sequence
  derived and/or modified sequence
atggcctctaaatcctggctgaattttttaaccttcctctgtggatcagcaataggatttcttttatgttctcagctatttagtattttgttgggagaaaaggttgacacccagcctaatgttcttcataatgatcctcatgcaaggcattcagatgataatggacagaatcatctagaaggacaaatgaacttcaatgcagattctagccaacataaagatgagaacacagacattgctgaaaacctctatcagaaagttagaattctttgctgggttatgaccggccctcaaaacctagagaaaaaggccaaacacgtcaaagctacttgggcccagcgttgtaacaaagtgttgtttatgagttcagaagaaaataaagacttccctgctgtgggactgaaaaccaaagaaggcagagatcaactatactggaaaacaattaaagcttttcagtatgttcatgaacattatttagaagatgctgattggtttttgaaagcagatgatgacacgtatgtcatactagacaatttgaggtggcttctttcaaaatacgaccctgaagaacccatttactttgggagaagatttaagccttatgtaaagcagggctacatgagtggaggagcaggatatgtactaagcaaagaagccttgaaaagatttgttgatgcatttaaaacagacaagtgtacacatagttcctccattgaagacttagcactggggagatgcatggaaattatgaatgtagaagcaggagattccagagataccattggaaaagaaacttttcatccctttgtgccagaacaccatttaattaaaggttatctacctagaacgttttggtactggaattacaactattatcctcctgtagaggtaagtttagaaattttattactatgtcaatacttggactga

SEQ ID NO: 306128 - DNA, 930 bp, Artificial Sequence
  derived and/or modified sequence
atggccagcaagagctggctgaacttcctgaccttcctgtgcggcagcgccatcggcttcctgctgtgcagccagctgttcagcatcctgctgggcgagaaggtggacacccagcccaacgtgctgcacaacgacccccacgccagacacagcgacgacaacggccagaaccacctggagggccagatgaacttcaacgccgacagcagccagcacaaggacgagaacaccgacatcgccgagaacctgtaccagaaggtgagaatcctgtgctgggtgatgaccggcccccagaacctggagaagaaggccaagcacgtgaaggccacctgggcccagagatgcaacaaggtgctgttcatgagcagcgaggagaacaaggacttccccgccgtgggcctgaagaccaaggagggcagagaccagctgtactggaagaccatcaaggccttccagtacgtgcacgagcactacctggaggacgccgactggttcctgaaggccgacgacgacacctacgtgatcctggacaacctgagatggctgctgagcaagtacgaccccgaggagcccatctacttcggcagaagattcaagccctacgtgaagcagggctacatgagcggcggcgccggctacgtgctgagcaaggaggccctgaagagattcgtggacgccttcaagaccgacaagtgcacccacagcagcagcatcgaggacctggccctgggcagatgcatggagatcatgaacgtggaggccggcgacagcagagacaccatcggcaaggagaccttccaccccttcgtgcccgagcaccacctgatcaagggctacctgcccagaaccttctggtactggaactacaactactacccccccgtggaggtgagcctggagatcctgctgctgtgccagtacctggactag

SEQ ID NO: 306129 - DNA, 303 bp, Artificial Sequence
  derived and/or modified sequence
atggccagcaagagctggctgaacttcctgaccttcctgtgcggcagcgccatcggcttcctgctgtgcagccagctgttcagcatcctgctgggcgagaaggtggacacccagcccaacgtgctgcacaacgacccccacgccagacacagcgacgacaacggccagaaccacctggagggccagatgaacttcaacgccgacagcagccagcacaaggacgagaacaccgacatcgccgagaacctgtaccagaaggtgagaatcctgtgctgggtgatgaccggcccccagaacctgtag

SEQ ID NO: 306130 - DNA, 396 bp, Artificial Sequence
  derived and/or modified sequence
atggccagcaagagctggctgaacttcctgaccttcctgtgcggcagcgccatcggcttcctgctgtgcagccagctgttcagcatcctgctgggcgagaaggtggacacccagcccaacgtgctgcacaacgacccccacgccagacacagcgacgacaacggccagaaccacctggagggccagatgaacttcaacgccgacagcagccagcacaaggacgagaacaccgacatcgccgagaacctgtaccagaaggtgagaatcctgtgctgggtgatgaccggcccccagaacctggagaagaaggccaagcacgtgaaggccacctgggcccagagatgcaacaaggtgctgttcatgagcagcgaggagaacaaggacttccccgcctag

SEQ ID NO: 306131 - DNA, 1092 bp, Artificial Sequence
  derived and/or modified sequence
atggccagcaagagctggctgaacttcctgaccttcctgtgcggcagcgccatcggcttcctgctgtgcagccagctgttcagcatcctgctgggcgagaaggtggacacccagcccaacgtgctgcacaacgacccccacgccagacacagcgacgacaacggccagaaccacctggagggccagatgaacttcaacgccgacagcagccagcacaaggacgagaacaccgacatcgccgagaacctgtaccagaaggtgagaatcctgtgctgggtgatgaccggcccccagaacctggagaagaaggccaagcacgtgaaggccacctgggcccagagatgcaacaaggtgctgttcatgagcagcgaggagaacaaggacttccccgccgtgggcctgaagaccaaggagggcagagaccagctgtactggaagaccatcaaggccttccagtacgtgcacgagcactacctggaggacgccgactggttcctgaaggccgacgacgacacctacgtgatcctggacaacctgagatggctgctgagcaagtacgaccccgaggagcccatctacttcggcagaagattcaagccctacgtgaagcagggctacatgagcggcggcgccggctacgtgctgagcaaggaggccctgaagagattcgtggacgccttcaagaccgacaagtgcacccacagcagcagcatcgaggacctggccctgggcagatgcatggagatcatgaacgtggaggccggcgacagcagagacaccatcggcaaggagaccttccaccccttcgtgcccgagcaccacctgatcaagggctacctgcccagaaccttctggtactggaactacaactactacccccccgtggagggccccggctgctgcagcgacctggccgtgagcttccactacgtggacagcaccaccatgtacgagctggagtacctggtgtaccacctgagaccctacggctacctgtacagataccagcccaccctgcccgagagaatcctgaaggagatcagccaggccaacaagaacgaggacaccaaggtgaagctgggcaacccctag

SEQ ID NO: 306132 - protein, 225 aa, Artificial Sequence
  derived and/or modified sequence
MVSHSELRKLFYSADAVCFDVDSTVIREEGIDELAKICGVEDAVSEMTRRAMGGAVPFKAALTERLALIQPSREQVQRLIAEQPPHLTPGIRELVSRLQERNVQVFLISGGFRSIVEHVASKLNIPATNVFANRLKFYFNGEYAGFDETQPTAESGGKGKVIKLLKEKFHFKKIIMIGDGATDMEACPPADAFIGFGGNVIRQQVKDNAKWYITDFVELLGELEE

SEQ ID NO: 306133 - protein, 187 aa, Artificial Sequence
  derived and/or modified sequence
MVSHSELRKLFYSADAVCFDVDSTVIREEGIDELAKICGVEDAVSEMTRRAMGGAVPFKAALTERLALIQPSREQVQRLIAEQPPHLTPGIRELVSRLQERNVQVFLISGGFRSIVEHVASKLNIPATNVFANRLKFYFNGEYAGFDETQPTAESGGKGKVIKLLKEKFHFKKIIMIGDGATDMEAC

SEQ ID NO: 306134 - DNA, 678 bp, Artificial Sequence
  derived and/or modified sequence
atggtgagccacagcgagctgagaaagctgttctacagcgccgacgccgtgtgcttcgacgtggacagcaccgtgatcagagaggagggcatcgacgagctggccaagatctgcggcgtggaggacgccgtgagcgagatgaccagaagagccatgggcggcgccgtgcccttcaaggccgccctgaccgagagactggccctgatccagcccagcagagagcaggtgcagagactgatcgccgagcagcccccccacctgacccccggcatcagagagctggtgagcagactgcaggagagaaacgtgcaggtgttcctgatcagcggcggcttcagaagcatcgtggagcacgtggccagcaagctgaacatccccgccaccaacgtgttcgccaacagactgaagttctacttcaacggcgagtacgccggcttcgacgagacccagcccaccgccgagagcggcggcaagggcaaggtgatcaagctgctgaaggagaagttccacttcaagaagatcatcatgatcggcgacggcgccaccgacatggaggcctgcccccccgccgacgccttcatcggcttcggcggcaacgtgatcagacagcaggtgaaggacaacgccaagtggtacatcaccgacttcgtggagctgctgggcgagctggaggagtag

SEQ ID NO: 306135 - DNA, 564 bp, Artificial Sequence
  derived and/or modified sequence
atggtgagccacagcgagctgagaaagctgttctacagcgccgacgccgtgtgcttcgacgtggacagcaccgtgatcagagaggagggcatcgacgagctggccaagatctgcggcgtggaggacgccgtgagcgagatgaccagaagagccatgggcggcgccgtgcccttcaaggccgccctgaccgagagactggccctgatccagcccagcagagagcaggtgcagagactgatcgccgagcagcccccccacctgacccccggcatcagagagctggtgagcagactgcaggagagaaacgtgcaggtgttcctgatcagcggcggcttcagaagcatcgtggagcacgtggccagcaagctgaacatccccgccaccaacgtgttcgccaacagactgaagttctacttcaacggcgagtacgccggcttcgacgagacccagcccaccgccgagagcggcggcaagggcaaggtgatcaagctgctgaaggagaagttccacttcaagaagatcatcatgatcggcgacggcgccaccgacatggaggcctgctag

SEQ ID NO: 306136 - DNA, 33 bp, Artificial Sequence
  derived and/or modified sequence
atggtgagccacagcgagctgagaaagctgtag

SEQ ID NO: 306137 - DNA, 678 bp, Artificial Sequence
  derived and/or modified sequence
atggtgtcacatagcgagctccgcaagttgttttattctgctgacgcagtctgctttgatgttgactctaccgttatccgagaagaaggcatcgatgaactcgcgaaaatctgtggagtggaggatgccgtttctgaaatgacgcgacgagccatgggcggcgcagtgccctttaaggccgcactcaccgaacgccttgctcttattcagccctctcgggagcaggtccaacgcctgattgcagagcagcctccacatctcacacccggcatccgcgaactggtgtccaggctgcaggaacggaatgtccaagtgttcctgatctccggcggtttccggagtatcgtcgaacatgtagcttcgaagctgaatattcctgcgacaaacgtgttcgctaacagactcaagttctacttcaatggagaatatgcagggtttgacgagacacagcctacagcagaatccggcggcaagggtaaagtgataaaacttctaaaggagaagttccatttcaagaaaattataatgattggagacggagcaacagacatggaggcatgccccccagccgacgctttcatcggctttggggggaacgtgatccgccaacaagtcaaagataatgctaaatggtacatcactgattttgttgagcttctaggggagctggaggagtag

SEQ ID NO: 306138 - DNA, 678 bp, Artificial Sequence
  derived and/or modified sequence
atggtgtcccactccgagctccgcaagctgttttatagtgcagacgccgtgtgctttgatgtggacagcaccgtcattagagaagaggggattgatgaattggcgaaaatctgcggcgtcgaggacgcggtcagcgagatgacccgcagagccatggggggcgctgtgccattcaaagcggcactcactgaacggctcgctctcattcaaccaagtagagaacaggtgcagcgacttatagccgagcagcctcctcacttgacccccggtatcagggagttagtcagccgcctgcaagagcggaacgtgcaagtttttctgatctctggcgggtttcggagcatcgtcgagcacgtggccagcaagctaaacatcccagccaccaacgtgttcgctaaccggctgaaattctatttcaacggtgaatatgcaggtttcgacgagactcaacccacagcagagtccggtggcaaagggaaagtaattaagttactgaaggagaaatttcatttcaagaaaataatcatgatcggtgatggagccacagatatggaagcttgccctcccgcagatgcctttattggctttggcggaaacgtcattcggcagcaggttaaggacaatgccaagtggtacataactgactttgtcgaattgttgggcgaactagaagagtag

SEQ ID NO: 306139 - DNA, 564 bp, Artificial Sequence
  derived and/or modified sequence
atggtcagccattcagaactgcggaagctcttctactctgctgatgcagtgtgctttgatgtggactctaccgtgatccgagaagaaggaatcgatgagctggccaaaatttgtggagtggaagatgccgtgtccgagatgacacggagagccatgggcggggccgtgccgtttaaggccgccctgaccgaaagacttgcccttattcagccttcacgagagcaggtgcagcgcttaatcgccgagcagccaccacatctaactcccgggattagagaacttgtatctcggctgcaggagcgtaacgtgcaggtttttttgatttccggaggttttaggtctatagtcgagcatgtggcatcaaagcttaacattccagcgacaaatgttttcgccaatagactcaagttttacttcaatggggaatacgcaggatttgacgaaactcagcccaccgcggaaagtggagggaaaggaaaggtaattaaacttcttaaagaaaaatttcacttcaagaaaattatcatgatcggggatggcgcaacagatatggaggcatgttag

SEQ ID NO: 306140 - DNA, 33 bp, Artificial Sequence
  derived and/or modified sequence
atggtgagccattctgagttgagaaagctctag

SEQ ID NO: 306141 - DNA, 678 bp, Artificial Sequence
  derived and/or modified sequence
atggtgtcccacagcgaactgcggaaactcttctactcagcggacgcagtctgtttcgacgttgactcaacagtaatcagagaagaaggcatcgatgaattagcgaaaatctgcggtgtcgaggatgccgtttcagagatgacgagacgcgctatgggaggagcagttccgttcaaggccgcactgaccgagaggctggccctgatccagccgtcccgcgaacaggtgcagaggttgatcgcagaacagccgccccatctgacgcctggcatccgggaattggtgtccaggctgcaggagcgaaacgttcaggtattccttatctctggtgggttcaggtctatcgtcgagcacgttgcctcaaagcttaatatccctgccacgaatgtgtttgcaaatcggttgaagttctatttcaatggcgagtacgcaggcttcgacgaaactcagccaactgccgaatcaggagggaagggcaaggttatcaagctccttaaggagaaattccactttaaaaagatcatcatgattggggatggagctacagatatggaagcatgcccaccagccgacgccttcataggctttggcggcaacgttattaggcagcaggtgaaagataacgcgaaatggtatatcacagactttgtagaattattgggggagctggaagaatag

SEQ ID NO: 306142 - DNA, 678 bp, Artificial Sequence
  derived and/or modified sequence
atggtgagccacagcgagctgaggaagctgttctacagcgcagatgctgtgtgctttgatgtggacagcaccgtcatccgggaggagggcattgatgagctggccaagatctgtggggtggaggatgctgtgtctgagatgacccggcgggccatgggcggcgctgtgcccttcaaggccgccctgacagagcggctggccctgatccagcccagccgggagcaggtgcagaggctgattgctgagcagcccccccacctgaccccaggcatccgggagctggtgtcccggctgcaggagagaaatgtgcaggtgttcctgatcagcggcggcttccgcagcatcgtggagcacgtggccagcaagctgaacatcccagccaccaacgtgtttgccaaccggctgaagttctacttcaacggggagtatgccggctttgatgagacccagcccacagctgagagcggcggcaagggcaaggtgatcaagctgctgaaggagaagttccacttcaagaagatcatcatgattggagatggagccacagacatggaggcctgccccccagcagatgccttcatcggctttggaggaaatgtcatccggcagcaggtgaaggacaatgccaagtggtacatcacagactttgtggagctgctgggggagctggaggagtag

SEQ ID NO: 306143 - DNA, 564 bp, Artificial Sequence
  derived and/or modified sequence
atggtgagccacagcgagctgaggaagctgttctacagcgcagatgctgtgtgctttgatgtggacagcaccgtcatccgggaggagggcattgatgagctggccaagatctgtggggtggaggatgctgtgtctgagatgacccggcgggccatgggcggcgctgtgcccttcaaggccgccctgacagagcggctggccctgatccagcccagccgggagcaggtgcagaggctgattgctgagcagcccccccacctgaccccaggcatccgggagctggtgtcccggctgcaggagagaaatgtgcaggtgttcctgatcagcggcggcttccgcagcatcgtggagcacgtggccagcaagctgaacatcccagccaccaacgtgtttgccaaccggctgaagttctacttcaacggggagtatgccggctttgatgagacccagcccacagctgagagcggcggcaagggcaaggtgatcaagctgctgaaggagaagttccacttcaagaagatcatcatgattggagatggagccacagacatggaggcctgctag

SEQ ID NO: 306144 - DNA, 33 bp, Artificial Sequence
  derived and/or modified sequence
atggtgagccacagcgagctgaggaagctgtag

SEQ ID NO: 306145 - DNA, 678 bp, Artificial Sequence
  derived and/or modified sequence
atggtgagccacagcgagctgcggaagctgttctacagcgccgacgcagtctgttttgatgtcgattctaccgtgatcagggaagaaggtatagacgagctcgctaaaatttgcggagtcgaagatgccgtctctgagatgaccaggcgcgccatgggtggagccgtaccattcaaggccgctctgactgagcgtttggctttaatacaaccaagccgcgaacaggtgcagaggttgatcgcagagcagccaccacacctcacccccggcattcgagagctggtgagtcggctgcaggagaggaatgtgcaagtttttttgatatccggtggtttcagatcaattgttgaacacgtcgcttccaagttgaatatacccgccacgaatgtcttcgccaaccggctgaaattttacttcaatggcgagtacgccggtttcgacgaaactcagcccaccgcagagtccggagggaaaggtaaggtgataaaactacttaaggagaagtttcactttaagaagattattatgatcggggacggggcaactgacatggaagcttgtcccccagcggacgcttttattggatttggcgggaatgttatccgccagcaagtaaaagacaacgctaagtggtatatcactgattttgtggagctcctaggggagctggaggaatag

SEQ ID NO: 306146 - DNA, 678 bp, Artificial Sequence
  derived and/or modified sequence
atggtgagccacagcgagctgcggaagctgttctacagcgccgacgctgtgtgtttcgatgtagatagtacagtgatccgtgaagaaggaattgatgaactggctaaaatttgcggagttgaagacgctgttagcgagatgacaaggagggctatggggggggccgtcccattcaaagctgcccttacggaacgactggcactgatccagccttcacgtgaacaggtacaacggttgatcgccgagcagccaccacacctgacacccgggatcagggagctggtgagccggctgcaggagcgtaacgtgcaggtgttcctgattagcggcgggtttcggtctatcgtcgaacacgtcgcatcgaaacttaatatccctgccactaacgtgttcgcaaataggctgaagttctatttcaacggggaatacgccggttttgatgaaacacagcctaccgcggaatccgggggcaaaggcaaagtgatcaaactgttgaaggagaaatttcattttaagaaaattattatgattggcgacggcgccaccgatatggaagcatgtcccccagcggacgctttcatcgggtttgggggcaatgtgattcgccagcaggtgaaggataacgctaaatggtacatcacagatttcgtagaactgctgggggaactggaggaatag

SEQ ID NO: 306147 - DNA, 564 bp, Artificial Sequence
  derived and/or modified sequence
atggtgagccacagcgagctgcggaagctgttctacagcgccgacgccgtttgtttcgatgtggattctaccgtgatccgtgaagaggggatcgatgaattggctaaaatctgcggcgttgaagacgctgtcagcgagatgacgaggcgagccatgggcggcgccgtgcccttcaaggcagcgctgactgaacgtctggccctgattcaacccagtagagagcaggttcagcgccttatcgctgagcagccccctcacctgacccctggtataagagaacttgtgagcagactacaggagcgaaatgtccaggtctttctaatctcaggcggttttcgctccatcgtggagcacgtggcctccaaactgaatattccagccaccaacgtgtttgccaacaggttaaaattttactttaatggggaatacgcggggtttgacgagacacagccgactgctgaatctggcggaaagggcaaggtgattaaactgctgaaggaaaagttccattttaaaaaaataataatgataggtgacggggccacagacatggaggcctgctag

SEQ ID NO: 306148 - DNA, 33 bp, Artificial Sequence
  derived and/or modified sequence
atggtgagccacagcgagctgcggaagctgtag

SEQ ID NO: 306149 - DNA, 678 bp, Artificial Sequence
  derived and/or modified sequence
atggtgagccacagcgagctgcggaagctgttctacagcgccgacgccgtgtgtttcgatgtcgacagcacggtgattcgcgaagaaggcatagatgagctagctaaaatatgcggtgtggaggacgctgtaagtgaaatgactcgacgagctatgggtggcgcagtcccgttcaaggctgcgttaacagagcggctcgctctgattcagcctagtagggaacaggtgcagcgcctgattgctgagcagcccccgcacctgacacctgggattcgcgagttggtaagcaggttgcaagaaaggaatgtgcaagtattcctgatctctggaggctttcgctccatcgtcgaacacgtagcctcaaaactcaatattcctgccactaacgtatttgcaaaccgtctcaagttctatttcaacggggagtatgctggtttcgatgaaacccagcctacagctgagagcggagggaaaggtaaggtgataaagctccttaaagaaaagttccactttaagaagattatcatgatcggcgatggcgccacagatatggaggcctgtccgcccgccgacgcctttataggctttgggggaaacgtgattcgacaacaagtgaaggacaacgctaagtggtacataaccgacttcgtggagctgctcggcgagctcgaggagtag

SEQ ID NO: 306150 - DNA, 2131 bp, Artificial Sequence
  derived and/or modified sequence
gttcccggcattccgtgctccttggttccggcgttggagctctttggggcccagctttgcggacccgggagctcgggacgcaggcggggcttgtgctccgcgggggcagggcgtagggtgggcctcctacctcccctgatctcgcggtttgttccgtttcattggagcttcccggaccgtgtgctcgacggtgccctaggtgccgtggggccacacgcgagtctgataagcaccctcccccggaatcatgcggtgctgtgaggcctagcgaagatgaagatagaatgcaaggtagaaagtgctggatacctttagaaagctgcaggactggtgcgatgggagttgagacgtaagaacctgcccgtccgtagggctctggatgctgctgaggcccgaggcccctatggcagatttgaaaattcacccttgtagagtcattcctgcctttgagcggactcccttttaagcagatctcaagagagcgttcggtggaggccctgggtctgcacagctcacctccctgggaactgctcgcccgagcgtcggagccggcgctggccccctgcagccggaaggttgcagccgcaggagccccggaggcccaggacacagggctcttgctcttgcagaatccacaggtctttcttgaggaaatctgtagacagaactttgtgctgcgtttttatctagggaaggaacagaagagtgtcgtctcctagaaatctagcactggagaaacgaggaaaattcttccagcgatggtctcccactcagagctgaggaagcttttctactcagcagatgctgtgtgttttgatgttgacagcacggtcatcagagaagaaggaatcgatgagctagccaaaatctgtggcgttgaggacgcggtgtcagaaatgacacggcgagccatgggcggggcagtgcctttcaaagctgctctcacagagcgcttagccctcatccagccctccagggagcaggtgcagagactcatagcagagcaacccccacacctgacccccggcataagggagctggtaagtcgcctacaggagcgaaatgttcaggttttcctaatatctggtggctttaggagtattgtagagcatgttgcttcaaagctcaatatcccagcaaccaatgtatttgccaataggctgaaattctactttaacggtgaatatgcaggttttgatgagacgcagccaacagctgaatctggtggaaaaggaaaagtgattaaacttttaaaggaaaaatttcattttaagaaaataatcatgattggagatggtgccacagatatggaagcctgtcctcctgctgatgctttcattggatttggaggaaatgtgatcaggcaacaagtcaaggataacgccaaatggtatatcactgattttgtagagctgctgggagaactggaagaataacatccattgtcgtacagctccaaacaacttcagatgaatttttacaagttatacagattgatactgtttgcttacagttgcctattacaacttgctatagaaagttggtacaaatgatctgtactttaaactacagttaggaatcctagaagattgctttttttttttttttaactgtagttccagtattatatgatgactattgatttcctggagaggttttttttttttttgagacagaatcttgctctgttgcccaggctggagtgcagtggcgcggtctcggctcactgcaagctctgcctcccaggttcacgccattctcctgcctcagcctcccgagtagctgggactacaggcacccgccaccacatccggctaattttttgtatttttagtagagacggggtttgaccgtgttagccaggatggtcttgatctcctgaccttgtgatccgcctgcctcagcctcccaaagtgctgggattacaggcttgggccaccgcgcccagccaatgtcctagagagttttgtgatctgaattctttatgtatatttgtagctatatttcatacaaagtgctttaagtgtggagagtcaattaaacacctttactcttagaaatacggattcggcagccttcagtgaatattggtttctctttggtatgtcaataaaagtttatccgtatgtca

SEQ ID NO: 306151 - DNA, 2178 bp, Artificial Sequence
  derived and/or modified sequence
gttcccggcattccgtgctccttggttccggcgttggagctctttggggcccagctttgcggacccgggagctcgggacgcaggcggggcttgtgctccgcgggggcagggcgtagggtgggcctcctacctcccctgatctcgcggtttgttccgtttcattggagcttcccggaccgtgtgctcgacggtgccctaggtgccgtggggccacacgcgagtctgataagcaccctcccccggaatcatgcggtgctgtgaggcctagcgaagatgaagatagaatgcaaggtagaaagtgctggatacctttagaaagctgcaggactggtgcgatgggagttgagacgtaagaacctgcccgtccgtagggctctggatgctgctgaggcccgaggcccctatggcagatttgaaaattcacccttgtagagtcattcctgcctttgagcggactcccttttaagtttacagaagcacttgcagaactcatcagaagccaccccgcttatcagcagatctcaagagagcgttcggtggaggccctgggtctgcacagctcacctccctgggaactgctcgcccgagcgtcggagccggcgctggccccctgcagccggaaggttgcagccgcaggagccccggaggcccaggacacagggctcttgctcttgcagaatccacaggtctttcttgaggaaatctgtagacagaactttgtgctgcgtttttatctagggaaggaacagaagagtgtcgtctcctagaaatctagcactggagaaacgaggaaaattcttccagcgatggtctcccactcagagctgaggaagcttttctactcagcagatgctgtgtgttttgatgttgacagcacggtcatcagagaagaaggaatcgatgagctagccaaaatctgtggcgttgaggacgcggtgtcagaaatgacacggcgagccatgggcggggcagtgcctttcaaagctgctctcacagagcgcttagccctcatccagccctccagggagcaggtgcagagactcatagcagagcaacccccacacctgacccccggcataagggagctggtaagtcgcctacaggagcgaaatgttcaggttttcctaatatctggtggctttaggagtattgtagagcatgttgcttcaaagctcaatatcccagcaaccaatgtatttgccaataggctgaaattctactttaacggtgaatatgcaggttttgatgagacgcagccaacagctgaatctggtggaaaaggaaaagtgattaaacttttaaaggaaaaatttcattttaagaaaataatcatgattggagatggtgccacagatatggaagcctgtcctcctgctgatgctttcattggatttggaggaaatgtgatcaggcaacaagtcaaggataacgccaaatggtatatcactgattttgtagagctgctgggagaactggaagaataacatccattgtcgtacagctccaaacaacttcagatgaatttttacaagttatacagattgatactgtttgcttacagttgcctattacaacttgctatagaaagttggtacaaatgatctgtactttaaactacagttaggaatcctagaagattgctttttttttttttttaactgtagttccagtattatatgatgactattgatttcctggagaggttttttttttttttgagacagaatcttgctctgttgcccaggctggagtgcagtggcgcggtctcggctcactgcaagctctgcctcccaggttcacgccattctcctgcctcagcctcccgagtagctgggactacaggcacccgccaccacatccggctaattttttgtatttttagtagagacggggtttgaccgtgttagccaggatggtcttgatctcctgaccttgtgatccgcctgcctcagcctcccaaagtgctgggattacaggcttgggccaccgcgcccagccaatgtcctagagagttttgtgatctgaattctttatgtatatttgtagctatatttcatacaaagtgctttaagtgtggagagtcaattaaacacctttactcttagaaatacggattcggcagccttcagtgaatattggtttctctttggtatgtcaataaaagtttatccgtatgtc

SEQ ID NO: 306152 - DNA, 826 bp, Artificial Sequence
  derived and/or modified sequence
agtttacagaagcacttgcagaactcatcagaagccaccccgcttatcagcagatctcaagagagcgttcggtggaggccctgggtctgcacagctcacctccctgggaactgctcgcccgagcgtcggagccggcgctggccccctgcagccggaaggttgcagccgcaggagccccggaggcccaggacacaggggaaggaacagaagagtgtcgtctcctagaaatctagcactggagaaacgaggaaaattcttccagcgatggtctcccactcagagctgaggaagcttttctactcagcagatgctgtgtgttttgatgttgacagcacggtcatcagagaagaaggaatcgatgagctagccaaaatctgtggcgttgaggacgcggtgtcagaaatgacacggcgagccatgggcggggcagtgcctttcaaagctgctctcacagagcgcttagccctcatccagccctccagggagcaggtgcagagactcatagcagagcaacccccacacctgacccccggcataagggagctggtaagtcgcctacaggagcgaaatgttcaggttttcctaatatctggtggctttaggagtattgtagagcatgttgcttcaaagctcaatatcccagcaaccaatgtatttgccaataggctgaaattctactttaacggtgaatatgcaggttttgatgagacgcagccaacagctgaatctggtggaaaaggaaaagtgattaaacttttaaaggaaaaatttcattttaagaaaataatcatgattggagatggtgccacagatatggaagcctgtc

SEQ ID NO: 306153 - DNA, 1409 bp, Artificial Sequence
  derived and/or modified sequence
tttcattggagcttcccggaccgtgtgctcgacggtgccctaggtgccgtggggccacacgcgagtctgataagcaccctcccccggaatcatgcggtgctgtgaggcctagcgaagatgaagatagaatgcaaggtagaaagtgctggatacctttagaaagctgcaggactggtgcgatgggagttgagacgtaagaacctgcccgtccgtagggctctggatgctgctgaggcccgaggcccctatggcagatttgaaaattcacccttgtagagtcattcctgcctttgagcggactcccttttaaggaggaaaattcttccagcgatggtctcccactcagagctgaggaagcttttctactcagcagatgctgtgtgttttgatgttgacagcacggtcatcagagaagaaggaatcgatgagctagccaaaatctgtggcgttgaggacgcggtgtcagaaatgacacggcgagccatgggcggggcagtgcctttcaaagctgctctcacagagcgcttagccctcatccagccctccagggagcaggtgcagagactcatagcagagcaacccccacacctgacccccggcataagggagctggtaagtcgcctacaggagcgaaatgttcaggttttcctaatatctggtggctttaggagtattgtagagcatgttgcttcaaagctcaatatcccagcaaccaatgtatttgccaataggctgaaattctactttaacggtgaatatgcaggttttgatgagacgcagccaacagctgaatctggtggaaaaggaaaagtgattaaacttttaaaggaaaaatttcattttaagaaaataatcatgattggagatggtgccacagatatggaagcctgtcctcctgctgatgctttcattggatttggaggaaatgtgatcaggcaacaagtcaaggataacgccaaatggtatatcactgattttgtagagctgctgggagaactggaagaataacatccattgtcgtacagctccaaacaacttcagatgaatttttacaagttatacagattgatactgtttgcttacagttgcctattacaacttgctatagaaagttggtacaaatgatctgtactttaaactacagttaggaatcctagaagattgctttttttttttttttaactgtagttccagtattatatgatgactattgatttcctggagagttttgtgatctgaattctttatgtatatttgtagctatatttcatacaaagtgctttaagtgtggagagtcaattaaacacctttactcttagaaatacggattcggcagccttcagtgaatattggtttctctttggtatgtcaataaaagtttatccgtatgtcagaacggatttgtggaa

SEQ ID NO: 306154 - DNA, 678 bp, Artificial Sequence
  derived and/or modified sequence
atggtgtcccacagcgagctgcgcaagctcttttacagcgccgatgcagtatgcttcgacgtagactccacagtgatcagagaagaaggaattgatgagctcgctaagatctgcggggtggaagatgcagtgtcagagatgaccagaagggctatggggggtgctgttccatttaaggccgcactcactgaacgattagcgctgattcaacccagtcgggagcaggtccaaagactgattgctgaacagccccctcatctgactccgggtatcagagaactggttagtaggctacaggagaggaacgtgcaagttttcctgatttcgggtgggttccggtccatcgttgagcatgtagcaagcaaactgaatattccagctacaaacgtatttgccaaccgattaaagttctacttcaacggggagtatgctgggtttgacgaaacgcagcctacagccgaaagcggcggaaagggcaaggtcattaaactcctgaaggagaaattccattttaagaagattatcatgataggagacggggcaactgatatggaggcatgccctcctgcagacgccttcattggcttcgggggtaacgtcattcgtcagcaggtgaaggataacgctaagtggtatataacagatttcgtggaactactgggagagctggaggaatag

SEQ ID NO: 306155 - DNA, 678 bp, Artificial Sequence
  derived and/or modified sequence
atggtgagccacagcgaactgcggaaattgttctactccgccgatgctgtttgtttcgatgtggacagcaccgtaattagggaagaagggatagacgaactagctaagatctgtggcgttgaggacgctgtatctgagatgacccggagagccatggggggagcagtgccattcaaggctgccctgaccgagcgactggccctcatccagccgtcgcgggaacaagtgcagcgcctcatcgctgagcagccgccacatttgactcctggcattagggagttagtttctcgcctgcaggagaggaatgtgcaggtattcttgatatcagggggtttccgttccattgtcgaacacgtggccagcaagctaaatattcctgctactaacgtgtttgccaatagacttaagttctattttaatggggagtatgcagggttcgacgagacccagcctacagcagagtccggcggaaagggcaaggtcatcaaactgctcaaagaaaagtttcattttaaaaagatcattatgatcggagacggcgcaacggacatggaggcttgtcctcccgctgatgcctttattgggttcggcggtaacgtgatacggcagcaggtgaaggataatgcgaagtggtacatcactgattttgtggagctcctgggagagctcgaagaatag

SEQ ID NO: 306156 - DNA, 564 bp, Artificial Sequence
  derived and/or modified sequence
atggtcagtcattccgagttacgaaagctgttctacagtgcagacgcagtgtgtttcgacgtggactctaccgttattagggaggagggcatagacgaactggcgaagatctgtggcgtcgaagatgcagtgtcagagatgacccggagggccatggggggtgctgtgccttttaaggcagccctcaccgagaggctcgccctgatccagccatccagggaacaggtccagcgcttgattgcagagcagcccccacacctgacaccaggtatacgggagttggtgagccgccttcaagaaagaaacgtgcaggtttttctcatctctggaggctttagatcaatcgtggaacatgttgcatcaaaactcaatatcccagccaccaacgtgtttgcgaatcggctgaaattctactttaacggggaatatgctggattcgacgagacacaacctactgccgaaagcggcggtaagggaaaagtgatcaagctgctcaaggagaaatttcacttcaagaagataatcatgataggcgatggggcaacagacatggaagcatgttag

SEQ ID NO: 306157 - DNA, 33 bp, Artificial Sequence
  derived and/or modified sequence
atggtgtctcattcagaactcagaaagctttag

SEQ ID NO: 306158 - DNA, 678 bp, Artificial Sequence
  derived and/or modified sequence
atggtgagccacagtgagcttcgcaagctcttctatagtgccgacgccgtctgcttcgatgtcgattctacagtgattagggaggagggtatcgacgagctagctaagatttgtggcgttgaggacgccgtgagcgaaatgactaggcgcgcaatgggaggagccgtaccctttaaagccgctctgacggagcggttggccctgatccagccgtctcgagagcaggtacagcgcttaatcgccgaacaaccacctcatctgactccgggtatcagggaactggtatctcgcctccaggagaggaatgtacaggtcttcctgatttcgggcggttttaggtccatcgttgagcacgtggccagcaagcttaacattcctgccacaaacgtctttgccaaccgccttaagttctactttaacggggaatatgccggatttgatgagacgcagcctacggctgaaagcggaggaaaaggcaaagtgataaaattgctgaaagaaaagttccatttcaaaaaaattatcatgataggagacggggcaactgacatggaagcatgtccccctgcagacgcatttattggcttcggaggtaatgtcataaggcagcaggtgaaggataacgctaagtggtacatcacggatttcgtggagctgctgggtgaactagaagaatag

SEQ ID NO: 306159 - protein, 46 aa, Artificial Sequence
  derived and/or modified sequence
MVSHSELRKLFYSADAVCFDVDSTVIREEGIDELAKICGVEDAVSE

SEQ ID NO: 306160 - DNA, 141 bp, Artificial Sequence
  derived and/or modified sequence
atggtgagccacagcgagctgagaaagctgttctacagcgccgacgccgtgtgcttcgacgtggacagcaccgtgatcagagaggagggcatcgacgagctggccaagatctgcggcgtggaggacgccgtgagcgagtag

SEQ ID NO: 306161 - DNA, 141 bp, Artificial Sequence
  derived and/or modified sequence
atggtatctcatagcgaactgcggaagcttttctactccgccgacgctgtatgtttcgatgttgatagcacagtcatccgtgaagaaggcatcgatgagctagccaaaatctgtggggtcgaagacgctgtctctgagtag

SEQ ID NO: 306162 - DNA, 141 bp, Artificial Sequence
  derived and/or modified sequence
atggtatcgcatagtgagctccggaaacttttctactctgcagatgcagtctgcttcgacgtggatagcacagtcattcgcgaagagggcatcgatgaacttgcgaaaatctgtggtgttgaggatgctgtttcagagtag

SEQ ID NO: 306163 - DNA, 141 bp, Artificial Sequence
  derived and/or modified sequence
atggtgagccacagcgagctgaggaagctgttctacagcgcagatgctgtgtgctttgatgtggacagcaccgtcatccgggaggagggcattgatgagctggccaagatctgtggggtggaggatgctgtgtctgagtag

SEQ ID NO: 306164 - DNA, 141 bp, Artificial Sequence
  derived and/or modified sequence
atggtgagccacagcgagctgcggaagctgttctacagcgccgacgcggtgtgcttcgacgtggacagcactgtcattcgcgaagaaggcatagatgaactggctaagatctgtggcgtggaagacgctgtgagtgaatag

SEQ ID NO: 306165 - DNA, 141 bp, Artificial Sequence
  derived and/or modified sequence
atggtgagccacagcgagctgcggaagctgttctacagcgccgacgctgtttgctttgatgtcgattctactgtgatcagggaggagggcatcgacgaactggcaaagatttgtggagtcgaggacgcagtgagtgaatag

SEQ ID NO: 306166 - DNA, 744 bp, Artificial Sequence
  derived and/or modified sequence
aagctgcaggactggtgcgatgggagttgagacgtaagaacctgcccgtccgtagggctctggatgctgctgaggcccgaggcccctatggcagatttgaaaattcacccttgtagagtcattcctgcctttgagcggactcccttttaagtttacagaagcacttgcagaactcatcagaagccaccccgcttatcagcagatctcaagagagcgttcggtggaggccctgggtctgcacagctcacctccctgggaactgctcgcccgagcgtcggagccggcgctggccccctgcagccggaaggttgcagccgcaggagccccggaggcccaggacacaggacagagtctcgttctgtcgcccaggctggagtgcagtggtgtgatctcggctcacttcaacctccgcctacagggttcaagggattctcctgcctcagcctcctgagtatctgggctcttgctcttgcagaatccacaggtctttcttgaggaaatctgtagacagaactttgtgctgcgtttttatctagggaaggaacagaagagtgtcgtctcctagaaatctagcactggagaaacgaggaaaattcttccagcgatggtctcccactcagagctgaggaagcttttctactcagcagatgctgtgtgttttgatgttgacagcacggtcatcagagaagaaggaatcgatgagctagccaaaatctgtggcgttgaggacgcggtgtcagaaat

SEQ ID NO: 306167 - DNA, 633 bp, Artificial Sequence
  derived and/or modified sequence
gatctcgcggtttgttccgtttcattggagcttcccggaccgtgtgctcgacggtgccctaggtgccgtggggccacacgcgagtctgataagcaccctcccccggaatcatgcggtgctgtgaggcctagcgaagatgaagatagaatgcaagtttacagaagcacttgcagaactcatcagaagccaccccgcttatcagcagatctcaagagagcgttcggtggaggccctgggtctgcacagctcacctccctgggaactgctcgcccgagcgtcggagccggcgctggccccctgcagccggaaggttgcagccgcaggagccccggaggcccaggacacagggctcttgctcttgcagaatccacaggtctttcttgaggaaatctgtagacagaactttgtgctgcgtttttatctagggaaggaacagaagagtgtcgtctcctagaaatctagcactggagaaacgaggaaaattcttccagcgatggtctcccactcagagctgaggaagcttttctactcagcagatgctgtgtgttttgatgttgacagcacggtcatcagagaagaaggaatcgatgagctagccaaaatctgtggcgttgaggacgcggtgtcagaaat

SEQ ID NO: 306168 - DNA, 141 bp, Artificial Sequence
  derived and/or modified sequence
atggtgagtcattccgaactccgaaaactgttctacagcgccgacgccgtgtgtttcgatgtggacagtactgttataagggaggagggaatagacgagctagctaagatctgcggggttgaggacgccgtatctgaatag

SEQ ID NO: 306169 - DNA, 141 bp, Artificial Sequence
  derived and/or modified sequence
atggtgagtcactcagagcttcgcaaacttttttattcggccgatgccgtgtgttttgatgtcgatagcactgtcattcgcgaggagggtattgacgagctggccaaaatctgcggcgtagaagacgcagttagcgagtag

SEQ ID NO: 306170 - protein, 296 aa, Artificial Sequence
  derived and/or modified sequence
MNAEPERKFGVVVVGVGRAGSVRMRDLRNPHPSSAFLNLIGFVSRRELGSIDGVQQISLEDALSSQEVEVAYICSESSSHEDYIRQFLNAGKHVLVEYPMTLSLAAAQELWELAEQKGKVLHEEHVELLMEEFAFLKKEVVGKDLLKGSLLFTAGPLEEERFGFPAFSGISRLTWLVSLFGELSLVSATLEERKEDQYMKMTVCLETEKKSPLSWIEEKGPGLKRNRYLSFHFKSGSLENVPNVGVNKNIFLKDQNIFVQKLLGQFSEKELAAEKKRILHCLGLAEEIQKYCCSRK

SEQ ID NO: 306171 - protein, 102 aa, Artificial Sequence
  derived and/or modified sequence
MNAEPERKFGVVVVGVGRAGSVRMRDLRNPHPSSAFLNLIGFVSRRELGSIDGVQQISLEDALSSQEVEVAYICSESSSHEDYIRQFLNAGKHVLVEYPMTL

SEQ ID NO: 306172 - DNA, 891 bp, Artificial Sequence
  derived and/or modified sequence
atgaacgccgagcccgaacggaagtttggggtcgttgtggtgggcgttggcagggccggcagcgttcggatgagggacctgcgcaacccccacccaagcagtgcttttcttaaccttatcggctttgtgtcaaggcgagaacttggatctatcgatggggtccaacagatctccttggaagacgctttgtcctcacaggaagtggaggtcgcatacatatgttcggagagcagttcccacgaggactatattcgtcagttcctgaacgctggaaagcacgtgttggtagaatacccaatgaccctctccctcgccgctgcacaagaactctgggaactggcggagcaaaagggtaaggtgttacacgaggagcatgttgaactgttaatggaggaatttgccttcctgaaaaaggaagtagtaggcaaagatctcctcaagggctctttactgtttacagccggacccttggaggaagaacgattcggcttccctgccttttccggaatctcaaggctgacctggctggtgtccctctttggagaattgagcctcgtctctgcaactctagaggaacggaaagaagaccagtatatgaagatgactgtgtgcttggagacggaaaagaaaagccctctcagttggatcgaggaaaagggccctggcttaaagcgcaacaggtacctaagcttccactttaaatcgggtagcttagaaaatgtcccaaatgttggagtgaacaagaatatcttcctgaaggaccagaatatctttgtgcaaaagcttctgggacagttctctgagaaggagcttgccgctgagaaaaaacgcattcttcactgcctgggattggccgaagaaatccagaaatattgctgcagccgtaagtag

SEQ ID NO: 306173 - DNA, 891 bp, Artificial Sequence
  derived and/or modified sequence
atgaatgccgagcctgagcggaaattcggggtcgtggtggtgggtgtggggcgtgccggttctgtccggatgagggatctccggaatccccatcccagctctgcctttctgaatctgattggatttgtcagccgccgagagttgggatccatcgacggggttcagcaaatcagtctggaggacgctctgagctctcaagaagtggaagtcgcttatatttgctcagagtcgtcgagccacgaagactacataaggcagttcctgaatgccgggaagcatgtgctggttgaataccctatgacactgagcttagccgccgcccaggagttgtgggagttggccgagcagaaggggaaggtgctgcacgaggagcacgtggagctgcttatggaggaattcgctttccttaaaaaggaagtggtgggcaaggatttgctcaagggatcacttttatttactgccggaccgctggaagaagagcgatttggttttcccgccttctctggtattagtcgactcacatggttagtgtcgctcttcggcgagctctcactggtctctgctacattggaagagaggaaggaggatcaatacatgaagatgaccgtgtgtctggaaacagagaagaaatctccactgagctggatcgaggagaaagggcctggtctgaagcgtaaccgttacctgagcttccactttaagtcgggttcactagagaatgttccgaacgtcggcgttaataagaatatcttcctgaaggaccaaaacatcttcgtgcagaagctcctcggccagttctccgagaaagaactcgccgcagagaagaagaggattttgcactgcctagggttagctgaagagatccagaaatactgctgctctagaaaatag

SEQ ID NO: 306174 - DNA, 309 bp, Artificial Sequence
  derived and/or modified sequence
atgaacgccgagcctgagaggaaattcggcgtggtagtagtgggtgtgggcagggctggctctgtccgtatgcgggacttacgaaatccccacccctccagtgccttcttaaacctgatcggatttgtctccaggcgggaactgggctccattgatggggtgcagcaaattagtttggaagatgcattgtcttcccaggaagtcgaggtagcgtatatctgtagtgagtcctcttctcacgaggactatatcaggcagttcctcaacgcagggaaacatgttttagttgaatatcccatgaccttatag

SEQ ID NO: 306175 - DNA, 891 bp, Artificial Sequence
  derived and/or modified sequence
atgaatgctgagcctgagaggaagtttggagtggtggtggtgggcgtgggccgggccggctctgtgaggatgagggacctgaggaacccccaccccagcagcgccttcctgaacctgattggatttgtgtccagaagagagctgggcagcattgatggagtgcagcagatcagcctggaggatgccctgagcagccaggaggtggaggtggcctacatctgcagcgagagcagcagccatgaggactacatccggcagttcctgaatgctgggaagcacgtgctggtggagtaccccatgaccctgagcctggccgccgcccaggagctgtgggagctggccgagcagaagggcaaggtgctgcacgaggagcacgtggagctgctgatggaggagtttgccttcctgaagaaggaggtggtgggcaaggacctgctgaagggcagcctgctcttcaccgctggccccctggaggaggagcgcttcggcttccctgccttcagcggcatcagccggctgacctggctggtgtccctgtttggagagctgagcctggtgtctgccaccctggaggagaggaaagaagaccagtacatgaagatgacagtgtgcctggagacagagaagaagagccccctgtcctggattgaggagaagggccctggcctgaagaggaaccgctacctgtccttccacttcaagagcggcagcctggagaatgtgcccaacgtgggcgtgaacaagaacatcttcctgaaggaccagaacatctttgtgcagaagctgctgggccagttcagcgagaaggagctggccgctgagaagaagaggatcctgcactgcctgggcctggccgaggagatccagaagtactgctgcagcaggaagtag

SEQ ID NO: 306176 - DNA, 309 bp, Artificial Sequence
  derived and/or modified sequence
atgaatgctgagcctgagaggaagtttggagtggtggtggtgggcgtgggccgggccggctctgtgaggatgagggacctgaggaacccccaccccagcagcgccttcctgaacctgattggatttgtgtccagaagagagctgggcagcattgatggagtgcagcagatcagcctggaggatgccctgagcagccaggaggtggaggtggcctacatctgcagcgagagcagcagccatgaggactacatccggcagttcctgaatgctgggaagcacgtgctggtggagtaccccatgaccctgtag

SEQ ID NO: 306177 - DNA, 891 bp, Artificial Sequence
  derived and/or modified sequence
atgaacgccgagcccgagcggaagttcggcgtggtggtggtgggcgtcggccgggccggatcagtacgcatgagggacttgaggaatccccacccttctagcgcctttctgaatctgatcggatttgtgagcaggcgtgagctgggttccatagacggggtgcaacagatatccctcgaggatgcactgtccagccaagaagtcgaggtagcgtatatctgtagtgagtctagttcccatgaggactatatcaggcagtttttgaatgccgggaagcatgtgctggtggagtaccctatgactctatcccttgccgcggcacaggagctttgggagctcgcggagcagaaaggaaaagtgctgcacgaagagcatgtcgaactgctgatggaggagttcgcctttttaaagaaagaagtcgtcggtaaggacttgttaaaaggctctctgctgtttaccgccggaccactcgaagaggagaggtttgggtttcccgctttttctggcatatcccgactcacatggttggtttctctctttggggagctcagcctagtttctgcaactttggaggagcggaaggaagatcaatacatgaagatgaccgtctgcctggaaacggagaagaaaagtccgctctcctggatcgaggaaaaaggacccggcctaaaaaggaaccggtatctctcattccattttaaatccggctccctagagaacgttcccaacgtgggtgtgaacaagaatatcttccttaaggaccaaaatatctttgtccagaagctgctcggacagttcagcgagaaggagctggccgctgagaaaaaaaggatcctccattgtctcgggctggcggaggagatccagaaatattgttgctcccggaaatag

SEQ ID NO: 306178 - DNA, 891 bp, Artificial Sequence
  derived and/or modified sequence
atgaacgccgagcccgagcggaagttcggcgtggtggtggtgggcgtgggtagagccggctcagtgcgaatgcgggatctgcgtaatccccaccccagcagcgcattcctcaacctgatcggctttgtctcccggcgcgagctcggaagtatcgatggcgtacagcaaattagcttagaggacgcattatcctcgcaggaggtcgaggttgcctacatctgcagtgagtcttcatcccacgaggattatatcaggcaatttcttaatgcggggaaacatgtcctcgttgagtaccctatgactctcagtttggcagcggcccaggagctgtgggagttggccgagcagaaagggaaggtgttgcacgaggagcatgtggagctattgatggaagagttcgccttcctgaagaaggaagtggtcggaaaagatctgctcaaggggtctctgctgtttaccgcaggcccgcttgaggaggaacgttttggttttcccgccttttccggtatctcaagacttacatggctggtgtccctgtttggtgagttgtcacttgttagcgccaccttagaagaaagaaaagaagaccaatatatgaagatgacggtctgtctagagaccgagaaaaagtctcctctttcttggatcgaagaaaaggggcccgggctcaagcgtaaccgctatctctctttccacttcaaaagcgggagcctggagaatgtgcccaacgtgggagtgaacaaaaatattttcttgaaagaccagaatattttcgtgcagaaacttctgggccagttttcagagaaagaattggccgctgagaagaaaaggattctgcattgcttgggactggccgaagagattcagaagtattgctgctcccggaagtag

SEQ ID NO: 306179 - DNA, 309 bp, Artificial Sequence
  derived and/or modified sequence
atgaacgccgagcccgagcggaagttcggcgtggtggtggtgggcgtaggacgcgctgggtctgtgcgcatgcgtgatttgcgaaacccacatccttccagtgccttcctcaatctcatcggctttgtctctcggcgcgaactcggaagcattgacggcgtgcagcagatttcactcgaagatgccctctcttcccaggaggttgaggtggcttatatctgctctgagtcatcaagtcacgaggactatatcagacaatttttgaatgccggcaagcatgtgttagtcgagtaccccatgacactctag

SEQ ID NO: 306180 - DNA, 891 bp, Artificial Sequence
  derived and/or modified sequence
atgaatgccgaacctgagcgcaagtttggcgtcgtggtcgtgggagtgggccgtgcgggttccgtgcggatgcgggatctgcgcaaccctcatccctcctccgccttcctgaacttgatcggttttgtctcccgcagagaattgggcagtatcgatggggtccagcaaattagcttagaagacgcactatcttctcaagaagttgaagtggcatacatctgctcagagagtagttctcacgaggactatattcgtcagtttcttaacgctggcaagcacgtgctggtggagtatcctatgactctgtccttggcagcagctcaagaattgtgggagctcgcggagcaaaagggaaaggtgctacatgaagagcacgttgagctcctcatggaagaattcgcatttttaaagaaagaggttgtgggcaaggacctcttgaaggggtcgctcttgtttaccgcgggacctctggaagaggaaaggttcggtttccccgctttctccggcattagccggctcacatggttagtgagcctgtttggggaactgtccctggtatcagccacactggaggaacggaaagaggaccaatacatgaagatgactgtgtgtctggagaccgagaagaagtcccccctgagttggattgaagaaaaaggacccggactgaaaaggaaccgttatctctctttccattttaagagcggcagcttggagaatgtcccaaatgtcggagtcaacaaaaatattttcctgaaagatcaaaatattttcgtgcagaaactcctgggccagttcagcgagaaggagcttgccgctgagaagaaacgcattctgcattgtttgggcctagctgaagagatacagaaatattgctgttctagaaaatag

SEQ ID NO: 306181 - DNA, 891 bp, Artificial Sequence
  derived and/or modified sequence
atgaatgctgagcccgagagaaagttcggggtcgttgtcgtgggcgtgggcagagccggatcagtcagaatgagggaccttcggaaccctcacccttctagcgcctttctcaaccttatcggatttgtgtctcgtagagagctgggttccatagatggagttcagcagatcagtctggaggacgcgctatccagtcaagaggtcgaggttgcttatatctgcagtgaatcttccagtcacgaggattatattcggcagttcctcaacgctggaaaacatgtcctggtggaatacccaatgacactatctctcgcggcagcacaggagctgtgggagctggcagaacagaagggaaaggtgctgcacgaggagcacgtggaattattgatggaagaattcgcgttcctgaagaaggaggtcgtaggaaaggaccttctgaagggatcccttctcttcacagccggtcctctagaagaggagcgcttcggattccccgcatttagcggtatctctaggctcacgtggctagtgtcgttgttcggcgaactttctctggtcagcgctaccttagaggagagaaaggaagaccagtatatgaaaatgaccgtttgtctggagaccgaaaagaagtctcctctgagttggattgaggagaaagggcctggattaaaacgaaacaggtatcttagctttcattttaaaagcggctcactggagaacgtgccaaacgtaggagtgaataagaatatcttcctgaaggaccaaaacatctttgtccagaagctgctcggccaattctctgagaaggagctggctgctgaaaagaagaggatcttacactgccttgggctcgctgaagaaatccaaaagtattgctgttctcgcaaatag

SEQ ID NO: 306182 - DNA, 309 bp, Artificial Sequence
  derived and/or modified sequence
atgaatgcagagcctgagcgcaagttcggggtcgtggtcgtgggcgtggggcgagcaggttcagtgaggatgcgggatctgaggaaccctcatccctcttctgcctttctcaatcttatcggcttcgttagtcgcagggaactggggagtattgatggcgtccagcagatcagtctcgaggatgccctgtcttcccaagaggtcgaagtggcatacatctgcagtgagtcctcatcacacgaagactacattcgacagttcttgaacgcaggcaagcacgtgcttgttgagtacccgatgactctctag

SEQ ID NO: 306183 - DNA, 1071 bp, Artificial Sequence
  derived and/or modified sequence
ggtccgcaaagccggtggcgcccggaggctgcacggagagcggtgcccgcgtcagtgaccgaaggaagagaccaagatgaatgcagagcccgagaggaagtttggcgtggtggtggttggtgttggccgagccggctccgtgcggatgagggacttgcggaatccacacccttcctcagcgttcctgaacctgattggcttcgtgtcgagaagggagctcgggagcattgatggagtccagcagatttctttggaggatgctctttccagccaagaggtggaggtcgcctatatctgcagtgagagctccagccatgaggactacatcaggcagttccttaatgctggcaagcacgtccttgtggaataccccatgacactgtcattggcggccgctcaggaactgtgggagctggctgagcagaaaggaaaagtcttgcacgaggagcatgttgaactcttgatggaggaattcgctttcctgaaaaaagaagtggtggggaaagacctgctgaaagggtcgctcctcttcacagctggcccgttggaagaagagcggtttggcttccctgcattcagcggcatctctcgcctgacctggctggtctccctctttggggagctttctcttgtgtctgccactttggaagagcgaaaggaagatcagtatatgaaaatgacagtgtgtctggagacagagaagaaaagtccactgtcatggattgaagaaaaaggacctggtctaaaacgaaacagatatttaagcttccatttcaagtctgggtccttggagaatgtgccaaatgtaggagtgaataagaacatatttctgaaagatcaaaatatatttgtccagaaactcttgggccagttctctgagaaggaactggctgctgaaaagaaacgcatcctgcactgcctggggcttgcagaagaaatccagaaatattgctgttcaaggaagtaagaggaggaggtgatgtagcacttccaagatggcaccagcatttggttcttctcaagagttgaccattatctctattcttaaaattaaacatgttggggaaacaa

SEQ ID NO: 306184 - DNA, 1159 bp, Artificial Sequence
  derived and/or modified sequence
aaagccggtggcgcccggaggctgcacggagagcggtgcccgcgtcagagcctcgccctgtcaccaggctggagtacagtggcgcgatctcggctcactgcaacttccacctgctgggttcaagcaattcttctgacctcagtgaccgaaggaagagaccaagatgaatgcagagcccgagaggaagtttggcgtggtggtggttggtgttggccgagccggctccgtgcggatgagggacttgcggaatccacacccttcctcagcgttcctgaacctgattggcttcgtgtcgagaagggagctcgggagcattgatggagtccagcagatttctttggaggatgctctttccagccaagaggtggaggtcgcctatatctgcagtgagagctccagccatgaggactacatcaggcagttccttaatgctggcaagcacgtccttgtggaataccccatgacactgtcattggcggccgctcaggaactgtgggagctggctgagcagaaaggaaaagtcttgcacgaggagcatgttgaactcttgatggaggaattcgctttcctgaaaaaagaagtggtggggaaagacctgctgaaagggtcgctcctcttcacagctggcccgttggaagaagagcggtttggcttccctgcattcagcggcatctctcgcctgacctggctggtctccctctttggggagctttctcttgtgtctgccactttggaagagcgaaaggaagatcagtatatgaaaatgacagtgtgtctggagacagagaagaaaagtccactgtcatggattgaagaaaaaggacctggtctaaaacgaaacagatatttaagcttccatttcaagtctgggtccttggagaatgtgccaaatgtaggagtgaataagaacatatttctgaaagatcaaaatatatttgtccagaaactcttgggccagttctctgagaaggaactggctgctgaaaagaaacgcatcctgcactgcctggggcttgcagaagaaatccagaaatattgctgttcaaggaagtaagaggaggaggtgatgtagcacttccaagatggcaccagcatttggttcttctcaagagttgaccattatctctattcttaaaattaaacatgttggggaaacaag

SEQ ID NO: 306185 - DNA, 443 bp, Artificial Sequence
  derived and/or modified sequence
ttgtgcctgtgtacgcagttcctgtagcactcggctgggcagaaatcatctttcagcactaagggaacatagttatgatctggaccttctgggagtggtcagtgcccaagaacagtgaccgaaggaagagaccaagatgaatgcagagcccgagaggaagtttggcgtggtggtggttggtgttggccgagccggctccgtgcggatgagggacttgcggaatccacacccttcctcagcgttcctgaacctgattggcttcgtgtcgagaagggagctcgggagcattgatggagtccagcagatttctttggaggatgctctttccagccaagaggtggaggtcgcctatatctgcagtgagagctccagccatgaggactacatcaggcagttccttaatgctggcaagcacgtccttgtggaataccccatgacactgt

SEQ ID NO: 306186 - DNA, 891 bp, Artificial Sequence
  derived and/or modified sequence
atgaacgccgagcccgagagaaagttcggcgtggtggtggtgggcgtgggcagagccggcagcgtgagaatgagagacctgagaaacccccaccccagcagcgccttcctgaacctgatcggcttcgtgagcagaagagagctgggcagcatcgacggcgtgcagcagatcagcctggaggacgccctgagcagccaggaggtggaggtggcctacatctgcagcgagagcagcagccacgaggactacatcagacagttcctgaacgccggcaagcacgtgctggtggagtaccccatgaccctgagcctggccgccgcccaggagctgtgggagctggccgagcagaagggcaaggtgctgcacgaggagcacgtggagctgctgatggaggagttcgccttcctgaagaaggaggtggtgggcaaggacctgctgaagggcagcctgctgttcaccgccggccccctggaggaggagagattcggcttccccgccttcagcggcatcagcagactgacctggctggtgagcctgttcggcgagctgagcctggtgagcgccaccctggaggagagaaaggaggaccagtacatgaagatgaccgtgtgcctggagaccgagaagaagagccccctgagctggatcgaggagaagggccccggcctgaagagaaacagatacctgagcttccacttcaagagcggcagcctggagaacgtgcccaacgtgggcgtgaacaagaacatcttcctgaaggaccagaacatcttcgtgcagaagctgctgggccagttcagcgagaaggagctggccgccgagaagaagagaatcctgcactgcctgggcctggccgaggagatccagaagtactgctgcagcagaaagtag

SEQ ID NO: 306187 - DNA, 309 bp, Artificial Sequence
  derived and/or modified sequence
atgaacgccgagcccgagagaaagttcggcgtggtggtggtgggcgtgggcagagccggcagcgtgagaatgagagacctgagaaacccccaccccagcagcgccttcctgaacctgatcggcttcgtgagcagaagagagctgggcagcatcgacggcgtgcagcagatcagcctggaggacgccctgagcagccaggaggtggaggtggcctacatctgcagcgagagcagcagccacgaggactacatcagacagttcctgaacgccggcaagcacgtgctggtggagtaccccatgaccctgtag

SEQ ID NO: 306188 - DNA, 327 bp, Artificial Sequence
  derived and/or modified sequence
atggaggagggccacggcctggacctgacctacatcaccgagagaatcatcgccgtgagcttccccgccggctgcagcgaggagagctacctgcacaacctgcaggaggtgaccagaatgctgaagagcaagcacggcgacaactacctggtgctgaacctgagcgagaagagatacgacctgaccaagctgaaccccaagatcatggacgtgggctggcccgagctgcacgccccccccctggacaagatgtgcaccatctgcaaggcccaggagagctggctgaacagcaacctgcagcacgtggtggtgatccactgcagatag

SEQ ID NO: 306189 - DNA, 327 bp, Artificial Sequence
  derived and/or modified sequence
atggaagaagggcatggactcgatctgacctacattactgaaaggattatcgctgttagttttcccgcagggtgctccgaggagtcctacctccataatctgcaggaagtgaccaggatgctcaaatccaagcatggtgacaattacctcgtgttgaaccttagcgagaaacgctatgacctgacaaagttaaatcccaagattatggatgtgggatggcccgaattacatgcaccaccgctggacaagatgtgtactatatgtaaggctcaggaatcctggcttaacagcaacctgcagcatgtagtggtgattcattgcagatag

SEQ ID NO: 306190 - DNA, 327 bp, Artificial Sequence
  derived and/or modified sequence
atggaggagggccacggcctggacctgacctacatcacagagcgcatcatcgctgtgtccttccctgctggctgcagcgaggagagctacctgcacaacctgcaggaggtgaccaggatgctgaagagcaagcatggagacaactacctggtgctgaacctgtctgagaagagatatgacctgaccaagctgaaccccaagatcatggatgtgggctggccagagctgcacgccccacccctggacaagatgtgcaccatctgcaaggcccaggagagctggctgaacagcaacctgcagcacgtggtggtgatccactgcaggtag

SEQ ID NO: 306191 - DNA, 327 bp, Artificial Sequence
  derived and/or modified sequence
atggaggagggccacggcctggacctgacctacatcaccgagcggatcattgctgtgtctttccccgctggctgcagcgaagaaagctatctgcacaatctgcaggaggtgacacgtatgcttaaatctaaacacggggacaattatctcgtgcttaatctgtccgagaagcgttatgatttgacaaagctaaaccctaagatcatggatgtgggatggcctgagctgcacgcccccccattagacaagatgtgtaccatatgcaaggcgcaggaatcctggctgaatagcaacttgcagcacgtcgttgtgattcattgccggtag

SEQ ID NO: 306192 - DNA, 327 bp, Artificial Sequence
  derived and/or modified sequence
atggaggagggtcacggcctggacctgacttacattaccgagaggattattgctgtatcgtttcccgctggatgcagcgaggagtcatacctccataacttacaagaggtaacacgcatgctgaaaagcaaacacggggacaactatctggtgctcaacctctcggaaaaacggtatgacctgacaaagctgaaccccaaaatcatggatgtgggctggccggaactgcacgcacccccactcgacaagatgtgcactatttgcaaagcccaggagagctggctaaactctaatctccagcatgtggtggtgatccactgtcgctag

SEQ ID NO: 306193 - DNA, 7625 bp, Artificial Sequence
  derived and/or modified sequence
agaatgggaaactgccttgggagaagccccaagtgagcccaagggcgcagagcagaaggaccctggagtgtaagagcctagattgcaagcctggcaggaggagccggaagaattaacctcgagtctgcacgcttttaagaacaaggcctttaaaaaatccaaagtgtgtggagtttgcaaacaaattattgacggtcaaggtatttcatgccgagcctgcaagtattcctgccacaagaaatgtgaagccaaggtggtgattccctgcggtgtgcaagtccgactggaacaggctccagggagttccacgctgtccagttctctctgccgtgataaacctctgcggcccgtcatcctgagtcccaccatggaggagggccatgggctggacctcacttacatcacggagcgcatcatcgctgtgtccttccctgccggctgctctgaggagtcctacctgcacaacctacaggaggtcacgcgcatgctcaagtccaagcacggggacaactacctggtattaaacctttcagaaaagagatatgaccttacgaagcttaacccaaagatcatggatgtgggctggccagagctccacgcaccgcccctggataagatgtgtaccatatgcaaggcgcaggagtcctggctgaacagcaacctccagcatgtggtcgtcattcactgcaggggcgggaaaggacgcataggagtggtcatatcatcctacatgcatttcaccaacgtctcagccagcgccgaccaggcccttgacaggtttgcaatgaagaagttttatgatgacaaagtttcagctttaatgcagccttcccaaaaacggtatgttcagttcctcagtgggctcctgtccggatcggtgaaaatgaatgcctctcccctgttcctgcattttgtcatcctccacggcacccccaacttcgacacaggtggagtgtgccggccctttctgaagctctaccaagccatgcagcctgtgtacacctccgggatctacaacgttggcccagaaaaccccagcaggatctgcatcgtcatcgagccggcccagcttctgaagggagatgtcatggtgaaatgctaccacaagaaataccgctcggccacccgtgacgtcattttccgcctgcagtttcacactggggctgtgcagggctacgggctggtgtttgggaaggaggatctggacaatgccagcaaagatgaccgttttcctgactatgggaaggttgaattagtcttctctgccacgcctgagaagattcaagggtccgaacacttgtacaacgaccacggtgtgattgtggactacaacacaacagacccactgatacgctgggactcgtacgagaacctcagtgcagatggagaagtgctacacacgcagggccctgtcgatggcagcctttacgcgaaggtgaggaagaaaagctcctcggatcctggcatcccaggtggcccccaggcaatcccggccaccaacagcccagaccacagtgaccacaccttgtctgtcagcagtgactccggccactctacagcctctgccaggacggataagacggaagagcgcctggccccaggaaccaggaggggcctgagtgcccaggagaaggcagagttggaccagctgctcagtggctttggcctggaagatcctggaagctccctcaaggaaatgactgatgctcgaagcaagtacagtgggacccgccacgtggtgccagcccaggttcacgtgaatggagacgctgctctgaaggatcgggagacagacattctggatgacgagatgccccaccacgacctgcacagtgtggacagccttgggaccctgtcctcctcggaagggcctcagtcggcccacctgggtcccttcacctgccacaagagcagccagaactcactcctatctgacggttttggcagcaacgttggtgaagatccgcagggcaccctcgttccggacctgggccttggcatggacggcccctatgagcgggagcggacttttgggagtcgagagcccaagcagccccagcccctgctgagaaagccctcagtgtccgcccagatgcaggcctatgggcagagcagctactccacacagacctgggtgcgccagcagcagatggttgtagctcaccagtatagcttcgccccagatggggaggcccggctggtgagccgctgccctgcagacaatcctggcctcgtccaggcccagcccagagtgccactcacccccacccgagggaccagcagtagggtggctgtccagaggggtgtaggcagtgggccacatccccctgacacacagcagccctctcccagcaaagcgttcaaacccaggtttccaggagaccaggttgtgaatggagccggcccagagctgagcacaggcccctccccaggctcgcccaccctggacatcgaccagtccatcgagcagctcaacaggctgatcctggagctggatcccaccttcgagcccatccctacccacatgaacgccctcggtagccaggccaatggctctgtgtctccagacagcgtgggaggtgggctccgggcaagcagcaggctgcctgacacaggagagggccccagcagggccaccgggcggcaaggctcctctgctgaacagcccctgggcgggagactcaggaagctgagcctggggcagtacgacaacgatgctggggggcagctgcccttctccaaatgtgcatggggaaaggctggtgtggactatgccccaaacctgccgccattcccctcaccagcggacgtcaaagagacgatgacccctggctatccccaggacctcgatattatcgatggcagaattttaagtagcaaggagtccatgtgttcaactccagcatttcctgtgtctccagagacaccgtatgtgaaaacagcgctgcgccatcctccgttcagcccacctgagcccccgctgagcagcccagccagtcagcacaaaggaggacgtgaaccacgaagctgccctgagacgctcactcacgctgtggggatgtcagagagccccatcggacccaaatccacgatgctccgggctgatgcgtcctcgacgccctcctttcagcaggcttttgcttcttcctgcaccatttccagcaacggccctgggcagaggagagagagctcctcttctgcagaacgccagtgggtggagagcagccccaagcccatggtttccctgctggggagcggccggcccaccggaagtcccctcagcgctgagttctccggtaccaggaaggactccccagtgctgtcctgcttcccgccgtcagagctccaggctcctttccacagccatgagctgtccctagcagagccaccggactccctggcgcctcccagcagccaggccttcctgggcttcggcaccgccccagtgggaagtggccttccgcccgaggaggacctgggggccttgctggccaattctcatggagcgtcaccgacccccagcatcccgctgacagcgacaggggctgccgacaatggcttcctgtcccacaactttctcacggtggcgcctggacacagcagccaccacagtccaggcctgcagggccagggtgtgaccctgcccgggcagccacccctccctgagaagaagcgggcctcggagggggatcgttctttgggctcagtctctccctcctccagtggcttctccagcccgcacagcgggagcaccatcagtatccccttcccaaatgtccttcccgacttttccaaggcttcagaagcggcctcacctctgccagatagtccaggtgataaacttgtgatcgtgaaatttgttcaagacacttccaagttctggtacaaggcggatatttcaagagaacaagccatcgccatgttgaaggacaaggagccgggctcattcattgttcgagacagccattccttccgaggggcctatggcctggccatgaaggtggccacgcccccaccttcagtcctgcagctgaacaagaaagctggagatttggccaatgaactcgtccggcactttttgatcgagtgtaccccgaagggagtgcggttgaaagggtgctcgaatgaaccatatttcgggagcctgacggccttggtgtgccagcattccatcacgcccttggccttgccgtgcaagctgcttatcccagagagagatccattggaggaaatagcagaaagttctccccagacggcagccaattcagcagctgagctgttgaagcagggggcagcctgcaatgtgtggtacttgaactctgtggagatggagtccctcaccggccaccaggcgatccagaaggccctgagcatcaccctggtccaggagcctccacctgtgtccacagttgtgcacttcaaggtgtcagcccagggcatcaccctgacagacaatcagaggaagctcttcttccggaggcattaccccgtgaacagtgtgattttctgtgccttggacccacaagacaggaagtggatcaaagatggcccttcctcaaaagtctttggatttgtggcccggaagcagggcagtgccacggataatgtgtgccacctgtttgcagagcatgaccctgagcagcctgccagtgccattgtcaacttcgtatcaaaggtcatgattggttccccaaagaaggtctgagaactcccctccctccctggacccaccgatgcctctcgaagccctggagacagccgttgggtgagggtggggcccccactttttaccaaactagtaaacctgacattccaggcccatgaggggaaagaggatcttccagctctgcaaaaacaagaacaaacaacatcaccgtgaattggcctttcctgaaagtgacttatctgacacatctctgtagccacatgctttttgggtagaagaagctgggcatgggtgcaccccaccccctagggtccccatgggaaagggacatgcaaggaaacagcacagaacacgaggtggtccccatgtccctggcacactagcattccgggggatgaggaatccccagcccttgaggcagaggtgccgagtgactgccatgcttcgcccgtccgcatgggcgcttctgtccagctgcacccgaggccgggggtttccctcacctcggtcttcccaagatggagatgctaacgaaactgagaagggggcgtatgtttgacgaaggtttgtgcaagtcaggcccttctggaacacagcagggcctacaacgaggggcctttgcgatgggctgtgaggatgggggtggtgggaagaattggccacgttggagaccccatgccaccccaccatggtgagtgctctgtgcctcctgctcacctgtggtgagctgggcgagctgggcgagctgggcgagctgggctggggagagcctgtgaggaccgagaggagaaatgagaagaaggaacaaaaatattatttctatgtaatttatattttacttatgccaaattatttatgataatttgccattgctatactgtaccagtgtcaaatgctgcagcctgccaagctgtgattttgtgaggcttgtccctatgtaggatgcaccgcaggcccctggccactgaaagagtgtgcagtggactgtgggtctcccatatgcggtgccgcccaaaggtggctttgcctcaagcaacctaccctgatgttttactcattggaatgtttttccccgattgtggatgacttcttttctgatggagagagtccaggagggatggaaaactcctggatttaagctcagcatcccccacatgggcttttcgatcatcttcaggcctgaagctgcacgacctgaagttcgcctgcatttatcagccctctttgtgctgctccttgccaccttggggttcctgctggggaccatgtgtggttgtggcatgtgtgagcagaagggaggatgaggaaaaagagaagaaaccccggtactgacaagctgtttttgagtgccactgtttgccatcatctaagccactgaatcaagtgtatttcaggcttatttcaacattccaatgccctggttttcctgcttgaatctgttcgtggtcaaaggtttgggggaatttgtgaccctggaacatccccagagtgaaagatggagctgggccacatcagaataaggccttggccccatcctctcacagcctaggtgctctgcaggcatgctgactgtcctgattgcgatccagcccgaaattccctcctctgctttcaaaagtcaaatcccccattcttaggccacactggtgtcacaagctcctgtcagggagctggggtttgggaatgtgctttgtgaactctgctttaaagtgaggggccgaggaaaacttagaaacaggcagagttggaagcagccaaatcacagtgggtgttgtgtgtgtgtgcgtgtgtgcatgcgtgcgtgtatgcgtgtgtgaaagcaggtggaccattccactttttagctcctattgatgcaccaaaccaagtgcctcatttctgtgccaaatgtttgccttggtcgttgtggacctccttctctaacttgcggtggcatgactgtcaggaggtgctggcattttcagcagatcctcatgtgttgaccctgatgtctttagcagaggcctctagcatctcggtttttcatccactgcaggaatgtggccacagggagcagaggtttgtactttccccaagaggtcctcatcctgagacggtctctacccatgtttaacccaaagagtgcaggccaggttccttatccttctgatgaaggatgagagagctcatttagaagtcagagcaaactagggtctcagtattgagaaacgcagcctgccagggaatcacagagacatcggggtgcccgcgatggccctcatgaagccatgcctcgacggcattcaggaagccctgcaaacgtgctttttgaactcattggccaggtgtgatttttacacaaggtaaacgtggtcaagggcatcggggaatttgctccaagcagatagctccctctgaggaaccaaaggaagcaagtttccacgatttctgaagagctggtataggaagtttctttcttccttttgtgttacatgtgcattaaacagaacaagctgtgtgtcatcacagattgtactgtgggctcagaaaccgtgagagagcccccaccgtggacaccggctctagggccacaggaaaaggaacgtttccaggcattttgtctccagggctcccgctggacaggcacgtactgccctggggagtaaatgcggagagttcacgaactgtgcccaacgcatgttatagccagggtcctactaactactcagtaaaagaacgtattgttgtattcctccagtgttaagctatagccatgttaaaagtcactgtgcatttattctcagcatcaaataccttgtaacgtcttctctgccttgttagtgcatatttttacttttctgatactgtaaagaatatatccagtatgtaaatgaatgttctataaatcttttgtatagtcattttctctgctccttaaatatcatctctattcagagtataataaaattatgaacttggt

SEQ ID NO: 306194 - DNA, 1166 bp, Artificial Sequence
  derived and/or modified sequence
agaatgggaaactgccttgggagaagccccaagtgagcccaagggcgcagagcagaaggaccctggagtgtaagagcctagattgcaagcctggcaggaggagccggaagaattaacctcgagtctgcacgcttttaagaacaaggcctttaaaaaatccaaagtgtgtggagtttgcaaacaaattattgacggtcaaggtatttcatgccgagcctgcaagtattcctgccacaagaaatgtgaagccaaggtggtgattccctgcggtgtgcaagtccgactggaacaggctccagggagttccacgctgtccagttctctctgccgtgataaacctctgcggcccgtcatcctgagtcccaccatggaggagggccatgggctggacctcacttacatcacggagcgcatcatcgctgtgtccttccctgccggctgctctgaggagtcctacctgcacaacctacaggaggtcacgcgcatgctcaagtccaagcacggggacaactacctggtattaaacctttcagaaaagagatatgaccttacgaagcttaacccaaagatcatggatgtgggctggccagagctccacgcaccgcccctggataagatgtgtaccatatgcaaggcgcaggagtcctggctgaacagcaacctccagcatgtggtcgtcattcactgcaggggcgggaaaggacgcataggagtggtcatatcatcctacatgcatttcaccaacgtctcagccagcgccgaccaggcccttgacaggtttgcaatgaagaagttttatgatgacaaagtttcagctttaatgcagccttcccaaaaacggtatgttcagttcctcagtgggctcctgtccggatcggtgaaaatgaatgcctctcccctgttcctgcattttgtcatcctccacggcacccccaacttcgacacaggtggagtgtgccggccctttctgaagctctaccaagccatgcagcctgtgtacacctccgggatctacaacgttggcccagaaaaccccagcaggatctgcatcgtcatcgagccggcccagcttctgaagggagatgtcatggtcatgaattacaatattgcgaacatctgaagtcattttcagctccaagtgaagaaatcatggtgaaatgctacca

SEQ ID NO: 306195 - DNA, 1156 bp, Artificial Sequence
  derived and/or modified sequence
agaatgggaaactgccttgggagaagccccaagtgagcccaagggcgcagagcagaaggaccctggagtgtaagagcctagattgcaagcctggcaggaggagccggaagaattaacctcgagtctgcacgcttttaagaacaaggcctttaaaaaatccaaagtgtgtggagtttgcaaacaaattattgacggtcaaggtatttcatgccgagcctgcaagtattcctgccacaagaaatgtgaagccaaggtggtgattccctgcggtgtgcaagtccgactggaacaggctccagggagttccacgctgtccagttctctctgccgtgataaacctctgcggcccgtcatcctgagtcccaccatggaggagggccatgggctggacctcacttacatcacggagcgcatcatcgctgtgtccttccctgccggctgctctgaggagtcctacctgcacaacctacaggaggtcacgcgcatgctcaagtccaagcacggggacaactacctggtattaaacctttcagaaaagagatatgaccttacgaagcttaacccaaagatcatggatgtgggctggccagagctccacgcaccgcccctggataagatgtgtaccatatgcaaggcgcaggagtcctggctgaacagcaacctccagcatgtggtcgtcattcactgcaggggcgggaaaggacgcataggagtggtcatatcatcctacatgcatttcaccaacgtctcagccagcgccgaccaggcccttgacaggtttgcaatgaagaagttttatgatgacaaagtttcagctttaatgcagccttcccaaaaacggtatgttcagttcctcagtgggctcctgtccggatcggtgaaaatgaatgcctctcccctgttcctgcattttgtcatcctccacggcacccccaacttcgacacaggtggagtgtgccggccctttctgaagctctaccaagccatgcagcctgtgtacacctccgggatctacaacgttggcccagaaaaccccagcaggatctgcatcgtcatcgagccggcccagcttctgaagggagatgtcatggtcatgaattacaatattgcgaacatctgaagtcattttcagctccaagtgaagaaatcatggtta

SEQ ID NO: 306196 - DNA, 4759 bp, Artificial Sequence
  derived and/or modified sequence
agaatgggaaactgccttgggagaagccccaagtgagcccaagggcgcagagcagaaggaccctggagtgtaagagcctagattgcaagcctggcaggaggagccggaagaattaacctcgagtctgcacgcttttaagaacaaggcctttaaaaaatccaaagtgtgtggagtttgcaaacaaattattgacggtcaaggtatttcatgccgagcctgcaagtattcctgccacaagaaatgtgaagccaaggtggtgattccctgcggtgtgcaagtccgactggaacaggctccagggagttccacgctgtccagttctctctgccgtgataaacctctgcggcccgtcatcctgagtcccaccatggaggagggccatgggctggacctcacttacatcacggagcgcatcatcgctgtgtccttccctgccggctgctctgaggagtcctacctgcacaacctacaggaggtcacgcgcatgctcaagtccaagcacggggacaactacctggtattaaacctttcagaaaagagatatgaccttacgaagcttaacccaaagatcatggatgtgggctggccagagctccacgcaccgcccctggataagatgtgtaccatatgcaaggcgcaggagtcctggctgaacagcaacctccagcatgtggtcgtcattcactgcaggggcgggaaaggacgcataggagtggtcatatcatcctacatgcatttcaccaacgtctcagccagcgccgaccaggcccttgacaggtttgcaatgaagaagttttatgatgacaaagtttcagctttaatgcagccttcccaaaaacggtatgttcagttcctcagtgggctcctgtccggatcggtgaaaatgaatgcctctcccctgttcctgcattttgtcatcctccacggcacccccaacttcgacacaggtggagtgtgccggccctttctgaagctctaccaagccatgcagcctgtgtacacctccgggatctacaacgttggcccagaaaaccccagcaggatctgcatcgtcatcgagccggcccagcttctgaagggagatgtcatggtgaaatgctaccacaagaaataccgctcggccacccgtgacgtcattttccgcctgcagtttcacactggggctgtgcagggctacgggctggtgtttgggaaggaggatctggacaatgccagcaaagatgaccgttttcctgactatgggaaggttgaattagtcttctctgccacgcctgagaagattcaagggtccgaacacttgtacaacgaccacggtgtgattgtggactacaacacaacagacccactgatacgctgggactcgtacgagaacctcagtgcagatggagaagtgctacacacgcagggccctgtcgatggcagcctttacgcgaaggtgaggaagaaaagctcctcggatcctggcatcccaggtggcccccaggcaatcccggccaccaacagcccagaccacagtgaccacaccttgtctgtcagcagtgactccggccactctacagcctctgccaggacggataagacggaagagcgcctggccccaggaaccaggaggggcctgagtgcccaggagaaggcagagttggaccagctgctcagtggctttggcctggaagatcctggaagctccctcaaggaaatgactgatgctcgaagcaagtacagtgggacccgccacgtggtgccagcccaggttcacgtgaatggagacgctgctctgaaggatcgggagacagacattctggatgacgagatgccccaccacgacctgcacagtgtggacagccttgggaccctgtcctcctcggaagggcctcagtcggcccacctgggtcccttcacctgccacaagagcagccagaactcactcctatctgacggttttggcagcaacgttggtgaagatccgcagggcaccctcgttccggacctgggccttggcatggacggcccctatgagcgggagcggacttttgggagtcgagagcccaagcagccccagcccctgctgagaaagccctcagtgtccgcccagatgcaggcctatgggcagagcagctactccacacagacctgggtgcgccagcagcagatggttgtagctcaccagtatagcttcgccccagatggggaggcccggctggtgagccgctgccctgcagacaatcctggcctcgtccaggcccagcccagagtgccactcacccccacccgagggaccagcagtagggtggctgtccagaggggtgtaggcagtgggccacatccccctgacacacagcagccctctcccagcaaagcgttcaaacccaggtttccaggagaccaggttgtgaatggagccggcccagagctgagcacaggcccctccccaggctcgcccaccctggacatcgaccagtccatcgagcagctcaacaggctgatcctggagctggatcccaccttcgagcccatccctacccacatgaacgccctcggtagccaggccaatggctctgtgtctccagacagcgtgggaggtgggctccgggcaagcagcaggctgcctgacacaggagagggccccagcagggccaccgggcggcaaggctcctctgctgaacagcccctgggcgggagactcaggaagctgagcctggggcagtacgacaacgatgctggggggcagctgcccttctccaaatgtgcatggggaaaggctggtgtggactatgccccaaacctgccgccattcccctcaccagcggacgtcaaagagacgatgacccctggctatccccaggacctcgatattatcgatggcagaattttaagtagcaaggagtccatgtgttcaactccagcatttcctgtgtctccagagacaccgtatgtgaaaacagcgctgcgccatcctccgttcagcccacctgagcccccgctgagcagcccagccagtcagcacaaaggaggacgtgaaccacgaagctgccctgagacgctcactcacgctgtggggatgtcagagagccccatcggacccaaatccacgatgctccgggctgatgcgtcctcgacgccctcctttcagcaggcttttgcttcttcctgcaccatttccagcaacggccctgggcagaggagagagagctcctcttctgcagaacgccagtgggtggagagcagccccaagcccatggtttccctgctggggagcggccggcccaccggaagtcccctcagcgctgagttctccggtaccaggaaggactccccagtgctgtcctgcttcccgccgtcagagctccaggctcctttccacagccatgagctgtccctagcagagccaccggactccctggcgcctcccagcagccaggccttcctgggcttcggcaccgccccagtgggaagtggccttccgcccgaggaggacctgggggccttgctggccaattctcatggagcgtcaccgacccccagcatcccgctgacagcgacaggggctgccgacaatggcttcctgtcccacaactttctcacggtggcgcctggacacagcagccaccacagtccaggcctgcagggccagggtgtgaccctgcccgggcagccacccctccctgagaagaagcgggcctcggagggggatcgttctttgggctcagtctctccctcctccagtggcttctccagcccgcacagcgggagcaccatcagtatccccttcccaaatgtccttcccgacttttccaaggcttcagaagcggcctcacctctgccagatagtccaggtgataaacttgtgatcgtgaaatttgttcaagacacttccaagttctggtacaaggcggatatttcaagagaacaagccatcgccatgttgaaggacaaggagccgggctcattcattgttcgagacagccattccttccgaggggcctatggcctggccatgaaggtggccacgcccccaccttcagtcctgcagctgaacaagaaagctggagatttggccaatgaactcgtccggcactttttgatcgagtgtaccccgaagggagtgcggttgaaagggtgctcgaatgaaccatatttcgggagcctgacggccttggtgtgccagcattccatcacgcccttggccttgccgtgcaagctgcttatcccagagagagatccattggaggaaatagcagaaagttctccccagacggcagccaattcagcagctgagctgttgaagcagggggcagcctgcaatgtgtggtacttgaactctgtggagatggagtccctcaccggccaccaggcgatccagaaggccctgagcatcaccctggtccaggagcctccacctgtgtccacagttgtgcacttcaaggtgtcagcccagggcatcaccctgacagacaatcagaggaagctcttcttccggaggcattaccccgtgaacagtgtgattttctgtgccttggacccacaagacaggaagtggatcaaagatggcccttcctcaaaagtctttggatttgtggcccggaagcagggcagtgccacggataatgtgtgccacctgtttgcagagcatgaccctgagcagcctgccagggaatcacagagacatcggggtgcccgcgatggccctcatgaagccatgcctcgacggcattcaggaagccctgcaaacgtgctttttgaactcattggccaggtgtga

SEQ ID NO: 306197 - protein, 1271 aa, Artificial Sequence
  derived and/or modified sequence
SQALNERMNWLCRNQDPNPPPQPEELTSSLHAFKNKAFKKSKVCGVCKQIIDGQGISCRACKYSCHKKCEAKVVIPCGVQVRLEQAPGSSTLSSSLCRDKPLRPVILSPTMEEGHGLDLTYITERIIAVSFPAGCSEESYLHNLQEVTRMLKSKHGDNYLVLNLSEKRYDLTKLNPKIMDVGWPELHAPPLDKMCTICKAQESWLNSNLQHVVVIHCRGGKGRIGVVISSYMHFTNVSASADQALDRFAMKKFYDDKVSALMQPSQKRYVQFLSGLLSGSVKMNASPLFLHFVILHGTPNFDTGGVCRPFLKLYQAMQPVYTSGIYNVGPENPSRICIVIEPAQLLKGDVMVKCYHKKYRSATRDVIFRLQFHTGAVQGYGLVFGKEDLDNASKDDRFPDYGKVELVFSATPEKIQGSEHLYNDHGVIVDYNTTDPLIRWDSYENLSADGEVLHTQGPVDGSLYAKVRKKSSSDPGIPGGPQAIPATNSPDHSDHTLSVSSDSGHSTASARTDKTEERLAPGTRRGLSAQEKAELDQLLSGFGLEDPGSSLKEMTDARSKYSGTRHVVPAQVHVNGDAALKDRETDILDDEMPHHDLHSVDSLGTLSSSEGPQSAHLGPFTCHKSSQNSLLSDGFGSNVGEDPQGTLVPDLGLGMDGPYERERTFGSREPKQPQPLLRKPSVSAQMQAYGQSSYSTQTWVRQQQMVVAHQYSFAPDGEARLVSRCPADNPGLVQAQPRVPLTPTRGTSSRVAVQRGVGSGPHPPDTQQPSPSKAFKPRFPGDQVVNGAGPELSTGPSPGSPTLDIDQSIEQLNRLILELDPTFEPIPTHMNALGSQANGSVSPDSVGGGLRASSRLPDTGEGPSRATGRQGSSAEQPLGGRLRKLSLGQYDNDAGGQLPFSKCAWGKAGVDYAPNLPPFPSPADVKETMTPGYPQDLDIIDGRILSSKESMCSTPAFPVSPETPYVKTALRHPPFSPPEPPLSSPASQHKGGREPRSCPETLTHAVGMSESPIGPKSTMLRADASSTPSFQQAFASSCTISSNGPGQRRESSSSAERQWVESSPKPMVSLLGSGRPTGSPLSAEFSGTRKDSPVLSCFPPSELQAPFHSHELSLAEPPDSLAPPSSQAFLGFGTAPVGSGLPPEEDLGALLANSHGASPTPSIPLTATGAADNGFLSHNFLTVAPGHSSHHSPGLQGQGVTLPGQPPLPEKKRASEGDRSLGSVSPSSSGFSSPHSGSTISIPFPNVLPDFSKASEAPTFYQTSKPDIPGP

SEQ ID NO: 306198 - DNA, 3816 bp, Artificial Sequence
  derived and/or modified sequence
agccaggccctgaacgagagaatgaactggctgtgcagaaaccaggaccccaacccccccccccagcccgaggagctgaccagcagcctgcacgccttcaagaacaaggccttcaagaagagcaaggtgtgcggcgtgtgcaagcagatcatcgacggccagggcatcagctgcagagcctgcaagtacagctgccacaagaagtgcgaggccaaggtggtgatcccctgcggcgtgcaggtgagactggagcaggcccccggcagcagcaccctgagcagcagcctgtgcagagacaagcccctgagacccgtgatcctgagccccaccatggaggagggccacggcctggacctgacctacatcaccgagagaatcatcgccgtgagcttccccgccggctgcagcgaggagagctacctgcacaacctgcaggaggtgaccagaatgctgaagagcaagcacggcgacaactacctggtgctgaacctgagcgagaagagatacgacctgaccaagctgaaccccaagatcatggacgtgggctggcccgagctgcacgccccccccctggacaagatgtgcaccatctgcaaggcccaggagagctggctgaacagcaacctgcagcacgtggtggtgatccactgcagaggcggcaagggcagaatcggcgtggtgatcagcagctacatgcacttcaccaacgtgagcgccagcgccgaccaggccctggacagattcgccatgaagaagttctacgacgacaaggtgagcgccctgatgcagcccagccagaagagatacgtgcagttcctgagcggcctgctgagcggcagcgtgaagatgaacgccagccccctgttcctgcacttcgtgatcctgcacggcacccccaacttcgacaccggcggcgtgtgcagacccttcctgaagctgtaccaggccatgcagcccgtgtacaccagcggcatctacaacgtgggccccgagaaccccagcagaatctgcatcgtgatcgagcccgcccagctgctgaagggcgacgtgatggtgaagtgctaccacaagaagtacagaagcgccaccagagacgtgatcttcagactgcagttccacaccggcgccgtgcagggctacggcctggtgttcggcaaggaggacctggacaacgccagcaaggacgacagattccccgactacggcaaggtggagctggtgttcagcgccacccccgagaagatccagggcagcgagcacctgtacaacgaccacggcgtgatcgtggactacaacaccaccgaccccctgatcagatgggacagctacgagaacctgagcgccgacggcgaggtgctgcacacccagggccccgtggacggcagcctgtacgccaaggtgagaaagaagagcagcagcgaccccggcatccccggcggcccccaggccatccccgccaccaacagccccgaccacagcgaccacaccctgagcgtgagcagcgacagcggccacagcaccgccagcgccagaaccgacaagaccgaggagagactggcccccggcaccagaagaggcctgagcgcccaggagaaggccgagctggaccagctgctgagcggcttcggcctggaggaccccggcagcagcctgaaggagatgaccgacgccagaagcaagtacagcggcaccagacacgtggtgcccgcccaggtgcacgtgaacggcgacgccgccctgaaggacagagagaccgacatcctggacgacgagatgccccaccacgacctgcacagcgtggacagcctgggcaccctgagcagcagcgagggcccccagagcgcccacctgggccccttcacctgccacaagagcagccagaacagcctgctgagcgacggcttcggcagcaacgtgggcgaggacccccagggcaccctggtgcccgacctgggcctgggcatggacggcccctacgagagagagagaaccttcggcagcagagagcccaagcagccccagcccctgctgagaaagcccagcgtgagcgcccagatgcaggcctacggccagagcagctacagcacccagacctgggtgagacagcagcagatggtggtggcccaccagtacagcttcgcccccgacggcgaggccagactggtgagcagatgccccgccgacaaccccggcctggtgcaggcccagcccagagtgcccctgacccccaccagaggcaccagcagcagagtggccgtgcagagaggcgtgggcagcggcccccacccccccgacacccagcagcccagccccagcaaggccttcaagcccagattccccggcgaccaggtggtgaacggcgccggccccgagctgagcaccggccccagccccggcagccccaccctggacatcgaccagagcatcgagcagctgaacagactgatcctggagctggaccccaccttcgagcccatccccacccacatgaacgccctgggcagccaggccaacggcagcgtgagccccgacagcgtgggcggcggcctgagagccagcagcagactgcccgacaccggcgagggccccagcagagccaccggcagacagggcagcagcgccgagcagcccctgggcggcagactgagaaagctgagcctgggccagtacgacaacgacgccggcggccagctgcccttcagcaagtgcgcctggggcaaggccggcgtggactacgcccccaacctgccccccttccccagccccgccgacgtgaaggagaccatgacccccggctacccccaggacctggacatcatcgacggcagaatcctgagcagcaaggagagcatgtgcagcacccccgccttccccgtgagccccgagaccccctacgtgaagaccgccctgagacacccccccttcagcccccccgagccccccctgagcagccccgccagccagcacaagggcggcagagagcccagaagctgccccgagaccctgacccacgccgtgggcatgagcgagagccccatcggccccaagagcaccatgctgagagccgacgccagcagcacccccagcttccagcaggccttcgccagcagctgcaccatcagcagcaacggccccggccagagaagagagagcagcagcagcgccgagagacagtgggtggagagcagccccaagcccatggtgagcctgctgggcagcggcagacccaccggcagccccctgagcgccgagttcagcggcaccagaaaggacagccccgtgctgagctgcttcccccccagcgagctgcaggcccccttccacagccacgagctgagcctggccgagccccccgacagcctggccccccccagcagccaggccttcctgggcttcggcaccgcccccgtgggcagcggcctgccccccgaggaggacctgggcgccctgctggccaacagccacggcgccagccccacccccagcatccccctgaccgccaccggcgccgccgacaacggcttcctgagccacaacttcctgaccgtggcccccggccacagcagccaccacagccccggcctgcagggccagggcgtgaccctgcccggccagccccccctgcccgagaagaagagagccagcgagggcgacagaagcctgggcagcgtgagccccagcagcagcggcttcagcagcccccacagcggcagcaccatcagcatccccttccccaacgtgctgcccgacttcagcaaggccagcgaggcccccaccttctaccagaccagcaagcccgacatccccggcccctag

SEQ ID NO: 306199 - DNA, 3816 bp, Artificial Sequence
  derived and/or modified sequence
agccaggcgctgaacgagcgtatgaattggctgtgcagaaatcaggatcctaacccgccaccccagcctgaggagctcacttcctccctgcatgcatttaaaaataaagctttcaagaaatctaaagtctgcggtgtttgcaagcagatcattgatggccaggggatttcatgcagggcgtgcaagtactcctgtcacaaaaagtgcgaggctaaggtggtgatcccctgtggagttcaggtgcgcctggagcaggcccccgggagtagcacactctctagttcattgtgcagggacaaacctctcaggcctgtgatcctgtccccgaccatggaggaaggacacggtctcgacctcacttacattacggaacgaattatagccgtcagctttcccgccggctgcagtgaggagagctatctgcataacctgcaagaggtcactcgtatgcttaagtccaagcacggtgacaattatctggtgttgaacctttccgagaagcggtacgacctgactaaactgaatcccaagatcatggacgtgggctggcccgaactgcacgcaccaccgcttgacaaaatgtgtacgatttgcaaggcgcaggaatcttggcttaactctaatcttcaacacgtcgttgttattcactgtaggggaggtaagggcaggattggggttgttatcagctcttatatgcactttactaacgtgagtgccagcgccgatcaggcacttgacaggtttgccatgaaaaaattctacgacgataaagtttctgctttgatgcaaccgtctcagaaaaggtacgtacaatttctttcaggtcttctttctggctccgtgaagatgaacgcatcccctcttttcctccactttgtcattctacatggcacccccaactttgacactggaggggtctgccgacccttcttgaaattgtaccaggccatgcagcccgtgtacacttccgggatctacaacgtggggccagaaaacccctcccggatctgtattgtgatcgagcccgcccagctgctgaagggtgacgttatggtgaagtgctaccacaaaaagtaccggagcgccactcgagatgtcatcttcagactgcagtttcacaccggggccgtgcaaggttacggactggtgttcggaaaggaggacctcgataatgcttctaaggacgaccgctttccggattacggtaaggtagagctggtgtttagtgctacccctgagaaaatccaggggtccgaacatctatataatgaccatggcgtgatcgtggactataataccaccgatcccctgattagatgggattcttacgagaatctttccgcagacggcgaggtgctgcatacccagggcccggttgacgggtccctatacgccaaggtgcggaagaagtcgtctagcgaccctggcatacccggagggccccaggctatcccagccaccaattccccggaccacagtgatcacacactctctgtcagcagcgactcaggacactctacagccagtgccagaacagacaagactgaagagcgtctagcccccggcacccgtagaggcctgagtgcccaggagaaggccgagctcgaccagctgttaagcggctttggactggaggatcctggcagctcattaaaggagatgactgacgcaagatctaagtatagcgggactcgacatgtggttccagctcaggtccacgtgaatggagatgctgctctcaaggatagggaaaccgacattctagacgacgaaatgccccaccatgatctgcattctgttgacagtttaggaacattatcatcatcggagggcccccagtccgcccatctcggacccttcacttgtcacaaatcttcacagaactctctgctttcagatgggtttggttctaatgtcggcgaagacccacagggcaccctcgtgcccgacctgggacttgggatggatggtccctatgagagggaacggacctttgggtcccgggagcctaaacagccccaacccctgctgcgtaagccatcagttagcgcccagatgcaggcatacggccagtcttcttactcaacgcagacctgggttcggcaacaacaaatggtagtggcccaccagtactcctttgcccccgacggcgaggctcggctggtgtcaaggtgtcccgcggacaaccccggactggttcaggcccaaccccgtgtaccacttacaccaacccggggaacgtccagccgagtggcggtgcagcggggggtgggttccggaccacacccacccgacacgcagcaacctagtccctccaaagccttcaagccacgattcccaggcgaccaggtggtgaacggcgccgggccggaactctctacgggccctagtcctggatcacccactctcgatatcgatcagtcgatcgaacagctcaaccgcctcatcttggaactcgatcctacttttgagcctatcccaacgcatatgaatgcattgggctcgcaagctaatgggagcgtcagcccggacagcgtggggggggggttaagagcaagttcgcggttgccggacactggagaaggaccttcacgcgctaccggtcggcagggctcctccgctgaacagccactaggaggtcgccttcgcaagctttcactgggacagtacgataacgacgcaggagggcagctgcctttctcaaagtgtgcttgggggaaagccggggtggattacgctccgaatcttcccccgttcccctcaccagcagatgtgaaggaaacgatgacccctggctaccctcaggatctggacattattgatggtcggattcttagctccaaggagagtatgtgttccacacccgccttccctgtgtctcccgaaaccccatacgtcaagactgccctgcgccatcccccttttagcccccccgagcccccactttcctccccagcttcccagcataagggcggccgagaaccacgttcttgtccggagacccttacccacgccgtggggatgtctgaaagtcctattggaccaaagagtacaatgctgcgggctgatgccagctcgaccccgagctttcagcaagcattcgcaagctcttgcactattagcagtaatggcccaggccagcggcgcgaatcatcgagctccgctgagagacagtgggttgaaagcagtcccaagccaatggtcagcttgctgggaagtggcagacccactggtagcccactgtcagccgaattctcaggcactcggaaggactcaccagttcttagttgctttccaccctcagaactccaggcgccgttccattcacacgaattatcgttggctgaacctccggattctctcgcccccccctcaagccaggcttttttgggattcggcacagcacccgtcgggagcggacttcctccggaagaggatcttggcgccctcctggctaattctcatggcgcctccccgacaccatctattcctttgactgcgacaggcgccgccgacaatggatttctgagtcacaatttcctgacagtcgcgccaggacattcatcccaccattcacccggccttcagggacaaggcgtgaccttacctggtcaaccacccttgcctgaaaagaaacgggcttccgaaggagataggtccctgggttctgtgtccccatctagttcaggcttttcgtcaccacactctggctctactatttctatcccattcccgaacgtgttgcctgacttttccaaggcctctgaagcgcccaccttctaccagacctccaagccagatatccccgggccgtag

SEQ ID NO: 306200 - DNA, 3816 bp, Artificial Sequence
  derived and/or modified sequence
agccaggccctgaatgaaagaatgaactggctgtgcaggaaccaggaccccaaccccccaccccagcctgaggagctgaccagcagcctgcacgccttcaagaacaaggccttcaagaagagcaaggtgtgtggggtgtgcaagcagatcattgatggccagggcatcagctgccgggcctgcaagtacagctgccacaagaagtgtgaggccaaggtggtgatcccctgtggggtgcaggtgcggctggagcaggcccctggcagcagcaccctgagcagcagcctgtgccgggacaagcccctgcggcctgtgatcctgagccccaccatggaggagggccacggcctggacctgacctacatcacagagcgcatcatcgctgtgtccttccctgctggctgcagcgaggagagctacctgcacaacctgcaggaggtgaccaggatgctgaagagcaagcatggagacaactacctggtgctgaacctgtctgagaagagatatgacctgaccaagctgaaccccaagatcatggatgtgggctggccagagctgcacgccccacccctggacaagatgtgcaccatctgcaaggcccaggagagctggctgaacagcaacctgcagcacgtggtggtgatccactgccggggcggcaagggccgcatcggcgtggtgatcagcagctacatgcacttcaccaacgtgtctgccagcgctgaccaggccctggacagatttgccatgaagaagttctatgatgacaaggtgtctgccctgatgcagcccagccagaagagatatgtgcagttcctgagcggcctgctgagcggctctgtgaagatgaatgccagccccctcttcctgcacttcgtcatcctgcacggcacccccaactttgacacaggaggagtgtgccggcccttcctgaagctgtaccaggccatgcagcctgtgtacaccagcggcatctacaacgtgggccctgagaaccccagccgcatctgcatcgtcatcgagcccgcccagctgctgaagggagatgtgatggtgaagtgctaccacaagaagtacagaagtgccaccagagatgtgatcttccggctgcagttccacactggagctgtgcagggctacggcctggtgtttgggaaggaggacctggacaatgccagcaaggatgaccgcttcccagactatggcaaggtggagctggtgttttctgccaccccagagaagatccagggcagcgagcacctgtacaatgaccatggagtcatcgtggactacaacaccacagaccccctcatccgctgggacagctatgagaacctgtctgcagatggagaggtgctgcacacccagggccctgtggatggcagcctgtatgccaaggtgaggaagaagagcagcagtgaccccggcatccctgggggcccccaggccatcccagccaccaacagcccagaccacagcgaccacaccctgtctgtgtccagtgacagcggccacagcacagccagcgccaggacagacaagacagaggagcggctggcccctggcacccggcggggcctgagcgcccaggagaaggccgagctggaccagctgctgagcggcttcggcctggaggaccccggcagcagcctgaaggagatgacagatgcccggagcaagtacagcggcaccaggcatgtggtgcctgcccaggtgcacgtgaatggagatgctgccctgaaggaccgggagacagacatcctggatgatgagatgccccaccacgacctgcacagcgtggacagcctgggcaccctgagcagcagcgagggcccccagagcgcccacctgggccccttcacctgccacaagagcagccagaacagcctgctgagtgatggcttcggcagcaatgtgggggaggacccccagggcaccctggtgcctgacctgggcctgggcatggatggcccctatgagcgggagaggaccttcggcagccgggagcccaagcagccccagcccctgctgaggaagcccagcgtgtctgcccagatgcaggcctacggccagagcagctacagcacccagacctgggtgcggcagcagcagatggtggtggcccaccagtacagctttgccccagatggagaggcccggctggtgagccgctgcccagctgacaaccctggcctggtgcaggcccagccccgggtgcccctgacccccacccggggcaccagcagccgggtggccgtgcagaggggcgtgggcagcggcccccaccccccagacacccagcagcccagccccagcaaggccttcaagccccgcttccctggggaccaggtggtgaatggagctggccctgagctgagcacaggccccagccctggcagccccaccctggacatcgaccagagcattgagcagctgaacagactcatcctggagctggaccccacctttgagcccatccccacccacatgaatgccctgggcagccaggccaacggctctgtgtccccagattctgtgggcggcggcctgcgggccagcagccggctgcctgacacaggagagggccccagccgggccaccggccggcagggcagcagcgctgagcagcccctgggcggccgcctgaggaagctgagcctgggccagtatgacaatgatgctgggggccagctgcccttcagcaaatgtgcctggggcaaggccggcgtggactatgcccccaacctgccccccttccccagccctgcagatgtgaaggagaccatgaccccaggctacccccaggacctggacatcattgatggccgcatcctgagcagcaaggagagcatgtgcagcaccccagccttccctgtgtccccagagaccccctacgtgaagacagccctgcggcacccccccttcagccccccagagccccccctgagcagccctgccagccagcacaagggcggccgggagcccaggagctgcccagagaccctgacccatgctgtgggcatgtctgagagccccatcggccccaagagcaccatgctgcgggcagatgccagcagcacccccagcttccagcaggcctttgccagcagctgcaccatcagcagcaatggacctggccagaggcgggagagcagcagcagcgctgagcggcagtgggtggagagcagccccaagcccatggtgtccctgctgggcagcggccggcccaccggcagccccctgtctgctgagttcagcggcaccaggaaggacagccctgtgctgagctgcttccccccatctgagctgcaggcccccttccacagccatgagctgagcctggccgagcccccagacagcctggccccacccagcagccaggccttcctgggcttcggcacagcccctgtgggcagcggcctgcccccagaggaggacctgggcgccctgctggccaacagccatggagccagccccacccccagcatccccctgacagccaccggggctgctgacaatggcttcctgagccacaacttcctgactgtggcccctggccacagcagccaccacagccctggcctgcagggccagggcgtgaccctgcccggccagccccccctgcctgagaagaagagggccagcgagggggacaggagcctgggctctgtgagccccagcagcagcggcttcagcagcccccacagcggcagcaccatcagcatccccttccccaacgtgctgcctgacttcagcaaggccagcgaggcccccaccttctaccagaccagcaagccagacatccctggcccctag

SEQ ID NO: 306201 - DNA, 3816 bp, Artificial Sequence
  derived and/or modified sequence
agccaggccctgaacgagcggatgaactggctgtgccggaaccaggatccaaatccaccaccgcaacccgaagagctgactagctcgctacacgctttcaaaaacaaggcctttaagaaatcaaaggtatgcggcgtttgtaagcaaatcatagacggccagggaattagttgtagagcgtgtaagtatagctgtcacaaaaagtgtgaggctaaagtcgtcattccatgcggagttcaggtgagactggagcaagcaccgggatcaagtaccctgagcagttctttgtgccgggacaaacccctgcgcccagttatcttgagtcccaccatggaggaggggcacggtctggatctcacctatataacggaacgaataatcgcagtgtccttccccgccggctgctctgaagagagctacctacacaatctgcaagaggtcacccggatgctgaaatcaaagcatggcgacaattacctggtactgaacctgtcagaaaagcggtacgacctcactaagttaaatcctaaaattatggacgtgggatggccggagcttcacgcccccccgttagacaaaatgtgtaccatctgtaaggctcaggaaagctggctgaacagtaatctgcaacacgtggttgtaatacactgtcgcggaggtaaaggcagaatcggcgtggtgatttcttcttatatgcactttactaatgtctctgcgtctgccgaccaggcattggaccgtttcgccatgaagaagttctacgatgacaaagtgagcgctttaatgcagccttctcaaaagaggtacgttcaattcctctccggactgctgagcggaagcgtgaagatgaacgcaagcccattgtttctgcactttgtcatcctgcatggcacacccaatttcgacacgggcggcgtctgtcggccatttttgaaattataccaggcaatgcaacctgtgtacacctcaggaatctataacgtcggccctgaaaatccctccaggatctgtatagttatagagccagctcagttacttaagggggacgtaatggtcaaatgctatcataagaaataccgcagcgcgacaagagatgtgatatttagactgcagtttcatacgggcgctgtacagggttatggtctcgtattcggcaaggaggacctggacaacgcaagcaaggatgatcgctttcccgattacggtaaggtggaacttgtgttcagtgccactccggagaaaattcaggggagcgagcacctgtacaacgaccatggtgtgatcgtggattataacacaacggacccactgatcaggtgggacagctatgaaaacttgagcgcggatggtgaggtgcttcatacacagggacccgttgacgggagcctatacgcaaaagtgagaaagaagtccagcagtgatcctggcattcccggtggcccccaggccattcctgcaactaactctcctgatcactccgatcacacattaagtgtcagcagcgatagcggccactccacagcctctgctagaactgacaagacggaggaacgcttagccccaggcacaagacggggcctgtccgcgcaggagaaggctgaactcgaccagctgttgtctgggttcggcctggaggaccctgggagcagcctcaaagagatgacagatgctagaagtaagtattcagggacacgacatgtagttccggcacaggtgcacgtgaacggagacgcggctttgaaggacagagaaactgacatactggatgacgaaatgccccatcacgatcttcactccgtcgacagcctgggcaccctatcgtcctcagaggggccccagtccgcccacctcggtccattcacctgccacaaatcctctcagaactctctgctgagcgacggcttcggaagcaatgttggcgaggatccacaggggaccttggtcccagatctgggtctaggtatggatggcccctacgaacgcgagcgcactttcggttccagggaacccaaacaacctcagcctcttctgcgaaagccgtctgtcagcgcgcagatgcaggcgtatggccagtctagctactcgacccagacatgggtgaggcagcagcagatggtagttgcacaccagtactctttcgcccctgatggtgaggcgagactggtgtcaagatgtccggccgataatcctgggcttgtgcaggcccaacctagggtgcccttgaccccaacacgcggtacgagttctcgcgtcgcagtgcaaaggggagtcggcagcggacctcacccgcctgacactcagcagccatcgcccagcaaggccttcaaaccccggtttcccggggaccaagtagtgaacggggccggacccgagcttagtacaggtcctagccccgggtctccgaccctcgacatcgaccagtctatcgagcagctcaacagactaatcctggaactcgatcccacttttgagccgatccccacacatatgaatgccctgggatcccaggctaatggatcggtgtcaccagattccgtcggtgggggactgagggcttcctcgcggttacccgatacaggggagggtccttcacgagcaacaggccgccaggggtcctccgccgaacagccactgggaggccgcctccggaagctgtcactcggacagtatgataatgacgcgggtgggcagctgccattttccaagtgcgcctggggcaaagcaggggtggactacgcccccaacttgccaccatttccctctccggcggatgtgaaggagaccatgacaccaggctatccacaggatctggatataatcgatggaaggattttatccagcaaagagtccatgtgctccacgcccgctttcccggtgagccccgaaactccgtacgtgaagactgctctcaggcatccgcccttcagcccccccgagcctcctctctcttcccccgcttcccagcataaagggggtagggagccgcgctcatgtcccgagaccctgacacatgctgtggggatgtcagaaagcccgattggaccgaagtcaacaatgctccgtgccgacgccagctctactccgagctttcaacaggccttcgccagctcttgcaccatttcaagcaacgggcccggtcagagacgggagagttcctctagtgccgagcggcagtgggttgaaagtagccctaaacctatggtatctctgttaggttccggtagaccaacaggttctcctctgtccgcggagttcagcggaacaagaaaagattctcccgtactgagttgtttcccacccagcgaactacaggcccccttccactctcacgagttatccctcgcggaacctcctgacagcctcgcacctcctagctctcaggccttcttgggcttcggtaccgcccccgtgggctccgggctgcctccagaggaagatttgggtgccctgctagctaacagtcacggtgcttcaccaaccccgtccatccccctaacagctactggtgccgccgacaacggttttctgtcacacaacttcctcaccgtggctccaggtcactcctctcaccatagtcctggcttgcaaggccaaggagtgactcttcctggtcagcctccattaccagaaaagaagcgcgcctcagagggagacaggtccctaggctccgtgtctccttccagcagcggattttccagtccgcactcgggctcaaccatctctatcccatttccaaacgtgctaccggatttttccaaggcctccgaggctcctacattctaccaaacatcaaagccggacatccctggaccgtag

SEQ ID NO: 306202 - DNA, 3816 bp, Artificial Sequence
  derived and/or modified sequence
agccaagcactcaacgagagaatgaactggctttgcagaaatcaggaccctaaccctccacctcagccagaagagctcactagttccttgcacgcctttaaaaacaaagccttcaagaagtcaaaggtttgcggggtttgtaaacagatcatcgatggtcaaggaatctcttgcagagcctgtaagtactcatgtcataaaaaatgtgaggcgaaagttgtgattccgtgtggtgtacaagtgcggctggagcaggccccagggagttctactctgagctctagcctgtgcagggacaaacccctgcgtcccgtgatcctttcgccaacaatggaggaggggcacgggctggatctgacgtatattacagagaggatcattgctgtcagttttccggctggctgtagcgaggagtcttacttgcacaaccttcaggaagtgactcgtatgttgaagtcgaagcacggcgataattatcttgtcttgaacctttctgagaagagatacgatctgactaagcttaaccccaaaatcatggatgtcggttggcctgagctacatgccccaccgctggacaagatgtgtactatatgcaaggcacaagagagctggctaaatagtaacctgcaacatgttgttgtaattcactgtcgtggtgggaaagggaggatcggtgtggtcatcagttcttacatgcattttacaaacgtgtccgcatccgctgatcaggcactcgacagatttgctatgaagaaattctatgacgacaaagtgtctgcgctcatgcagccgtctcagaagaggtacgtccagttcctgagcgggctgctgtccggctcagtgaaaatgaacgccagcccgttgtttctgcattttgtcattctgcatggcacgccaaactttgacactggcggagtgtgcagaccttttctgaaactctaccaggcaatgcagccagtctacaccagcggcatttataacgtgggccctgagaacccatcacgcatttgtatagtcattgagcccgctcaactcctcaaaggcgatgtcatggtgaaatgctatcacaaaaagtaccgatctgccacccgcgacgtcatatttagactgcagttccacactggcgctgtgcagggatatggccttgtgtttggtaaggaagacctggacaacgcctctaaagatgaccggttccccgattatggcaaggtcgaactcgtgttcagcgcaacgccagaaaagatacagggcagcgaacatctgtacaacgaccatggagtcatagtcgattataatactacagaccccctgatccgatgggacagctacgaaaacctctctgctgatggagaggtcctgcacacgcagggcccagtcgatggctcactctacgcaaaggtgcgaaaaaagtcttcatccgatcctggaatccctggaggaccgcaagccattccagcaacgaattcccctgatcactcagatcacaccttgtcagtgtcatccgattctggccactctaccgcctccgcaaggacggataaaactgaagagagactggcaccaggcacacggaggggcctctccgcccaggaaaaggctgagcttgatcagctgctatctgggtttggactggaggatcccggaagttctctgaaggagatgaccgacgctcggagtaagtattccgggactaggcatgttgtccctgcacaggtacacgtaaatggagatgccgcacttaaagacagagaaacagatattttagatgatgaaatgccccaccacgaccttcacagcgtggacagcctgggtacgctttccagcagtgagggcccacagtccgcccatctaggcccattcacttgccacaagtcctcccaaaattctctgctctccgatggattcggatccaacgtgggtgaagacccacaaggcactctcgtgcctgacctgggactcggtatggacggcccttacgagcgggaacggactttcggcagcagggagccaaagcagccacagcccctcctcaggaagccaagtgtcagcgcccaaatgcaggcctatggtcagtcctcttactcgacccagacttgggtgcgacagcagcaaatggtcgtggcacaccagtactccttcgcaccggatggtgaggcgcgtcttgtgtcacggtgtccggctgacaatcctggcctcgtgcaggcgcagccccgagtgccattgacccctacacggggtacgagctctcgagtggctgtgcagcgcggagttggctcaggccctcacccccctgacacgcagcaacctagtcccagcaaagcctttaagcccagatttcctggagaccaggtggtgaacggtgctgggccagaactatcaacaggaccttcgcccggaagcccaaccctggatatcgatcagagcattgagcagcttaaccggctgattctagagctcgatcccaccttcgaacccattccgactcatatgaacgcgttaggatcccaggctaatggttccgtgtccccagatagtgtcgggggaggactccgggcttcctcacgccttccggacactggtgagggtcctagccgggctaccggcaggcagggctctagtgcagaacagccgctgggcggaagactgaggaagctgtcgctcggccagtatgataacgacgcgggaggccagctcccattcagcaaatgcgcatggggaaaagctggtgtcgattatgccccaaatcttccaccctttccaagcccggctgatgtgaaagagactatgacccctgggtaccctcaggatctagacatcattgatgggagaatcctgagctcaaaggaatccatgtgctctaccccggctttccccgtcagcccggagacaccttatgtgaagaccgccttgcgccatcctcctttctcccctccagagccccctctgagcagtcctgcctctcagcataaaggaggacgcgagccgaggagctgcccagagacactgactcacgccgtcggcatgagtgaatcacctattggtccaaagtccactatgctaagagccgatgcgtcaagtaccccctcattccagcaggcttttgctagtagctgtaccatctctagcaacggccctggtcagcggagagaatcctctagcagtgccgaaagacagtgggtcgagagctcgcccaagcccatggtctcacttctcggcagtgggaggccaaccggctcaccgctgtccgctgagttcagtggaacacgaaaggattctccagtactgtcatgctttccacccagcgaactgcaggctccgtttcacagtcacgaactttctctcgccgagcccccagactccctagcgcctccatccagccaggcatttctgggattcggaacagctccagtcggtagcggactcccacctgaagaggacctgggagcccttcttgcaaatagtcacggggcttctcctacaccttctatacccctaacagctacaggcgcagccgacaacgggttcctcagccataactttttgactgtggccccagggcattcaagccatcactcccctgggttgcagggtcaaggcgtcacactgcctggccagccacctctcccagagaaaaaacgagccagcgaaggagatagatcgctcggatcagtttccccgagctccagcggcttctcctccccgcacagtgggagtacgatcagcatccctttcccaaacgtgttaccagacttctctaaagcatctgaagcccctaccttctatcagaccagtaaaccagacatcccaggcccttag

SEQ ID NO: 306203 - DNA, 7618 bp, Artificial Sequence
  derived and/or modified sequence
agccagccaggaggacgggcccgcccgcgcgctactcggagcccagcctcgttgcggccatcgccctgccggaccgcgcctcaggctcccccagccggaagaattaacctcgagtctgcacgcttttaagaacaaggcctttaaaaaatccaaagtgtgtggagtttgcaaacaaattattgacggtcaaggtatttcatgccgagcctgcaagtattcctgccacaagaaatgtgaagccaaggtggtgattccctgcggtgtgcaagtccgactggaacaggctccagggagttccacgctgtccagttctctctgccgtgataaacctctgcggcccgtcatcctgagtcccaccatggaggagggccatgggctggacctcacttacatcacggagcgcatcatcgctgtgtccttccctgccggctgctctgaggagtcctacctgcacaacctacaggaggtcacgcgcatgctcaagtccaagcacggggacaactacctggtattaaacctttcagaaaagagatatgaccttacgaagcttaacccaaagatcatggatgtgggctggccagagctccacgcaccgcccctggataagatgtgtaccatatgcaaggcgcaggagtcctggctgaacagcaacctccagcatgtggtcgtcattcactgcaggggcgggaaaggacgcataggagtggtcatatcatcctacatgcatttcaccaacgtctcagccagcgccgaccaggcccttgacaggtttgcaatgaagaagttttatgatgacaaagtttcagctttaatgcagccttcccaaaaacggtatgttcagttcctcagtgggctcctgtccggatcggtgaaaatgaatgcctctcccctgttcctgcattttgtcatcctccacggcacccccaacttcgacacaggtggagtgtgccggccctttctgaagctctaccaagccatgcagcctgtgtacacctccgggatctacaacgttggcccagaaaaccccagcaggatctgcatcgtcatcgagccggcccagcttctgaagggagatgtcatggtgaaatgctaccacaagaaataccgctcggccacccgtgacgtcattttccgcctgcagtttcacactggggctgtgcagggctacgggctggtgtttgggaaggaggatctggacaatgccagcaaagatgaccgttttcctgactatgggaaggttgaattagtcttctctgccacgcctgagaagattcaagggtccgaacacttgtacaacgaccacggtgtgattgtggactacaacacaacagacccactgatacgctgggactcgtacgagaacctcagtgcagatggagaagtgctacacacgcagggccctgtcgatggcagcctttacgcgaaggtgaggaagaaaagctcctcggatcctggcatcccaggtggcccccaggcaatcccggccaccaacagcccagaccacagtgaccacaccttgtctgtcagcagtgactccggccactctacagcctctgccaggacggataagacggaagagcgcctggccccaggaaccaggaggggcctgagtgcccaggagaaggcagagttggaccagctgctcagtggctttggcctggaagatcctggaagctccctcaaggaaatgactgatgctcgaagcaagtacagtgggacccgccacgtggtgccagcccaggttcacgtgaatggagacgctgctctgaaggatcgggagacagacattctggatgacgagatgccccaccacgacctgcacagtgtggacagccttgggaccctgtcctcctcggaagggcctcagtcggcccacctgggtcccttcacctgccacaagagcagccagaactcactcctatctgacggttttggcagcaacgttggtgaagatccgcagggcaccctcgttccggacctgggccttggcatggacggcccctatgagcgggagcggacttttgggagtcgagagcccaagcagccccagcccctgctgagaaagccctcagtgtccgcccagatgcaggcctatgggcagagcagctactccacacagacctgggtgcgccagcagcagatggttgtagctcaccagtatagcttcgccccagatggggaggcccggctggtgagccgctgccctgcagacaatcctggcctcgtccaggcccagcccagagtgccactcacccccacccgagggaccagcagtagggtggctgtccagaggggtgtaggcagtgggccacatccccctgacacacagcagccctctcccagcaaagcgttcaaacccaggtttccaggagaccaggttgtgaatggagccggcccagagctgagcacaggcccctccccaggctcgcccaccctggacatcgaccagtccatcgagcagctcaacaggctgatcctggagctggatcccaccttcgagcccatccctacccacatgaacgccctcggtagccaggccaatggctctgtgtctccagacagcgtgggaggtgggctccgggcaagcagcaggctgcctgacacaggagagggccccagcagggccaccgggcggcaaggctcctctgctgaacagcccctgggcgggagactcaggaagctgagcctggggcagtacgacaacgatgctggggggcagctgcccttctccaaatgtgcatggggaaaggctggtgtggactatgccccaaacctgccgccattcccctcaccagcggacgtcaaagagacgatgacccctggctatccccaggacctcgatattatcgatggcagaattttaagtagcaaggagtccatgtgttcaactccagcatttcctgtgtctccagagacaccgtatgtgaaaacagcgctgcgccatcctccgttcagcccacctgagcccccgctgagcagcccagccagtcagcacaaaggaggacgtgaaccacgaagctgccctgagacgctcactcacgctgtggggatgtcagagagccccatcggacccaaatccacgatgctccgggctgatgcgtcctcgacgccctcctttcagcaggcttttgcttcttcctgcaccatttccagcaacggccctgggcagaggagagagagctcctcttctgcagaacgccagtgggtggagagcagccccaagcccatggtttccctgctggggagcggccggcccaccggaagtcccctcagcgctgagttctccggtaccaggaaggactccccagtgctgtcctgcttcccgccgtcagagctccaggctcctttccacagccatgagctgtccctagcagagccaccggactccctggcgcctcccagcagccaggccttcctgggcttcggcaccgccccagtgggaagtggccttccgcccgaggaggacctgggggccttgctggccaattctcatggagcgtcaccgacccccagcatcccgctgacagcgacaggggctgccgacaatggcttcctgtcccacaactttctcacggtggcgcctggacacagcagccaccacagtccaggcctgcagggccagggtgtgaccctgcccgggcagccacccctccctgagaagaagcgggcctcggagggggatcgttctttgggctcagtctctccctcctccagtggcttctccagcccgcacagcgggagcaccatcagtatccccttcccaaatgtccttcccgacttttccaaggcttcagaagcggcctcacctctgccagatagtccaggtgataaacttgtgatcgtgaaatttgttcaagacacttccaagttctggtacaaggcggatatttcaagagaacaagccatcgccatgttgaaggacaaggagccgggctcattcattgttcgagacagccattccttccgaggggcctatggcctggccatgaaggtggccacgcccccaccttcagtcctgcagctgaacaagaaagctggagatttggccaatgaactcgtccggcactttttgatcgagtgtaccccgaagggagtgcggttgaaagggtgctcgaatgaaccatatttcgggagcctgacggccttggtgtgccagcattccatcacgcccttggccttgccgtgcaagctgcttatcccagagagagatccattggaggaaatagcagaaagttctccccagacggcagccaattcagcagctgagctgttgaagcagggggcagcctgcaatgtgtggtacttgaactctgtggagatggagtccctcaccggccaccaggcgatccagaaggccctgagcatcaccctggtccaggagcctccacctgtgtccacagttgtgcacttcaaggtgtcagcccagggcatcaccctgacagacaatcagaggaagctcttcttccggaggcattaccccgtgaacagtgtgattttctgtgccttggacccacaagacaggaagtggatcaaagatggcccttcctcaaaagtctttggatttgtggcccggaagcagggcagtgccacggataatgtgtgccacctgtttgcagagcatgaccctgagcagcctgccagtgccattgtcaacttcgtatcaaaggtcatgattggttccccaaagaaggtctgagaactcccctccctccctggacccaccgatgcctctcgaagccctggagacagccgttgggtgagggtggggcccccactttttaccaaactagtaaacctgacattccaggcccatgaggggaaagaggatcttccagctctgcaaaaacaagaacaaacaacatcaccgtgaattggcctttcctgaaagtgacttatctgacacatctctgtagccacatgctttttgggtagaagaagctgggcatgggtgcaccccaccccctagggtccccatgggaaagggacatgcaaggaaacagcacagaacacgaggtggtccccatgtccctggcacactagcattccgggggatgaggaatccccagcccttgaggcagaggtgccgagtgactgccatgcttcgcccgtccgcatgggcgcttctgtccagctgcacccgaggccgggggtttccctcacctcggtcttcccaagatggagatgctaacgaaactgagaagggggcgtatgtttgacgaaggtttgtgcaagtcaggcccttctggaacacagcagggcctacaacgaggggcctttgcgatgggctgtgaggatgggggtggtgggaagaattggccacgttggagaccccatgccaccccaccatggtgagtgctctgtgcctcctgctcacctgtggtgagctgggcgagctgggcgagctgggcgagctgggctggggagagcctgtgaggaccgagaggagaaatgagaagaaggaacaaaaatattatttctatgtaatttatattttacttatgccaaattatttatgataatttgccattgctatactgtaccagtgtcaaatgctgcagcctgccaagctgtgattttgtgaggcttgtccctatgtaggatgcaccgcaggcccctggccactgaaagagtgtgcagtggactgtgggtctcccatatgcggtgccgcccaaaggtggctttgcctcaagcaacctaccctgatgttttactcattggaatgtttttccccgattgtggatgacttcttttctgatggagagagtccaggagggatggaaaactcctggatttaagctcagcatcccccacatgggcttttcgatcatcttcaggcctgaagctgcacgacctgaagttcgcctgcatttatcagccctctttgtgctgctccttgccaccttggggttcctgctggggaccatgtgtggttgtggcatgtgtgagcagaagggaggatgaggaaaaagagaagaaaccccggtactgacaagctgtttttgagtgccactgtttgccatcatctaagccactgaatcaagtgtatttcaggcttatttcaacattccaatgccctggttttcctgcttgaatctgttcgtggtcaaaggtttgggggaatttgtgaccctggaacatccccagagtgaaagatggagctgggccacatcagaataaggccttggccccatcctctcacagcctaggtgctctgcaggcatgctgactgtcctgattgcgatccagcccgaaattccctcctctgctttcaaaagtcaaatcccccattcttaggccacactggtgtcacaagctcctgtcagggagctggggtttgggaatgtgctttgtgaactctgctttaaagtgaggggccgaggaaaacttagaaacaggcagagttggaagcagccaaatcacagtgggtgttgtgtgtgtgtgcgtgtgtgcatgcgtgcgtgtatgcgtgtgtgaaagcaggtggaccattccactttttagctcctattgatgcaccaaaccaagtgcctcatttctgtgccaaatgtttgccttggtcgttgtggacctccttctctaacttgcggtggcatgactgtcaggaggtgctggcattttcagcagatcctcatgtgttgaccctgatgtctttagcagaggcctctagcatctcggtttttcatccactgcaggaatgtggccacagggagcagaggtttgtactttccccaagaggtcctcatcctgagacggtctctacccatgtttaacccaaagagtgcaggccaggttccttatccttctgatgaaggatgagagagctcatttagaagtcagagcaaactagggtctcagtattgagaaacgcagcctgccagggaatcacagagacatcggggtgcccgcgatggccctcatgaagccatgcctcgacggcattcaggaagccctgcaaacgtgctttttgaactcattggccaggtgtgatttttacacaaggtaaacgtggtcaagggcatcggggaatttgctccaagcagatagctccctctgaggaaccaaaggaagcaagtttccacgatttctgaagagctggtataggaagtttctttcttccttttgtgttacatgtgcattaaacagaacaagctgtgtgtcatcacagattgtactgtgggctcagaaaccgtgagagagcccccaccgtggacaccggctctagggccacaggaaaaggaacgtttccaggcattttgtctccagggctcccgctggacaggcacgtactgccctggggagtaaatgcggagagttcacgaactgtgcccaacgcatgttatagccagggtcctactaactactcagtaaaagaacgtattgttgtattcctccagtgttaagctatagccatgttaaaagtcactgtgcatttattctcagcatcaaataccttgtaacgtcttctctgccttgttagtgcatatttttacttttctgatactgtaaagaatatatccagtatgtaaatgaatgttctataaatcttttgtatagtcattttctctgctccttaaatatcatctctattcagagtataataaaattatgaacttggtaa

SEQ ID NO: 306204 - DNA, 6683 bp, Artificial Sequence
  derived and/or modified sequence
cgcgactcccactaggctatgagctacaggagggagggtaggtcttgctcccggagagcaccttaatcacaggcgctgaatgaaagaatgaactggttgtgcaggaaccaggatccgaacccgcctccccagccggaagaattaacctcgagtctgcacgcttttaagaacaaggcctttaaaaaatccaaagtgtgtggagtttgcaaacaaattattgacggtcaaggtatttcatgccgagcctgcaagtattcctgccacaagaaatgtgaagccaaggtggtgattccctgcggtgtgcaagtccgactggaacaggctccagggagttccacgctgtccagttctctctgccgtgataaacctctgcggcccgtcatcctgagtcccaccatggaggagggccatgggctggacctcacttacatcacggagcgcatcatcgctgtgtccttccctgccggctgctctgaggagtcctacctgcacaacctacaggaggtcacgcgcatgctcaagtccaagcacggggacaactacctggtattaaacctttcagaaaagagatatgaccttacgaagcttaacccaaagatcatggatgtgggctggccagagctccacgcaccgcccctggataagatgtgtaccatatgcaaggcgcaggagtcctggctgaacagcaacctccagcatgtggtcgtcattcactgcaggggcgggaaaggacgcataggagtggtcatatcatcctacatgcatttcaccaacgtctcagccagcgccgaccaggcccttgacaggtttgcaatgaagaagttttatgatgacaaagtttcagctttaatgcagccttcccaaaaacggtatgttcagttcctcagtgggctcctgtccggatcggtgaaaatgaatgcctctcccctgttcctgcattttgtcatcctccacggcacccccaacttcgacacaggtggagtgtgccggccctttctgaagctctaccaagccatgcagcctgtgtacacctccgggatctacaacgttggcccagaaaaccccagcaggatctgcatcgtcatcgagccggcccagcttctgaagggagatgtcatggtgaaatgctaccacaagaaataccgctcggccacccgtgacgtcattttccgcctgcagtttcacactggggctgtgcagggctacgggctggtgtttgggaaggaggatctggacaatgccagcaaagatgaccgttttcctgactatgggaaggttgaattagtcttctctgccacgcctgagaagattcaagggtccgaacacttgtacaacgaccacggtgtgattgtggactacaacacaacagacccactgatacgctgggactcgtacgagaacctcagtgcagatggagaagtgctacacacgcagggccctgtcgatggcagcctttacgcgaaggtgaggaagaaaagctcctcggatcctggcatcccaggtggcccccaggcaatcccggccaccaacagcccagaccacagtgaccacaccttgtctgtcagcagtgactccggccactctacagcctctgccaggacggataagacggaagagcgcctggccccaggaaccaggaggggcctgagtgcccaggagaaggcagagttggaccagctgctcagtggctttggcctggaagatcctggaagctccctcaaggaaatgactgatgctcgaagcaagtacagtgggacccgccacgtggtgccagcccaggttcacgtgaatggagacgctgctctgaaggatcgggagacagacattctggatgacgagatgccccaccacgacctgcacagtgtggacagccttgggaccctgtcctcctcggaagggcctcagtcggcccacctgggtcccttcacctgccacaagagcagccagaactcactcctatctgacggttttggcagcaacgttggtgaagatccgcagggcaccctcgttccggacctgggccttggcatggacggcccctatgagcgggagcggacttttgggagtcgagagcccaagcagccccagcccctgctgagaaagccctcagtgtccgcccagatgcaggcctatgggcagagcagctactccacacagacctgggtgcgccagcagcagatggttgtagctcaccagtatagcttcgccccagatggggaggcccggctggtgagccgctgccctgcagacaatcctggcctcgtccaggcccagcccagagtgccactcacccccacccgagggaccagcagtagggtggctgtccagaggggtgtaggcagtgggccacatccccctgacacacagcagccctctcccagcaaagcgttcaaacccaggtttccaggagaccaggttgtgaatggagccggcccagagctgagcacaggcccctccccaggctcgcccaccctggacatcgaccagtccatcgagcagctcaacaggctgatcctggagctggatcccaccttcgagcccatccctacccacatgaacgccctcggtagccaggccaatggctctgtgtctccagacagcgtgggaggtgggctccgggcaagcagcaggctgcctgacacaggagagggccccagcagggccaccgggcggcaaggctcctctgctgaacagcccctgggcgggagactcaggaagctgagcctggggcagtacgacaacgatgctggggggcagctgcccttctccaaatgtgcatggggaaaggctggtgtggactatgccccaaacctgccgccattcccctcaccagcggacgtcaaagagacgatgacccctggctatccccaggacctcgatattatcgatggcagaattttaagtagcaaggagtccatgtgttcaactccagcatttcctgtgtctccagagacaccgtatgtgaaaacagcgctgcgccatcctccgttcagcccacctgagcccccgctgagcagcccagccagtcagcacaaaggaggacgtgaaccacgaagctgccctgagacgctcactcacgctgtggggatgtcagagagccccatcggacccaaatccacgatgctccgggctgatgcgtcctcgacgccctcctttcagcaggcttttgcttcttcctgcaccatttccagcaacggccctgggcagaggagagagagctcctcttctgcagaacgccagtgggtggagagcagccccaagcccatggtttccctgctggggagcggccggcccaccggaagtcccctcagcgctgagttctccggtaccaggaaggactccccagtgctgtcctgcttcccgccgtcagagctccaggctcctttccacagccatgagctgtccctagcagagccaccggactccctggcgcctcccagcagccaggccttcctgggcttcggcaccgccccagtgggaagtggccttccgcccgaggaggacctgggggccttgctggccaattctcatggagcgtcaccgacccccagcatcccgctgacagcgacaggggctgccgacaatggcttcctgtcccacaactttctcacggtggcgcctggacacagcagccaccacagtccaggcctgcagggccagggtgtgaccctgcccgggcagccacccctccctgagaagaagcgggcctcggagggggatcgttctttgggctcagtctctccctcctccagtggcttctccagcccgcacagcgggagcaccatcagtatccccttcccaaatgtccttcccgacttttccaaggcttcagaagcccccactttttaccaaactagtaaacctgacattccaggcccatgaggggaaagaggatcttccagctctgcaaaaacaagaacaaacaacatcaccgtgaattggcctttcctgaaagtgacttatctgacacatctctgtagccacatgctttttgggtagaagaagctgggcatgggtgcaccccaccccctagggtccccatgggaaagggacatgcaaggaaacagcacagaacacgaggtggtccccatgtccctggcacactagcattccgggggatgaggaatccccagcccttgaggcagaggtgccgagtgactgccatgcttcgcccgtccgcatgggcgcttctgtccagctgcacccgaggccgggggtttccctcacctcggtcttcccaagatggagatgctaacgaaactgagaagggggcgtatgtttgacgaaggtttgtgcaagtcaggcccttctggaacacagcagggcctacaacgaggggcctttgcgatgggctgtgaggatgggggtggtgggaagaattggccacgttggagaccccatgccaccccaccatggtgagtgctctgtgcctcctgctcacctgtggtgagctgggcgagctgggcgagctgggcgagctgggctggggagagcctgtgaggaccgagaggagaaatgagaagaaggaacaaaaatattatttctatgtaatttatattttacttatgccaaattatttatgataatttgccattgctatactgtaccagtgtcaaatgctgcagcctgccaagctgtgattttgtgaggcttgtccctatgtaggatgcaccgcaggcccctggccactgaaagagtgtgcagtggactgtgggtctcccatatgcggtgccgcccaaaggtggctttgcctcaagcaacctaccctgatgttttactcattggaatgtttttccccgattgtggatgacttcttttctgatggagagagtccaggagggatggaaaactcctggatttaagctcagcatcccccacatgggcttttcgatcatcttcaggcctgaagctgcacgacctgaagttcgcctgcatttatcagccctctttgtgctgctccttgccaccttggggttcctgctggggaccatgtgtggttgtggcatgtgtgagcagaagggaggatgaggaaaaagagaagaaaccccggtactgacaagctgtttttgagtgccactgtttgccatcatctaagccactgaatcaagtgtatttcaggcttatttcaacattccaatgccctggttttcctgcttgaatctgttcgtggtcaaaggtttgggggaatttgtgaccctggaacatccccagagtgaaagatggagctgggccacatcagaataaggccttggccccatcctctcacagcctaggtgctctgcaggcatgctgactgtcctgattgcgatccagcccgaaattccctcctctgctttcaaaagtcaaatcccccattcttaggccacactggtgtcacaagctcctgtcagggagctggggtttgggaatgtgctttgtgaactctgctttaaagtgaggggccgaggaaaacttagaaacaggcagagttggaagcagccaaatcacagtgggtgttgtgtgtgtgtgcgtgtgtgcatgcgtgcgtgtatgcgtgtgtgaaagcaggtggaccattccactttttagctcctattgatgcaccaaaccaagtgcctcatttctgtgccaaatgtttgccttggtcgttgtggacctccttctctaacttgcggtggcatgactgtcaggaggtgctggcattttcagcagatcctcatgtgttgaccctgatgtctttagcagaggcctctagcatctcggtttttcatccactgcaggaatgtggccacagggagcagaggtttgtactttccccaagaggtcctcatcctgagacggtctctacccatgtttaacccaaagagtgcaggccaggttccttatccttctgatgaaggatgagagagctcatttagaagtcagagcaaactagggtctcagtattgagaaacgcagcctgccagggaatcacagagacatcggggtgcccgcgatggccctcatgaagccatgcctcgacggcattcaggaagccctgcaaacgtgctttttgaactcattggccaggtgtgatttttacacaaggtaaacgtggtcaagggcatcggggaatttgctccaagcagatagctccctctgaggaaccaaaggaagcaagtttccacgatttctgaagagctggtataggaagtttctttcttccttttgtgttacatgtgcattaaacagaacaagctgtgtgtcatcacagattgtactgtgggctcagaaaccgtgagagagcccccaccgtggacaccggctctagggccacaggaaaaggaacgtttccaggcattttgtctccagggctcccgctggacaggcacgtactgccctggggagtaaatgcggagagttcacgaactgtgcccaacgcatgttatagccagggtcctactaactactcagtaaaagaacgtattgttgtattcctccagtgttaagctatagccatgttaaaagtcactgtgcatttattctcagcatcaaataccttgtaacgtcttctctgccttgttagtgcatatttttacttttctgatactgtaaagaatatatccagtatgtaaatgaatgttctataaatcttttgtatagtcattttctctgctccttaaatatcatctctattcagagtataataaaattatgaacttggt

SEQ ID NO: 306205 - protein, 919 aa, Artificial Sequence
  derived and/or modified sequence
MDGPYERERTFGSREPKQPQPLLRKPSVSAQMQAYGQSSYSTQTWVRQQQMVVAHQYSFAPDGEARLVSRCPADNPGLVQAQPRVPLTPTRGTSSRVAVQRGVGSGPHPPDTQQPSPSKAFKPRFPGDQVVNGAGPELSTGPSPGSPTLDIDQSIEQLNRLILELDPTFEPIPTHMNALGSQANGSVSPDSVGGGLRASSRLPDTGEGPSRATGRQGSSAEQPLGGRLRKLSLGQYDNDAGGQLPFSKCAWGKAGVDYAPNLPPFPSPADVKETMTPGYPQDLDIIDGRILSSKESMCSTPAFPVSPETPYVKTALRHPPFSPPEPPLSSPASQHKGGREPRSCPETLTHAVGMSESPIGPKSTMLRADASSTPSFQQAFASSCTISSNGPGQRRESSSSAERQWVESSPKPMVSLLGSGRPTGSPLSAEFSGTRKDSPVLSCFPPSELQAPFHSHELSLAEPPDSLAPPSSQAFLGFGTAPVGSGLPPEEDLGALLANSHGASPTPSIPLTATGAADNGFLSHNFLTVAPGHSSHHSPGLQGQGVTLPGQPPLPEKKRASEGDRSLGSVSPSSSGFSSPHSGSTISIPFPNVLPDFSKASEAASPLPDSPGDKLVIVKFVQDTSKFWYKADISREQAIAMLKDKEPGSFIVRDSHSFRGAYGLAMKVATPPPSVLQLNKKAGDLANELVRHFLIECTPKGVRLKGCSNEPYFGSLTALVCQHSITPLALPCKLLIPERDPLEEIAESSPQTAANSAAELLKQGAACNVWYLNSVEMESLTGHQAIQKALSITLVQEPPPVSTVVHFKVSAQGITLTDNQRKLFFRRHYPVNSVIFCALDPQDRKWIKDGPSSKVFGFVARKQGSATDNVCHLFAEHDPEQPARESQRHRGARDGPHEAMPRRHSGSPANVLFELIGQV

SEQ ID NO: 306206 - DNA, 570 bp, Artificial Sequence
  derived and/or modified sequence
ttgtcagtcttgatctgctacagctttgtagccagagtgaggtggtgattccctgcggtgtgcaagtccgactggaacaggctccagggagttccacgctgtccagttctctctgccgtgataaacctctgcggcccgtcatcctgagtcccaccatggaggagggccatgggctggacctcacttacatcacggagcgcatcatcgctgtgtccttccctgccggctgctctgaggagtcctacctgcacaacctacaggaggtcacgcgcatgctcaagtccaagcacggggacaactacctggtattaaacctttcagaaaagagatatgaccttacgaagcttaacccaaagatcatggatgtgggctggccagagctccacgcaccgcccctggataagatgtgtaccatatgcaaggcgcaggagtcctggctgaacagcaacctccagcatgtggtcgtcattcactgcaggggcgggaaaggacgcataggagtggtcatatcatcctacatgcatttcaccaacgtctcagccagcgccgaccaggcccttgacaggtttg

SEQ ID NO: 306207 - protein, 1445 aa, Artificial Sequence
  derived and/or modified sequence
MEEGHGLDLTYITERIIAVSFPAGCSEESYLHNLQEVTRMLKSKHGDNYLVLNLSEKRYDLTKLNPKIMDVGWPELHAPPLDKMCTICKAQESWLNSNLQHVVVIHCRGGKGRIGVVISSYMHFTNVSASADQALDRFAMKKFYDDKVSALMQPSQKRYVQFLSGLLSGSVKMNASPLFLHFVILHGTPNFDTGGVCRPFLKLYQAMQPVYTSGIYNVGPENPSRICIVIEPAQLLKGDVMVKCYHKKYRSATRDVIFRLQFHTGAVQGYGLVFGKEDLDNASKDDRFPDYGKVELVFSATPEKIQGSEHLYNDHGVIVDYNTTDPLIRWDSYENLSADGEVLHTQGPVDGSLYAKVRKKSSSDPGIPGGPQAIPATNSPDHSDHTLSVSSDSGHSTASARTDKTEERLAPGTRRGLSAQEKAELDQLLSGFGLEDPGSSLKEMTDARSKYSGTRHVVPAQVHVNGDAALKDRETDILDDEMPHHDLHSVDSLGTLSSSEGPQSAHLGPFTCHKSSQNSLLSDGFGSNVGEDPQGTLVPDLGLGMDGPYERERTFGSREPKQPQPLLRKPSVSAQMQAYGQSSYSTQTWVRQQQMVVAHQYSFAPDGEARLVSRCPADNPGLVQAQPRVPLTPTRGTSSRVAVQRGVGSGPHPPDTQQPSPSKAFKPRFPGDQVVNGAGPELSTGPSPGSPTLDIDQSIEQLNRLILELDPTFEPIPTHMNALGSQANGSVSPDSVGGGLRASSRLPDTGEGPSRATGRQGSSAEQPLGGRLRKLSLGQYDNDAGGQLPFSKCAWGKAGVDYAPNLPPFPSPADVKETMTPGYPQDLDIIDGRILSSKESMCSTPAFPVSPETPYVKTALRHPPFSPPEPPLSSPASQHKGGREPRSCPETLTHAVGMSESPIGPKSTMLRADASSTPSFQQAFASSCTISSNGPGQRRESSSSAERQWVESSPKPMVSLLGSGRPTGSPLSAEFSGTRKDSPVLSCFPPSELQAPFHSHELSLAEPPDSLAPPSSQAFLGFGTAPVGSGLPPEEDLGALLANSHGASPTPSIPLTATGAADNGFLSHNFLTVAPGHSSHHSPGLQGQGVTLPGQPPLPEKKRASEGDRSLGSVSPSSSGFSSPHSGSTISIPFPNVLPDFSKASEAASPLPDSPGDKLVIVKFVQDTSKFWYKADISREQAIAMLKDKEPGSFIVRDSHSFRGAYGLAMKVATPPPSVLQLNKKAGDLANELVRHFLIECTPKGVRLKGCSNEPYFGSLTALVCQHSITPLALPCKLLIPERDPLEEIAESSPQTAANSAAELLKQGAACNVWYLNSVEMESLTGHQAIQKALSITLVQEPPPVSTVVHFKVSAQGITLTDNQRKLFFRRHYPVNSVIFCALDPQDRKWIKDGPSSKVFGFVARKQGSATDNVCHLFAEHDPEQPASAIVNFVSKVMIGSPKKV

SEQ ID NO: 306208 - protein, 250 aa, Artificial Sequence
  derived and/or modified sequence
MEEGHGLDLTYITERIIAVSFPAGCSEESYLHNLQEVTRMLKSKHGDNYLVLNLSEKRYDLTKLNPKIMDVGWPELHAPPLDKMCTICKAQESWLNSNLQHVVVIHCRGGKGRIGVVISSYMHFTNVSASADQALDRFAMKKFYDDKVSALMQPSQKRYVQFLSGLLSGSVKMNASPLFLHFVILHGTPNFDTGGVCRPFLKLYQAMQPVYTSGIYNVGPENPSRICIVIEPAQLLKGDVMVMNYNIANI

SEQ ID NO: 306209 - DNA, 698 bp, Artificial Sequence
  derived and/or modified sequence
aggctggccctcagccccgggcggacattgtcctgtgagctccatgcctgcgtgctcaccgtggggccgggcacacctgccagctgctcctggctgtggttctggggactcccacactcaccaggctctcccacctggtgggctattccagctgcctcctttatgcccagagctgccgagacattaacacgaagaggggtgtgcttgactaaagcaggggaaggagcgaaacgtaggaggagctgtttctggaagggaaaagcagccctggccggtggtccctgcccaggcccagcacagctccagggagttccacgctgtccagttctctctgccgtgataaacctctgcggcccgtcatcctgagtcccaccatggaggagggccatgggctggacctcacttacatcacggagcgcatcatcgctgtgtccttccctgccggctgctctgaggagtcctacctgcacaacctacaggaggtcacgcgcatgctcaagtccaagcacggggacaactacctggtattaaacctttcagaaaagagatatgaccttacgaagcttaacccaaagatcatggatgtgggctggccagagctccacgcaccgcccctggataagatgtgtaccatatgcaaggcgcaggagtcctggctgaacagcaacctccagcatgtggtcgtcattcactgcagg

SEQ ID NO: 306210 - protein, 108 aa, Artificial Sequence
  derived and/or modified sequence
MEEGHGLDLTYITERIIAVSFPAGCSEESYLHNLQEVTRMLKSKHGDNYLVLNLSEKRYDLTKLNPKIMDVGWPELHAPPLDKMCTICKAQESWLNSNLQHVVVIHCR

SEQ ID NO: 306211 - protein, 138 aa, Artificial Sequence
  derived and/or modified sequence
MEEGHGLDLTYITERIIAVSFPAGCSEESYLHNLQEVTRMLKSKHGDNYLVLNLSEKRYDLTKLNPKIMDVGWPELHAPPLDKMCTICKAQESWLNSNLQHVVVIHCRGGKGRIGVVISSYMHFTNVSASADQALDRF

SEQ ID NO: 306212 - DNA, 4338 bp, Artificial Sequence
  derived and/or modified sequence
atggaggagggccacggcctggacctgacctacatcaccgagagaatcatcgccgtgagcttccccgccggctgcagcgaggagagctacctgcacaacctgcaggaggtgaccagaatgctgaagagcaagcacggcgacaactacctggtgctgaacctgagcgagaagagatacgacctgaccaagctgaaccccaagatcatggacgtgggctggcccgagctgcacgccccccccctggacaagatgtgcaccatctgcaaggcccaggagagctggctgaacagcaacctgcagcacgtggtggtgatccactgcagaggcggcaagggcagaatcggcgtggtgatcagcagctacatgcacttcaccaacgtgagcgccagcgccgaccaggccctggacagattcgccatgaagaagttctacgacgacaaggtgagcgccctgatgcagcccagccagaagagatacgtgcagttcctgagcggcctgctgagcggcagcgtgaagatgaacgccagccccctgttcctgcacttcgtgatcctgcacggcacccccaacttcgacaccggcggcgtgtgcagacccttcctgaagctgtaccaggccatgcagcccgtgtacaccagcggcatctacaacgtgggccccgagaaccccagcagaatctgcatcgtgatcgagcccgcccagctgctgaagggcgacgtgatggtgaagtgctaccacaagaagtacagaagcgccaccagagacgtgatcttcagactgcagttccacaccggcgccgtgcagggctacggcctggtgttcggcaaggaggacctggacaacgccagcaaggacgacagattccccgactacggcaaggtggagctggtgttcagcgccacccccgagaagatccagggcagcgagcacctgtacaacgaccacggcgtgatcgtggactacaacaccaccgaccccctgatcagatgggacagctacgagaacctgagcgccgacggcgaggtgctgcacacccagggccccgtggacggcagcctgtacgccaaggtgagaaagaagagcagcagcgaccccggcatccccggcggcccccaggccatccccgccaccaacagccccgaccacagcgaccacaccctgagcgtgagcagcgacagcggccacagcaccgccagcgccagaaccgacaagaccgaggagagactggcccccggcaccagaagaggcctgagcgcccaggagaaggccgagctggaccagctgctgagcggcttcggcctggaggaccccggcagcagcctgaaggagatgaccgacgccagaagcaagtacagcggcaccagacacgtggtgcccgcccaggtgcacgtgaacggcgacgccgccctgaaggacagagagaccgacatcctggacgacgagatgccccaccacgacctgcacagcgtggacagcctgggcaccctgagcagcagcgagggcccccagagcgcccacctgggccccttcacctgccacaagagcagccagaacagcctgctgagcgacggcttcggcagcaacgtgggcgaggacccccagggcaccctggtgcccgacctgggcctgggcatggacggcccctacgagagagagagaaccttcggcagcagagagcccaagcagccccagcccctgctgagaaagcccagcgtgagcgcccagatgcaggcctacggccagagcagctacagcacccagacctgggtgagacagcagcagatggtggtggcccaccagtacagcttcgcccccgacggcgaggccagactggtgagcagatgccccgccgacaaccccggcctggtgcaggcccagcccagagtgcccctgacccccaccagaggcaccagcagcagagtggccgtgcagagaggcgtgggcagcggcccccacccccccgacacccagcagcccagccccagcaaggccttcaagcccagattccccggcgaccaggtggtgaacggcgccggccccgagctgagcaccggccccagccccggcagccccaccctggacatcgaccagagcatcgagcagctgaacagactgatcctggagctggaccccaccttcgagcccatccccacccacatgaacgccctgggcagccaggccaacggcagcgtgagccccgacagcgtgggcggcggcctgagagccagcagcagactgcccgacaccggcgagggccccagcagagccaccggcagacagggcagcagcgccgagcagcccctgggcggcagactgagaaagctgagcctgggccagtacgacaacgacgccggcggccagctgcccttcagcaagtgcgcctggggcaaggccggcgtggactacgcccccaacctgccccccttccccagccccgccgacgtgaaggagaccatgacccccggctacccccaggacctggacatcatcgacggcagaatcctgagcagcaaggagagcatgtgcagcacccccgccttccccgtgagccccgagaccccctacgtgaagaccgccctgagacacccccccttcagcccccccgagccccccctgagcagccccgccagccagcacaagggcggcagagagcccagaagctgccccgagaccctgacccacgccgtgggcatgagcgagagccccatcggccccaagagcaccatgctgagagccgacgccagcagcacccccagcttccagcaggccttcgccagcagctgcaccatcagcagcaacggccccggccagagaagagagagcagcagcagcgccgagagacagtgggtggagagcagccccaagcccatggtgagcctgctgggcagcggcagacccaccggcagccccctgagcgccgagttcagcggcaccagaaaggacagccccgtgctgagctgcttcccccccagcgagctgcaggcccccttccacagccacgagctgagcctggccgagccccccgacagcctggccccccccagcagccaggccttcctgggcttcggcaccgcccccgtgggcagcggcctgccccccgaggaggacctgggcgccctgctggccaacagccacggcgccagccccacccccagcatccccctgaccgccaccggcgccgccgacaacggcttcctgagccacaacttcctgaccgtggcccccggccacagcagccaccacagccccggcctgcagggccagggcgtgaccctgcccggccagccccccctgcccgagaagaagagagccagcgagggcgacagaagcctgggcagcgtgagccccagcagcagcggcttcagcagcccccacagcggcagcaccatcagcatccccttccccaacgtgctgcccgacttcagcaaggccagcgaggccgccagccccctgcccgacagccccggcgacaagctggtgatcgtgaagttcgtgcaggacaccagcaagttctggtacaaggccgacatcagcagagagcaggccatcgccatgctgaaggacaaggagcccggcagcttcatcgtgagagacagccacagcttcagaggcgcctacggcctggccatgaaggtggccacccccccccccagcgtgctgcagctgaacaagaaggccggcgacctggccaacgagctggtgagacacttcctgatcgagtgcacccccaagggcgtgagactgaagggctgcagcaacgagccctacttcggcagcctgaccgccctggtgtgccagcacagcatcacccccctggccctgccctgcaagctgctgatccccgagagagaccccctggaggagatcgccgagagcagcccccagaccgccgccaacagcgccgccgagctgctgaagcagggcgccgcctgcaacgtgtggtacctgaacagcgtggagatggagagcctgaccggccaccaggccatccagaaggccctgagcatcaccctggtgcaggagcccccccccgtgagcaccgtggtgcacttcaaggtgagcgcccagggcatcaccctgaccgacaaccagagaaagctgttcttcagaagacactaccccgtgaacagcgtgatcttctgcgccctggacccccaggacagaaagtggatcaaggacggccccagcagcaaggtgttcggcttcgtggccagaaagcagggcagcgccaccgacaacgtgtgccacctgttcgccgagcacgaccccgagcagcccgccagcgccatcgtgaacttcgtgagcaaggtgatgatcggcagccccaagaaggtgtag

SEQ ID NO: 306213 - DNA, 417 bp, Artificial Sequence
  derived and/or modified sequence
atggaggagggccacggcctggacctgacctacatcaccgagagaatcatcgccgtgagcttccccgccggctgcagcgaggagagctacctgcacaacctgcaggaggtgaccagaatgctgaagagcaagcacggcgacaactacctggtgctgaacctgagcgagaagagatacgacctgaccaagctgaaccccaagatcatggacgtgggctggcccgagctgcacgccccccccctggacaagatgtgcaccatctgcaaggcccaggagagctggctgaacagcaacctgcagcacgtggtggtgatccactgcagaggcggcaagggcagaatcggcgtggtgatcagcagctacatgcacttcaccaacgtgagcgccagcgccgaccaggccctggacagattctag

SEQ ID NO: 306214 - DNA, 753 bp, Artificial Sequence
  derived and/or modified sequence
atggaggagggccacggcctggacctgacctacatcaccgagagaatcatcgccgtgagcttccccgccggctgcagcgaggagagctacctgcacaacctgcaggaggtgaccagaatgctgaagagcaagcacggcgacaactacctggtgctgaacctgagcgagaagagatacgacctgaccaagctgaaccccaagatcatggacgtgggctggcccgagctgcacgccccccccctggacaagatgtgcaccatctgcaaggcccaggagagctggctgaacagcaacctgcagcacgtggtggtgatccactgcagaggcggcaagggcagaatcggcgtggtgatcagcagctacatgcacttcaccaacgtgagcgccagcgccgaccaggccctggacagattcgccatgaagaagttctacgacgacaaggtgagcgccctgatgcagcccagccagaagagatacgtgcagttcctgagcggcctgctgagcggcagcgtgaagatgaacgccagccccctgttcctgcacttcgtgatcctgcacggcacccccaacttcgacaccggcggcgtgtgcagacccttcctgaagctgtaccaggccatgcagcccgtgtacaccagcggcatctacaacgtgggccccgagaaccccagcagaatctgcatcgtgatcgagcccgcccagctgctgaagggcgacgtgatggtgatgaactacaacatcgccaacatctag

SEQ ID NO: 306215 - DNA, 4338 bp, Artificial Sequence
  derived and/or modified sequence
atggaggaaggccatgggttggatctgacctacattactgagagaatcatcgccgtgtcattcccagccggctgctcagaggagtcttatctccacaatctacaggaagtgacccggatgctgaagagtaaacacggtgataactatttggtgctcaatctcagcgaaaagaggtacgacctgacaaaactcaacccaaagataatggacgttggatggcctgagctccatgcacctcccttggataaaatgtgcactatttgtaaggcccaggagtcctggctcaactcaaatctacagcatgtggtggtcatccattgtcgcgggggcaagggccggatcggagtggtgatctcttcctacatgcacttcactaatgtgtccgctagcgccgaccaggcgctggaccgatttgctatgaagaagttttacgatgataaagtctccgcattgatgcagccttcccaaaagcggtatgtccagttcctgtcgggattgctatctggctccgttaagatgaacgcgtccccattgttcctgcatttcgtgatactgcacggaacaccaaactttgacactggtggtgtgtgtaggcccttcctgaagctttatcaggcaatgcaaccggtgtatacttctggtatttataatgtgggacctgaaaacccatctaggatctgtattgtgatcgagcccgcgcaactgttgaaaggggacgtgatggtcaagtgttaccataaaaagtatagatccgcaacaagggatgtgatcttccgtttgcagtttcatacaggtgccgtgcaagggtacggtctggtttttgggaaggaagatctcgataacgcatcaaaagatgacaggttcccggactacgggaaggtagagttagtcttttcagctacccccgagaagatccagggtagtgagcatctgtacaatgatcacggagttatcgttgactataacactactgacccactgattagatgggacagctatgagaacctgagtgcggacggtgaagtcctacacactcagggacccgtggatggctcactctacgccaaggtgaggaagaaatcaagttcagaccccggcatccctggcggtccccaagcgatcccagccactaattccccagaccattcagaccatacacttagtgtaagctccgacagtggacactcaactgcgtccgcacgcaccgacaagaccgaggaaagactggctccaggcacaagaagaggtctgtcagcacaggagaaagcggagctggaccagcttctttcaggatttggcctcgaggatcctggaagctccttaaaggagatgacagacgcccgttctaagtattctggaactcggcacgttgtgcccgctcaggtgcacgtgaatggtgacgccgctctcaaagaccgagaaactgatatactagatgatgagatgccccaccacgatctgcactcggtcgactccctggggaccctttcaagttcagagggtccccagtcagcacaccttggacccttcacatgtcataaatcctcccagaactctctgttgtctgacgggttcggtagcaacgtgggcgaggacccacaggggacattagtgcccgaccttgggctgggtatggatggaccgtatgagagagaacgaacctttggttctcgcgagcctaagcagcctcagccactgctcaggaagcccagcgtgagtgcccagatgcaggcctatggtcagagcagttacagtactcagacgtgggtcaggcaacaacaaatggtggttgcacaccagtactctttcgcccctgacggcgaagccagattagtcagtcggtgccctgctgataatccaggactggtgcaggcccaaccacgcgttcccctgacacccacacgtggcacatccagccgggtggcagtgcagagaggagtagggtctggcccacacccgcctgacactcagcagccatcaccttccaaagctttcaagcctcgattccctggcgatcaggtcgtcaatggggccgggcctgagctgagtacaggaccttcgccgggctctcctaccttagatatcgatcagtcgattgaacagctgaatagacttattctagaactcgacccaaccttcgagcccatacccactcatatgaacgccctggggtcccaagcaaacggaagcgtatcaccggattccgtgggagggggcctccgtgcaagttcacggctgcctgataccggagaaggacccagccgcgcaacagggaggcagggcagttcagccgagcaacccctgggcggccggctgcgtaaattgtctctgggccagtacgataacgacgctggaggccagcttcctttctctaagtgcgcatggggaaaggccggtgttgactacgccccaaatctgcccccctttcctagccctgccgacgttaaggaaaccatgacaccaggatatccccaggatctcgacatcatcgatggccggatcttaagttcaaaagagagcatgtgctccacacctgcttttccagtgtccccagaaaccccatacgtcaagacagctttgcgacacccacccttttcacctccggaaccgcccctgtcaagtccagcctcacagcataagggtgggcgggagccaaggtcatgtcccgagactctgacacacgcagtaggaatgtccgagtcccctattggacccaaatctacaatgctccgggccgacgcttcgtcgacccccagtttccaacaggctttcgcctctagctgcactatcagcagcaacgggccagggcagcgccgagagagctcgagcagtgccgagcgtcagtgggtcgaatcatccccaaagcctatggtcagcctgctagggtccggcagacccaccggcagcccactgtctgcagagttctcaggtactcgtaaagattctccggtgctgtcctgctttcctccctccgaactgcaggctcccttccattctcacgagctctctttagcagagccccccgactcgcttgccccaccttcgtcccaagcctttcttggcttcgggactgcacctgtgggctcaggactgccgcctgaggaggatcttggtgccctcctggctaactcgcacggggccagcccgaccccatcaattccactgactgccaccggggctgcagacaacgggtttcttagccataacttcctaaccgtcgcccctggtcattcctcccatcattcaccaggcctacaagggcagggggtgaccttgcccggccaacctccgttgcctgaaaaaaagagggccagtgaaggggacaggagcctaggatctgtttcgccgtcctcatctggtttctctagcccgcatagcggatcgaccatcagtataccgttcccgaatgtgctccccgacttcagcaaggcgtcagaagccgccagtcctttgcctgacagtcctggggataagctcgttatagtgaagtttgtccaagatacctcgaaattttggtataaagctgacatatctcgagagcaagcaatcgcgatgctcaaggacaaagagccagggagctttatcgtgagagactcccactcattccggggggcctatggactggctatgaaagttgccacgcctcccccgtctgtgctacagctgaacaaaaaggccggagatctcgccaatgaactagtgcggcatttcctcatagagtgtaccccgaaaggggttcgcctgaagggctgttctaatgaaccctatttcggcagtctcaccgcactagtatgccagcattcaataacacctttggctctgccatgtaaactcctcattcctgagcgagatcctctcgaggagattgctgagtcttctccccaaactgcagcaaactctgcagcggagctcctaaagcagggcgccgcttgcaatgtgtggtatctgaattccgttgaaatggaatcccttacgggacaccaggctatccagaaagctttatcaatcaccctggtacaggagccaccacccgtcagtactgttgtccacttcaaggtgagcgcccaggggataacccttacagataaccagcgtaagctgttttttaggcggcactatcccgtgaacagtgtgattttctgcgctttagatccccaggatcgcaaatggatcaaggacggcccgagctccaaggtgttcggcttcgtcgcaagaaagcagggttccgctaccgataacgtgtgccaccttttcgctgaacacgatcccgagcagcccgccagcgccatcgttaacttcgtgagcaaagtcatgatcgggtcccctaaaaaggtgtag

SEQ ID NO: 306216 - DNA, 4338 bp, Artificial Sequence
  derived and/or modified sequence
atggaggagggccacggactggacctgacttatattaccgagagaattattgcagtgagcttccccgcaggatgctccgaagagtcctacttgcacaacctccaagaggtgaccaggatgttgaagagcaagcatggggacaattatctggtacttaatctcagcgaaaagcgttatgatctgacaaaacttaaccccaaaatcatggacgtggggtggcctgagctgcacgcccctcccctggacaagatgtgtacgatctgcaaagcccaggagtcatggttgaatagcaacctccaacacgtggttgtgattcattgtcgcggcggtaaagggaggatcggcgtcgtgatctcttcgtatatgcattttaccaatgtgagcgcctcagcagaccaggcgctggatcgattcgcaatgaagaaattctacgatgataaggtctcagccttgatgcagccatcccagaagcgctacgtacagtttctttcagggctactgagcggctcggtaaagatgaacgcctcccccctgtttctgcacttcgtaatcctgcatggcaccccaaacttcgatacgggcggcgtatgccgtccgtttttgaagctgtaccaggccatgcagccggtatacacatctggcatctacaatgtcggtcccgagaatccctcaaggatttgtatcgttattgagccagctcagctgctcaagggagatgtgatggtcaagtgctaccacaaaaagtacaggtctgccacaagggatgtgatttttagactgcaattccacacaggtgccgtgcaggggtatggactggtgtttggaaaagaggatttggacaacgccagcaaggatgaccggtttcccgattacgggaaagtggagctggtgttcagcgccaccccggagaagatccagggatctgaacatctgtataatgatcacggggtgatcgttgactacaatacaaccgatccactcatccggtgggattcttatgagaatctgtcggcagacggtgaagtccttcatacccaaggccccgttgacggcagcctttacgcaaaagtgcgtaaaaaaagcagctccgatcccgggattcccgggggacctcaggccatccctgcaaccaattctccagatcacagtgaccacaccctgtcagtcagctctgactcgggacactccacggctagcgcgaggacagataaaaccgaagagcgactggctccgggcactcgacggggactttccgctcaggagaaagccgagcttgaccagctgttaagcggttttggtctcgaggatcccggctcttctttgaaggagatgacagacgctcgctccaaatatagcggcaccaggcacgttgttccagcccaagtgcacgttaatggggatgccgcgctgaaggacagagagactgacattcttgatgacgagatgccacatcacgatctgcacagcgttgactctttgggaactctaagttcgtccgaagggccccagagcgcacacctgggccctttcacctgccataagtcctcacagaattccctgctgtccgacggctttgggagtaacgtgggggaggacccacaaggaactctggttcccgatttgggcttgggcatggacggcccttatgagcgtgagagaacgtttggatcgagagagcccaaacaaccgcaaccattgctgaggaaaccttctgtatcagcccagatgcaggcatatggacagtcatcttactccacccaaacatgggtcaggcagcagcagatggtggtcgcacaccaatactcatttgcgccagacggcgaggcccgcttggtctcccgctgccccgccgacaacccaggcctggttcaggcccagccccgggttcccttgaccccaacgagaggtacaagctcacgggtggctgtgcagcggggcgtggggtcgggtcctcaccctcccgatacgcagcagccgagcccgtctaaagcctttaagcctcgctttccgggagatcaggttgtgaacggtgctggacccgaacttagtacgggccccagccccggtagtccaacgctggatatcgaccagagtatcgagcagttgaaccgtctgattctcgaactggatcccacttttgaaccaattcctacccacatgaatgctctgggctctcaggcgaatggctccgttagccccgattcagtcggtggcggtttgcgggcatcatctaggctgcccgacacaggtgaagggccgagcagggcaacagggcggcagggaagctccgcagagcaaccactcggcggaaggttgcggaaactgagtctggggcagtacgacaatgatgccggcgggcagctgccatttagcaaatgtgcctgggggaaggcgggcgttgattatgcgccgaacctcccaccctttccaagccccgcagatgtcaaggagacgatgacgcctgggtacccccaggacctggacatcatagatggcaggatcctttcatctaaagaatccatgtgtagcactcccgccttcccggtttccccagagaccccgtacgtgaaaacagctcttaggcatccacctttcagcccccccgagccgccgctttccagcccagcctctcagcacaagggaggaagggagccacgcagttgtcctgaaacgttaacccacgctgttggcatgtccgaatctccaataggaccaaaatctacaatgctgcgggcagacgccagctccacaccctcatttcagcaggcttttgcaagttcttgcaccatttcctcaaatggaccaggacaacgacgggagagttccagcagcgccgaaaggcagtgggtcgaatctagcccaaaaccgatggtgtctttattaggatctgggaggccaactggttcaccgttgtcagctgaattctctggaactcggaaggactcccctgtacttagttgtttcccaccctccgaactgcaggcacccttccatagccacgagctttcactggccgaaccccctgactctctcgccccaccctctagtcaggcatttcttggtttcggaaccgctccagttggttcgggtctccctccagaagaagatctcggagcattgctcgctaacagtcatggggccagtcctactccaagcataccccttacggcgactggggcagcagataatgggtttctttctcataactttctgaccgtggcccccggccatagctcacaccactcaccaggcctccagggccaaggagttacactcccaggccagccgccactgcctgagaaaaaaagagccagtgagggagatcgctccctgggttccgtgtccccatcctccagtggctttagcagccctcactcaggaagcactatctcaatacccttcccgaatgtcctgcccgatttctcaaaggcttcagaggcagcatcccctttgccggactctcccggagataagttggtgatcgtgaagtttgtgcaggatacttctaaattctggtacaaggcggacatctctagggaacaagcgattgcaatgctcaaggacaaggagccaggttcttttatcgtgagggacagccacagcttcaggggtgcttatggattagcgatgaaggtcgccacccccccgccttctgtcctccaactgaacaagaaagccggcgacctcgccaacgagttagtccgtcattttctgatagagtgtacacctaaaggcgtgagactgaagggatgtagcaatgagccgtacttcggaagcctgaccgctctggtgtgtcagcattccatcacccccctcgctctgccatgcaagctcttgattcctgaacgggaccctctggaggagatcgccgaaagcagcccccaaacggctgcgaactcagccgccgagctgctgaagcagggcgccgcctgcaacgtgtggtacctcaacagcgtggaaatggaatcgttaacagggcaccaggccatccagaaagcgttgagtataactctggtgcaggaaccacctcctgtgtccaccgtggtacactttaaggtatcagcccaggggataacactcacagacaatcagagaaaactcttcttccggagacattaccctgttaacagcgtcatattctgtgccctggatcctcaggacagaaaatggattaaagacgggccctcctcgaaagtgtttggatttgtcgctcggaagcaagggagtgctacagacaacgtgtgtcacctgttcgccgagcacgatcccgaacagccggccagcgcgattgtgaatttcgtgtctaaggtaatgattggcagtccaaagaaagtatag

SEQ ID NO: 306217 - DNA, 417 bp, Artificial Sequence
  derived and/or modified sequence
atggaggagggccacggcctggacctgacctacatcactgaaaggatcatcgccgtctcattccccgccggatgttctgaggaatcctacttgcataatttgcaggaggtgaccaggatgctgaagtctaagcacggcgacaattatctggttttaaacctgtcagaaaagcggtatgacctgaccaagctgaatcccaagattatggatgtcggctggcccgagctgcacgccccaccattagacaagatgtgtacaatctgcaaggcccaggaaagctggttgaactcaaacctgcaacacgttgtggtaatccattgcaggggggggaaaggccggataggcgtggtgatttcttcgtacatgcattttacaaacgtttctgcatctgctgatcaagctctcgataggttttag

SEQ ID NO: 306218 - DNA, 753 bp, Artificial Sequence
  derived and/or modified sequence
atggaggaaggccacggcctcgacttgacgtacatcaccgagcgaatcattgccgttagctttcctgcaggctgtagcgaagagagctacctgcacaacttacaggaggtaaccagaatgctcaaatcaaaacacggcgataactaccttgttctaaatctgtccgagaaaaggtatgacctaactaagctgaacccaaaaattatggacgttgggtggccagagctgcacgcaccccccctagataagatgtgcactatttgtaaagcccaggagtcctggctgaactcgaacctccagcacgtagtggtgatccactgtaggggtgggaagggccggatcggagtggtgatttcttcctacatgcactttactaacgttagtgcaagtgccgaccaggccctggatcgcttcgccatgaagaaattttacgatgataaggtgagcgcacttatgcagccaagccagaagcgctacgtccaatttctaagtggtctgctttcagggtcagtgaagatgaatgcctcccccctgtttttacactttgtcatcttgcatggcaccccgaatttcgacaccgggggcgtgtgccggcccttcttaaaactgtatcaggcaatgcagcctgtatacactagcgggatatacaatgtgggcccagagaatccctcacgtatctgcatcgttattgaacctgcacaactcctcaagggggacgtgatggtgatgaactacaacatcgctaacatttag

SEQ ID NO: 306219 - DNA, 753 bp, Artificial Sequence
  derived and/or modified sequence
atggaagagggacatgggttagacttgacttatattactgaacgaataatcgccgtgagctttccagcaggatgctctgaggaatcatacctccataacctccaagaggtgactaggatgttaaaaagcaaacacggcgataattatctggtgttgaacctcagtgagaaaagatacgacctgaccaagctcaatcctaaaattatggacgtgggctggccagaattgcacgccccacccctggacaaaatgtgcaccatttgtaaagcacaggagagctggcttaactcgaacctgcagcatgtagtggtaattcactgccggggcggcaagggcagaatcggagttgttatttctagctatatgcatttcacgaacgtttcagcttcagcagatcaggctctcgaccggttcgccatgaagaagttttatgacgataaagtaagtgcattaatgcagccctcacagaaacgttacgtccagttcctctcaggcttgttgagcggatccgttaagatgaatgcctctcctctgtttctgcattttgtgattctacacggaactcctaactttgacacagggggagtgtgccgtcctttcctgaagctgtaccaggctatgcaaccagtctacaccagcgggatttacaatgttggcccagagaacccgtctcgaatatgtatagtgatagagcctgcacaactcctaaagggggatgtcatggtgatgaactataacattgccaacatctag

SEQ ID NO: 306220 - DNA, 4338 bp, Artificial Sequence
  derived and/or modified sequence
atggaggagggccacggcctggacctgacctacatcacagagcgcatcatcgctgtgtccttccctgctggctgcagcgaggagagctacctgcacaacctgcaggaggtgaccaggatgctgaagagcaagcatggagacaactacctggtgctgaacctgtctgagaagagatatgacctgaccaagctgaaccccaagatcatggatgtgggctggccagagctgcacgccccacccctggacaagatgtgcaccatctgcaaggcccaggagagctggctgaacagcaacctgcagcacgtggtggtgatccactgccggggcggcaagggccgcatcggcgtggtgatcagcagctacatgcacttcaccaacgtgtctgccagcgctgaccaggccctggacagatttgccatgaagaagttctatgatgacaaggtgtctgccctgatgcagcccagccagaagagatatgtgcagttcctgagcggcctgctgagcggctctgtgaagatgaatgccagccccctcttcctgcacttcgtcatcctgcacggcacccccaactttgacacaggaggagtgtgccggcccttcctgaagctgtaccaggccatgcagcctgtgtacaccagcggcatctacaacgtgggccctgagaaccccagccgcatctgcatcgtcatcgagcccgcccagctgctgaagggagatgtgatggtgaagtgctaccacaagaagtacagaagtgccaccagagatgtgatcttccggctgcagttccacactggagctgtgcagggctacggcctggtgtttgggaaggaggacctggacaatgccagcaaggatgaccgcttcccagactatggcaaggtggagctggtgttttctgccaccccagagaagatccagggcagcgagcacctgtacaatgaccatggagtcatcgtggactacaacaccacagaccccctcatccgctgggacagctatgagaacctgtctgcagatggagaggtgctgcacacccagggccctgtggatggcagcctgtatgccaaggtgaggaagaagagcagcagtgaccccggcatccctgggggcccccaggccatcccagccaccaacagcccagaccacagcgaccacaccctgtctgtgtccagtgacagcggccacagcacagccagcgccaggacagacaagacagaggagcggctggcccctggcacccggcggggcctgagcgcccaggagaaggccgagctggaccagctgctgagcggcttcggcctggaggaccccggcagcagcctgaaggagatgacagatgcccggagcaagtacagcggcaccaggcatgtggtgcctgcccaggtgcacgtgaatggagatgctgccctgaaggaccgggagacagacatcctggatgatgagatgccccaccacgacctgcacagcgtggacagcctgggcaccctgagcagcagcgagggcccccagagcgcccacctgggccccttcacctgccacaagagcagccagaacagcctgctgagtgatggcttcggcagcaatgtgggggaggacccccagggcaccctggtgcctgacctgggcctgggcatggatggcccctatgagcgggagaggaccttcggcagccgggagcccaagcagccccagcccctgctgaggaagcccagcgtgtctgcccagatgcaggcctacggccagagcagctacagcacccagacctgggtgcggcagcagcagatggtggtggcccaccagtacagctttgccccagatggagaggcccggctggtgagccgctgcccagctgacaaccctggcctggtgcaggcccagccccgggtgcccctgacccccacccggggcaccagcagccgggtggccgtgcagaggggcgtgggcagcggcccccaccccccagacacccagcagcccagccccagcaaggccttcaagccccgcttccctggggaccaggtggtgaatggagctggccctgagctgagcacaggccccagccctggcagccccaccctggacatcgaccagagcattgagcagctgaacagactcatcctggagctggaccccacctttgagcccatccccacccacatgaatgccctgggcagccaggccaacggctctgtgtccccagattctgtgggcggcggcctgcgggccagcagccggctgcctgacacaggagagggccccagccgggccaccggccggcagggcagcagcgctgagcagcccctgggcggccgcctgaggaagctgagcctgggccagtatgacaatgatgctgggggccagctgcccttcagcaaatgtgcctggggcaaggccggcgtggactatgcccccaacctgccccccttccccagccctgcagatgtgaaggagaccatgaccccaggctacccccaggacctggacatcattgatggccgcatcctgagcagcaaggagagcatgtgcagcaccccagccttccctgtgtccccagagaccccctacgtgaagacagccctgcggcacccccccttcagccccccagagccccccctgagcagccctgccagccagcacaagggcggccgggagcccaggagctgcccagagaccctgacccatgctgtgggcatgtctgagagccccatcggccccaagagcaccatgctgcgggcagatgccagcagcacccccagcttccagcaggcctttgccagcagctgcaccatcagcagcaatggacctggccagaggcgggagagcagcagcagcgctgagcggcagtgggtggagagcagccccaagcccatggtgtccctgctgggcagcggccggcccaccggcagccccctgtctgctgagttcagcggcaccaggaaggacagccctgtgctgagctgcttccccccatctgagctgcaggcccccttccacagccatgagctgagcctggccgagcccccagacagcctggccccacccagcagccaggccttcctgggcttcggcacagcccctgtgggcagcggcctgcccccagaggaggacctgggcgccctgctggccaacagccatggagccagccccacccccagcatccccctgacagccaccggggctgctgacaatggcttcctgagccacaacttcctgactgtggcccctggccacagcagccaccacagccctggcctgcagggccagggcgtgaccctgcccggccagccccccctgcctgagaagaagagggccagcgagggggacaggagcctgggctctgtgagccccagcagcagcggcttcagcagcccccacagcggcagcaccatcagcatccccttccccaacgtgctgcctgacttcagcaaggccagcgaggccgccagccccctgcctgacagccctggggacaagctggtgattgtgaagtttgtgcaggacaccagcaagttctggtacaaggctgacatcagccgggagcaggccatcgccatgctgaaggacaaggagcccggcagcttcatcgtgcgggacagccacagcttccggggggcctacggcctggccatgaaggtggccaccccaccacccagcgtgctgcagctgaacaagaaggccggggacctggccaatgagctggtgcgccacttcctgattgagtgcacccccaagggcgtgcggctgaagggctgcagcaatgagccctacttcggcagcctgacagccctggtgtgccagcacagcatcacccccctggccctgccctgcaagctgctgatccctgagcgggaccccctggaggagattgctgagagcagcccccagacagctgccaacagcgctgctgagctgctgaagcagggcgccgcctgcaatgtgtggtacctgaacagcgtggagatggagagcctgaccggccaccaggccatccagaaggccctgagcatcaccctggtgcaggagcccccacctgtgtccacagtggtgcacttcaaggtgtctgcccagggcatcaccctgacagacaaccagaggaagctgttcttccgccgccactaccctgtgaacagcgtcatcttctgtgccctggacccccaggacaggaagtggatcaaggatggccccagcagcaaggtgtttggatttgtggccaggaagcagggcagcgccacagacaacgtgtgccacctgtttgctgagcatgaccctgagcagcctgccagcgccatcgtgaactttgtgtccaaggtgatgattggcagccccaagaaggtgtag

SEQ ID NO: 306221 - DNA, 417 bp, Artificial Sequence
  derived and/or modified sequence
atggaggagggccacggcctggacctgacctacatcacagagcgcatcatcgctgtgtccttccctgctggctgcagcgaggagagctacctgcacaacctgcaggaggtgaccaggatgctgaagagcaagcatggagacaactacctggtgctgaacctgtctgagaagagatatgacctgaccaagctgaaccccaagatcatggatgtgggctggccagagctgcacgccccacccctggacaagatgtgcaccatctgcaaggcccaggagagctggctgaacagcaacctgcagcacgtggtggtgatccactgccggggcggcaagggccgcatcggcgtggtgatcagcagctacatgcacttcaccaacgtgtctgccagcgctgaccaggccctggaccgcttctag

SEQ ID NO: 306222 - DNA, 753 bp, Artificial Sequence
  derived and/or modified sequence
atggaggagggccacggcctggacctgacctacatcacagagcgcatcatcgctgtgtccttccctgctggctgcagcgaggagagctacctgcacaacctgcaggaggtgaccaggatgctgaagagcaagcatggagacaactacctggtgctgaacctgtctgagaagagatatgacctgaccaagctgaaccccaagatcatggatgtgggctggccagagctgcacgccccacccctggacaagatgtgcaccatctgcaaggcccaggagagctggctgaacagcaacctgcagcacgtggtggtgatccactgccggggcggcaagggccgcatcggcgtggtgatcagcagctacatgcacttcaccaacgtgtctgccagcgctgaccaggccctggacagatttgccatgaagaagttctatgatgacaaggtgtctgccctgatgcagcccagccagaagagatatgtgcagttcctgagcggcctgctgagcggctctgtgaagatgaatgccagccccctcttcctgcacttcgtcatcctgcacggcacccccaactttgacacaggaggagtgtgccggcccttcctgaagctgtaccaggccatgcagcctgtgtacaccagcggcatctacaacgtgggccctgagaaccccagccgcatctgcatcgtcatcgagcccgcccagctgctgaagggagatgtgatggtgatgaactacaacatcgccaacatctag

SEQ ID NO: 306223 - DNA, 4338 bp, Artificial Sequence
  derived and/or modified sequence
atggaggagggccacggcctggacctgacctacatcaccgagcggatcattgccgtttctttccctgccggctgttctgaagaatcatacctgcacaatctacaggaggtgacccgaatgctaaaaagcaagcacggagataactatctcgtcctgaatctatccgagaagcggtacgacctaactaagctcaatcctaagatcatggatgtgggatggcccgagctccatgctccgccgctggacaagatgtgcacaatttgtaaagctcaggagtcctggttgaattcaaatctacagcacgtggtggtgattcactgtagaggaggcaagggacggatcggtgtcgtaatttcaagttatatgcacttcaccaacgtatctgcctctgccgatcaggccttagacagattcgctatgaagaaattttatgacgataaggttagcgccctgatgcaacccagtcaaaagaggtacgtccagttcctcagcggattgctctcagggtcagtgaaaatgaacgctagccccctgttcctgcacttcgtaatcttgcacgggacccctaacttcgacacaggtggcgtgtgccgaccattcctgaaactctaccaagcgatgcagcctgtgtacactagcggtatctataacgtgggacccgaaaatccttctcgaatctgtatcgtcatcgagcctgctcagttgctcaaaggggacgtcatggttaaatgctatcacaagaagtacaggtccgcaacaagggatgtgatcttccgcctgcaatttcacaccggggctgttcaaggctatgggttagtgtttggtaaagaggacctggacaacgccagtaaggacgataggttccctgattatgggaaagtcgaattagtgttttcggctaccccagagaagattcaggggtccgagcacctctataatgatcatggagttatcgtggactacaacaccacagatcccctgataaggtgggatagctatgaaaatctgtcagccgatggggaggtcttgcatacccaggggccggttgatgggtccctgtatgccaaagtccggaaaaagagttcatctgaccctggaatcccgggcggaccccaagcaatccctgctaccaattctccggaccactcggaccacacactctccgtaagctcggattcgggtcatagcaccgcatcggcgcgaacagacaaaaccgaggagaggcttgcccctggaaccagacgcgggttgtctgcccaggaaaaagccgagctggaccagctcctatcggggtttgggcttgaggaccctggctcaagccttaaggagatgacagatgcccgctctaaatattcagggactcgacacgtagtacccgcgcaggtccacgtcaacggcgacgctgcactcaaggaccgcgagaccgatatcttggacgacgaaatgccacaccacgacctgcattctgtagactcacttggaaccttatcatcttcagaggggccgcagtctgcccacctggggcccttcacctgccacaagagctctcagaatagtctgctatcagatggcttcggaagtaacgtgggtgaggacccacagggaacacttgtgcccgacctcggtttaggcatggacggtccttatgaaagagagagaacatttggctctcgcgaaccaaaacagccccagccactgcttaggaaaccaagcgtgagtgctcagatgcaggcatacggacagtcatcctattctacgcaaacatgggtgaggcaacagcaaatggtcgtggcccaccagtatagcttcgcacccgatggcgaggcccgactcgtgtctcgctgtcccgcagataatcctggacttgtgcaggcccagccaagagtaccactcacgccaacgagaggcactagcagcagggtcgcggtgcagcggggcgtgggttcaggcccgcacccccccgacacccagcaacccagccccagcaaggcatttaaaccccgttttccaggcgaccaggtggtaaacggagccgggcctgaactctctacaggaccgtcccctgggtctccgacgctcgacatcgaccaatcgatcgaacaactgaataggttgatccttgaactggacccaacctttgaaccaatcccaacacacatgaatgccctgggatctcaggctaacggttcagtctctcctgactccgtcggtggggggcttcgggcgtcttcccggctcccagacactggcgagggacccagtagggctacagggaggcagggcagttctgccgagcagccgctggggggcagactcagaaagctgtctcttggacagtatgataacgacgcaggtggccaactgcctttctcaaaatgcgcctggggaaaagctggtgtggattatgcccctaaccttccccccttcccttctcctgccgacgtgaaagagacgatgacccctggatatccacaggatctcgatatcatagacgggaggattttgagctcaaaggagtcaatgtgctccaccccagcctttcccgtttcgcctgagactccatacgttaaaaccgctctgcggcatccccctttcagtcccccggagccgcccctgagctcccctgcttcccagcacaagggaggacgagagcccaggtcttgtccagagactctgacgcacgccgtggggatgagcgagtccccaattggacctaaatctacaatgctgagagccgatgcctctagtaccccttcgtttcagcaggcctttgcctcctcatgcaccatcagctccaatgggcccggacaacggagagagagttcctcgtcagccgaaaggcagtgggtggaatctagccctaaaccaatggttagcttactcggaagcgggcgacccactgggtcaccattgagcgcagagttttccggaacccgcaaagacagcccggtgctgtcatgtttcccccccagtgaattgcaagctcccttccactcccatgagctgagtcttgcagagcccccagattccctcgctccaccttctagccaggccttcctgggctttggcactgcgccagtgggaagcggtctgcctcctgaggaagatctgggagcactgctagccaactcccatggcgcctcacccactccatctattcctcttacggctactggcgctgcagacaacggttttttgtctcataacttcttgacagtggctcccggtcactcatcacaccattccccaggattgcaggggcaaggcgtaaccctacccggccagcctcctctgcccgaaaaaaaacgcgcatcagagggggacagatccctgggtagcgtgtccccttcttccagcggattcagcagccctcattctggttccacaatctccataccctttccgaatgtgctccctgacttctctaaggccagcgaagctgcaagccccctccccgacagtcccggtgacaagctggtaattgttaagtttgtgcaggacaccagcaaattttggtataaggcagatatctctcgggaacaggccattgctatgctcaaagataaagagccaggctcatttatagtaagggattcccacagtttcagaggggcttatggcctggccatgaaagttgccacccctcctcctagcgtgctgcagctgaataaaaaggccggcgaccttgcgaacgagctggtacggcactttttgatcgaatgcacaccaaaaggcgtacggcttaagggttgctccaacgagccttattttggaagcctcacagccctggtatgtcaacactctattactcctctcgccttaccctgcaaacttcttattcccgaacgtgacccccttgaagagattgccgagagtagcccccagaccgctgccaactccgccgcagaattgcttaaacaaggcgctgcatgtaacgtctggtacctcaactccgtcgaaatggagtctttgaccggccatcaagccatacagaaggcactcagtataacattggtgcaggaaccacctcctgtctctactgtggtccatttcaaggtatccgcacaaggcattactttgaccgacaatcagcgcaaactattctttcgaagacattatcctgtgaacagtgtcatcttctgtgctctcgacccacaggatagaaagtggatcaaagacggaccctcaagcaaggtgtttggatttgtggccaggaaacagggcagtgcaaccgacaacgtgtgtcatctattcgcagaacacgaccctgaacagcctgcgtcagccatagtgaattttgtaagcaaagtgatgattggttcacctaagaaggtatag

SEQ ID NO: 306224 - DNA, 4338 bp, Artificial Sequence
  derived and/or modified sequence
atggaggagggccacggcctggacctgacctacatcaccgagcggatcattgcggtgtcattccccgcgggatgcagcgaggagagctacctgcacaatttgcaggaagtcacccggatgttgaaaagcaagcacggcgataactacctagtgttaaacctttccgaaaagaggtacgaccttaccaagctcaaccccaagattatggacgtcggctggcctgaattgcatgcccccccactggacaagatgtgcacaatttgcaaagctcaggaaagctggctgaattctaatctgcaacacgtggtcgtcatacactgtagaggcgggaaaggacggatcggcgtcgtgatcagctcctacatgcacttcacgaacgtaagcgcgagcgccgaccaggctctagatcggttcgctatgaaaaaattctacgatgacaaggtgagcgctctgatgcaacccagtcagaagcggtatgtgcagttcttatctgggctgctcagcggttccgtcaagatgaacgcctcacctttgttcctgcattttgtgattcttcacggcaccccgaacttcgatacaggcggcgtctgtcgacccttcctcaagttatatcaggctatgcagcccgtttacacttctggaatttataatgtgggcccagaaaaccccagccgcatttgcattgtaatcgaacctgcccagttactgaagggtgacgtgatggtcaagtgttaccataagaaatataggtccgccacccgggatgttatctttaggttgcagtttcataccggtgctgtccagggctatggtctggtgttcggcaaagaagacctggacaatgccagcaaagacgacagatttcctgattacggcaaggtcgagctcgtgttttcagctacacccgagaaaatccagggctccgagcacctttataatgaccacggagtcattgtcgattacaacacaaccgatcccctgattcgatgggacagctatgaaaacttaagtgctgacggtgaggttctgcatactcagggccctgtcgacggatcactttatgcaaaggtaaggaaaaaaagctcttctgaccctggtataccaggcggcccacaggctatcccagcgactaactccccagaccactctgatcacaccctgtcggtttccagcgattcaggacacagtactgccagcgcacgaaccgataagaccgaggaaaggctggcgccaggaacaagaagaggcctgtcggctcaggagaaagctgaactggaccagttgctttctggcttcggactggaagatcctggcagcagtctgaaggaaatgactgatgcccggagtaagtactccggcacacggcacgtcgttcctgctcaggtccatgtgaacggagacgcagccttaaaggaccgagaaactgacattcttgatgacgagatgcctcaccatgatctgcattccgttgactctttggggacactgtcaagcagcgagggcccacagtccgctcacttggggccgttcacctgccacaagagtagccagaattctctcttgagcgacggtttcgggagcaacgtcggggaagatccccagggcactctggtgcctgatttagggcttgggatggatgggccttatgagcgagaacgcactttcggaagccgggagccaaagcagccccagccactcctaagaaaaccgtccgtcagcgcacagatgcaggcctacggacagtccagctattccactcagacctgggtccgacagcagcaaatggtagtggcacatcagtactccttcgcacctgacggtgaagcccgcctggtgtcccggtgcccagccgacaaccccggtctggtgcaggcgcagccccgcgtccctttgacacccaccagggggacatcctcaagggttgctgtgcagcggggagttgggtccggtccccaccctccagatacacagcaaccatcccctagcaaggccttcaaacctagattccctggagatcaggtggtgaatggcgcagggccggagctctctacaggccccagcccggggtcccctacgctggacatcgaccagtcgatcgagcagctcaaccgactgatcttggaactcgacccaacttttgaacccatcccaacccacatgaatgctttaggctcacaggcaaacggcagcgtgtcccctgattcagttggtggcggactcagagcaagttcacgccttcccgacactggtgagggcccttcccgcgccacagggagacagggaagctctgccgaacagcccctgggtggcagactccgcaagctaagtcttggccagtatgacaacgatgccggaggccaattgcccttctccaaatgtgcctgggggaaggcaggagtcgactatgctcccaatctgccaccatttccatctcctgccgatgtcaaggagactatgactccaggttacccccaggacctggatatcattgatggtaggatcctttccagcaaagaatcaatgtgtagtacaccggctttccctgtgtcacccgagaccccctacgtgaagacggcgcttaggcatcccccatttagtcctcctgaaccaccactgtcctcacccgcctcccagcacaagggcggtagagagcccagaagctgccccgaaacactgacgcacgctgtcggtatgtctgaatcccccatcggtcctaagtctacgatgctccgagctgacgcttcctctactccaagcttccagcaagcgttcgcttccagttgtacaatctcttccaatggccccggccagcggagagagtcttccagctccgccgaacgtcagtgggtggagtctagtccaaaacccatggtatctttgttaggttcaggcagaccaacaggatctccgctgtctgctgagttttccggcacacggaaggattcccctgttctcagttgcttccccccctcagagttgcaggcaccgtttcatagccacgaactgtccctggcagagccaccagatagtctcgctcccccttcctcgcaagcttttctgggattcggaaccgcccccgtcggaagcgggctcccccccgaggaggatttgggcgctttgttggcaaattcccacggcgcttcccctaccccatcaattccactaaccgcaaccggagccgccgataatggttttctttcccataactttttgaccgtggctccagggcactcttcccaccactctccgggtctccagggtcagggcgtcacgttgcccggacagccaccactgcctgagaagaagagggcttccgaaggtgaccgtagcttgggtagcgtcagccccagcagtagcggattctcaagtccccacagcggctcaacaatatcaatcccattcccaaatgtgctgcccgacttcagcaaggcgtctgaggctgcttctccactgcctgattctccaggtgacaagctagtcatagtgaagttcgtccaggacacgtccaaattctggtataaggcagatatctctcgagagcaggctattgccatgctgaaagacaaagagcctgggtcctttattgttagagacagtcacagctttcggggagcctatgggctggcgatgaaggtggcaacaccacccccgagcgtccttcagcttaacaaaaaggcaggcgacctggcaaatgagctagtacgccacttcctcatcgagtgtaccccaaagggcgtgcggctcaaaggatgctctaatgaaccctacttcggatcactaacagctttagtttgtcagcactctataacccctttggcgttgccttgcaaactgcttataccggaacgcgacccactggaagagattgcagaatcatcaccacagactgctgcaaatagcgccgctgagttgctgaagcagggagccgcctgcaatgtctggtacttgaactctgttgaaatggagtctttgacaggacatcaggcaattcagaaggcactgtccatcaccctagtgcaggaaccaccaccagtcagtacggtggtgcactttaaggtgtctgcacagggcattacactgactgacaaccaacggaagctgttttttcggcggcattaccctgtaaacagtgtgattttctgcgccctcgatcctcaggaccggaagtggataaaggacggtccaagcagcaaagtgtttggctttgtcgcaagaaagcagggatcggccaccgacaacgtgtgccacctgttcgctgaacacgatccagagcagcctgcctcagctatagtgaatttcgtctccaaagttatgatcggctctcccaagaaggtatag

SEQ ID NO: 306225 - DNA, 417 bp, Artificial Sequence
  derived and/or modified sequence
atggaggagggccacggcctggacctgacctacatcaccgagcggataatagctgtgtctttcccagccggctgtagtgaagagtcatacctgcataatctgcaggaggtaacgcgcatgctcaaaagcaagcacggagacaattatctggtgcttaatctgtcggagaagcgctacgatttgacaaaactgaaccccaagattatggatgtcgggtggcctgagctacacgctccgccactcgacaaaatgtgtaccatttgtaaagcccaggagtcatggttgaactcaaatctccaacatgttgttgtaatccactgtcggggaggaaaaggccggattggcgtcgtgatatcctcttacatgcattttaccaatgtctctgctagcgccgaccaagctctggacaggttttag

SEQ ID NO: 306226 - DNA, 753 bp, Artificial Sequence
  derived and/or modified sequence
atggaggagggccacggcctggacctgacctacatcaccgagcggataattgcagtgagcttcccggccgggtgctctgaggagtcctacctgcacaaccttcaagaagtcacgagaatgttgaaatcaaaacatggcgacaactatttggtgcttaatctgtcagagaaacgctacgatctcaccaagctgaaccctaaaataatggacgtcggctggcctgaactgcatgccccccccctcgataagatgtgcacaatatgcaaggcacaggagtcatggctcaacagtaatctgcagcacgtggtggtgatccactgtagaggcggcaaaggccgcatcggcgtggtcatatcatcctacatgcactttactaatgtgtcagcctctgcagaccaagcgctggaccggttcgctatgaaaaaattctatgacgataaggtctcagcacttatgcagcccagtcaaaaacggtacgtacagttcttaagcggactactgtccgggagtgtgaagatgaacgcctcacccctttttctccatttcgtgatactgcacggtacccctaacttcgatacagggggagtgtgccggccctttctcaaactgtaccaggctatgcagccagtctacacatcagggatctacaacgttggcccagaaaatccaagccggatctgcattgtaattgagcccgcccaactgttgaaaggcgacgtgatggtcatgaattataatattgccaacatttag

SEQ ID NO: 306227 - DNA, 753 bp, Artificial Sequence
  derived and/or modified sequence
atggaggagggccacggcctggacctgacctacatcaccgagcggatcatcgctgtgagttttcccgcagggtgctccgaggaaagttatctgcataacctgcaagaagtgacaagaatgttgaagtctaagcacggggacaattacttggtgctgaatctgagcgagaagagatacgacttaactaagctgaaccccaagatcatggatgtgggctggcccgaactccacgcccctcccctggataaaatgtgcaccatttgtaaagcacaggagtcttggctgaatagtaacctccaacacgtggtggtgatacactgtagagggggcaaaggccgtattggagttgtcatatctagctacatgcattttaccaacgtttcagcgagtgccgaccaggcgcttgataggtttgccatgaagaagttttatgatgacaaggttagcgcccttatgcagcccagccagaaacggtacgtgcagttcttgagcgggctgttatcgggctcagttaagatgaacgctagtcctctgttccttcacttcgtgatcctacatggtacaccaaacttcgacacagggggtgtctgccggccttttctcaaactgtaccaggcgatgcagcccgtctatacgtccgggatttacaatgtgggacctgagaacccatctagaatttgcatagttatcgagcccgcccagctcctcaagggagatgtcatggtgatgaattataatattgccaacatctag

SEQ ID NO: 306228 - DNA, 4338 bp, Artificial Sequence
  derived and/or modified sequence
atggaagaggggcacgggctagatttaacctacatcacggagagaataattgcagtgtcatttccagctgggtgtagcgaggagtcatatctccataatctccaggaggttacgagaatgctcaaatccaaacatggcgataattatctggttctcaaccttagtgagaagcggtatgacctcactaaactaaatcctaaaatcatggacgtaggctggccggagcttcatgccccaccgctcgacaaaatgtgcaccatctgcaaagcccaggaatcctggctcaactctaacctgcagcacgtggtggttatccactgtaggggcggaaagggccgaatcggcgtggtcattagctcatacatgcactttactaacgtatcagcatccgctgatcaggcactggatcgctttgctatgaagaagttctacgatgataaagtgtcagcccttatgcaacctagccagaagcgctatgtacaatttttgtctgggcttctgtcaggttcggtgaagatgaatgcctcaccactgtttctgcacttcgtcatcctgcatgggactcccaattttgataccgggggtgtgtgtcgccctttcctaaaactgtaccaggccatgcagcctgtgtatacctctggaatctataatgtgggccctgagaatccttctaggatctgtatcgtcatcgaacccgctcagctgctgaaaggcgacgtgatggttaagtgttaccataaaaaatataggagcgccacccgggatgttatcttcaggctgcaatttcacaccggggcagtccagggctatgggttggtgtttggcaaggaagacttggacaatgcttctaaagatgaccgatttccggattacgggaaagtagagctcgtattttctgctaccccagaaaaaatacagggaagtgaacacctctacaacgaccatggcgtgatcgtggattacaacaccaccgaccccctgataagatgggacagttacgaaaacttgtccgctgacggcgaggtgcttcacacccaaggacccgtggatgggagtctgtacgcgaaagtgcgtaaaaaatcatccagcgaccctggcatccctggcggaccacaggcaattcctgcaaccaattccccagaccacagcgaccacacactctccgtgtcgagcgactctggtcattctacagcttctgctcgaactgacaaaactgaggagagactagccccaggcactcgacgcggtctctcagcccaggaaaaggctgagctcgaccagctgttaagcggcttcggattggaagatccagggtctagccttaaggagatgaccgacgcgagatccaagtactctggaactcgccatgttgtccccgctcaagtgcacgtgaacggcgatgctgccctgaaggaccgcgagactgacatcctcgacgatgaaatgccgcatcacgacctgcacagtgtagactccctgggaaccttaagttcctctgagggtccgcagtctgctcatctcggtccctttacctgccacaaatcctcccagaatagtctgctgtctgacggctttggttccaatgtaggcgaagacccacagggcactctcgtccccgacctcggtttaggaatggatggcccttacgaacgcgagcgcacgttcggttccagagagcccaaacagcctcagccactgctgaggaaaccttctgtatccgcccagatgcaggcttacggacaatcatcatacagtacccagacttgggtgcgacagcaacaaatggtcgttgcccaccagtattctttcgcccctgatggcgaggctcgcctggtgagtcgctgtcctgctgacaacccgggactagtccaggcccagcccagagtacccctgacccccacccgcggtacctcttctcgggtcgcagtgcagagaggggtcggtagtgggcctcatccccctgatacccagcagccatcgccatccaaagcattcaaaccccgttttcctggcgatcaggtggtgaatggagccggacccgagctctctacagggcctagccccggatcacccacactagatatcgaccagtctatcgagcagctgaacaggcttatactggaactggatccgactttcgagccgattccgacccacatgaatgccctgggatcccaggctaacggaagtgtgagccccgatagcgtgggaggaggattgcgcgctagttcaagactgcctgataccggagaagggcctagcagggctacagggcgtcagggcagcagtgccgagcagcctctgggcggacgattaagaaagttatccctgggccaatatgataatgacgctggcggacagctccccttctccaagtgcgcatggggtaaagctggcgttgactacgcacctaatttgccccctttcccatcacctgccgacgttaaggagacaatgacaccaggatatccacaggaccttgacatcatcgacggtcggatcctgtcttctaaggaatccatgtgtagcaccccagcttttccggtgtcccccgagaccccctatgtaaaaaccgctctgagacatcctcccttcagtcctccagaacctcctctgtcttcacccgcatcacagcataagggagggagagagcccagatcctgtccagaaaccctgacccatgctgtcggaatgtctgagagtcctatcggacctaagagcaccatgctgcgggctgacgcctcttcaaccccttctttccagcaggccttcgcttcctcgtgcacaatatcatccaacggccctgggcagcggagggaatcatcgagtagcgctgaaagacagtgggtggagtccagccccaagccaatggtgagcctgctcggttctggccgtcccactgggtcccccctgagcgccgaattctctggcacgcgcaaggactcaccagtgcttagctgctttccaccttcagagctgcaagcaccgtttcactcacatgagctaagtctcgccgaacccccagatagcctggcaccaccaagcagtcaagctttcctcggcttcggcaccgccccagtcggttccggtctcccacccgaggaagaccttggagcactgttagccaatagccacggggcatcacctacaccaagtataccgctcaccgccacgggcgctgccgacaatggcttcttgtcccacaactttctgacagtggcccctggccacagctctcatcattctcccggattgcaagggcagggagtgaccctgcccggacagccacccttacccgaaaagaagagagcttccgaaggtgaccgcagcttaggctctgtgtcccccagcagttccggttttagcagtcctcatagcggctccaccatttccattccctttcctaatgtgctgcccgacttttcaaaagcctccgaggccgcatcgccactccccgattcgccgggagacaagctggtgattgtgaagttcgtgcaggacaccagtaagttttggtataaggccgacatttcccgcgaacaagctatcgctatgttaaaggataaggagccgggatcctttattgtaagggattcccattcctttagaggtgcctatggcttggcaatgaaagtcgcgactcctccaccttccgttctgcagctgaataagaaagcaggtgatctggcaaatgaactcgtccgccattttttaatcgagtgcactcccaaaggagtgcgtctcaaagggtgcagcaacgagccctacttcggcagcttaacggctctcgtctgccagcacagcataactccattagctctgccttgtaaattgctcattccagagagggatccattagaggaaattgccgagtcaagccctcagaccgccgctaacagcgcagccgaattattaaaacaaggcgctgcttgtaacgtgtggtatctaaattctgtcgagatggagagcctgacgggacaccaggctatccagaaggctctgtccatcactcttgttcaagagcctcccccagtgtctactgtcgtgcattttaaggtctctgcccagggtatcactctgacagacaaccagcgcaagctgttcttcaggcgccattatcctgtgaactccgtgattttttgcgcattagatccccaggatagaaagtggatcaaggacggaccttccagcaaagtgttcggttttgtcgcaagaaagcagggctctgcgactgataacgtgtgtcatctatttgccgaacatgatcctgaacaacctgccagtgctatagtgaactttgtcagtaaagttatgatcgggtcacccaagaaggtgtag

SEQ ID NO: 306229 - DNA, 4338 bp, Artificial Sequence
  derived and/or modified sequence
atggaagagggccatgggttagacttgacctacataaccgagcggatcatcgcggtatcttttcctgccggatgcagcgaagagtcttacctacataatctgcaggaagtcacccgtatgctgaagtccaaacacggcgataattacctcgtactgaatctcagcgagaaacgctacgatctgactaagttgaatcccaagatcatggatgtcggctggcccgaactccacgcaccgccactggacaagatgtgcaccatctgcaaggctcaggaatcctggctcaacagcaatctgcagcacgtggtggtcattcattgccgagggggaaaaggcagaataggggtggttatttcaagctacatgcacttcacaaacgtctcagccagtgccgaccaggcccttgaccgattcgcaatgaagaagttctatgacgacaaggtcagtgctcttatgcaaccgagtcagaaacgctacgtccagttcctgtcaggactcttgtccgggagcgtgaaaatgaacgccagtcctctattcttgcattttgtgattttacacggcaccccgaacttcgacactggaggcgtctgtaggccatttcttaagctgtatcaggccatgcaaccagtgtacaccagtggaatctacaacgttgggcctgaaaaccctagtcgcatctgtattgtgattgaaccagcgcaattgttgaagggcgacgtgatggtaaaatgttatcataagaaataccgcagtgcgactcgggacgtaattttcagacttcaatttcataccggtgcggtgcaaggctacgggttggtctttggcaaggaggatctcgacaacgcttccaaagatgacaggttcccagattatggtaaggttgaactcgtattttccgccacaccggagaaaatccaggggtcagaacatctgtataacgaccatggggtgattgtggattacaatactacggatcccctgatcaggtgggattcatacgagaatctcagcgcggatggcgaagttctccacacgcagggaccagtggacggctcactgtatgccaaagtaagaaaaaaaagctcctccgatcccggaattcccggaggccctcaagccatcccagccacgaatagccccgaccatagtgaccacacactcagtgtgagctccgattcaggtcattccaccgcgtccgctcgtaccgataagacagaggagcgcttggcccctgggacaaggcggggtctctccgcccaggagaaggccgagcttgaccagctactgtctggcttcggactcgaagaccctggttcttcgctcaaggagatgactgatgccagatccaagtactccgggacgagacatgtggtcccagcacaggtgcatgttaatggggacgccgctctgaaggatagagaaacggacattttggacgacgagatgccacatcacgatctccactctgtggacagcttaggcaccttgtctagcagtgagggcccacaatccgcccacttagggcctttcacatgccacaaatcgtctcagaacagtctattaagcgatgggttcggatccaacgtgggcgaagacccccaaggtacgctggtgccagatttaggacttgggatggatgggccttacgaaagagagaggacattcggtagtagggagcccaaacagcctcagccattactccggaaaccgagcgtgagcgcacaaatgcaggcctacgggcaaagttcttatagcacacaaacctgggtaaggcaacagcaaatggtcgtggctcatcagtactccttcgctccagacggggaagccaggctggtttccagatgccctgccgataaccccggtctggtgcaggcacaacctagagtgccactgactcctacaagaggtacatccagtagagtggccgtgcagcggggagtgggtagtggaccgcaccccccagatacacagcagccgtctccttctaaagcgtttaaacctaggttccctggagatcaagtcgtgaacggcgcagggccagagttatccaccgggccatctcccggaagtccaaccctagatatagatcagtctatcgaacagctgaatcgcttgatccttgagctcgatccaactttcgaaccgatcccaacacatatgaatgcactggggagtcaagccaatggatccgtctcccccgactctgtcggcggtggactccgcgctagctcccggttacctgatactggagaaggccctagtcgcgcaaccggccgtcaaggctccagcgctgagcaacctctgggcggtaggctacgcaagctatccctgggacagtatgataatgacgcgggtggacagctgcctttctcaaaatgtgcatggggaaaagctggagtggattatgctcccaacctccctcccttccctagtccagcagatgtgaaggaaacaatgacacctggctacccacaagacctggatattattgatggccgaattctgtcttcaaaggagagcatgtgctcaacccctgcctttcccgtcagccctgagaccccatacgtgaagaccgcattacgtcatcccccatttagcccaccggagccgccactttcaagcccagcaagtcagcacaaaggcggacgtgaacctcgatcctgccccgaaactctgactcatgctgtaggaatgtctgagtcaccaattggaccaaagtctaccatgttgagagccgacgcatcctcgacacccagctttcagcaggcttttgcctcttcctgcactatcagctccaacggaccaggccagcgtagggagagctctagcagcgccgaacggcagtgggtggaaagcagccccaaacccatggttagcttactcgggtcagggcgtcccaccggatcacctttgagcgccgagttcagcgggacccgcaaagattcccctgtgcttagttgttttccaccatcagaattgcaggccccattccattctcatgaactctccctggccgagccccctgacagcctagcccctccctccagtcaagcctttttgggtttcgggaccgcgcctgtcggttcagggctcccccctgaagaggatctaggagccctgctagccaacagccacggggcatcgcctactccatccatccctctcacagcaacgggagcagcggataacggctttctttctcataattttctcacggttgcaccgggtcatagctcacatcactctccagggcttcagggacagggagtcaccctgcctggccagcctcccctgcccgagaagaaacgcgcaagcgagggtgaccggtcactgggaagcgtgtctccctccagtagtggatttagctcgccacattccggtagtactatcagtatcccatttccaaatgtgttgcccgacttctcaaaagcatctgaagcggcttctcccctgcccgactcccctggagacaaactggtaattgtcaagtttgtccaggatacgagcaagttttggtataaggctgacattagtagagaacaggcaatcgccatgctgaaggataaggaaccaggatcgttcattgtccgagatagccacagcttccgcggagcctacggtttggcaatgaaagtggctaccccgcctccatccgttttgcagctaaataagaaagcaggcgatctcgccaatgagctggtgcggcattttctgatcgagtgtacgcctaaaggtgtccggctgaagggctgctcaaatgagccctatttcggatctctcacagctttagtatgccagcattcgatcacccccctggctctcccgtgcaaacttctcattcctgagcgcgaccccttagaagagatcgccgaaagctccccccagacggccgcaaatagcgcagcggaactacttaaacagggggcagcatgcaacgtgtggtacttaaattccgtagaaatggagtccctgacgggccaccaagctatccagaaggccctcagcatcactttggtgcaggagccaccaccggtttccactgttgtgcactttaaggtgtccgcccagggcattaccttgactgacaaccagcgtaagcttttttttagacgacactacccagtgaattccgtcatattttgcgcactggacccacaggataggaaatggataaaggatgggcctagcagtaaggtgttcgggttcgtagccagaaagcaaggctcagcaacagacaatgtgtgccatctttttgctgagcatgatccagagcagcctgctagcgccatcgttaactttgtctctaaagtgatgataggctcccccaagaaggtatag

SEQ ID NO: 306230 - DNA, 417 bp, Artificial Sequence
  derived and/or modified sequence
atggaggaggggcacggtctggacctgacctacatcaccgagcgcataatcgctgtgtcattcccagcaggatgtagcgaagagtcttatttgcataacttacaggaggtgacacgcatgcttaagagtaagcacggtgataattacctggtacttaacctgtctgagaaacgatacgatctgacaaagctgaacccaaaaattatggatgtgggctggcctgagctgcatgccccacctctggacaaaatgtgtacgatctgcaaagcgcaggaatcatggttaaacagcaacttgcagcacgttgtggtcattcactgtaggggaggaaaaggcaggataggcgtggtgattagttcgtacatgcatttcaccaatgtgagcgcctctgcagaccaggcgctggatagattctag

SEQ ID NO: 306231 - DNA, 753 bp, Artificial Sequence
  derived and/or modified sequence
atggaggaaggacatggcctcgacctcacctatattacagagcgtattatcgcagtgagcttccctgcaggatgcagcgaggagagctatcttcacaacctacaagaggtgacaagaatgctaaaaagtaagcacggagacaactacttggtgctaaacctaagcgagaagagatatgacctgaccaaattgaaccccaaaatcatggatgtcggctggcctgaactgcacgcccctcccctggacaagatgtgtactatttgtaaagctcaagagagctggctaaacagcaacctccagcacgtggtcgtgatccactgcagaggcggaaagggtcgcatcggtgtggtcatttcgagctacatgcacttcactaacgtgagcgcctcagccgatcaggcgttagatcgctttgccatgaagaagttttacgacgacaaggtgagtgccctcatgcagccgagtcagaaacggtatgtgcagtttttgagtggactgttgtccggctccgtgaaaatgaacgcatcccctctattcctgcattttgtaattcttcatggtacacctaatttcgataccgggggagtgtgtagacccttcctgaaactgtatcaggctatgcagcctgtatatacatcaggcatttataatgtgggtcccgagaatccaagccgaatctgtatcgtcattgaacccgcacagctactgaagggcgatgtgatggtgatgaattataatatcgccaacatttag

SEQ ID NO: 306232 - DNA, 753 bp, Artificial Sequence
  derived and/or modified sequence
atggaagagggccacggcttggacctaacctatatcacagaaaggattatcgctgtgtcatttcccgcaggctgttctgaagaatcatacctgcacaatctgcaggaagtgacaagaatgttgaaaagtaagcatggagacaactacctggtcctcaatctcagtgagaagcgatatgacctgacaaagttaaaccctaaaatcatggatgttgggtggcctgaattgcacgcccctcccctggataagatgtgcacgatctgcaaggctcaggaaagctggctgaactcaaatttacagcacgtcgtggtgatccattgccggggaggaaagggaaggataggcgtggtgataagcagctatatgcacttcacgaatgtatcagcctccgccgaccaggccttggatagattcgctatgaagaagttctatgacgataaggtctccgcattgatgcagccgtctcagaaaagatacgttcagttcctcagtggattgttatcaggtagcgtgaagatgaatgctagcccactgttcctgcactttgtgatcctgcatggaacacccaactttgacaccgggggtgtgtgtaggccctttctgaaactctaccaggccatgcaacctgtgtatacaagtgggatttacaacgtcggacccgagaatccttccagaatttgtatagtgatagaaccagctcaactgctgaaaggagatgtgatggttatgaactacaacatcgccaatatctag

SEQ ID NO: 306233 - protein, 1205 aa, Artificial Sequence
  derived and/or modified sequence
MEEGHGLDLTYITERIIAVSFPAGCSEESYLHNLQEVTRMLKSKHGDNYLVLNLSEKRYDLTKLNPKIMDVGWPELHAPPLDKMCTICKAQESWLNSNLQHVVVIHCRGGKGRIGVVISSYMHFTNVSASADQALDRFAMKKFYDDKVSALMQPSQKRYVQFLSGLLSGSVKMNASPLFLHFVILHGTPNFDTGGVCRPFLKLYQAMQPVYTSGIYNVGPENPSRICIVIEPAQLLKGDVMMPHHDLHSVDSLGTLSSSEGPQSAHLGPFTCHKSSQNSLLSDGFGSNVGEDPQGTLVPDLGLGMDGPYERERTFGSREPKQPQPLLRKPSVSAQMQAYGQSSYSTQTWVRQQQMVVAHQYSFAPDGEARLVSRCPADNPGLVQAQPRVPLTPTRGTSSRVAVQRGVGSGPHPPDTQQPSPSKAFKPRFPGDQVVNGAGPELSTGPSPGSPTLDIDQSIEQLNRLILELDPTFEPIPTHMNALGSQANGSVSPDSVGGGLRASSRLPDTGEGPSRATGRQGSSAEQPLGGRLRKLSLGQYDNDAGGQLPFSKCAWGKAGVDYAPNLPPFPSPADVKETMTPGYPQDLDIIDGRILSSKESMCSTPAFPVSPETPYVKTALRHPPFSPPEPPLSSPASQHKGGREPRSCPETLTHAVGMSESPIGPKSTMLRADASSTPSFQQAFASSCTISSNGPGQRRESSSSAERQWVESSPKPMVSLLGSGRPTGSPLSAEFSGTRKDSPVLSCFPPSELQAPFHSHELSLAEPPDSLAPPSSQAFLGFGTAPVGSGLPPEEDLGALLANSHGASPTPSIPLTATGAADNGFLSHNFLTVAPGHSSHHSPGLQGQGVTLPGQPPLPEKKRASEGDRSLGSVSPSSSGFSSPHSGSTISIPFPNVLPDFSKASEAASPLPDSPGDKLVIVKFVQDTSKFWYKADISREQAIAMLKDKEPGSFIVRDSHSFRGAYGLAMKVATPPPSVLQLNKKAGDLANELVRHFLIECTPKGVRLKGCSNEPYFGSLTALVCQHSITPLALPCKLLIPERDPLEEIAESSPQTAANSAAELLKQGAACNVWYLNSVEMESLTGHQAIQKALSITLVQEPPPVSTVVHFKVSAQGITLTDNQRKLFFRRHYPVNSVIFCALDPQDRKWIKDGPSSKVFGFVARKQGSATDNVCHLFAEHDPEQPASAIVNFVSKVMIGSPKKV

SEQ ID NO: 306234 - DNA, 3618 bp, Artificial Sequence
  derived and/or modified sequence
atggaggagggccacggcctggacctgacctacatcaccgagagaatcatcgccgtgagcttccccgccggctgcagcgaggagagctacctgcacaacctgcaggaggtgaccagaatgctgaagagcaagcacggcgacaactacctggtgctgaacctgagcgagaagagatacgacctgaccaagctgaaccccaagatcatggacgtgggctggcccgagctgcacgccccccccctggacaagatgtgcaccatctgcaaggcccaggagagctggctgaacagcaacctgcagcacgtggtggtgatccactgcagaggcggcaagggcagaatcggcgtggtgatcagcagctacatgcacttcaccaacgtgagcgccagcgccgaccaggccctggacagattcgccatgaagaagttctacgacgacaaggtgagcgccctgatgcagcccagccagaagagatacgtgcagttcctgagcggcctgctgagcggcagcgtgaagatgaacgccagccccctgttcctgcacttcgtgatcctgcacggcacccccaacttcgacaccggcggcgtgtgcagacccttcctgaagctgtaccaggccatgcagcccgtgtacaccagcggcatctacaacgtgggccccgagaaccccagcagaatctgcatcgtgatcgagcccgcccagctgctgaagggcgacgtgatgatgccccaccacgacctgcacagcgtggacagcctgggcaccctgagcagcagcgagggcccccagagcgcccacctgggccccttcacctgccacaagagcagccagaacagcctgctgagcgacggcttcggcagcaacgtgggcgaggacccccagggcaccctggtgcccgacctgggcctgggcatggacggcccctacgagagagagagaaccttcggcagcagagagcccaagcagccccagcccctgctgagaaagcccagcgtgagcgcccagatgcaggcctacggccagagcagctacagcacccagacctgggtgagacagcagcagatggtggtggcccaccagtacagcttcgcccccgacggcgaggccagactggtgagcagatgccccgccgacaaccccggcctggtgcaggcccagcccagagtgcccctgacccccaccagaggcaccagcagcagagtggccgtgcagagaggcgtgggcagcggcccccacccccccgacacccagcagcccagccccagcaaggccttcaagcccagattccccggcgaccaggtggtgaacggcgccggccccgagctgagcaccggccccagccccggcagccccaccctggacatcgaccagagcatcgagcagctgaacagactgatcctggagctggaccccaccttcgagcccatccccacccacatgaacgccctgggcagccaggccaacggcagcgtgagccccgacagcgtgggcggcggcctgagagccagcagcagactgcccgacaccggcgagggccccagcagagccaccggcagacagggcagcagcgccgagcagcccctgggcggcagactgagaaagctgagcctgggccagtacgacaacgacgccggcggccagctgcccttcagcaagtgcgcctggggcaaggccggcgtggactacgcccccaacctgccccccttccccagccccgccgacgtgaaggagaccatgacccccggctacccccaggacctggacatcatcgacggcagaatcctgagcagcaaggagagcatgtgcagcacccccgccttccccgtgagccccgagaccccctacgtgaagaccgccctgagacacccccccttcagcccccccgagccccccctgagcagccccgccagccagcacaagggcggcagagagcccagaagctgccccgagaccctgacccacgccgtgggcatgagcgagagccccatcggccccaagagcaccatgctgagagccgacgccagcagcacccccagcttccagcaggccttcgccagcagctgcaccatcagcagcaacggccccggccagagaagagagagcagcagcagcgccgagagacagtgggtggagagcagccccaagcccatggtgagcctgctgggcagcggcagacccaccggcagccccctgagcgccgagttcagcggcaccagaaaggacagccccgtgctgagctgcttcccccccagcgagctgcaggcccccttccacagccacgagctgagcctggccgagccccccgacagcctggccccccccagcagccaggccttcctgggcttcggcaccgcccccgtgggcagcggcctgccccccgaggaggacctgggcgccctgctggccaacagccacggcgccagccccacccccagcatccccctgaccgccaccggcgccgccgacaacggcttcctgagccacaacttcctgaccgtggcccccggccacagcagccaccacagccccggcctgcagggccagggcgtgaccctgcccggccagccccccctgcccgagaagaagagagccagcgagggcgacagaagcctgggcagcgtgagccccagcagcagcggcttcagcagcccccacagcggcagcaccatcagcatccccttccccaacgtgctgcccgacttcagcaaggccagcgaggccgccagccccctgcccgacagccccggcgacaagctggtgatcgtgaagttcgtgcaggacaccagcaagttctggtacaaggccgacatcagcagagagcaggccatcgccatgctgaaggacaaggagcccggcagcttcatcgtgagagacagccacagcttcagaggcgcctacggcctggccatgaaggtggccacccccccccccagcgtgctgcagctgaacaagaaggccggcgacctggccaacgagctggtgagacacttcctgatcgagtgcacccccaagggcgtgagactgaagggctgcagcaacgagccctacttcggcagcctgaccgccctggtgtgccagcacagcatcacccccctggccctgccctgcaagctgctgatccccgagagagaccccctggaggagatcgccgagagcagcccccagaccgccgccaacagcgccgccgagctgctgaagcagggcgccgcctgcaacgtgtggtacctgaacagcgtggagatggagagcctgaccggccaccaggccatccagaaggccctgagcatcaccctggtgcaggagcccccccccgtgagcaccgtggtgcacttcaaggtgagcgcccagggcatcaccctgaccgacaaccagagaaagctgttcttcagaagacactaccccgtgaacagcgtgatcttctgcgccctggacccccaggacagaaagtggatcaaggacggccccagcagcaaggtgttcggcttcgtggccagaaagcagggcagcgccaccgacaacgtgtgccacctgttcgccgagcacgaccccgagcagcccgccagcgccatcgtgaacttcgtgagcaaggtgatgatcggcagccccaagaaggtgtag

SEQ ID NO: 306235 - DNA, 2760 bp, Artificial Sequence
  derived and/or modified sequence
atggacggcccctacgagagagagagaaccttcggcagcagagagcccaagcagccccagcccctgctgagaaagcccagcgtgagcgcccagatgcaggcctacggccagagcagctacagcacccagacctgggtgagacagcagcagatggtggtggcccaccagtacagcttcgcccccgacggcgaggccagactggtgagcagatgccccgccgacaaccccggcctggtgcaggcccagcccagagtgcccctgacccccaccagaggcaccagcagcagagtggccgtgcagagaggcgtgggcagcggcccccacccccccgacacccagcagcccagccccagcaaggccttcaagcccagattccccggcgaccaggtggtgaacggcgccggccccgagctgagcaccggccccagccccggcagccccaccctggacatcgaccagagcatcgagcagctgaacagactgatcctggagctggaccccaccttcgagcccatccccacccacatgaacgccctgggcagccaggccaacggcagcgtgagccccgacagcgtgggcggcggcctgagagccagcagcagactgcccgacaccggcgagggccccagcagagccaccggcagacagggcagcagcgccgagcagcccctgggcggcagactgagaaagctgagcctgggccagtacgacaacgacgccggcggccagctgcccttcagcaagtgcgcctggggcaaggccggcgtggactacgcccccaacctgccccccttccccagccccgccgacgtgaaggagaccatgacccccggctacccccaggacctggacatcatcgacggcagaatcctgagcagcaaggagagcatgtgcagcacccccgccttccccgtgagccccgagaccccctacgtgaagaccgccctgagacacccccccttcagcccccccgagccccccctgagcagccccgccagccagcacaagggcggcagagagcccagaagctgccccgagaccctgacccacgccgtgggcatgagcgagagccccatcggccccaagagcaccatgctgagagccgacgccagcagcacccccagcttccagcaggccttcgccagcagctgcaccatcagcagcaacggccccggccagagaagagagagcagcagcagcgccgagagacagtgggtggagagcagccccaagcccatggtgagcctgctgggcagcggcagacccaccggcagccccctgagcgccgagttcagcggcaccagaaaggacagccccgtgctgagctgcttcccccccagcgagctgcaggcccccttccacagccacgagctgagcctggccgagccccccgacagcctggccccccccagcagccaggccttcctgggcttcggcaccgcccccgtgggcagcggcctgccccccgaggaggacctgggcgccctgctggccaacagccacggcgccagccccacccccagcatccccctgaccgccaccggcgccgccgacaacggcttcctgagccacaacttcctgaccgtggcccccggccacagcagccaccacagccccggcctgcagggccagggcgtgaccctgcccggccagccccccctgcccgagaagaagagagccagcgagggcgacagaagcctgggcagcgtgagccccagcagcagcggcttcagcagcccccacagcggcagcaccatcagcatccccttccccaacgtgctgcccgacttcagcaaggccagcgaggccgccagccccctgcccgacagccccggcgacaagctggtgatcgtgaagttcgtgcaggacaccagcaagttctggtacaaggccgacatcagcagagagcaggccatcgccatgctgaaggacaaggagcccggcagcttcatcgtgagagacagccacagcttcagaggcgcctacggcctggccatgaaggtggccacccccccccccagcgtgctgcagctgaacaagaaggccggcgacctggccaacgagctggtgagacacttcctgatcgagtgcacccccaagggcgtgagactgaagggctgcagcaacgagccctacttcggcagcctgaccgccctggtgtgccagcacagcatcacccccctggccctgccctgcaagctgctgatccccgagagagaccccctggaggagatcgccgagagcagcccccagaccgccgccaacagcgccgccgagctgctgaagcagggcgccgcctgcaacgtgtggtacctgaacagcgtggagatggagagcctgaccggccaccaggccatccagaaggccctgagcatcaccctggtgcaggagcccccccccgtgagcaccgtggtgcacttcaaggtgagcgcccagggcatcaccctgaccgacaaccagagaaagctgttcttcagaagacactaccccgtgaacagcgtgatcttctgcgccctggacccccaggacagaaagtggatcaaggacggccccagcagcaaggtgttcggcttcgtggccagaaagcagggcagcgccaccgacaacgtgtgccacctgttcgccgagcacgaccccgagcagcccgccagagagagccagagacacagaggcgccagagacggcccccacgaggccatgcccagaagacacagcggcagccccgccaacgtgctgttcgagctgatcggccaggtgtag

SEQ ID NO: 306236 - DNA, 3618 bp, Artificial Sequence
  derived and/or modified sequence
atggaagaaggccacggcctggatctaacttatattaccgaacggatcattgccgtgtccttccccgcaggatgctcagaggagtcttacctacataatctacaagaggtaactagaatgctgaagtcaaagcatggagataactacctggttttgaacctctctgagaagcgctacgatttgaccaaacttaacccaaaaatcatggacgtcggctggccggagctccatgccccgccgctggacaagatgtgtaccatttgtaaggcacaggagagttggctgaattctaatctgcagcacgtggtggtaattcactgtcgcggggggaaagggcgtattggcgtagtcatttcctcttacatgcacttcaccaacgtgtctgcctccgcagaccaagcactggacagatttgctatgaagaaattttacgatgacaaggtgagcgccctgatgcagccgagtcagaagaggtacgtgcaatttttatcaggcctactgagcgggtctgtgaaaatgaatgcgagtcccctgtttttgcattttgtgatcctccatggtactcccaattttgacacaggtggcgtgtgcagaccttttctcaagttgtatcaagctatgcagccagtctacacatctggaatatataacgttggtccagagaacccctcacggatctgtattgtgatcgagcctgctcaactcctgaaaggagacgtgatgatgccccaccacgacctgcattctgtggatagcctcggcacactgtcttcgagcgaggggcctcagagcgctcatctgggcccattcacttgtcacaagagtagccaaaattccctgttgagcgacgggttcggctcaaatgtcggggaggatccccaggggaccctggttcctgatttaggcctcggcatggatgggccgtacgagcgcgaaagaactttcggtagcagagagccaaagcaaccccagcctctgctccgaaagccttctgtatcagcccagatgcaagcgtacggccaaagcagctattctacccagacatgggtcaggcagcagcagatggtggtggcgcatcagtacagctttgccccggacggagaagctcggttggtgagccgatgtcctgctgacaatccgggcctggttcaggcacagccacgagtcccactgactccaacgcgaggaaccagctctcgggtggctgtccagcggggagtcggctcaggaccacaccctcccgacacacagcaacccagcccgtctaaagcctttaagcctaggttccctggtgaccaggtcgttaatggggccggccccgagctcagtactggtccatcccccggatccccaactctggacatagaccagtctattgagcagctgaatagactgattctggaactggaccccactttcgaacctatcccgacccatatgaatgctttaggcagccaagccaacggatctgtcagtccagactctgtgggcggcgggctgcgcgcttctagtcgcttgccggatacaggcgagggccctagcagagctactggaagacaaggaagctcagccgagcagcccctgggcgggaggctgcgcaagttgagcttagggcagtatgataatgacgctggcggccagctcccattctcgaaatgcgcgtggggaaaggctggcgtggattacgctcctaacctgcccccattccctagccccgccgatgtgaaggaaaccatgacccccggatacccacaggacttggacattattgacggacggattctgtcctccaaagaatccatgtgttcaactccagcctttccagtaagtcctgaaacaccctacgtgaaaacagcattaaggcaccccccgttctcccccccggagcccccactgagcagtcctgcatcacagcacaagggggggagggagcctaggtcctgcccggaaactctgacacacgctgttgggatgtccgaatccccaatcgggccgaaaagcaccatgcttagagccgacgccagctctacgccatccttccagcaggccttcgcctcttcctgtacgataagctcgaacggccctggccagagaagagagtcctcttcaagcgctgagaggcagtgggtggaaagttcgccgaagccgatggtgagcctgctgggctcaggtcgaccgacaggctctccactgtccgcggagtttagcggtacgcgaaaagattctcctgtcctctcttgttttccccccagcgagctgcaagccccttttcacagtcacgagctgagtctggccgagcctccagactcgcttgccccacccagctcacaagcatttcttggcttcgggactgccccagtgggaagtggcctgccccctgaggaggatttgggtgccctcttggcaaactcgcatggcgccagcccgaccccttcaatacctttaactgctacaggcgcggcggataacggttttctaagtcacaattttttaacagttgcaccaggacacagcagccaccacagtccaggcctccagggccagggcgtgaccttgcctggtcaaccgcctctccccgagaagaaaagggcgagcgaaggagatcgcagcttaggatccgtctcccccagttcctccggtttttctagtccacactctggctccaccatcagcattcccttccccaatgtgctacccgatttttccaaggcctccgaagcagcgagcccactgcctgatagccccggggataagcttgtgatcgtaaagttcgtgcaggacacctccaaattctggtacaaagccgacatctccagagagcaggcaattgcaatgctgaaggataaggagcccggaagtttcattgtgcgtgattcacactcgtttagaggcgcctatggcctggcaatgaaggtggccactcctcctccgtctgtcctccagttgaacaaaaaagctggcgacctggcaaacgagctcgtacgacacttcctaattgagtgcactccaaaaggcgtgaggctgaagggatgctcaaatgaaccgtatttcgggagtttgacggcgctggtctgccagcattctattactccattagccctgccctgcaaacttctcattccagagcgggaccctctggaggaaatagcggaaagttccccacaaactgctgcgaactcggccgccgagctgcttaagcaaggagccgcatgcaacgtgtggtatctgaacagcgttgaaatggagtctttaacaggccatcaggcaatccagaaagcactctctataaccctggttcaggagcctccgcctgtgtctacagtggtccacttcaaggtcagtgctcagggcattactctcactgacaaccagcgcaaactgtttttccggcgccactaccccgtaaactcagtgatcttctgtgcattagatcctcaggatcgaaagtggatcaaggacggcccatcttccaaagtattcggcttcgtagctcggaaacaaggtagtgccaccgacaatgtgtgccatctgtttgccgaacacgatcctgagcagccagccagcgctatagtgaacttcgtatctaaagtgatgattggatccccaaaaaaggtgtag

SEQ ID NO: 306237 - DNA, 2760 bp, Artificial Sequence
  derived and/or modified sequence
atggatggaccttacgaaagagaacgcaccttcggaagtagggagcccaagcagccccagccactgctcaggaagccttccgtcagtgcccagatgcaggcctatggtcagtcgagctacagcacgcagacatgggtgagacaacagcagatggtggtggctcaccagtattcttttgcccccgacggagaagcacggctcgtcagccgatgccctgcggacaaccctggcttagtgcaggcccaacctagagtgcccttgaccccaactaggggcactagcagccgggtagctgtccagcgaggggtgggcagcgggccccacccaccggatactcaacagccgtctcccagtaaagcttttaagcctcgattcccgggagatcaagtggtgaacggcgctgggcctgaattgtcaacaggcccaagccccggatctcctactcttgacatcgatcagtctatcgagcagcttaatagactcatcctcgagttagacccaacattcgagcccattccaactcacatgaacgccttgggatcacaggccaatggcagtgtcagtcccgactctgtgggaggtgggctgcgtgcttcttcccgcctcccagacactggcgagggtcccagcagagccacaggccgacagggctcatccgccgagcagcctctgggtggccggctgcgaaaactgagtctgggacaatacgataacgatgctggcggccagttacccttttctaaatgtgcctggggcaaggcaggggtcgactatgctcctaacctaccaccgttcccctctcctgccgatgtgaaggagactatgacacccggatatccccaggacctggatatcatcgacggtcggatcctgagttccaaggagagcatgtgtagcaccccagctttccccgtcagccctgagactccttatgtgaaaaccgctctgcgccacccacctttctccccacctgagccccctctatcctcccccgcatcccagcataaaggagggagagagcctcgcagctgtcctgagaccttgactcatgccgtcggcatgagtgagtccccaatcggccccaagtctaccatgctccgggcagacgcatcgtcaacacccagttttcaacaggccttcgccagctcgtgcacgatttcttctaatggaccgggacagcgtcgcgagtcctcctcctccgcagagagacagtgggttgaaagctccccaaaacccatggtaagcttgctggggtccggacgtcccaccggctcaccactcagcgccgagttcagcggcaccaggaaggacagtcctgtgttatcatgctttccgccttctgaactgcaggcccccttccactcccatgaacttagcttagccgagcccccagattctctcgctccaccgtcatcccaggctttcctgggcttcggaaccgcccctgttgggtctggcttacctccagaggaggatctgggcgctcttttggcaaacagccacggcgcaagccccacaccaagcatccccctcacagccaccggagccgccgataatggattcctttcccataattttttaaccgtggccccggggcattccagccatcattcacctggcctgcagggccagggcgtaactctgccggggcagcctcctctgcccgagaagaagcgggcctctgagggtgatagaagtcttgggtctgtctccccaagctcatctgggttttcatctccacatagtgggtccactataagcattccgttccccaatgtgctccccgacttctctaaagccagcgaagctgcgagccctctgcctgacagccccggggataagttggtgatcgtgaagttcgtgcaggacaccagcaaattttggtacaaggcggatatcagccgagagcaagccattgctatgctgaaagacaaagaacctgggagcttcattgtgcgagattcccactcatttaggggcgcctacggtctggctatgaaggtcgctacccctcctcctagtgtgctgcagctgaataagaaggccggggatctggccaacgaactggttcggcactttctcatcgagtgtacaccaaagggcgtccgtctaaagggatgttccaatgaaccttattttggctcattgacagctctcgtttgtcaacactcaataacaccgctggccttaccttgcaagctcctgatccccgagcgggacccactcgaggaaattgctgagagctcccctcagactgccgcaaacagcgctgcagagctcttgaagcagggcgccgcatgtaacgtgtggtacctaaactctgtggaaatggaatcgttaaccgggcatcaggccatccaaaaagcactgtctatcacactggtgcaggaaccccctcctgtgtctacagtggtgcattttaaagtgtccgctcaaggaatcactcttactgacaatcagcgaaaactgttctttagacgccattaccctgtaaatagcgtgatcttctgcgccctggacccacaggataggaaatggatcaaggacggccccagctccaaggtgtttgggtttgtggctcgcaaacaggggtcagcgaccgataacgtgtgtcacctatttgctgagcacgatccagaacagcctgcaagagaaagccagagacacagaggtgctcgggacggtccacacgaagcaatgcccagacgccacagtggatcacccgccaacgttctgtttgagcttatcggacaggtgtag

SEQ ID NO: 306238 - DNA, 3618 bp, Artificial Sequence
  derived and/or modified sequence
atggaggagggccacggcctggacctgacctacatcacagagcgcatcatcgctgtgtccttccctgctggctgcagcgaggagagctacctgcacaacctgcaggaggtgaccaggatgctgaagagcaagcatggagacaactacctggtgctgaacctgtctgagaagagatatgacctgaccaagctgaaccccaagatcatggatgtgggctggccagagctgcacgccccacccctggacaagatgtgcaccatctgcaaggcccaggagagctggctgaacagcaacctgcagcacgtggtggtgatccactgccggggcggcaagggccgcatcggcgtggtgatcagcagctacatgcacttcaccaacgtgtctgccagcgctgaccaggccctggacagatttgccatgaagaagttctatgatgacaaggtgtctgccctgatgcagcccagccagaagagatatgtgcagttcctgagcggcctgctgagcggctctgtgaagatgaatgccagccccctcttcctgcacttcgtcatcctgcacggcacccccaactttgacacaggaggagtgtgccggcccttcctgaagctgtaccaggccatgcagcctgtgtacaccagcggcatctacaacgtgggccctgagaaccccagccgcatctgcatcgtcatcgagcccgcccagctgctgaagggagatgtgatgatgccccaccacgacctgcacagcgtggacagcctgggcaccctgagcagcagcgagggcccccagagcgcccacctgggccccttcacctgccacaagagcagccagaacagcctgctgagtgatggcttcggcagcaatgtgggggaggacccccagggcaccctggtgcctgacctgggcctgggcatggatggcccctatgagcgggagaggaccttcggcagccgggagcccaagcagccccagcccctgctgaggaagcccagcgtgtctgcccagatgcaggcctacggccagagcagctacagcacccagacctgggtgcggcagcagcagatggtggtggcccaccagtacagctttgccccagatggagaggcccggctggtgagccgctgcccagctgacaaccctggcctggtgcaggcccagccccgggtgcccctgacccccacccggggcaccagcagccgggtggccgtgcagaggggcgtgggcagcggcccccaccccccagacacccagcagcccagccccagcaaggccttcaagccccgcttccctggggaccaggtggtgaatggagctggccctgagctgagcacaggccccagccctggcagccccaccctggacatcgaccagagcattgagcagctgaacagactcatcctggagctggaccccacctttgagcccatccccacccacatgaatgccctgggcagccaggccaacggctctgtgtccccagattctgtgggcggcggcctgcgggccagcagccggctgcctgacacaggagagggccccagccgggccaccggccggcagggcagcagcgctgagcagcccctgggcggccgcctgaggaagctgagcctgggccagtatgacaatgatgctgggggccagctgcccttcagcaaatgtgcctggggcaaggccggcgtggactatgcccccaacctgccccccttccccagccctgcagatgtgaaggagaccatgaccccaggctacccccaggacctggacatcattgatggccgcatcctgagcagcaaggagagcatgtgcagcaccccagccttccctgtgtccccagagaccccctacgtgaagacagccctgcggcacccccccttcagccccccagagccccccctgagcagccctgccagccagcacaagggcggccgggagcccaggagctgcccagagaccctgacccatgctgtgggcatgtctgagagccccatcggccccaagagcaccatgctgcgggcagatgccagcagcacccccagcttccagcaggcctttgccagcagctgcaccatcagcagcaatggacctggccagaggcgggagagcagcagcagcgctgagcggcagtgggtggagagcagccccaagcccatggtgtccctgctgggcagcggccggcccaccggcagccccctgtctgctgagttcagcggcaccaggaaggacagccctgtgctgagctgcttccccccatctgagctgcaggcccccttccacagccatgagctgagcctggccgagcccccagacagcctggccccacccagcagccaggccttcctgggcttcggcacagcccctgtgggcagcggcctgcccccagaggaggacctgggcgccctgctggccaacagccatggagccagccccacccccagcatccccctgacagccaccggggctgctgacaatggcttcctgagccacaacttcctgactgtggcccctggccacagcagccaccacagccctggcctgcagggccagggcgtgaccctgcccggccagccccccctgcctgagaagaagagggccagcgagggggacaggagcctgggctctgtgagccccagcagcagcggcttcagcagcccccacagcggcagcaccatcagcatccccttccccaacgtgctgcctgacttcagcaaggccagcgaggccgccagccccctgcctgacagccctggggacaagctggtgattgtgaagtttgtgcaggacaccagcaagttctggtacaaggctgacatcagccgggagcaggccatcgccatgctgaaggacaaggagcccggcagcttcatcgtgcgggacagccacagcttccggggggcctacggcctggccatgaaggtggccaccccaccacccagcgtgctgcagctgaacaagaaggccggggacctggccaatgagctggtgcgccacttcctgattgagtgcacccccaagggcgtgcggctgaagggctgcagcaatgagccctacttcggcagcctgacagccctggtgtgccagcacagcatcacccccctggccctgccctgcaagctgctgatccctgagcgggaccccctggaggagattgctgagagcagcccccagacagctgccaacagcgctgctgagctgctgaagcagggcgccgcctgcaatgtgtggtacctgaacagcgtggagatggagagcctgaccggccaccaggccatccagaaggccctgagcatcaccctggtgcaggagcccccacctgtgtccacagtggtgcacttcaaggtgtctgcccagggcatcaccctgacagacaaccagaggaagctgttcttccgccgccactaccctgtgaacagcgtcatcttctgtgccctggacccccaggacaggaagtggatcaaggatggccccagcagcaaggtgtttggatttgtggccaggaagcagggcagcgccacagacaacgtgtgccacctgtttgctgagcatgaccctgagcagcctgccagcgccatcgtgaactttgtgtccaaggtgatgattggcagccccaagaaggtgtag

SEQ ID NO: 306239 - DNA, 2760 bp, Artificial Sequence
  derived and/or modified sequence
atggatggcccctatgagcgggagaggaccttcggcagccgggagcccaagcagccccagcccctgctgaggaagcccagcgtgtctgcccagatgcaggcctacggccagagcagctacagcacccagacctgggtgcggcagcagcagatggtggtggcccaccagtacagctttgccccagatggagaggcccggctggtgagccgctgcccagctgacaaccctggcctggtgcaggcccagccccgggtgcccctgacccccacccggggcaccagcagccgggtggccgtgcagaggggcgtgggcagcggcccccaccccccagacacccagcagcccagccccagcaaggccttcaagccccgcttccctggggaccaggtggtgaatggagctggccctgagctgagcacaggccccagccctggcagccccaccctggacatcgaccagagcattgagcagctgaacagactcatcctggagctggaccccacctttgagcccatccccacccacatgaatgccctgggcagccaggccaacggctctgtgtccccagattctgtgggcggcggcctgcgggccagcagccggctgcctgacacaggagagggccccagccgggccaccggccggcagggcagcagcgctgagcagcccctgggcggccgcctgaggaagctgagcctgggccagtatgacaatgatgctgggggccagctgcccttcagcaaatgtgcctggggcaaggccggcgtggactatgcccccaacctgccccccttccccagccctgcagatgtgaaggagaccatgaccccaggctacccccaggacctggacatcattgatggccgcatcctgagcagcaaggagagcatgtgcagcaccccagccttccctgtgtccccagagaccccctacgtgaagacagccctgcggcacccccccttcagccccccagagccccccctgagcagccctgccagccagcacaagggcggccgggagcccaggagctgcccagagaccctgacccatgctgtgggcatgtctgagagccccatcggccccaagagcaccatgctgcgggcagatgccagcagcacccccagcttccagcaggcctttgccagcagctgcaccatcagcagcaatggacctggccagaggcgggagagcagcagcagcgctgagcggcagtgggtggagagcagccccaagcccatggtgtccctgctgggcagcggccggcccaccggcagccccctgtctgctgagttcagcggcaccaggaaggacagccctgtgctgagctgcttccccccatctgagctgcaggcccccttccacagccatgagctgagcctggccgagcccccagacagcctggccccacccagcagccaggccttcctgggcttcggcacagcccctgtgggcagcggcctgcccccagaggaggacctgggcgccctgctggccaacagccatggagccagccccacccccagcatccccctgacagccaccggggctgctgacaatggcttcctgagccacaacttcctgactgtggcccctggccacagcagccaccacagccctggcctgcagggccagggcgtgaccctgcccggccagccccccctgcctgagaagaagagggccagcgagggggacaggagcctgggctctgtgagccccagcagcagcggcttcagcagcccccacagcggcagcaccatcagcatccccttccccaacgtgctgcctgacttcagcaaggccagcgaggccgccagccccctgcctgacagccctggggacaagctggtgattgtgaagtttgtgcaggacaccagcaagttctggtacaaggctgacatcagccgggagcaggccatcgccatgctgaaggacaaggagcccggcagcttcatcgtgcgggacagccacagcttccggggggcctacggcctggccatgaaggtggccaccccaccacccagcgtgctgcagctgaacaagaaggccggggacctggccaatgagctggtgcgccacttcctgattgagtgcacccccaagggcgtgcggctgaagggctgcagcaatgagccctacttcggcagcctgacagccctggtgtgccagcacagcatcacccccctggccctgccctgcaagctgctgatccctgagcgggaccccctggaggagattgctgagagcagcccccagacagctgccaacagcgctgctgagctgctgaagcagggcgccgcctgcaatgtgtggtacctgaacagcgtggagatggagagcctgaccggccaccaggccatccagaaggccctgagcatcaccctggtgcaggagcccccacctgtgtccacagtggtgcacttcaaggtgtctgcccagggcatcaccctgacagacaaccagaggaagctgttcttccgccgccactaccctgtgaacagcgtcatcttctgtgccctggacccccaggacaggaagtggatcaaggatggccccagcagcaaggtgtttggatttgtggccaggaagcagggcagcgccacagacaacgtgtgccacctgtttgctgagcatgaccctgagcagcctgcccgggagagccagaggcacagaggagccagagatggcccccatgaggccatgccccggcggcacagcggcagccctgccaacgtgctgtttgagctgattggccaggtgtag

SEQ ID NO: 306240 - DNA, 3618 bp, Artificial Sequence
  derived and/or modified sequence
atggaggagggccacggcctggacctgacctacatcaccgagcggatcatagcagtttcttttcccgcaggttgctcggaggaatcctacttacataatctgcaggaagttactcggatgcttaaatctaagcatggagataactatttggtgttaaacctcagcgagaaacgttacgacctgacaaaactgaaccccaaaattatggatgtgggttggcctgagctgcatgcacccccgctagacaaaatgtgcaccatctgtaaggcacaggaatcctggctcaactctaatctgcaacatgtggtggttatccactgcagaggtggtaaaggccggataggcgtggtcattagcagctacatgcacttcaccaacgtatctgcctctgcggaccaggctttagataggttcgcaatgaagaagttctacgatgataaagttagtgccctgatgcagcctagccagaaaaggtatgtgcaatttctcagtggactgctctctggcagcgtcaaaatgaacgcgtcaccgctgttccttcattttgtgattctgcacggcacaccaaacttcgacactggaggagtatgccggccattcctgaagttgtatcaggctatgcagcctgtctacacatctgggatttataacgtggggcctgagaacccctctcggatctgtatcgtcattgagcccgcccagctgttaaaaggcgacgttatgatgccacatcacgatttgcatagcgtagatagcctgggtacacttagcagtagcgagggcccacagtctgcacaccttggcccatttacttgccataagagcagccagaattctctactctccgatggtttcgggagtaatgtgggcgaagatccccagggaactctcgttccagacctgggcctggggatggacggtccctatgaaagggaacgaacatttggtagccgggaacctaagcagccccagccactgctgcggaagccgagcgtgtctgcgcagatgcaagcctacggacagagctcttatagcacccagacctgggtcaggcaacagcagatggtcgtcgctcaccagtacagtttcgcccctgacggcgaagcaaggttggtttctcgctgtcccgctgacaacccgggtctcgtccaggcccagccccgcgtgccactcacgcccactcgggggacttcatcccgggttgctgtgcagagaggtgtcggtagcggcccacatccaccggatacacagcagcctagcccaagcaaagcattcaagccgaggttccctggcgaccaggtggtgaacggggccggaccggaactgagtactggcccaagtcccggctcacccaccctggacattgaccagtccattgagcagttgaataggttgattctcgaactggaccctacattcgagccgatcccaactcatatgaatgcactaggcagccaggcaaacggatcagtgtcccccgactcagtgggtggtggcctccgcgcctcctcccgtctaccggatacaggggagggaccgtcacgcgccaccggcagacagggatcaagcgcagagcagcctctgggcggacgtctccgcaagctgtctttgggccaatacgataatgacgccgggggacagctgcctttttcgaagtgcgcgtgggggaaagcaggcgttgattacgcccctaacctgcctccctttcctagccccgccgatgtcaaagaaacaatgacacccggctacccccaggacctcgatataatcgacggtcgcatcttgagttcaaaggagagtatgtgttctactcccgctttcccagtctcccctgaaaccccatacgtcaaaaccgccctccgtcaccctcccttcagcccccccgagccccccctgagctctcctgcatcacagcacaaaggtggccgggagccccgatcttgcccagaaaccctcacccatgctgtcggcatgtccgagtcccccatcggtccaaagtctactatgctccgtgcggacgcgtcgtccaccccatccttccaacaggcctttgcctccagctgcactatttcatctaacggccctgggcagagacgggaatccagctcatcggctgaaagacagtgggtcgagtctagcccaaagcctatggtatctctgttgggctccgggcgccccaccggaagtcccctgtctgctgaattttccggtaccaggaaggactctccggttctgtcatgcttccccccatctgagcttcaggcaccctttcactcacatgagctttccctggctgagcccccagactctctggctccgcccagcagccaggccttcctaggttttggcacagcaccagtggggagcggactcccacctgaggaggacctgggcgctctcctggctaacagtcacggcgcttcgccaacgccttccatcccactgacggccacgggggccgccgacaacggttttttgtctcacaattttctcacggtggcgcctgggcattctagccaccacagtcccggactgcagggacagggtgttaccctaccggggcagccccccctgcctgagaagaaaagggcctccgaaggggacaggagcctcgggtctgtctctccgtcatccagcggattttcaagccctcactccggcagcacaatctccattccattccctaacgtgctgccagatttctccaaggcctctgaagctgcttctcccctgccggattcccccggggataaactcgtcatagtcaaattcgtgcaagacacatcaaaattttggtacaaggccgatatcagccgcgagcaagccatcgccatgctaaaggataaggagccaggaagttttatcgtcagggactcacactcctttcgtggcgcctatggattggcaatgaaggttgccacaccaccgcccagtgtgctacaactgaataagaaggccggcgatctcgctaacgaactcgttagacacttcctaatagaatgtacccccaagggtgtcaggctcaagggctgcagtaacgaaccttatttcgggtcactcacagctctggtctgtcagcatagcataacgccactggccttaccgtgtaagctgctgatccccgaaagggatcccctggaggaaatcgccgaaagtagcccgcagaccgcagctaactccgctgccgagctcctgaaacagggcgccgcctgtaacgtttggtacttaaactccgttgaaatggagtcgttgaccggacaccaggccattcaaaaagccttgtcaattaccctcgtccaggagcctccccccgtgtctacggtcgttcattttaaggtgtcagcccaggggatcactctcactgacaatcagcggaagcttttctttaggcggcactacccagtgaattccgtcatcttctgtgccctcgacccccaagaccgaaagtggatcaaggacggaccatctagtaaggtctttgggttcgtggctcgaaaacaggggagcgctactgataatgtgtgccacctgttcgcagaacatgacccagaacaaccagcgagcgccatcgtgaacttcgtctcaaaagtcatgataggctcgccgaaaaaggtgtag

SEQ ID NO: 306241 - DNA, 2760 bp, Artificial Sequence
  derived and/or modified sequence
atggacggcccctacgagcgggagcggaccttcggcagccgggagccgaaacaacctcagccattactacgtaagcctagcgtatccgcgcagatgcaggcatacggacagagtagctatagcacccaaacttgggtgcgccagcagcagatggtcgtagcacaccagtactcattcgctcccgacggggaggctaggttggtgagtagatgtccagccgataaccccggtctggtgcaggcacagccaagagtccccttgacccctacgaggggcacctcaagcagggtggccgttcagagaggcgttggtagcggtccccatccacctgacacacaacagcccagtccaagcaaggcctttaaacccagattccccggggatcaggtggttaatggtgcaggtcccgagctgtcaacaggcccatctccgggctcacccaccctcgacatcgatcagagtatagagcaactgaacaggctcatcctcgaattagatcctacatttgaaccaattccaacccacatgaacgctttaggcagccaggcaaacgggagtgtttctccagattcggttggcgggggactgagagcttcaagcaggttgcccgacacaggggagggtcctagccgcgcaaccggccggcagggctcctccgctgagcagcctctgggtggccgactgagaaaattgtcactgggccaatatgacaatgacgctggggggcagctccctttttctaagtgcgcctgggggaaagccggcgtggattatgctcctaatctgccaccctttccctcaccagccgatgttaaagagacaatgacccccggatacccacaggatctggacatcattgatggtcggattctaagctcaaaggaatccatgtgcagcacaccggccttccccgtctcaccagagaccccttatgtgaaaactgcactacggcaccctccgttctcccctcccgagcctcctctgtcttcgcctgcatctcagcataagggggggagagagcctcggagctgtcctgaaacactgacacacgctgtcggtatgagcgagagtcccattggtcccaaaagcaccatgctgcgggcagacgcatcttcaacaccttcctttcagcaggcttttgctagttcttgtaccatctcgagcaacggcccaggccagcgacgcgaatctagcagtagcgctgagaggcagtgggtggagtcctcacccaaacctatggtgtccctactcgggtctggccgcccaactggctctccgctttcagccgaattctctgggacgcgtaaggatagtcccgtgctgtcttgtttccctccgagcgagcttcaggccccctttcatagccacgagttgagcctagctgaaccaccagacagtcttgcccctccctcgtcacaggcgttcctgggctttggaacagctcccgtgggttctggattgccccccgaggaagacttgggagcactgctggcgaatagccacggcgcctcaccaacgccatcgattccactgaccgccacaggagctgctgataatggatttctgtcacataattttctgaccgtggccccaggccattctagtcaccatagcccgggcctgcagggtcagggcgttacattgccgggacagccacccttgcccgagaaaaagcgcgcttctgagggagatagaagcctgggaagcgtctctccaagtagctccggtttttcgtctccacattccggatcgacaatcagtatccctttcccgaatgtcctccccgactttagcaaagcttcagaggctgcctcccccttgccagacagcccgggggataagttagtcatcgtcaaatttgttcaggatactagtaagttttggtacaaagcggacatctccagagaacaggccattgctatgctgaaggataaggagcctgggtcttttattgtccgggacagccactcttttaggggagcatacggactggccatgaaggtagccacccccccaccttctgtactccagctgaataagaaggctggggatctggctaacgaattagtcaggcattttttaatagaatgtaccccaaagggcgtgcgtttgaaaggctgcagcaacgagccatattttggctcccttactgccttggtttgtcagcacagcattacccctctggctttgccgtgcaagcttctgatccccgagcgcgatcccctggaggaaatcgcagagagttctccccagaccgcagcgaattctgcggccgaactgctgaagcagggggccgcctgtaatgtgtggtatctgaacagtgtcgagatggagtcactgaccggacaccaggctatccagaaggctctgtcaatcaccctggttcaggaacctccccccgtctccaccgttgtccacttcaaagtatcagcgcaggggattacactgaccgacaaccagcggaaactctttttcagaaggcactaccccgtcaacagcgtgattttctgtgcattggatcctcaagataggaaatggataaaggacggaccctctagcaaagtttttggattcgtcgccaggaagcagggctctgccacggacaacgtgtgtcatcttttcgcagagcacgatccggagcagcctgcccgcgagtcccagagacatagaggggcaagggacggacctcacgaggctatgcctaggcgacactctggatcgccagcaaatgtattgtttgagttgatcggccaggtctag

SEQ ID NO: 306242 - DNA, 3618 bp, Artificial Sequence
  derived and/or modified sequence
atggaggagggacatgggctggatttaacctacattacagaaaggattatcgccgtctctttcccagccggatgttccgaagagtcttatcttcataatctacaagaggtcacgcgtatgctcaaaagcaaacacggtgataactacctggtcctcaatctgagtgagaaacgctacgatttgaccaagctcaatccaaagattatggacgtagggtggcctgaattgcacgcacccccactggataaaatgtgtacaatttgtaaggcccaagaaagctggctaaattctaatctgcagcatgttgtggtgatacactgccgtgggggtaaaggcaggattggagtcgtgatcagctcttatatgcactttaccaatgtgtccgcatcagccgatcaggcgctggatcggttcgcgatgaaaaagttctacgatgataaggtgagtgccctgatgcagccatcccagaaaaggtacgtccagttcctgagcgggttgcttagcggctcagtgaagatgaacgcaagtccactcttccttcactttgtgatactgcacggtacccctaatttcgacaccggcggagtgtgccgcccattcctcaaactttatcaggccatgcagccagtatatacgtccgggatatacaatgtgggacctgaaaacccctcaaggatctgcattgtcatagagcctgctcagctgctcaagggggatgtcatgatgccccaccacgacctgcacagcgtggatagccttgggactctctcatccagcgaggggcctcaatctgcccatctgggcccattcacctgtcataagtcaagtcaaaattctcttctgagcgacgggttcgggagtaacgtcggtgaggatcctcagggcaccctggtgcctgacttgggcctgggaatggatggcccatatgagagggagcggacgttcggttctcgggagcccaaacagcctcagcccctgctccgtaagccatccgtgagcgcccaaatgcaggcttacggccagtccagctactccactcagacatgggtcaggcagcagcaaatggttgtcgcacatcagtacagctttgcccctgacggagaggcacgcctagtctcccggtgccccgctgataaccctggactggttcaggcgcagcctagagtaccactaactcctacacgtggtaccagttcgcgagttgccgtccagcggggagtgggcagtgggcctcatcctccagacacccaacagccctcaccaagcaaggctttcaaacctcggttccccggagaccaggtcgttaatggggctggcccagaattgtctaccggaccttcacctggcagtccaaccctggacattgatcagagtatcgagcagctgaatagacttatcctggaattagacccaaccttcgaacccatacctactcacatgaacgcgctgggcagtcaggcaaatggatctgtatccccggatagcgtgggtggcggtctaagagccagttcaagacttccagataccggggagggccctagcagagccacaggtagacaaggatcaagcgccgagcagccacttgggggtcgcttgaggaaactgagtctgggacagtacgataacgacgccggtggacagctacctttctctaagtgcgcatggggtaaggcaggcgtcgactatgctcccaatctcccaccattccctagccccgctgatgtgaaggaaacaatgacacctgggtacccgcaggacctggatattatcgatggtcgtattctcagcagcaaagagtcaatgtgcagcacaccagcattccccgtttctcccgagacaccttatgtgaaaaccgcgctgcgacaccctcctttctctccacccgaaccaccactttcctcccctgcgtcacagcacaagggagggagggagccacgctcatgccctgagaccctgacccatgccgtgggaatgtcagaaagcccaatagggcctaagagcaccatgctgagagccgacgctagctccactcctagttttcagcaagcatttgcgagctcttgcacgatctcttcaaatggacctgggcagcgacgggagtctagttcatctgctgagcgacagtgggtcgagtcatctcctaagcctatggtttcattactcggatcgggcagaccaaccggatctcccttgtcagcggagttcagcggaacccgcaaggatagtcctgttctgtcatgtttccctccgtcagaactgcaggctccgttccattctcacgaattgtcactggctgaaccacccgactcccttgctcccccatcctcacaggccttcttaggttttggaaccgctccagtgggcagtggactgcccccagaagaagatctcggtgctctgctggccaattcccacggggctagtccaacgcccagtatccccctgaccgccaccggcgctgcagacaacggctttctatctcacaactttctcaccgtggcccctggccacagtagccatcactcccctggccttcaagggcagggcgtgaccctccccggacaacctcctctacccgaaaagaagcgtgccagtgagggcgacaggtctctcgggagtgtgtccccctctagcagtggatttagttcaccacatagcggaagcacgatttcaatccccttcccaaatgtgctccccgatttttctaaggcttccgaggccgcttccccattgccggacagccccggagataagctggtcatcgtcaagttcgttcaggacaccagcaaattctggtataaggcagatattagcagagaacaggcgatcgccatgctgaaggataaggagcccggatccttcattgtgagagactctcattccttccggggagcttacgggttggccatgaaggtggccacaccaccacccagtgtgctgcaactgaacaaaaaggccggtgaccttgcgaacgagctggtgagacacttcctcattgagtgcaccccgaagggagttcgcctgaagggatgctccaacgagccctactttggatctcttactgctcttgtctgccagcactctattacacccttggcgctgccatgtaagttactgattccagagagggacccgctcgaggagatagctgagtcctctcctcagacagcggctaactccgccgcagagttgttaaaacaaggggctgcgtgcaacgtgtggtatctcaattccgtcgaaatggagagtttgaccggacaccaggctatccagaaagcactgtctattactctagtccaggaacctcctcctgtttcaacagtcgttcatttcaaagtaagcgcccagggcattacactcacagacaaccagcgtaaactcttctttagacgccactatcctgtgaactccgtcattttctgtgcactggatcctcaggatcgcaagtggataaaggatggcccatcgtcaaaagtcttcggctttgtcgcccgaaaacaagggagtgccactgacaatgtgtgtcacctttttgcagagcacgatccggaacaaccagcctccgcaatcgtaaatttcgtctccaaggtgatgataggatcgcccaaaaaggtttag

SEQ ID NO: 306243 - DNA, 2760 bp, Artificial Sequence
  derived and/or modified sequence
atggacggcccatacgagcgggaacgaactttcggatcccgtgagcccaaacagcctcagccactgctgaggaaacccagtgtctcagcccagatgcaagcctatggccaaagtagctactctacccagacttgggtgcggcagcagcagatggtggtcgcccaccagtactcctttgctcccgatggcgaagcacgtctggtgagcaggtgcccagctgacaatcctggcctcgttcaggctcaaccccgagtccctctgaccccaacccgcggaacatcctctcgggttgccgtgcagaggggcgtcggatcaggaccccacccacccgacacacagcagccttcaccctccaaggcatttaaacccagatttccgggtgatcaggttgtgaacggggctgggcctgagctaagcacgggcccaagcccgggtagccctaccctggatatcgaccagagcattgaacaactgaacaggctgatccttgagctggatcctactttcgaacccatcccaactcatatgaatgccctcggaagccaggcgaacggctcagtcagtcccgactccgtgggtggcggactgcgcgcttccagccgactgccggacaccggtgaaggcccatcaagggcaactggtcggcagggttcgagcgccgagcagccactggggggacgcctgcgaaaactgagccttggccagtacgataatgacgccggtgggcagctgcccttctctaagtgcgcctggggcaaagccggagtggactacgcacctaatctaccccctttcccatcgccggcagacgtgaaagagactatgacccccggatacccccaggacctcgacatcattgacgggaggatcctgagtagtaaggagtctatgtgttctacccccgcttttccagtgtcacctgagactccttatgtgaagaccgcactgcgacatccccctttctctcctccagaacccccactatcctctcctgctagtcagcataaaggcggacgggagcccagaagctgtccagaaaccctcacacacgccgtgggaatgtctgagtcgccgatcggccctaaatcgaccatgttaagggccgacgcaagctccaccccgtcatttcagcaagcatttgcatcttcatgtactatttcctccaacggacctggacagcgtcgcgagtcctcttcctcagcagaacgccagtgggtcgagagctcccccaaaccaatggtctctctgctgggctctggtcggccaaccggttccccacttagcgcagagttcagtggcaccagaaaggattctcctgtcttatcctgcttccctccttcagaactccaggctccgttccattcccatgaattgagccttgctgagccaccagacagcctggctccccctagctcccaggcattcctgggctttggcacagcaccagtcggctcaggtctgcccccagaagaagacctcggcgcactcctggcgaactctcacggggcttcgccaacaccctctattcccctgaccgccaccggcgctgccgataatgggtttctcagtcataacttcctgacagtagctcctggccactcctctcaccactcacctgggcttcagggtcagggagtgaccctgccgggacagcctccattaccagagaagaaacgggcatctgagggtgatcggtccctggggtccgtctctcccagttcaagcggcttttcttccccacactccggaagcaccatctcaattccttttcccaatgtgctcccggatttctcaaaagcatcagaggccgctagtccactgccggactctccaggcgacaagctagtaatcgtgaagtttgttcaggatactagtaaattctggtataaggccgatatttcccgggagcaggctatcgccatgttgaaagacaaagaacctggatccttcatcgtgagggacagtcactctttcaggggcgcttacggcctcgctatgaaggttgccactccgccaccatcagtcctgcagctgaacaagaaggcgggtgacctggcaaacgaactggtgagacactttctcatagaatgcaccccaaagggggtcaggcttaaagggtgcagtaacgaaccttattttgggtccttgaccgccctggtttgtcagcacagtatcacacccttggccctcccatgtaagctgttaatccctgagagggatccactcgaagaaattgccgaaagttctcctcagacagcagcaaacagcgcagcagagcttctcaaacagggcgcagcttgcaatgtctggtatttgaattcagtcgagatggaatctctcaccggacaccaggccattcagaaagcactgagtattacgctcgtgcaagagccaccgcctgtgtcaaccgtcgtacactttaaggtgtccgcccaaggaattacactgacagacaaccagcggaagctgttttttcgacgccactaccctgtgaattcagtaatcttctgtgccctcgaccctcaggatagaaagtggatcaaggacggtccctcctcgaaagtgttcggatttgtggcccgaaagcagggcagtgcaacggacaacgtgtgtcacttgtttgctgaacacgacccggagcagcctgctcgggaaagtcaacgccataggggggctagagatgggcctcacgaggccatgcctcgacgccactctggctcacctgcaaacgtgctgttcgaactcatcggacaagtttag

SEQ ID NO: 306244 - DNA, 6905 bp, Artificial Sequence
  derived and/or modified sequence
agaatgggaaactgccttgggagaagccccaagtgagcccaagggcgcagagcagaaggaccctggagtgtaagagcctagattgcaagcctggcaggaggagccggaagaattaacctcgagtctgcacgcttttaagaacaaggcctttaaaaaatccaaagtgtgtggagtttgcaaacaaattattgacggtcaaggtatttcatgccgagcctgcaagtattcctgccacaagaaatgtgaagccaaggtggtgattccctgcggtgtgcaagtccgactggaacaggctccagggagttccacgctgtccagttctctctgccgtgataaacctctgcggcccgtcatcctgagtcccaccatggaggagggccatgggctggacctcacttacatcacggagcgcatcatcgctgtgtccttccctgccggctgctctgaggagtcctacctgcacaacctacaggaggtcacgcgcatgctcaagtccaagcacggggacaactacctggtattaaacctttcagaaaagagatatgaccttacgaagcttaacccaaagatcatggatgtgggctggccagagctccacgcaccgcccctggataagatgtgtaccatatgcaaggcgcaggagtcctggctgaacagcaacctccagcatgtggtcgtcattcactgcaggggcgggaaaggacgcataggagtggtcatatcatcctacatgcatttcaccaacgtctcagccagcgccgaccaggcccttgacaggtttgcaatgaagaagttttatgatgacaaagtttcagctttaatgcagccttcccaaaaacggtatgttcagttcctcagtgggctcctgtccggatcggtgaaaatgaatgcctctcccctgttcctgcattttgtcatcctccacggcacccccaacttcgacacaggtggagtgtgccggccctttctgaagctctaccaagccatgcagcctgtgtacacctccgggatctacaacgttggcccagaaaaccccagcaggatctgcatcgtcatcgagccggcccagcttctgaagggagatgtcatgatgccccaccacgacctgcacagtgtggacagccttgggaccctgtcctcctcggaagggcctcagtcggcccacctgggtcccttcacctgccacaagagcagccagaactcactcctatctgacggttttggcagcaacgttggtgaagatccgcagggcaccctcgttccggacctgggccttggcatggacggcccctatgagcgggagcggacttttgggagtcgagagcccaagcagccccagcccctgctgagaaagccctcagtgtccgcccagatgcaggcctatgggcagagcagctactccacacagacctgggtgcgccagcagcagatggttgtagctcaccagtatagcttcgccccagatggggaggcccggctggtgagccgctgccctgcagacaatcctggcctcgtccaggcccagcccagagtgccactcacccccacccgagggaccagcagtagggtggctgtccagaggggtgtaggcagtgggccacatccccctgacacacagcagccctctcccagcaaagcgttcaaacccaggtttccaggagaccaggttgtgaatggagccggcccagagctgagcacaggcccctccccaggctcgcccaccctggacatcgaccagtccatcgagcagctcaacaggctgatcctggagctggatcccaccttcgagcccatccctacccacatgaacgccctcggtagccaggccaatggctctgtgtctccagacagcgtgggaggtgggctccgggcaagcagcaggctgcctgacacaggagagggccccagcagggccaccgggcggcaaggctcctctgctgaacagcccctgggcgggagactcaggaagctgagcctggggcagtacgacaacgatgctggggggcagctgcccttctccaaatgtgcatggggaaaggctggtgtggactatgccccaaacctgccgccattcccctcaccagcggacgtcaaagagacgatgacccctggctatccccaggacctcgatattatcgatggcagaattttaagtagcaaggagtccatgtgttcaactccagcatttcctgtgtctccagagacaccgtatgtgaaaacagcgctgcgccatcctccgttcagcccacctgagcccccgctgagcagcccagccagtcagcacaaaggaggacgtgaaccacgaagctgccctgagacgctcactcacgctgtggggatgtcagagagccccatcggacccaaatccacgatgctccgggctgatgcgtcctcgacgccctcctttcagcaggcttttgcttcttcctgcaccatttccagcaacggccctgggcagaggagagagagctcctcttctgcagaacgccagtgggtggagagcagccccaagcccatggtttccctgctggggagcggccggcccaccggaagtcccctcagcgctgagttctccggtaccaggaaggactccccagtgctgtcctgcttcccgccgtcagagctccaggctcctttccacagccatgagctgtccctagcagagccaccggactccctggcgcctcccagcagccaggccttcctgggcttcggcaccgccccagtgggaagtggccttccgcccgaggaggacctgggggccttgctggccaattctcatggagcgtcaccgacccccagcatcccgctgacagcgacaggggctgccgacaatggcttcctgtcccacaactttctcacggtggcgcctggacacagcagccaccacagtccaggcctgcagggccagggtgtgaccctgcccgggcagccacccctccctgagaagaagcgggcctcggagggggatcgttctttgggctcagtctctccctcctccagtggcttctccagcccgcacagcgggagcaccatcagtatccccttcccaaatgtccttcccgacttttccaaggcttcagaagcggcctcacctctgccagatagtccaggtgataaacttgtgatcgtgaaatttgttcaagacacttccaagttctggtacaaggcggatatttcaagagaacaagccatcgccatgttgaaggacaaggagccgggctcattcattgttcgagacagccattccttccgaggggcctatggcctggccatgaaggtggccacgcccccaccttcagtcctgcagctgaacaagaaagctggagatttggccaatgaactcgtccggcactttttgatcgagtgtaccccgaagggagtgcggttgaaagggtgctcgaatgaaccatatttcgggagcctgacggccttggtgtgccagcattccatcacgcccttggccttgccgtgcaagctgcttatcccagagagagatccattggaggaaatagcagaaagttctccccagacggcagccaattcagcagctgagctgttgaagcagggggcagcctgcaatgtgtggtacttgaactctgtggagatggagtccctcaccggccaccaggcgatccagaaggccctgagcatcaccctggtccaggagcctccacctgtgtccacagttgtgcacttcaaggtgtcagcccagggcatcaccctgacagacaatcagaggaagctcttcttccggaggcattaccccgtgaacagtgtgattttctgtgccttggacccacaagacaggaagtggatcaaagatggcccttcctcaaaagtctttggatttgtggcccggaagcagggcagtgccacggataatgtgtgccacctgtttgcagagcatgaccctgagcagcctgccagtgccattgtcaacttcgtatcaaaggtcatgattggttccccaaagaaggtctgagaactcccctccctccctggacccaccgatgcctctcgaagccctggagacagccgttgggtgagggtggggcccccactttttaccaaactagtaaacctgacattccaggcccatgaggggaaagaggatcttccagctctgcaaaaacaagaacaaacaacatcaccgtgaattggcctttcctgaaagtgacttatctgacacatctctgtagccacatgctttttgggtagaagaagctgggcatgggtgcaccccaccccctagggtccccatgggaaagggacatgcaaggaaacagcacagaacacgaggtggtccccatgtccctggcacactagcattccgggggatgaggaatccccagcccttgaggcagaggtgccgagtgactgccatgcttcgcccgtccgcatgggcgcttctgtccagctgcacccgaggccgggggtttccctcacctcggtcttcccaagatggagatgctaacgaaactgagaagggggcgtatgtttgacgaaggtttgtgcaagtcaggcccttctggaacacagcagggcctacaacgaggggcctttgcgatgggctgtgaggatgggggtggtgggaagaattggccacgttggagaccccatgccaccccaccatggtgagtgctctgtgcctcctgctcacctgtggtgagctgggcgagctgggcgagctgggcgagctgggctggggagagcctgtgaggaccgagaggagaaatgagaagaaggaacaaaaatattatttctatgtaatttatattttacttatgccaaattatttatgataatttgccattgctatactgtaccagtgtcaaatgctgcagcctgccaagctgtgattttgtgaggcttgtccctatgtaggatgcaccgcaggcccctggccactgaaagagtgtgcagtggactgtgggtctcccatatgcggtgccgcccaaaggtggctttgcctcaagcaacctaccctgatgttttactcattggaatgtttttccccgattgtggatgacttcttttctgatggagagagtccaggagggatggaaaactcctggatttaagctcagcatcccccacatgggcttttcgatcatcttcaggcctgaagctgcacgacctgaagttcgcctgcatttatcagccctctttgtgctgctccttgccaccttggggttcctgctggggaccatgtgtggttgtggcatgtgtgagcagaagggaggatgaggaaaaagagaagaaaccccggtactgacaagctgtttttgagtgccactgtttgccatcatctaagccactgaatcaagtgtatttcaggcttatttcaacattccaatgccctggttttcctgcttgaatctgttcgtggtcaaaggtttgggggaatttgtgaccctggaacatccccagagtgaaagatggagctgggccacatcagaataaggccttggccccatcctctcacagcctaggtgctctgcaggcatgctgactgtcctgattgcgatccagcccgaaattccctcctctgctttcaaaagtcaaatcccccattcttaggccacactggtgtcacaagctcctgtcagggagctggggtttgggaatgtgctttgtgaactctgctttaaagtgaggggccgaggaaaacttagaaacaggcagagttggaagcagccaaatcacagtgggtgttgtgtgtgtgtgcgtgtgtgcatgcgtgcgtgtatgcgtgtgtgaaagcaggtggaccattccactttttagctcctattgatgcaccaaaccaagtgcctcatttctgtgccaaatgtttgccttggtcgttgtggacctccttctctaacttgcggtggcatgactgtcaggaggtgctggcattttcagcagatcctcatgtgttgaccctgatgtctttagcagaggcctctagcatctcggtttttcatccactgcaggaatgtggccacagggagcagaggtttgtactttccccaagaggtcctcatcctgagacggtctctacccatgtttaacccaaagagtgcaggccaggttccttatccttctgatgaaggatgagagagctcatttagaagtcagagcaaactagggtctcagtattgagaaacgcagcctgccagggaatcacagagacatcggggtgcccgcgatggccctcatgaagccatgcctcgacggcattcaggaagccctgcaaacgtgctttttgaactcattggccaggtgtgatttttacacaaggtaaacgtggtcaagggcatcggggaatttgctccaagcagatagctccctctgaggaaccaaaggaagcaagtttccacgatttctgaagagctggtataggaagtttctttcttccttttgtgttacatgtgcattaaacagaacaagctgtgtgtcatcacagattgtactgtgggctcagaaaccgtgagagagcccccaccgtggacaccggctctagggccacaggaaaaggaacgtttccaggcattttgtctccagggctcccgctggacaggcacgtactgccctggggagtaaatgcggagagttcacgaactgtgcccaacgcatgttatagccagggtcctactaactactcagtaaaagaacgtattgttgtattcctccagtgttaagctatagccatgttaaaagtcactgtgcatttattctcagcatcaaataccttgtaacgtcttctctgccttgttagtgcatatttttacttttctgatactgtaaagaatatatccagtatgtaaatgaatgttctataaatcttttgtatagtcattttctctgctccttaaatatcatctctattcagagtataataaaattatgaacttggt

SEQ ID NO: 306245 - protein, 109 aa, Artificial Sequence
  derived and/or modified sequence
MSITDVLSADDIAAALQECRDPDTFEPQKFFQTSGLSKMSANQVKDVFRFIDNDQSGYLDEEELKFFLQKFESGARELTESETKSLMAAADNDGDGKIGAEEFQEMVHS

SEQ ID NO: 306246 - DNA, 330 bp, Artificial Sequence
  derived and/or modified sequence
atgagtatcactgacgttctgtcagcagatgacatcgcagccgcccttcaggagtgtagggacccagacaccttcgagccccaaaaatttttccaaacctctggactgtccaagatgagcgctaatcaagtcaaagacgtcttccggttcattgataacgaccagagtggctaccttgacgaagaggaactaaagttctttctgcaaaagtttgaatctggcgcccgagagctgacggagtctgagaccaaatcccttatggctgctgcagataacgacggagatgggaagatcggtgccgaggaatttcaggagatggtccactcttag

SEQ ID NO: 306247 - DNA, 330 bp, Artificial Sequence
  derived and/or modified sequence
atgtcaattacagacgttctctctgctgacgacatcgctgctgccctgcaggagtgtagggatcctgatacattcgaacctcagaaattctttcagacgagcggacttagtaaaatgagcgccaatcaggtgaaggatgtgttccggttcattgataatgaccagagcgggtatttggacgaagaggagcttaagtttttcttgcagaaatttgagtcgggggcccgggaactaactgaatccgagaccaagtcactaatggcagccgctgacaacgacggggatgggaagatcggcgcagaggagttccaggaaatggtgcattcttag

SEQ ID NO: 306248 - DNA, 330 bp, Artificial Sequence
  derived and/or modified sequence
atgagcatcacagatgtgctgtctgcagatgacattgctgctgccctgcaggagtgccgggaccctgacacctttgagccccagaagttcttccagaccagcggcctgagcaagatgtctgccaaccaggtgaaggatgtgttccgcttcatcgacaatgaccagagcggctacctggatgaggaggagctgaagttcttcctgcagaagtttgaaagtggggcccgggagctgacagaaagtgagaccaagagcctgatggctgctgctgacaatgatggagatggcaagatcggggctgaggagttccaggagatggtgcacagctag

SEQ ID NO: 306249 - DNA, 330 bp, Artificial Sequence
  derived and/or modified sequence
atgagcatcaccgacgtgctgagcgccgacgacatcgccgccgccctccaggaatgccgtgaccctgacactttcgagccccagaagttcttccagacatcagggctatctaagatgtcagccaatcaggtaaaggatgttttcaggtttattgacaacgatcagtcaggctatctcgatgaagaggagctcaagttcttcctgcaaaaatttgagagtggggcccgggaattaactgaaagcgagaccaaatctctgatggccgcagccgacaatgacggggatggtaagattggtgccgaggagttccaagagatggtacattcttag

SEQ ID NO: 306250 - DNA, 330 bp, Artificial Sequence
  derived and/or modified sequence
atgagcatcaccgacgtgctgagcgccgacgacatcgccgccgccctgcaggaatgccgggaccctgacacattcgaacctcagaagttttttcagacatccgggctttctaagatgtcggcaaatcaagtcaaggacgtgttccgttttatagacaacgaccagtcaggctaccttgatgaagaagaactcaagttctttctccagaagtttgaaagcggcgcccgagaattgacagaaagcgagactaaaagcttaatggctgccgcagacaatgacggagacggcaagataggagctgaagagttccaagagatggtgcatagctag

SEQ ID NO: 306251 - DNA, 695 bp, Artificial Sequence
  derived and/or modified sequence
cagtgggcctgggaagatgtgtttcccctggatgtgcacattcctgtttgtggcttatcgcctctcatttattctgtgtgagtaggtagaaaatgagcatcacggacgtgctcagtgctgacgacattgcagcagcgctccaggaatgccgagacccagacacttttgaaccccaaaaattcttccagacatcaggcctctccaagatgtcagccaatcaggtgaaggatgttttccggttcatagacaacgaccagagcgggtacctggatgaagaagagcttaagtttttcctccagaagtttgagagtggtgccagagaactgaccgagtcagaaaccaagtccttgatggctgcggcggataatgatggagatgggaaaattggagcagaggaattccaggaaatggtgcattcttaaaagccccagtctctggagaaaagagagaaagggataatcacctggaaggattccaaagccctgggaatggggaaccccacatcccatccctacctaatttgttaattttccctgaaaaccttctgcagtttgctcattgttttagtgaggtcacgagggagtcactcctgactttcttggtggtgggtatatgccctgacaacttctgtaagccccccttcccccaacaggcaatgcctctaaaaatcacccaataaagacaggcttctcatc

SEQ ID NO: 306252 - DNA, 623 bp, Artificial Sequence
  derived and/or modified sequence
ggaaatctaagaggttgtaactatcactttttctagcctatataaggtaggtcagtaaggtagcaaaaacacatctgttgttttgctccttcaactctttttcctgattcttcctggggggaaaccgaaaacggtgaaaaatgagcatcacggacgtgctcagtgctgacgacattgcagcagcgctccaggaatgccgagacccagacacttttgaaccccaaaaattcttccagacatcaggcctctccaagatgtcagccaatcaggtgaaggatgttttccggttcatagacaacgaccagagcgggtacctggatgaagaagagcttaagtttttcctccagaagtttgagagtggtgccagagaactgaccgagtcagaaaccaagtccttgatggctgcggcggataatgatggagatgggaaaattggagcagaggaattccaggaaatggtgcattcttaaaagccccagtctctggagaaaagagagaaagggataatcacctggaaggattccaaagccctgggaatggggaaccccacatcccatccctacctaatttgttaattttccctgaaaaccttctgcagtttgctcattgttttagtgaggtca

SEQ ID NO: 306253 - DNA, 330 bp, Artificial Sequence
  derived and/or modified sequence
atgtcaatcactgacgttcttagtgccgacgacatcgctgctgctctgcaggaatgcagagatccagatacatttgaaccacagaagtttttccagacttccggccttagcaaaatgtccgcaaatcaggtaaaggatgtatttagatttatcgacaatgaccagagcggatatctcgacgaagaggagcttaaattcttcctccagaagttcgagagtggggcacgtgaactgactgagtcagaaacaaaatcacttatggctgccgcagataacgatggggacgggaagatcggggcagaggaattccaagagatggtccacagttag

SEQ ID NO: 306254 - DNA, 330 bp, Artificial Sequence
  derived and/or modified sequence
atgtccattaccgacgtgcttagcgctgacgacatagccgctgcgctccaggaatgcagagatcctgacaccttcgagccccagaaatttttccagacctccgggctgtccaagatgagcgccaaccaggtcaaagatgtgtttcgctttatagacaatgatcagtcaggatacctcgacgaggaggaactcaagttctttctccagaaattcgaatccggcgcacgcgagctgactgagtccgaaacgaaatccctgatggccgctgcagacaatgatggcgacggaaagataggggctgaggaattccaggaaatggtccattcctag

SEQ ID NO: 306255 - DNA, 330 bp, Artificial Sequence
  derived and/or modified sequence
atgagcatcaccgacgtgctgagcgccgacgacatcgccgccgccctgcaggagtgcagagaccccgacaccttcgagccccagaagttcttccagaccagcggcctgagcaagatgagcgccaaccaggtgaaggacgtgttcagattcatcgacaacgaccagagcggctacctggacgaggaggagctgaagttcttcctgcagaagttcgagagcggcgccagagagctgaccgagagcgagaccaagagcctgatggccgccgccgacaacgacggcgacggcaagatcggcgccgaggagttccaggagatggtgcacagctag

SEQ ID NO: 306256 - protein, 143 aa, Artificial Sequence
  derived and/or modified sequence
MSDQKKEEEEEAAAAAAMATEGGKTSEPENNNKKPKTSGSQDSQPSPLALLAATCSKIGTPGENQATGQQQRNLLETLGNLLPPLLLLQKRITFLNQPLVRLVLPAVITGVHLLQKLNQVILPPLVNFKSYKYKIQVVVYSTK

SEQ ID NO: 306257 - DNA, 407 bp, Artificial Sequence
  derived and/or modified sequence
agcaggtcctgagtgtcaggaattcagattctctgccccactcctgctggataggaggacacttccactagaacctgggcctggcctttccagttttctgctgggagtccggattctggtgctttgctccgaagcagtgcccgtgggctccgggctggctcatcatcacagcttctctgctcagtgaggagaccatcattgtgctgcttttctgatgccttccatttgcctttttctccacttgggaaaaacaaaaaaagctagtatgctacatcctgaaaagttgttaatccttcaccaccacatacattgaaaaatcagttcctgccgggaagtaccactaaaggcatattgtaaactttttttctaattggaaaggtaaactttttttcccccataactatttt

SEQ ID NO: 306258 - DNA, 432 bp, Artificial Sequence
  derived and/or modified sequence
atgagcgaccagaagaaggaggaggaggaggaggccgccgccgccgccgccatggccaccgagggcggcaagaccagcgagcccgagaacaacaacaagaagcccaagaccagcggcagccaggacagccagcccagccccctggccctgctggccgccacctgcagcaagatcggcacccccggcgagaaccaggccaccggccagcagcagagaaacctgctggagaccctgggcaacctgctgccccccctgctgctgctgcagaagagaatcaccttcctgaaccagcccctggtgagactggtgctgcccgccgtgatcaccggcgtgcacctgctgcagaagctgaaccaggtgatcctgccccccctggtgaacttcaagagctacaagtacaagatccaggtggtggtgtacagcaccaagtag

SEQ ID NO: 306259 - DNA, 432 bp, Artificial Sequence
  derived and/or modified sequence
atgtccgatcagaaaaaagaggaagaggaggaagcagccgcagccgctgctatggctacagaagggggcaaaactagcgaaccagaaaataacaataaaaaaccaaagacaagcggatcacaggatagtcagccgtcccccctggctctcctggctgccacttgttccaaaatcggcacccctggagaaaaccaggcgactgggcagcagcagagaaatctgttggagacattaggtaacctgttgccgccacttctgctgcttcagaagagaatcactttcctgaaccagcctctcgttcgactcgtgttgcccgccgtgattacaggcgtgcacctgctccagaagcttaaccaggtgatcctgcctccactggttaacttcaaatcttacaagtacaagatccaggttgtcgtctattcgacaaaatag

SEQ ID NO: 306260 - DNA, 432 bp, Artificial Sequence
  derived and/or modified sequence
atgtctgaccagaagaaggaggaggaggaggaggccgctgctgctgctgccatggccacagagggcggcaagaccagcgagcctgagaacaacaacaagaagcccaagaccagcggcagccaggacagccagcccagccccctggccctgctggccgccacctgcagcaagattggcaccccaggagagaaccaggccaccggccagcagcagaggaacctgctggagaccctgggcaacctgctgccccccctgctgctgctgcagaagaggatcaccttcctgaaccagcccctggtgcggctggtgctgcctgctgtgatcactggagtgcacctgctgcagaagctgaaccaggtgatcctgccccccctggtgaacttcaagagctacaagtacaagatccaggtggtggtgtacagcaccaagtag

SEQ ID NO: 306261 - DNA, 432 bp, Artificial Sequence
  derived and/or modified sequence
atgagcgaccagaagaaggaggaggaggaggaggccgccgccgccgccgcgatggctacagagggtggcaagacatctgagcctgaaaacaataacaagaaacctaagacaagcgggtctcaggattctcaaccatcaccgctggcattgcttgcggctacctgtagtaagataggcacccccggagaaaatcaggccacaggacagcagcagaggaacctgctcgaaacacttggtaacctgctcccgcccctactgcttctccaaaaacggatcacattccttaaccagcctctggtgcggttagtgctgccggccgtcatcaccggtgtgcacctgctccagaagttgaaccaagtgattcttcctcccctggtgaactttaagtcatacaaatacaagatccaggttgtggtctacagcactaagtag

SEQ ID NO: 306262 - DNA, 432 bp, Artificial Sequence
  derived and/or modified sequence
atgagtgaccagaagaaagaggaggaagaagaggcggcagcagcagctgctatggcgactgagggaggtaaaacctcggaacctgaaaataataacaaaaagccgaagacctcaggaagccaagactcacagccaagccctctggcattgctggctgcgacatgctcaaagattgggacccccggtgaaaaccaggccaccggacagcagcaaaggaatctccttgagacccttggaaacctgctccccccattgctgctgctgcaaaagcggattactttccttaaccagccgttggttcggctggtccttccggctgtaatcaccggagtccacctgttacagaaactcaaccaggtgatcctgccacccctcgtaaacttcaaatcctacaaatacaagatccaggtcgtcgtctactctactaaatag

SEQ ID NO: 306263 - protein, 202 aa, Artificial Sequence
  derived and/or modified sequence
MMQDVSSSPVSPADDSLSNSEEEPDRQQPPSGKRGGRKRRSSRRSAGGGAGPGGAAGGGVGGGDEPGSPAQGKRGKKSAGCGGGGGAGGGGGSSSGGGSPQSYEELQTQRVMANVRERQRTQSLNEAFAALRKIIPTLPSDKLSKIQTLKLAARYIDFLYQVLQSDELDSKMASCSYVAHERLSYAFSVWRMEGAWSMSASH

SEQ ID NO: 306264 - DNA, 1669 bp, Artificial Sequence
  derived and/or modified sequence
gaggtataagagcctccaagtctgcagctctcgcccaactcccagacacctcgcgggctctgcagcaccggcaccgtttccaggaggcctggcggggtgtgcgtccagccgttgggcgctttctttttggacctcggggccatccacaccgtcccctccccctcccgcctccctccccgcctcccccgcgcgccctccccgcggaggtccctcccgtccgtcctcctgctctctcctccgcgggccgcatcgcccgggccggcgccgcgcgcgggggaagctggcgggctgaggcgccccgctcttctcctctgccccgggcccgcgaggccacgcgtcgccgctcgagagatgatgcaggacgtgtccagctcgccagtctcgccggccgacgacagcctgagcaacagcgaggaagagccagaccggcagcagccgccgagcggcaagcgcgggggacgcaagcggcgcagcagcaggcgcagcgcgggcggcggcgcggggcccggcggagccgcgggtgggggcgtcggaggcggcgacgagccgggcagcccggcccagggcaagcgcggcaagaagtctgcgggctgtggcggcggcggcggcgcgggcggcggcggcggcagcagcagcggcggcgggagtccgcagtcttacgaggagctgcagacgcagcgggtcatggccaacgtgcgggagcgccagcgcacccagtcgctgaacgaggcgttcgccgcgctgcggaagatcatccccacgctgccctcggacaagctgagcaagattcagaccctcaagctggcggccaggtacatcgacttcctctaccaggtcctccagagcgacgagctggactccaagatggcaagctgcagctatgtggctcacgagcggctcagctacgccttctcggtctggaggatggagggggcctggtccatgtccgcgtcccactagcaggcggagccccccaccccctcagcagggccggagacctagatgtcattgtttccagagaaggagaaaatggacagtctagagactctggagctggataactaaaaataaaaatatatgccaaagattttcttggaaattagaagagcaaaatccaaattcaaagaaacagggcgtggggcgcacttttaaaagagaaagcgagacaggcccgtggacagtgattcccagacgggcagcggcaccatcctcacacctctgcattctgatagaagtctgaacagttgtttgtgttttttttttttttttttttgacgaagaatgtttttatttttatttttttcatgcatgcattctcaagaggtcgtgccaatcagccactgaaaggaaaggcatcactatggactttctctattttaaaatggtaacaatcagaggaactataagaacacctttagaaataaaaatactgggatcaaactggcctgcaaaaccatagtcagttaattctttttttcatccttcctctgaggggaaaaacaaaaaaaaacttaaaatacaaaaaacaacattctatttatttattgaggacccatggtaaaatgcaaatagatccggtgtctaaatgcattcatatttttatgattgttttgtaaatatctttgtatatttttctgcaataaataaatataaaaaatttagagaaaaa

SEQ ID NO: 306265 - DNA, 609 bp, Artificial Sequence
  derived and/or modified sequence
atgatgcaggacgtgagcagcagccccgtgagccccgccgacgacagcctgagcaacagcgaggaggagcccgacagacagcagccccccagcggcaagagaggcggcagaaagagaagaagcagcagaagaagcgccggcggcggcgccggccccggcggcgccgccggcggcggcgtgggcggcggcgacgagcccggcagccccgcccagggcaagagaggcaagaagagcgccggctgcggcggcggcggcggcgccggcggcggcggcggcagcagcagcggcggcggcagcccccagagctacgaggagctgcagacccagagagtgatggccaacgtgagagagagacagagaacccagagcctgaacgaggccttcgccgccctgagaaagatcatccccaccctgcccagcgacaagctgagcaagatccagaccctgaagctggccgccagatacatcgacttcctgtaccaggtgctgcagagcgacgagctggacagcaagatggccagctgcagctacgtggcccacgagagactgagctacgccttcagcgtgtggagaatggagggcgcctggagcatgagcgccagccactag

SEQ ID NO: 306266 - DNA, 609 bp, Artificial Sequence
  derived and/or modified sequence
atgatgcaagatgtgagtagctctccggtgtccccggccgacgattctcttagcaactccgaggaagagcccgatcgccaacagccaccatccggaaagcggggcgggagaaagagacgatcaagccgtcgctccgcgggaggaggcgctggaccgggcggcgctgcgggaggcggtgtaggtggtggtgacgagcccggctcaccagcgcaggggaaaagaggcaagaaaagcgctgggtgcggtgggggaggcggagctggtggcggaggaggctcttctagtggtgggggctcccctcagagttacgaggaactgcagactcagcgtgtgatggccaacgtccgcgagagacagagaactcaatcattgaacgaggcctttgcagcattgcggaaaattatcccgaccctgccctcagataaactctctaagatccagactctgaaattagcggcaagatatatagatttcctgtatcaggtgctccagtcagacgagctggattccaagatggcctcctgttcctacgtggcccacgagcggctcagctacgctttctcggtctggcgtatggagggagcatggagcatgagtgcgagtcattag

SEQ ID NO: 306267 - DNA, 609 bp, Artificial Sequence
  derived and/or modified sequence
atgatgcaggatgtgagcagcagccctgtgtccccagcagatgacagcctgagcaacagcgaggaggagccagaccggcagcagcccccatctgggaagagaggaggcaggaagagaagaagcagcagaagatctgctgggggcggggccggccctgggggcgccgccggcggcggcgtgggcggcggagatgagcccggcagccctgcccagggcaagaggggcaagaagtctgctggctgcggcggcggcggcggggccggcggcggcggcggcagcagcagcggcggcggcagcccccagagctatgaggagctgcagacccagagggtgatggccaacgtgcgggagcggcagaggacccagagcctgaatgaggcctttgctgccctgaggaagatcatccccaccctgcccagcgacaagctgagcaagatccagaccctgaagctggccgcccgctacatcgacttcctgtaccaggtgctgcagagtgatgagctggacagcaagatggccagctgcagctatgtggcccacgagcggctgtcctatgccttctctgtgtggaggatggagggcgcctggagcatgtctgccagccactag

SEQ ID NO: 306268 - DNA, 609 bp, Artificial Sequence
  derived and/or modified sequence
atgatgcaggacgtgagcagcagccccgtgagccccgccgacgactctctgagtaactctgaggaagagccggaccggcaacagcctcccagcggcaaaaggggggggcggaagcgaaggtcaagtagacggtccgctggtggaggagcagggccaggcggcgctgccggtggtggggtcggcggtggagacgaaccaggatcgccagctcagggcaaaagaggaaaaaagagcgccggctgcggtggaggtgggggcgccgggggcggcggtggatcctcctctggaggcggcagtccgcagtcctacgaagagttacagacacagcgtgtcatggccaatgttcgagaaaggcagagaacacagagcttgaatgaggcattcgccgccctccgcaagattatacccactcttccctccgacaagttgtctaagattcaaacattgaagctagcggccagatacatcgacttcctgtaccaggtactgcaatccgatgagctcgactcaaagatggccagttgcagttacgtggcacacgaacgcctgagctacgcgttctctgtctggcggatggaaggggcatggtcaatgtccgcctcgcattag

SEQ ID NO: 306269 - DNA, 609 bp, Artificial Sequence
  derived and/or modified sequence
atgatgcaggacgtgtcctcatcaccagtatctcccgcagatgatagtttgagcaatagcgaggaggaaccagatagacagcagccaccctccgggaagcgtgggggtaggaaacgccgttcttcgcgtcgatcagctggcggaggggctggccctggcggagctgcgggtggtggggtgggtggcggagatgaacctggatcccccgctcagggaaagcgcggtaaaaaatccgcgggttgtggcggtggagggggagcgggaggaggcggtggatcttctagtggaggtggcagtcctcagtcctacgaggagttgcaaacccagcgtgttatggccaacgtgagggaacgtcagcgcacacagtctctgaacgaggccttcgcagctttgagaaagattatcccgaccttgcctagtgataagctgtcaaagatccaaaccctgaagctcgccgctaggtatattgattttctgtaccaggtcctccagtccgacgagctggatagcaaaatggcttcttgtagttacgtggcgcacgagcggctgagctatgcattttccgtttggcgcatggagggagcctggtctatgtccgctagccactag

SEQ ID NO: 306270 - DNA, 1666 bp, Artificial Sequence
  derived and/or modified sequence
gaggtataagagcctccaagtctgcagctctcgcccaactcccagacacctcgcgggctctgcagcaccggcaccgtttccaggaggcctggcggggtgtgcgtccagccgttgggcgctttctttttggacctcggggccatccacaccgtcccctccccctcccgcctccctccccgcctcccccgcgcgccctccccgcggaggtccctcccgtccgtcctcctgctctctcctccgcgggccgcatcgcccgggccggcgccgcgcgcgggggaagctggcgggctgaggcgccccgctcttctcctctgccccgggcccgcgaggccacgcgtcgccgctcgagagatgatgcaggacgtgtccagctcgccagtctcgccggccgacgacagcctgagcaacagcgaggaagagccagaccggcagcagccgccgagcggcaagcgcgggggacgcaagcggcgcagcagcaggcgcagcgcgggcggcggcgcggggcccggcggagccgcgggtgggggcgtcggaggcggcgacgagccgggcagcccggcccagggcaagcgcggcaagaagtctgcgggctgtggcggcggcggcggcgcgggcggcggcggcggcagcagcagcggcggcgggagtccgcagtcttacgaggagctgcagacgcagcgggtcatggccaacgtgcgggagcgccagcgcacccagtcgctgaacgaggcgttcgccgcgctgcggaagatcatccccacgctgccctcggacaagctgagcaagattcagaccctcaagctggcggccaggtacatcgacttcctctaccaggtcctccagagcgacgagctggactccaagatggcaagctgcagctatgtggctcacgagcggctcagctacgccttctcggtctggaggatggagggggcctggtccatgtccgcgtcccactagcaggcggagccccccaccccctcagcagggccggagacctagatgtcattgtttccagagaaggagaaaatggacagtctagagactctggagctggataactaaaaataaaaatatatgccaaagattttcttggaaattagaagagcaaaatccaaattcaaagaaacagggcgtggggcgcacttttaaaagagaaagcgagacaggcccgtggacagtgattcccagacgggcagcggcaccatcctcacacctctgcattctgatagaagtctgaacagttgtttgtgttttttttttttttttttttgacgaagaatgtttttatttttatttttttcatgcatgcattctcaagaggtcgtgccaatcagccactgaaaggaaaggcatcactatggactttctctattttaaaatggtaacaatcagaggaactataagaacacctttagaaataaaaatactgggatcaaactggcctgcaaaaccatagtcagttaattctttttttcatccttcctctgaggggaaaaacaaaaaaaaacttaaaatacaaaaaacaacattctatttatttattgaggacccatggtaaaatgcaaatagatccggtgtctaaatgcattcatatttttatgattgttttgtaaatatctttgtatatttttctgcaataaataaatataaaaaatttagagaa

SEQ ID NO: 306271 - protein, 202 aa, Artificial Sequence
  derived and/or modified sequence
MLATLARVAALRRTCLFSGRGGGRGLWTGRPQSDMNNIKPLEGVKILDLTRVLAGPFATMNLGDLGAEVIKVERPGAGDDTRTWGPPFVGTESTYYLSVNRNKKSIAVNIKDPKGVKIIKELAAVCDVFVENYVPGKLSAMGLGYEDIDEIAPHIIYCSITEKGFSHVAQDGLDLQTSSNLPALVSQSAGITGMSHRAWPTS

SEQ ID NO: 306272 - DNA, 609 bp, Artificial Sequence
  derived and/or modified sequence
atgctggccacactcgcgagagtggctgccctacgccggacttgcttgttttcaggcaggggcggcggccggggtctttggacaggcagaccccagagcgacatgaataatatcaagcccttggagggagtcaagatccttgacctgacgagggttctggcaggtccttttgccacaatgaatttgggagacctcggggcagaagtcataaaagttgagcggccaggagccggcgacgatacgcgtacgtggggccctccatttgttgggaccgagtctacctactacctgtccgtgaatcggaacaagaaatcgattgcggtcaacatcaaagaccccaaaggcgtcaagattatcaaagagctagctgcggtttgcgacgtgttcgtggagaattacgtcccagggaaactcagtgccatgggtctgggctatgaagatatcgacgagatagccccacacatcatttattgttctattaccgagaaaggcttcagccacgtggcgcaggacggtctcgatctgcagacatcaagcaaccttcctgcgttggttagtcagtccgccggcatcacaggaatgagtcaccgtgcttggcccactagctag

SEQ ID NO: 306273 - DNA, 609 bp, Artificial Sequence
  derived and/or modified sequence
atgctggccaccctggcccgggtggccgccctgcggaggacctgcctcttcagcggccggggcggcggccggggcctgtggacaggccggccccagagcgacatgaacaacatcaagcccctggagggcgtgaagatcctggacctgaccagggtgctggccggcccctttgccaccatgaacctgggggacctgggcgctgaggtgatcaaggtggagaggcctggagctggagatgacaccaggacctggggccccccatttgtgggcacagagagcacctactacctgtctgtgaacagaaacaagaagagcattgctgtgaacatcaaggaccccaagggcgtgaagatcatcaaggagctggccgctgtgtgtgatgtgtttgtggagaactacgtgcctgggaagctgagcgccatgggcctgggctatgaggacattgatgaaattgccccccacatcatctactgcagcatcacagagaagggcttcagccacgtggcccaggacggcctggacctgcagaccagcagcaacctgcctgccctggtgtcccagagcgctggcatcaccggcatgagccaccgggcctggcccaccagctag

SEQ ID NO: 306274 - DNA, 609 bp, Artificial Sequence
  derived and/or modified sequence
atgctggccaccctggcccgggtggccgccctgcggcggacctgcctcttttccgggcgcggtggcggcagaggactttggacagggagacctcaatccgacatgaacaatataaagccactggagggggtaaaaatcttggacctcaccagagtgttggcaggtccttttgctaccatgaacctgggggacctgggcgctgaggtgattaaggtggagaggccaggcgccggagacgatacccggacttgggggcctccctttgtagggactgaaagcacctattatctgtccgtcaataggaacaagaagtctatagccgtcaatataaaagatcccaagggggtgaagatcataaaagagctggccgccgtttgtgatgtgttcgtagaaaactacgttccaggcaagctgtctgcgatgggactgggctatgaggatattgacgagattgccccccatattatctactgtagcatcacggagaaggggttctctcacgtagcacaggacgggctagatcttcagacatcatctaatctgcctgccctggtgtctcagagtgccggaataaccggaatgtcccatagggcgtggccaactagctag

SEQ ID NO: 306275 - DNA, 609 bp, Artificial Sequence
  derived and/or modified sequence
atgctggcaaccctcgccagagtggctgcactcagaagaacatgccttttttcgggtagagggggaggcagaggtctctggacaggcaggccacagagcgacatgaataacatcaaacccttagagggcgtgaaaatactggatttgaccagagtcttggccggaccctttgccactatgaatctgggcgacttgggtgcagaagtcattaaagtggagcggccaggcgcaggagacgatacgcgcacctggggacccccattcgtcgggactgagtctacatattatctgagtgtgaacagaaacaagaaatccatcgccgttaatattaaggacccaaaaggcgtgaagatcattaaagagttggccgctgtctgcgatgtctttgtggaaaactatgtgcccggaaaactctccgcaatgggccttggctatgaagatattgacgaaattgctccacacattatatattgcagtattacagaaaaggggtttagccatgtagcccaggatgggctggacctccagacgtcttctaacctgcctgccctggtgtcccagtcagcaggaatcacaggtatgtcacacagagcatggcctacttcatag

SEQ ID NO: 306276 - DNA, 1217 bp, Artificial Sequence
  derived and/or modified sequence
gatgctggcgacgctggcgagggtggcagctctgcgcagaacctgcctcttctccggccggggcggcgggagggggctgtggactggccgcccgcagtcagatatgaacaatataaagccattggaaggggtaaaaattctggatctaacaagagtcctggcgggaccttttgctactatgaatttaggagatcttggagcagaagttataaaagtggagagaccaggagctggtgatgatacacgaacttgggggccaccttttgttgggacagaaagtacatattatctcagtgttaaccgaaataaaaaaagtattgctgttaatatcaaggatccaaaaggggtgaaaatcatcaaagagcttgcagctgtttgtgatgtgtttgtggaaaactatgtccctggcaaactgtctgcaatgggcctgggatatgaagatatagacgagattgctcctcacatcatctattgttccatcacagagaaggggttttcccatgttgcccaggatggtcttgatctccaaacctcaagcaatctgccggctctggtctcccaaagtgctgggattacaggaatgagccaccgcgcctggccaacttcctgaattatcgttgtctccacacctgcttacagtgctgttcctcaggtatcaaagcatcccagcatgttgtgcctttctccccatcctcctctactttctcctctgttgtgtactggtaactcggaatctctgaatggctgtagaaacagaaaagtggatgggactgatggaaaacccaaatttgggtttcagaaagctatctgttgtttgacatgcagtctagaattaatgactataccaggttacccttggaacatcttgcatttgtgggcagaaacatttggctacttgccacggggttatcctgaaaaaagatgggcttgaaaaactgtcactagtgtcacttgaattggtcatccatggttggggagttccattccaagaggataatttacacaatttaaaataaagggggccaggtgtggtggctcacacctgtaatcctagcgctttgggaggccaaagcaggtggaatccttgaggtcaggagtttgagatcatcctggctaacatggtgaaaccctgtctctactaaaaatacaaaaattatctgggcatggtggtgtgcacctgtaatcccagtttttgggaggctgaggcaggagaatca

SEQ ID NO: 306277 - DNA, 609 bp, Artificial Sequence
  derived and/or modified sequence
atgctggccaccctggccagagtggccgccctgagaagaacctgcctgttcagcggcagaggcggcggcagaggcctgtggaccggcagaccccagagcgacatgaacaacatcaagcccctggagggcgtgaagatcctggacctgaccagagtgctggccggccccttcgccaccatgaacctgggcgacctgggcgccgaggtgatcaaggtggagagacccggcgccggcgacgacaccagaacctggggcccccccttcgtgggcaccgagagcacctactacctgagcgtgaacagaaacaagaagagcatcgccgtgaacatcaaggaccccaagggcgtgaagatcatcaaggagctggccgccgtgtgcgacgtgttcgtggagaactacgtgcccggcaagctgagcgccatgggcctgggctacgaggacatcgacgagatcgccccccacatcatctactgcagcatcaccgagaagggcttcagccacgtggcccaggacggcctggacctgcagaccagcagcaacctgcccgccctggtgagccagagcgccggcatcaccggcatgagccacagagcctggcccaccagctag

SEQ ID NO: 306278 - DNA, 2962 bp, Artificial Sequence
  derived and/or modified sequence
gggagcgcgcggcggccgggggcggagcgcagccagggctgcgcggcgcgccccggctcccgcccgctcccagccgggccccccagcggtcggcgggacggctcccggctgcagtctgcccgcccgccccgcgcgggggccgagtcgcgaagcgcgcctgcgacccggcgtccgggcgcgctggagaggacgcgaggagccatgaggcgccagcctgcgaaggtggcggcgctgctgctcgggctgctcttggagtgcacagaagccaaaaagcattgctggtatttcgaaggactctatccaacctattatatatgccgctcctacgaggactgctgtggctccaggtgctgtgtgcgggccctctccatacagaggctgtggtacttctggttccttctgatgatgggcgtgcttttctgctgcggagccggcttcttcatccggaggcgcatgtaccccccgccgctgatcgaggagccagccttcaatgtgtcctacaccaggcagcccccaaatcccggcccaggagcccagcagccggggccgccctattacaccgacccaggaggaccggggatgaaccctgtcgggaattccatggcaatggctttccaggtcccacccaactcaccccaggggagtgtggcctgcccgccccctccagcctactgcaacacgcctccgcccccgtacgaacaggtagtgaaggccaagtagtggggtgcccacgtgcaagaggagagacaggagagggcctttccctggcctttctgtcttcgttgatgttcacttccaggaacggtctcgtgggctgctaagggcagttcctctgatatcctcacagcaagcacagctctctttcaggctttccatggagtacaatatatgaactcacactttgtctcctctgttgcttctgtttctgacgcagtctgtgctctcacatggtagtgtggtgacagtccccgagggctgacgtccttacggtggcgtgaccagatctacaggagagagactgagaggaagaaggcagtgctggaggtgcaggtggcatgtagaggggccaggccgagcatcccaggcaagcatccttctgcccgggtattaataggaagccccatgccgggcggctcagccgatgaagcagcagccgactgagctgagcccagcaggtcatctgctccagcctgtcctctcgtcagccttcctcttccagaagctgttggagagacattcaggagagagcaagccccttgtcatgtttctgtctctgttcatatcctaaagatagacttctcctgcaccgccagggaagggtagcacgtgcagctctcaccgcaggatggggcctagaatcaggcttgccttggaggcctgacagtgatctgacatccactaagcaaatttatttaaattcatgggaaatcacttcctgccccaaactgagacattgcattttgtgagctcttggtctgatttggagaaaggactgttacccatttttttggtgtgtttatggaagtgcatgtagagcgtcctgccctttgaaatcagactgggtgtgtgtcttccctggacatcactgcctctccagggcattctcaggcccgggggtctccttccctcaggcagctccagtggtgggttctgaagggtgctttcaaaacggggcacatctggctgggaagtcacatggactcttccagggagagagaccagctgaggcgtctctctctgaggttgtgttgggtctaagcgggtgtgtgctgggctccaaggaggaggagcttgctgggaaaagacaggagaagtactgactcaactgcactgaccatgttgtcataattagaataaagaagaagtggtcggaaatgcacattcctggataggaatcacagctcaccccaggatctcacaggtagtctcctgagtagttgacggctagcggggagctagttccgccgcatagttatagtgttgatgtgtgaacgctgacctgtcctgtgtgctaagagctatgcagcttagctgaggcgcctagattactagatgtgctgtatcacggggaatgaggtgggggtgcttattttttaatgaactaatcagagcctcttgagaaattgttactcattgaactggagcatcaagacatctcatggaagtggatacggagtgatttggtgtccatgcttttcactctgaggacatttaatcggagaacctcctggggaattttgtgggagacacttgggaacaaaacagacaccctgggaatgcagttgcaagcacagatgctgccaccagtgtctctgaccaccctggtgtgactgctgactgccagcgtggtacctcccatgctgcaggcctccatctaaatgagacaacaaagcacaatgttcactgtttacaaccaagacaactgcgtgggtccaaacactcctcttcctccaggtcatttgttttgcatttttaatgtctttattttttgtaatgaaaaagcacactaagctgcccctggaatcgggtgcagctgaataggcacccaaaagtccgtgactaaatttcgtttgtctttttgatagcaaattatgttaagagacagtgatggctagggctcaacaattttgtattcccatgtttgtgtgagacagagtttgttttcccttgaacttggttagaattgtgctactgtgaacgctgatcctgcatatggaagtcccacttcggtgacatttcctggccattcttgtttccattgtgtggatggtgggttgtgcccacttcctggagtgagacagctcctggtgtgtagaattcccggagcgtccgtggttcagagtaaacttgaagcagatctgtgcatgcttttcctctgcaacaattggctcgtttctcttttttgttctcttttgataggatcctgtttcctatgtgtgcaaaataaaaataaatttgggca

SEQ ID NO: 306279 - DNA, 2751 bp, Artificial Sequence
  derived and/or modified sequence
atgctcagcgaaactcttgggtatctgtcttctgtgctcttgcagtgcacagaagccaaaaagcattgctggtatttcgaaggactctatccaacctattatatatgccgctcctacgaggactgctgtggctccaggtgctgtgtgcgggccctctccatacagaggctgtggtacttctggttccttctgatgatgggcgtgcttttctgctgcggagccggcttcttcatccggaggcgcatgtaccccccgccgctgatcgaggagccagccttcaatgtgtcctacaccaggcagcccccaaatcccggcccaggagcccagcagccggggccgccctattacaccgacccaggaggaccggggatgaaccctgtcgggaattccatggcaatggctttccaggtcccacccaactcaccccaggggagtgtggcctgcccgccccctccagcctactgcaacacgcctccgcccccgtacgaacaggtagtgaaggccaagtagtggggtgcccacgtgcaagaggagagacaggagagggcctttccctggcctttctgtcttcgttgatgttcacttccaggaacggtctcgtgggctgctaagggcagttcctctgatatcctcacagcaagcacagctctctttcaggctttccatggagtacaatatatgaactcacactttgtctcctctgttgcttctgtttctgacgcagtctgtgctctcacatggtagtgtggtgacagtccccgagggctgacgtccttacggtggcgtgaccagatctacaggagagagactgagaggaagaaggcagtgctggaggtgcaggtggcatgtagaggggccaggccgagcatcccaggcaagcatccttctgcccgggtattaataggaagccccatgccgggcggctcagccgatgaagcagcagccgactgagctgagcccagcaggtcatctgctccagcctgtcctctcgtcagccttcctcttccagaagctgttggagagacattcaggagagagcaagccccttgtcatgtttctgtctctgttcatatcctaaagatagacttctcctgcaccgccagggaagggtagcacgtgcagctctcaccgcaggatggggcctagaatcaggcttgccttggaggcctgacagtgatctgacatccactaagcaaatttatttaaattcatgggaaatcacttcctgccccaaactgagacattgcattttgtgagctcttggtctgatttggagaaaggactgttacccatttttttggtgtgtttatggaagtgcatgtagagcgtcctgccctttgaaatcagactgggtgtgtgtcttccctggacatcactgcctctccagggcattctcaggcccgggggtctccttccctcaggcagctccagtggtgggttctgaagggtgctttcaaaacggggcacatctggctgggaagtcacatggactcttccagggagagagaccagctgaggcgtctctctctgaggttgtgttgggtctaagcgggtgtgtgctgggctccaaggaggaggagcttgctgggaaaagacaggagaagtactgactcaactgcactgaccatgttgtcataattagaataaagaagaagtggtcggaaatgcacattcctggataggaatcacagctcaccccaggatctcacaggtagtctcctgagtagttgacggctagcggggagctagttccgccgcatagttatagtgttgatgtgtgaacgctgacctgtcctgtgtgctaagagctatgcagcttagctgaggcgcctagattactagatgtgctgtatcacggggaatgaggtgggggtgcttattttttaatgaactaatcagagcctcttgagaaattgttactcattgaactggagcatcaagacatctcatggaagtggatacggagtgatttggtgtccatgcttttcactctgaggacatttaatcggagaacctcctggggaattttgtgggagacacttgggaacaaaacagacaccctgggaatgcagttgcaagcacagatgctgccaccagtgtctctgaccaccctggtgtgactgctgactgccagcgtggtacctcccatgctgcaggcctccatctaaatgagacaacaaagcacaatgttcactgtttacaaccaagacaactgcgtgggtccaaacactcctcttcctccaggtcatttgttttgcatttttaatgtctttattttttgtaatgaaaaagcacactaagctgcccctggaatcgggtgcagctgaataggcacccaaaagtccgtgactaaatttcgtttgtctttttgatagcaaattatgttaagagacagtgatggctagggctcaacaattttgtattcccatgtttgtgtgagacagagtttgttttcccttgaacttggttagaattgtgctactgtgaacgctgatcctgcatatggaagtcccacttcggtgacatttcctggccattcttgtttccattgtgtggatggtgggttgtgcccacttcctggagtgagacagctcctggtgtgtagaattcccggagcgtccgtggttcagagtaaacttgaagcagatctgtgcatgcttttcctctgcaacaattggctcgtttctcttttttgttctcttttgataggatcctgtttcctatgtgtgcaaaataaaaataaatttgggc

SEQ ID NO: 306280 - protein, 71 aa, Artificial Sequence [sequence omitted]

SEQ ID NO: 306281 - protein, 269 aa, Artificial Sequence
  derived and/or modified sequence
MRELEFAKLECCLAWQLQASRRELEMELKMLKSQSSSAEQSFLFSREEADTLRLKVEELEGERSRLEEEKRMLEAQLERRALQGDYDQSRTKVLHMSLNPTSVARQRLREDHSQLQAECERLRGLLRAMERGGTVPADLEAAAASLPSSKEVAELKKQVESAELKNQRLKEVFQTKIQEFRKACYTLTGYQIDITTENQYRLTSLYAEHPGDCLIFKATSPSGSKMQLLETEFSHTVGELIEVHLRRQDSIPAFLSSLTLELFSRQTVA

SEQ ID NO: 306282 - protein, 157 aa, Artificial Sequence
  derived and/or modified sequence
MEDLGENTMVLSTLRSLNNFISQRVEGGSGLDISTSAPGSLQMQYQQSMQLEERAEQIRSKSHLIQVEREKMQMELSHKRARVELERAASTSARNYEREVDRNQELLTRIRQLQEREAGAEEKMQEQLERNRQCQQNLDAASKRLREKEDSLAQAGE

SEQ ID NO: 306283 - DNA, 474 bp, Artificial Sequence
  derived and/or modified sequence
atggaagacctaggggaaaacaccatggtgcttagtaccctcagaagcctgaacaatttcatcagccagagggtggaagggggttcaggactggatatttctacgtcggcgcctggatccctgcagatgcagtaccagcagagtatgcagctggaagaacgggcggagcaaatccgtagtaagtctcatcttattcaggtggaacgagagaaaatgcagatggagttgagccacaaaagggcccgcgtcgagctcgaaagagcagcatccaccagcgcacggaattatgaacgcgaggtcgaccggaaccaagagctgctgacccgaataagacagctccaggagcgcgaagcgggagctgaggagaagatgcaggagcagttagaacgaaacagacagtgccagcagaatttggacgctgcttcaaagcgcctgcgtgaaaaggaggactctctagcccaggcaggcgaatag

SEQ ID NO: 306284 - DNA, 474 bp, Artificial Sequence
  derived and/or modified sequence
atggaggacctgggggagaacaccatggtgctgagcaccctgcggagcctgaacaacttcatcagccagagggtggagggcggcagcggcctggacatcagcaccagcgcccctggcagcctgcagatgcagtaccagcagagcatgcagctggaggagagagctgagcagatccgcagcaagagccacctgatccaggtggagcgggagaagatgcagatggagctgagccacaagagggcccgggtggagctggagcgggccgccagcaccagcgccaggaactatgaaagagaggtggacaggaaccaggagctgctgacccgcatccggcagctgcaggagcgggaggccggggctgaggagaagatgcaggagcagctggagaggaaccggcagtgccagcagaacctggatgctgccagcaagaggctgcgggagaaggaggacagcctggcccaggccggggagtag

SEQ ID NO: 306285 - DNA, 555 bp, Artificial Sequence
  derived and/or modified sequence
gtcgcgataaatgggcgccggcggagcggagggagatccgagcggcggcggcaagctggctgcgagcggctgaggaaagcaaccatggaagacctgggggaaaacaccatggttttatccaccctgagatctttgaacaacttcatctctcagcgtgtggagggaggctctggactggatatttctacctcggccccaggttctctgcagatgcagtaccagcagagcatgcagctggaggaaagagcagagcagatccgttcgaagtcccacctcatccaggtggagcgggagaaaatgcagatggagctgagtcacaagagggctcgagtggagctggagagagcagccagcaccagtgccaggaactacgagcgtgaggtcgaccgcaaccaggagctcctgacgcgcatccggcagcttcaggagcgggaggccggggcggaggagaagatgcaggagcagctggagcgcaacaggcagtgtcagcagaacttggatgctgccagcaagaggctgcgtgagaaagaggacagtctggcccaggctggcgag

SEQ ID NO: 306286 - DNA, 474 bp, Artificial Sequence
  derived and/or modified sequence
atggaggacctgggcgagaacaccatggtgctgagcaccctgcggtctttgaataattttatctctcagagagttgaagggggttcaggcctggatattagtacctccgccccaggttctctgcagatgcaatatcagcagtcgatgcagcttgaggagcgggccgagcagatccgaagcaaaagccacctgatccaagtcgaacgggagaaaatgcaaatggagctgagccacaaaagggcccgcgtcgagttggagcgtgcggctagtaccagtgctcggaactacgagagagaggtggatcgcaatcaagagctgctgaccaggatcagacagttacaggagcgggaagcaggcgccgaggaaaagatgcaagaacagttagaacgcaacagacaatgtcagcagaacctggacgccgccagcaaacgattacgagagaaggaggactctctggcccaggccggggaatag

SEQ ID NO: 306287 - DNA, 474 bp, Artificial Sequence
  derived and/or modified sequence
atggaggatcttggagagaatacaatggttctatcaacactgcgcagcctcaacaacttcatctcccagcgggtcgaggggggttcgggacttgatatttcaacaagtgcccctggcagcttacagatgcagtaccagcagtcgatgcagctggaggaaagggcagagcagattcggtctaagagccatcttatccaggttgaaagggagaagatgcaaatggagctgtcccataagcgcgctcgcgtagagctggagcgcgctgcttctacatccgctaggaactacgaaagagaagttgataggaaccaagaactgctgactcggattaggcagttgcaggaaagggaagccggagcagaagagaaaatgcaagagcagctggaaagaaataggcagtgtcagcagaacctggatgctgcatctaagaggttgcgggaaaaggaggatagcttagcccaggcgggtgaatag

SEQ ID NO: 306288 - DNA, 474 bp, Artificial Sequence
  derived and/or modified sequence
atggaggacctgggcgagaacaccatggtgctgagcaccctgagaagcctgaacaacttcatcagccagagagtggagggcggcagcggcctggacatcagcaccagcgcccccggcagcctgcagatgcagtaccagcagagcatgcagctggaggagagagccgagcagatcagaagcaagagccacctgatccaggtggagagagagaagatgcagatggagctgagccacaagagagccagagtggagctggagagagccgccagcaccagcgccagaaactacgagagagaggtggacagaaaccaggagctgctgaccagaatcagacagctgcaggagagagaggccggcgccgaggagaagatgcaggagcagctggagagaaacagacagtgccagcagaacctggacgccgccagcaagagactgagagagaaggaggacagcctggcccaggccggcgagtag

SEQ ID NO: 306289 - DNA, 810 bp, Artificial Sequence
  derived and/or modified sequence
atgcgggaactggagttcgcaaagctcgaatgctgtctcgcttggcagctccaggcatcacggagagaactggagatggaattaaaaatgttgaagagccagagcagctcagcagagcagtcttttctgttctcccgggaggaagctgataccttacgcctgaaagtcgaagaacttgaaggagagagatcacggttggaggaagagaagaggatgctcgaggcacagttagagcgacgggctctccagggagattatgatcagtcccgcacaaaagtgcttcatatgtccctgaaccccacatcagtggcccgccaaaggctgagggaggaccacagtcaactccaggcagagtgtgagcgcttgagaggactgcttcgagccatggagcggggcggcacggtacccgctgacttggaggctgccgccgccagcctgccttcttcaaaggaggtcgccgaacttaagaagcaggttgaaagcgctgaactaaagaatcagcgcctgaaggaagtattccagacaaagatacaggaattccgcaaagcctgctacaccctaaccgggtaccagatcgacatcaccacggaaaaccagtataggctgacttctttgtatgcggagcaccccggcgactgtttgatcttcaaggctactagtcctagcgggagcaagatgcaattgcttgaaacagaattcagtcacaccgtcggggaacttattgaagtccacctccggcggcaagacagtatcccagcattccttagcagcctgaccctggaacttttcagcagacaaacagtagcctag

SEQ ID NO: 306290 - DNA, 810 bp, Artificial Sequence
  derived and/or modified sequence
atgagggagctggagtttgccaagctggagtgctgcctggcctggcagctgcaggccagcagaagagagctggagatggagctgaagatgctgaagagccagagcagcagcgctgagcagagcttcctgttcagccgggaggaggccgacaccctgcggctgaaggtggaggagctggagggggagaggagccggctggaggaggagaagaggatgctggaggcccagctggagcggcgggccctgcagggcgactatgaccagagcaggaccaaggtgctgcacatgagcctgaaccccacctctgtggcccggcagaggctgcgggaggaccacagccagctgcaggccgagtgtgagcggctgcggggcctgctgcgggccatggagcggggcggcaccgtgcctgctgacctggaggccgctgctgccagcctgcccagcagcaaggaggtggccgagctgaagaagcaggtggagagcgctgagctgaagaaccagaggctgaaggaggtgttccagaccaagatccaggagttcaggaaggcctgctacaccctgaccggctaccagattgacatcaccacagagaaccagtaccgcctgaccagcctgtatgcagagcaccctggggactgcctgatcttcaaggccaccagccccagcggcagcaagatgcagctgctggagacagagttcagccacacagtgggggagctgattgaggtgcacctgcggcggcaggacagcatcccagccttcctgagcagcctgaccctggagctgttcagccggcagacagtggcctag

SEQ ID NO: 306291 - DNA, 1086 bp, Artificial Sequence
  derived and/or modified sequence
atgagagaacttgagtttgcaaagttagagtgctgtctggcctggcagcttcaggcttccaggagagagctggagatggagctgaagatgctgaagtctcagtccagctctgccgaacagagcttcctgttctccagggaggaggcggacacgctcaggttgaaggtcgaggagctggaaggcgagcggagtcggctggaggaggaaaagaggatgctggaggcacagctggagcggcgagctctgcagggtgactatgaccagagcaggaccaaagtgctgcacatgagcctgaaccccaccagtgtggccaggcagcgcctgcgcgaggaccacagccagctgcaggcggagtgcgagcgactgcgcgggctcctgcgcgccatggagagaggaggcaccgtcccagccgaccttgaggctgccgccgcgagtctgccatcgtccaaggaggtggcagagctgaagaagcaggtggagagtgccgagctgaagaaccagcggctcaaggaggttttccagaccaagatccaggagttccgcaaggcctgctacacgctcaccggctaccagatcgacatcaccacggagaaccagtaccggctgacctcgctgtacgccgagcacccaggcgactgcctcatcttcaaggccaccagcccctcgggttccaagatgcagctactggagacagagttctcacacaccgtgggcgagctcatcgaggtgcacctgcggcgccaggacagcatccctgccttcctcagctcgctcaccctcgagctcttcagccgccagaccgtggcgtagcctgcaggctcgggggcatagccggagccactctgcttggcctgacctgcaggtcccctgccccgccagccacaggctgggtgcacgtcctgcctctccagccccacagggcagcagcatgactgacagacacgctgggacctacgtcgggcttcctgctggggcggccagcaccctctccacgtgcagaccccatgcgtcccggagcctggtgtgtgggcgtcggccaccagcctgggttcctcaccttgtgaaataaaatcttctcccctagac

SEQ ID NO: 306292 - DNA, 810 bp, Artificial Sequence
  derived and/or modified sequence
atgcgggagctggagttcgccaagctggagtgctgcctggcctggcagcttcaggctagccggcgggagctggagatggagctgaaaatgcttaaatcccagtcatcctccgcagaacaatctttcctattctcacgcgaggaagctgatactctgcggctaaaggtcgaagagttggagggagagaggtccaggctggaagaagagaagagaatgcttgaagcgcaactcgagaggagagctctgcagggagattatgatcagagccgtaccaaggtgttgcatatgagtctgaatcccaccagtgtagcacgccagcggctgcgcgaagatcactcacagctccaggccgagtgcgagaggttgaggggacttctgcgagcaatggaaagaggggggactgtgcccgcagatctggaggcggccgcagcttctctgccgagttccaaagaagtagccgagctgaaaaagcaagtagaatccgcagagttgaaaaaccagaggctcaaagaggtgttccagacaaagatccaggagttccggaaagcttgctatacactgactgggtatcagatcgacattaccactgaaaatcaataccggctaaccagcttgtatgcagagcaccccggggactgcttaatctttaaggctacctctccttccggatctaaaatgcagctgctggaaacagagtttagtcacacagtgggtgagcttattgaagttcacttgagaagacaggacagcatccccgctttcttgagcagtctgaccctagagttattttctcgtcaaacagtagcctag

SEQ ID NO: 306293 - DNA, 810 bp, Artificial Sequence
  derived and/or modified sequence
atgcgtgagctcgagtttgccaagctggagtgctgtctagcatggcagctgcaagcttctagaagagagcttgagatggaacttaagatgctgaagtcacagtcctcctctgctgagcaatccttcctgttcagcagagaggaagctgacaccctgcggttgaaagttgaagaactggaaggcgaaagatcaagactggaagaggagaaaaggatgctggaggcccagcttgagaggcgtgccctacagggcgactacgatcagagtagaacaaaagtcttacacatgtccctcaatcccacatccgtcgctcgccagcgacttcgggaagaccattctcagctgcaagccgaatgcgaacgcctgcgcggtctcctgcgagctatggagagggggggtaccgtgcctgccgatctggaagctgccgcagcttcccttccgtcaagcaaagaagtagccgagctgaaaaagcaggtcgaaagcgccgaactgaagaaccaacggttaaaagaggtgtttcagacaaaaatccaggaattccggaaagcctgttatactcttacaggataccagatcgatattacgacagaaaatcagtaccggctgaccagtctctacgctgagcacccaggggactgcctgatctttaaagctaccagccccagcgggagcaagatgcagctattggaaaccgaatttagccacactgtcggagaactcatagaagtgcatctgcgtcggcaggactccatcccagcctttctgtcttcgctgactttggaattattttcaagacagacagtcgcgtag

SEQ ID NO: 306294 - DNA, 810 bp, Artificial Sequence
  derived and/or modified sequence
atgagagagctggagttcgccaagctggagtgctgcctggcctggcagctgcaggccagcagaagagagctggagatggagctgaagatgctgaagagccagagcagcagcgccgagcagagcttcctgttcagcagagaggaggccgacaccctgagactgaaggtggaggagctggagggcgagagaagcagactggaggaggagaagagaatgctggaggcccagctggagagaagagccctgcagggcgactacgaccagagcagaaccaaggtgctgcacatgagcctgaaccccaccagcgtggccagacagagactgagagaggaccacagccagctgcaggccgagtgcgagagactgagaggcctgctgagagccatggagagaggcggcaccgtgcccgccgacctggaggccgccgccgccagcctgcccagcagcaaggaggtggccgagctgaagaagcaggtggagagcgccgagctgaagaaccagagactgaaggaggtgttccagaccaagatccaggagttcagaaaggcctgctacaccctgaccggctaccagatcgacatcaccaccgagaaccagtacagactgaccagcctgtacgccgagcaccccggcgactgcctgatcttcaaggccaccagccccagcggcagcaagatgcagctgctggagaccgagttcagccacaccgtgggcgagctgatcgaggtgcacctgagaagacaggacagcatccccgccttcctgagcagcctgaccctggagctgttcagcagacagaccgtggcctag

SEQ ID NO: 306295 - protein, 122 aa, Artificial Sequence
  derived and/or modified sequence
MEDTPLVISKQKTEVVCGVPTQVVCTAFSSHILVVVTQFGKMGTLVSLEPSSVASDVSKPVLTTKVLLGQDEPLIHVFAKNLVAFVSQEAGNRAVLLAVAVKDKSMEGLKALREVIRVCQVW

SEQ ID NO: 306296 - DNA, 369 bp, Artificial Sequence
  derived and/or modified sequence
atggaggacacccccctggtgatcagcaagcagaagaccgaggtggtgtgcggcgtgcccacccaggtggtgtgcaccgccttcagcagccacatcctggtggtggtgacccagttcggcaagatgggcaccctggtgagcctggagcccagcagcgtggccagcgacgtgagcaagcccgtgctgaccaccaaggtgctgctgggccaggacgagcccctgatccacgtgttcgccaagaacctggtggccttcgtgagccaggaggccggcaacagagccgtgctgctggccgtggccgtgaaggacaagagcatggagggcctgaaggccctgagagaggtgatcagagtgtgccaggtgtggtag

SEQ ID NO: 306297 - DNA, 369 bp, Artificial Sequence
  derived and/or modified sequence
atggaggacactccgctcgtgattagcaaacagaaaaccgaggttgtttgtggggtgcctactcaggtggtatgtacggcattcagctcccatattttggtagttgtcacgcagtttgggaagatgggaacactcgtgtctctagaacccagctccgttgcatccgatgtgtccaaacccgtgctcactacaaaggtgctgctgggtcaggatgagcctctgatccacgtgttcgccaagaacttagtagcgtttgtgtcccaggaggccgggaatcgggccgtcctgctggccgttgctgtcaaggataagagcatggagggccttaaggcactccgtgaggttatacgagtttgccaagtgtggtag

SEQ ID NO: 306298 - DNA, 369 bp, Artificial Sequence
  derived and/or modified sequence
atggaggacacacctctcgtgatatcaaagcagaagacagaagtggtgtgcggagttccaacacaggtggtctgtaccgccttcagtagccatatactggtggtggtgactcagtttggcaagatgggaactctggtgtcacttgagcctagctccgtcgcatcagatgttagcaaaccagtgctaaccacaaaagtgctactgggacaggatgagccgttgattcatgtgtttgctaagaacctggttgccttcgtctcccaggaagccgggaatcgggccgtgcttctggccgttgccgtcaaggacaaatccatggaggggctgaaggccctgagagaggtgattcgagtgtgtcaggtttggtag

SEQ ID NO: 306299 - DNA, 369 bp, Artificial Sequence
  derived and/or modified sequence
atggaggacacccccctcgtcataagtaaacaaaagaccgaggtggtgtgcggggtccctactcaggtggtctgtaccgcattcagctcccacattctggtggtggttactcagttcggcaagatgggcacactggtaagcctggaacctagttcggttgcttctgatgtatcgaaaccagtactgactactaaagttctgctcggacaggatgagccgcttattcatgtcttcgctaaaaacctggtagctttcgtgagccaagaggcagggaatagggccgtacttctggctgtagccgtgaaagataaatcaatggagggcctgaaggccctccgcgaggtaattagggtgtgccaggtttggtag

SEQ ID NO: 306300 - DNA, 369 bp, Artificial Sequence
  derived and/or modified sequence
atggaggacacccccctggtgatcagcaagcagaagacagaggtggtgtgtggggtgcccacccaggtggtgtgcacagccttcagcagccacatcctggtggtggtgacccagtttgggaagatgggcaccctggtgtccctggagcccagctctgtggccagtgatgtgtccaagcctgtgctgaccaccaaggtgctgctgggccaggatgagcccctcatccacgtgtttgccaagaacctggtggcctttgtgtcccaggaggccggcaacagagctgtgctgctggccgtggccgtgaaggacaagtccatggagggcctgaaggccctgcgggaggtgatccgggtgtgccaggtgtggtag

SEQ ID NO: 306301 - DNA, 369 bp, Artificial Sequence
  derived and/or modified sequence
atggaggacacccccctggtgatcagcaagcagaagaccgaggtggtgtgtggagtgcccacccaggtggtgtgtacggcattctcttctcatattttagtcgtggttacccagttcggtaagatgggaacattggtctccctggagccttcttccgtagcaagtgacgtatcaaagcctgtcctcaccactaaggtacttttgggccaagacgaaccactgatccacgtgttcgccaagaatctggtcgcgtttgtatcacaagaggctggcaatcgagctgtgctcctcgccgttgccgtgaaggacaagagtatggaagggctgaaggccctcagagaggtgatccgcgtgtgccaggtctggtag

SEQ ID NO: 306302 - DNA, 369 bp, Artificial Sequence
  derived and/or modified sequence
atggaggacacccccctggtgatcagcaagcagaagaccgaggtggtgtgtggtgttcccactcaggtggtctgtaccgctttttcttcccacattttggttgtggttacccagttcgggaagatgggcacccttgtcagcttagagcccagtagtgtagcctcagacgtaagtaaaccggtgttaaccactaaggtcctcctcggccaggacgaacctctgatccatgtgtttgcaaaaaatctcgttgccttcgtgtcacaagaggctggcaacagagccgtacttctggctgtggccgtaaaagacaagagcatggaggggctaaaggcgttacgggaagtaatacgggtgtgccaggtatggtag

SEQ ID NO: 306303 - DNA, 369 bp, Artificial Sequence
  derived and/or modified sequence
atggaggacacccccctggtgatcagcaagcagaagaccgaggtggtctgtggagtgcctactcaggtggtgtgcacagcattttcctcgcatatcttggtggtcgtgacccagttcggtaaaatgggcaccctggtcagtttagagccctcttcagttgcttcagatgttagtaagcctgtcctcacgactaaggtacttcttggacaggacgagccactcatacatgtatttgccaaaaacttggtggcatttgtgagtcaagaggccgggaacagagcagtgcttctagccgttgctgtcaaagataagtccatggaggggttgaaggccctgagagaggtcatcagagtttgtcaggtgtggtag

SEQ ID NO: 306304 - DNA, 369 bp, Artificial Sequence
  derived and/or modified sequence
atggaagacacacccctcgtcattagtaaacaaaagacagaagtagtgtgtggggtgcctacccaggtggtgtgtactgctttctcaagccatattttggtggtagttacgcagttcgggaagatgggtaccctcgtgagtctcgagccaagcagcgtcgcgagcgatgtcagtaaacctgtgctgaccaccaaggtcttactcgggcaagatgagccactcatccacgtgtttgccaaaaatctggtcgcctttgtgtcccaagaggccggtaatagggctgtgctgcttgcagtggccgtcaaggacaaatcgatggaaggattaaaggcactcagagaggtcattcgggtctgccaggtgtggtag

SEQ ID NO: 306305 - DNA, 369 bp, Artificial Sequence
  derived and/or modified sequence
atggaagacacaccactagttatctctaaacagaaaacggaggtagtctgcggagttcccacacaggtcgtttgcacagccttttcaagtcacatcctcgtggtggttacccaatttggaaagatgggaaccctggtgtcactggaaccaagctccgtagctagtgacgttagtaagccagtgctcaccaccaaggtgctgttaggccaggatgagcctctgatccatgtctttgctaaaaatctggtagccttcgtcagtcaggaggccggtaatcgggcagtgttgttggcagtggctgtgaaagataagagcatggaggggttgaaagctctgcgcgaagtgatcagagtgtgccaggtgtggtag

SEQ ID NO: 306306 - DNA, 369 bp, Artificial Sequence
  derived and/or modified sequence
atggaagatacccctctggtcatttctaaacagaagactgaggtggtgtgtggggttcccacccaagtcgtctgtaccgccttctcttcccacatcttggtggttgtgacacagttcggtaagatgggcaccctcgtgtctcttgaaccatccagcgtggctagtgatgtcagtaagcctgtgctgactacaaaagtcttactcggtcaggatgagcctttgattcacgtgttcgctaaaaacctggttgcctttgtgagccaggaggccggaaaccgcgctgtgctcctagccgtagccgtcaaggacaagtcaatggaagggctcaaggccctgcgggaggttattagagtctgtcaggtttggtag

SEQ ID NO: 306307 - DNA, 1007 bp, Artificial Sequence
  derived and/or modified sequence
cccagcactttgggaggccgaggaaggcagatcacctgaggtcaggagttcaagaccagcctgaccgacatggtgaaaccccatctctactaaaaatttaaaaagttagccgggcctggtggcgcacgcctgtaatcccagctacacaggaggctgaggcaggagaattgcttgaaccagggaggcggaggctgcagtgagccgagatcgcgccactgcactccagcctgggtgacacagcaagactccgtctcaaacaaaacaaaacaaaaaaccttccagcttggagaaactgagagtgagcagtagggagtgagggggtccctgggaggaaccagaactcatcccgcttcagggtggggctggcccccttcttggccttggccggggcttcgtgtcacggagcgcccgagggacggtcggagcccaccccagcccgcccgccgcctgagcctggccgagctctctgcacctgcacacgtctgtaaaacgcggatgaaacgcttctacggaaccgggtggctgagatgaactgccactgcagagccccgccatggaagacacgccgttggtgatatcgaagcagaagacggaggtggtgtgcggggtccccacccaggtggtgtgtacggccttcagcagtcacatcctggtggtggtgacccagtttgggaagatgggcaccctggtctccctggagcccagcagcgtggccagtgacgtcagcaagcctgtgctcaccacaaaagtccttctggggcaggatgagcctctcatccatgtctttgcaaagaacctggtagcgtttgtgtctcaagaagctggaaacagagcagtcctcctcgccgtggccgtgaaggacaaaagcatggaggggctgaaggcgctgagggaggtgatccgggtgtgccaggtgtggtgacctggaggcagccgccccgcgctgctcagcaggacacgtgaacacccagacacccactcagggactcaagtctcacctccctccc

SEQ ID NO: 306308 - DNA, 1391 bp, Artificial Sequence
  derived and/or modified sequence
cgcgggcttccccgggcggctgcgtccccagtagcccggccggcctcggcaccgcgtgtcgtgggggtcccgggccgcggctgcagggccggggcggcggcgaggccgaggggcgggaagccactgcccggcctggcagtgtgaacgtgcaagtcgatcccctaacccagaaagccccaggcgcggtctctatgggcggccccgctcctgcttctgttttatttttttacggacagggtctcgctctaccgcccgggttgtaatgcaatggtgtgatcacggctcaccgcagcctcgacctcccgggctgaagcgatcttcccgcctcagcctcctgagtaactgggaccacaggcgcgccctgctggttttttttttttttttttttggtagagatgggggtctcgctatgttggccaggctggtctcgaattcctggcctcaacgatcgtcctgtctcggcctcccaaagtgccgggatgacaggcatgagccaccgcgcctggccccttcttttgaatgggcctccttgcgtttccgtttcaatgccccgtgctacttttttgggagccccaaggctgtactgtttgattgactcctttttttcccctttctttttaacctaaattaaagctgccactgcagagccccgccatggaagacacgccgttggtgatatcgaagcagaagacggaggtggtgtgcggggtccccacccaggtggtgtgtacggccttcagcagtcacatcctggtggtggtgacccagtttgggaagatgggcaccctggtctccctggagcccagcagcgtggccagtgacgtcagcaagcctgtgctcaccacaaaagtccttctggggcaggatgagcctctcatccatgtctttgcaaagaacctggtagcgtttgtgtctcaagaagctggaaacagagcagtcctcctcgccgtggccgtgaaggacaaaagcatggaggggctgaaggcgctgagggaggtgatccgggtgtgccaggtgtggtgacctggaggcagccgccccgcgctgctcagcaggacacgtgaacacccagacacccactcagggactcaagtctcacctccctccccggtggagggaggaactttggcactagcccttggagccaggaaaaaagactcgtgtctcaggcagactcttactctggttactaagatcatctgtgcatgacggggagggtggaacaggtcccggaggagtcgtgaatggttctcaccaggacctgaatcgttgcttgtgtttgagaattggaggaatgagtcagcaggcgtggctcatggcccccccgtgtgcaggatcaattgtaggaggaaatttcttttttattaaaagcgaatgtgtatcccaaaata

SEQ ID NO: 306309 - DNA, 774 bp, Artificial Sequence
  derived and/or modified sequence
cgcacgcagagccacttccgggcgcggcgccggcttgctgccactgcagagccccgccatggaagacacgccgttggtgatatcgaagcagaagacggaggtggtgtgcggggtccccacccaggtggtgtgtacggccttcagcagtcacatcctggtggtggtgacccagtttgggaagatgggcaccctggtctccctggagcccagcagcgtggccagtgacgtcagcaagcctgtgctcaccacaaaagtccttctggggcaggatgagcctctcatccatgtctttgcaaagaacctggtagcgtttgtgtctcaagaagctggaaacagagcagtcctcctcgccgtggccgtgaaggacaaaagcatggaggggctgaaggcgctgagggaggtgatccgggtgtgccaggtgtggtgacctggaggcagccgccccgcgctgctcagcaggacacgtgaacacccagacacccactcagggactcaagtctcacctccctccccggtggagggaggaactttggcactagcccttggagccaggaaaaaagactcgtgtctcaggcagactcttactctggttactaagatcatctgtgcatgacggggagggtggaacaggtcccggaggagtcgtgaatggttctcaccaggacctgaatcgttgcttgtgtttgagaattggaggaatgagtcagcaggcgtggctcatggcccccccgtgtgcaggatcaattgtaggaggaaatttcttttttattaaaa

SEQ ID NO: 306310 - DNA, 222 bp, Artificial Sequence
  derived and/or modified sequence
atgccagggggcggtcctgagatggacgattatatggagactctcaaggacgaggaagacgccttgtgggaaaatgtcgagtgtaatcgccatatgttaagccgttacatcaacccagctaagctgactccctatctacgtcagtgcaaagttattgatgagcaggacgaagatgaggtattgaacgcgcctatgttgccaagtaaaattaacagagcgtag

SEQ ID NO: 306311 - DNA, 222 bp, Artificial Sequence
  derived and/or modified sequence
atgcctgggggcggccctgagatggatgactacatggagaccctgaaggatgaagaagatgccctgtgggagaatgtggagtgcaacagacacatgctgagccgctacatcaacccagccaagctgaccccctacctgcggcagtgcaaggtgattgatgagcaggatgaagatgaggtgctgaatgcccccatgctgcccagcaagatcaacagagcctag

SEQ ID NO: 306312 - DNA, 222 bp, Artificial Sequence
  derived and/or modified sequence
atgcccggcggcggccccgagatggacgactacatggagaccctgaaggacgaagaagacgcactctgggaaaacgtcgagtgcaaccgccacatgctcagcagatacatcaaccctgctaagttgacaccatacctgaggcaatgcaaggtgatcgatgagcaggatgaagatgaggtgttgaacgctcccatgcttccttccaagattaatcgggcctag

SEQ ID NO: 306313 - DNA, 222 bp, Artificial Sequence
  derived and/or modified sequence
atgcccggaggtggacccgagatggacgattacatggagactctcaaggatgaggaagatgcattgtgggagaatgtcgaatgtaaccggcatatgctctcgaggtacattaatccagcgaaactaaccccatacctgagacagtgtaaagtgatcgatgaacaagatgaggacgaggtgctgaacgcgccaatgttgccttctaaaattaatcgagcttag

SEQ ID NO: 306314 - DNA, 584 bp, Artificial Sequence
  derived and/or modified sequence
gactcctgcccgcgccgcccgcagccccctcccggccctgcagcccctgggcgggcggcgcccctcggaggacggctccgggcccggggggacggagggcctggtcgcctggaggaagccggaggcctgcgtggaggaggcgccccgcgcagctggctggcggagcatgagcgccccaggaggagagagaatttgagaggaacacgaggaacccccaggacccagctggctcacaaccgcatcccaagcactgcaagtccagatgcaacgggagcctggctcaagggacgacaagatccagccggaaagtgtagaagtcacaccccaatggcgggatagcagcccctgtgtgtgagcacccctccatgccaggaggagggccagagatggatgactacatggagacgctgaaggatgaagaggacgccttgtgggagaatgtggagtgtaaccggcacatgctcagccgctatatcaaccctgccaagctcacgccctacctgcgtcagtgtaaggtcattgatgagcaggatgaagatgaagtgcttaatgcccctatgctgccatccaagatcaaccgagca

SEQ ID NO: 306315 - DNA, 222 bp, Artificial Sequence
  derived and/or modified sequence
atgcccggcggcggccccgagatggacgactacatggagaccctgaaggacgaggaggacgccctgtgggagaacgtggagtgcaacagacacatgctgagcagatacatcaaccccgccaagctgaccccctacctgagacagtgcaaggtgatcgacgagcaggacgaggacgaggtgctgaacgcccccatgctgcccagcaagatcaacagagcctag

SEQ ID NO: 306316 - protein, 1312 aa, Artificial Sequence
  derived and/or modified sequence
MEEKGSKRGLEAAGKAGLATAGPGLLPRKPPGLAAGPAGTYGKAVSPPPSPRASPVAALKAKVIQKLEDVSKPPAYAYPATPSSHPTSPPPASPPPTPGITRKEEAPENVVEKKDLELEKEAPSPFQALFSDIPPRYPFQALPPHYGRPYPFLLQPTAAADADGLAPDVPLPADGPERLALSPEDKPIRLSPSKITEPLREGPEEEPLAEREVKAEVEDMDEGPTELPPLESPLPLPAAEAMATPSPAGGCGGGLLEAQALSATGQSCAEPSECPDFVEGPEPRVDSPGRTEPCTAALDLGVQLTPETLVEAKEEPVEVPVAVPVVEAVPEEGLAQVAPSESQPTLEMSDCDVPAGEGQCPSLEPQEAVPVLGSTCFLEEASSDQFLPSLEDPLAGMNALAAAAELPQARPLPSPGAAGAQALEKLEAAESLVLEQSFLHGITLLSEIAELELERRSQEMGGAERALVARPSLESLLAAGSHMLREVLDGPVVDPLKNLRLPRELKPNKKYSWMRKKEERMYAMKSSLEDMDALELDFRMRLAEVQRQYKEKQRELVKLQRRRDSEDRREEPHRSLARRGPGRPRKRTHAPSALSPPRKRGKSGHSSGKLSSKSLLTSDDYELGAGIRKRHKGSEEEHDALIGMGKARGRNQTWDEHEASSDFISQLKIKKKKMASDQEQLASKLDKALSLTKQDKLKSPFKFSDSAGGKSKTSGGCGRYLTPYDSLLGKNRKALAKGLGLSLKSSREGKHKRAAKTRKMEVGFKARGQPKSAHSPFASEVSSYSYNTDSEEDEEFLKDEWPAQGPSSSKLTPSLLCSMVAKNSKAAGGPKLTKRGLAAPRTLKPKPATSRKQPFCLLLREAEARSSFSDSSEESFDQDESSEEEDEEEELEEEDEASGGGYRLGARERALSPGLEESGLGLLARFAASALPSPTVGPSLSVVQLEAKQKARKKEERQSLLGTEFEYTDSESEVKVRKRSPAGLLRPKKGLGEPGPSLAAPTPGARGPDPSSPDKAKLAVEKGRKARKLRGPKEPGFEAGPEASDDDLWTRRRSERIFLHDASAAAPAPVSTAPATKTSRCAKGGPLSPRKDAGRAKDRKDPRKKKKGKEAGPGAGLPPPRAPALPSEARAPPPPPPPPPPHPPLPPPPLPPPPLPLRLPPLPPPPLPRPHPPPPPPLPPLLPPPQTRTLPAARTMRQPPPPRLALPRRRRSPPRPPSRPARRGPRPTPQARRRPRPSPRRLLRSPHSLCSPRLRPGPRADPRRERASTSPPPRSWPSGSACRPWRTGPRSPPSCQPGSSGSGSASPPSGVA

SEQ ID NO: 306317 - DNA, 1602 bp, Artificial Sequence
  derived and/or modified sequence
atggaggagaagggcagcaagagaggcctggaggccgccggcaaggccggcctggccaccgccggccccggcctgctgcccagaaagccccccggcctggccgccggccccgccggcacctacggcaaggccgtgagccccccccccagccccagagccagccccgtggccgccctgaaggccaaggtgatccagaagctggaggacgtgagcaagccccccgcctacgcctaccccgccacccccagcagccaccccaccagccccccccccgccagccccccccccacccccggcatcaccagaaaggaggaggcccccgagaacgtggtggagaagaaggacctggagctggagaaggaggcccccagccccttccaggccctgttcagcgacatcccccccagataccccttccaggccctgcccccccactacggcagaccctaccccttcctgctgcagcccaccgccgccgccgacgccgacggcctggcccccgacgtgcccctgcccgccgacggccccgagagactggccctgagccccgaggacaagcccatcagactgagccccagcaagatcaccgagcccctgagagagggccccgaggaggagcccctggccgagagagaggtgaaggccgaggtggaggacatggacgagggccccaccgagctgccccccctggagagccccctgcccctgcccgccgccgaggccatggccacccccagccccgccggcggctgcggcggcggcctgctggaggcccaggccctgagcgccaccggccagagctgcgccgagcccagcgagtgccccgacttcgtggagggccccgagcccagagtggacagccccggcagaaccgagccctgcaccgccgccctggacctgggcgtgcagctgacccccgagaccctggtggaggccaaggaggagcccgtggaggtgcccgtggccgtgcccgtggtggaggccgtgcccgaggagggcctggcccaggtggcccccagcgagagccagcccaccctggagatgagcgactgcgacgtgcccgccggcgagggccagtgccccagcctggagccccaggaggccgtgcccgtgctgggcagcacctgcttcctggaggaggccagcagcgaccagttcctgcccagcctggaggaccccctggccggcatgaacgccctggccgccgccgccgagctgccccaggccagacccctgcccagccccggcgccgccggcgcccaggccctggagaagctggaggccgccgagagcctggtgctggagcagagcttcctgcacggcatcaccctgctgagcgagatcgccgagctggagctggagagaagaagccccccccagggcctgcccccctgcatgggccagggcagccccatgcccgccggcctgcccgactgcgccagaggccccgcccccaccctgagcggctggcccagactgggcgagcagagcagagtgggcctgcagcccggcgtgagcgtgaagggcaccagatggagaggccccggcaccggccccccctggagcaagcccagccactacagaaagccccagtggtgctag

SEQ ID NO: 306318 - DNA, 3939 bp, Artificial Sequence
  derived and/or modified sequence
atggaggagaagggcagcaagagaggcctggaggccgccggcaaggccggcctggccaccgccggccccggcctgctgcccagaaagccccccggcctggccgccggccccgccggcacctacggcaaggccgtgagccccccccccagccccagagccagccccgtggccgccctgaaggccaaggtgatccagaagctggaggacgtgagcaagccccccgcctacgcctaccccgccacccccagcagccaccccaccagccccccccccgccagccccccccccacccccggcatcaccagaaaggaggaggcccccgagaacgtggtggagaagaaggacctggagctggagaaggaggcccccagccccttccaggccctgttcagcgacatcccccccagataccccttccaggccctgcccccccactacggcagaccctaccccttcctgctgcagcccaccgccgccgccgacgccgacggcctggcccccgacgtgcccctgcccgccgacggccccgagagactggccctgagccccgaggacaagcccatcagactgagccccagcaagatcaccgagcccctgagagagggccccgaggaggagcccctggccgagagagaggtgaaggccgaggtggaggacatggacgagggccccaccgagctgccccccctggagagccccctgcccctgcccgccgccgaggccatggccacccccagccccgccggcggctgcggcggcggcctgctggaggcccaggccctgagcgccaccggccagagctgcgccgagcccagcgagtgccccgacttcgtggagggccccgagcccagagtggacagccccggcagaaccgagccctgcaccgccgccctggacctgggcgtgcagctgacccccgagaccctggtggaggccaaggaggagcccgtggaggtgcccgtggccgtgcccgtggtggaggccgtgcccgaggagggcctggcccaggtggcccccagcgagagccagcccaccctggagatgagcgactgcgacgtgcccgccggcgagggccagtgccccagcctggagccccaggaggccgtgcccgtgctgggcagcacctgcttcctggaggaggccagcagcgaccagttcctgcccagcctggaggaccccctggccggcatgaacgccctggccgccgccgccgagctgccccaggccagacccctgcccagccccggcgccgccggcgcccaggccctggagaagctggaggccgccgagagcctggtgctggagcagagcttcctgcacggcatcaccctgctgagcgagatcgccgagctggagctggagagaagaagccaggagatgggcggcgccgagagagccctggtggccagacccagcctggagagcctgctggccgccggcagccacatgctgagagaggtgctggacggccccgtggtggaccccctgaagaacctgagactgcccagagagctgaagcccaacaagaagtacagctggatgagaaagaaggaggagagaatgtacgccatgaagagcagcctggaggacatggacgccctggagctggacttcagaatgagactggccgaggtgcagagacagtacaaggagaagcagagagagctggtgaagctgcagagaagaagagacagcgaggacagaagagaggagccccacagaagcctggccagaagaggccccggcagacccagaaagagaacccacgcccccagcgccctgagcccccccagaaagagaggcaagagcggccacagcagcggcaagctgagcagcaagagcctgctgaccagcgacgactacgagctgggcgccggcatcagaaagagacacaagggcagcgaggaggagcacgacgccctgatcggcatgggcaaggccagaggcagaaaccagacctgggacgagcacgaggccagcagcgacttcatcagccagctgaagatcaagaagaagaagatggccagcgaccaggagcagctggccagcaagctggacaaggccctgagcctgaccaagcaggacaagctgaagagccccttcaagttcagcgacagcgccggcggcaagagcaagaccagcggcggctgcggcagatacctgaccccctacgacagcctgctgggcaagaacagaaaggccctggccaagggcctgggcctgagcctgaagagcagcagagagggcaagcacaagagagccgccaagaccagaaagatggaggtgggcttcaaggccagaggccagcccaagagcgcccacagccccttcgccagcgaggtgagcagctacagctacaacaccgacagcgaggaggacgaggagttcctgaaggacgagtggcccgcccagggccccagcagcagcaagctgacccccagcctgctgtgcagcatggtggccaagaacagcaaggccgccggcggccccaagctgaccaagagaggcctggccgcccccagaaccctgaagcccaagcccgccaccagcagaaagcagcccttctgcctgctgctgagagaggccgaggccagaagcagcttcagcgacagcagcgaggagagcttcgaccaggacgagagcagcgaggaggaggacgaggaggaggagctggaggaggaggacgaggccagcggcggcggctacagactgggcgccagagagagagccctgagccccggcctggaggagagcggcctgggcctgctggccagattcgccgccagcgccctgcccagccccaccgtgggccccagcctgagcgtggtgcagctggaggccaagcagaaggccagaaagaaggaggagagacagagcctgctgggcaccgagttcgagtacaccgacagcgagagcgaggtgaaggtgagaaagagaagccccgccggcctgctgagacccaagaagggcctgggcgagcccggccccagcctggccgcccccacccccggcgccagaggccccgaccccagcagccccgacaaggccaagctggccgtggagaagggcagaaaggccagaaagctgagaggccccaaggagcccggcttcgaggccggccccgaggccagcgacgacgacctgtggaccagaagaagaagcgagagaatcttcctgcacgacgccagcgccgccgcccccgcccccgtgagcaccgcccccgccaccaagaccagcagatgcgccaagggcggccccctgagccccagaaaggacgccggcagagccaaggacagaaaggaccccagaaagaagaagaagggcaaggaggccggccccggcgccggcctgcccccccccagagcccccgccctgcccagcgaggccagagcccccccccccccccccccccccccccccccccacccccccctgccccccccccccctgccccccccccccctgcccctgagactgccccccctgccccccccccccctgcccagaccccacccccccccccccccccccctgccccccctgctgccccccccccagaccagaaccctgcccgccgccagaaccatgagacagccccccccccccagactggccctgcccagaagaagaagaagcccccccagaccccccagcagacccgccagaagaggccccagacccaccccccaggccagaagaagacccagacccagccccagaagactgctgagaagcccccacagcctgtgcagccccagactgagacccggccccagagccgaccccagaagagagagagccagcaccagccccccccccagaagctggcccagcggcagcgcctgcagaccctggagaaccggccccagaagcccccccagctgccagcccggcagcagcggcagcggcagcgccagcccccccagcggcgtggcctag

SEQ ID NO: 306319 - DNA, 912 bp, Artificial Sequence
  derived and/or modified sequence
atggacggcagagacttcggcccccagagaagcgtgcacggcccccccccccccctgctgagcggcctggccatggacagccacagagtgggcgccgccaccgccggcagactgcccgccagcggcctgcccggccccctgccccccggcaagtacatggccggcctgaacctgcacccccaccccggcaagtgccccgccccctgccccagcccccccgtgttccccggcagaagcaccagacccggcccccccgtgcacagcagacccggcctgggcgacagccccagcgtgggccacggcggcgccggcagactgggcagccagggctgggagacccccggccccggcgccaaggccgtggagagcgtggccagactgggctacctgttcagaagcgtgctgggccccagagagcccaaggccggcgtggtggccagagccaccggcgccatccccatccccggcgcccccgccgccagagcctgggccggcgtgttcaagatctgggccagaaaggagcagaccggccccgcccccagagagacccccctgcccgagctggagagcttcagctggcagaccctgctgctggccctggtgggcccccccggcttctgcagccagctgcaccacagcagaagagccggcagcctggccgtgaccgagagaagaggcatgagagagtacgccggcggctgcggcagcaccgtgacccccgccctgggcccctggcccagaggcggcagagacgcccccttcttccccggcagaaccgccgccctgggcacctgcacccccgtgggcggcagaagacccagacccagcggcaccccctgcttccccgccagaaagagagtgagaagatgcggcagagacaccgagaccggccccagcagaagcagaacctag

SEQ ID NO: 306320 - DNA, 1602 bp, Artificial Sequence
  derived and/or modified sequence
atggaggagaaaggaagcaaacgcggcctcgaagccgcgggcaaggctggactagcaaccgccgggcccggtctccttcctcggaaacctcccggtttagccgctggccccgccggcacctacggcaaagccgtctctccccctcctagccccagagcctcaccagttgctgcattgaaggcaaaggttattcagaaactggaagatgtgtccaagcctccagcttacgcgtatccagccaccccttcatctcatcccacgtcgcccccacccgcctctcctcctcccacaccggggattacccggaaggaagaggcacctgaaaatgtggtggaaaagaaggatctggaactagagaaggaggcccccagcccctttcaagcactcttcagcgacatcccccctcgctacccattccaggccctgccccctcattacggacggccctacccattcctgctgcaacctaccgccgccgcagacgcagatgggctagcccccgacgtgccgctgcccgctgatggacctgagaggttggccctcagcccggaggacaagcccatacgcctgtctccgtctaagattacagaacctctcagggagggacctgaggaagagccactggctgagcgggaggtcaaagccgaggtggaagacatggacgaaggtccaacagagctcccccccctggaaagcccactcccactacccgccgcagaagccatggcaaccccctccccagccggcgggtgcgggggaggtttgctcgaggcccaggccctgtcggctactgggcagagttgcgcggagcccagcgagtgcccagacttcgtggagggaccagaaccaagagtagactcccctggaaggacagagccatgcaccgccgcgctagacctgggtgtccagctgactccggagaccttggtggaggcgaaggaagaaccagtggaggtcccagtcgctgtccctgtagttgaagctgtgcccgaagagggcctggcgcaagtcgcaccaagtgaatctcagcctacactggaaatgagcgattgcgatgtgcccgccggagagggacagtgcccctccttggaaccacaggaggccgtacctgtacttggctcaacttgcttcctggaagaagcttcctcagaccagttcctgccttcgctcgaagaccctcttgctggcatgaatgcactggcggctgcagccgaactccctcaggccaggcccctgccgagtcccggagcagccggcgcgcaggctttagaaaagcttgaagctgcagagagcctggttctggagcagagctttctgcacgggattacactgttgagcgagattgccgaattagagctggagcgcaggagcccacctcagggcctgcccccttgtatgggccagggctcccctatgcccgcggggctgccagactgtgctcgggggccagctcccacccttagcgggtggccccgcttaggcgagcagtccagggtgggcctgcagccaggggtgagtgtgaaaggtacccgctggaggggccctggcactggaccgccttggtctaagccctcccattatagaaaacctcagtggtgttag

SEQ ID NO: 306321 - DNA, 3939 bp, Artificial Sequence
  derived and/or modified sequence
atggaggagaaggggtctaagagaggactcgaggctgctgggaaggcgggattggcaaccgcggggcccggcctgctgcctagaaagccccccggcctggcagccggacccgccggcacctatgggaaagcagtgagccccccacctagtccccgagcatctcccgtggccgccctgaaagccaaggtgatccagaagctggaagacgtgtctaaacctcccgcctacgcctatccagcgacacctagctcccacccgacttcgccgccgccagctagcccccccccaacccccggcattactcgtaaggaggaggcccctgagaatgtggtagaaaagaaggacctggagttggaaaaagaggctccttccccttttcaggctttattcagtgacatccccccccggtatccatttcaggcgctgcccccccattatgggcgtccctatccctttctgctgcagcccactgcggctgccgatgccgatggacttgctcccgacgtgcccttgcctgccgatgggcctgaaagactggcattgagccctgaagacaagcccattcgcttaagcccctcgaaaatcaccgagcccctgagggagggaccagaggaggagcctctggcggagcgagaggttaaagccgaagttgaggacatggatgagggaccgacagaactgcccccactggaatccccactgccactgcccgccgctgaggcgatggcgacaccctcccctgccggtggttgcggcggcgggttgctcgaggcgcaggctctttcagctaccgggcagtcatgcgccgaaccatctgaatgtcccgattttgtagagggtccagagcctagagtcgattctccaggcaggactgagccctgcacagccgctctcgatcttggtgtccagctgacaccagagaccctggtcgaagccaaggaagagccggtggaagtccctgtggctgttcctgtggtggaggccgtcccagaagaagggctcgcccaggtcgcccccagtgagtcacaacccaccctggagatgtccgactgtgatgttcccgctggtgagggacagtgcccttccctagagccccaggaggctgtgcctgtcttgggatccacgtgcttcctagaggaggcttctagtgaccagttcctgccctcactggaggatcccctggcagggatgaacgcactcgcagccgcagccgaactgccccaggccagacccctgcccagccctggggcagctggagcacaagctctcgagaagttagaagctgccgaaagtcttgtcctagagcagtcttttttgcacgggatcacactgctgtccgaaattgccgagctggagctcgagcgacgttcacaggagatgggaggagctgaacgggccttggtggcccgaccttcactcgagtcgttgctggcagctggctctcacatgctgcgggaagtgctggatggccccgtcgtcgatccccttaagaatttgcggctgccccgagagctgaaacctaacaaaaagtacagttggatgaggaagaaagaagagcgcatgtatgcgatgaaatcaagcctggaggatatggatgctctggagttggatttcaggatgcggctggcagaggtccaaaggcagtataaggaaaagcaacgtgagctggtgaaactgcagcgccggcgtgatagcgaggatcgccgtgaggagccccaccggtctctggctcgtcgcgggcctgggaggcctcgcaagcgaactcacgcccccagtgctctgtcccccccccgcaaaagggggaagtccggccactcctccggcaagcttagcagcaaatctctgctcacctctgacgactacgaattgggggccgggatcaggaagcgccataaggggtctgaggaagaacacgacgccctgatcgggatgggaaaggcacgagggcggaatcagacatgggatgagcacgaagcatcgtcagactttatcagccagctcaagataaaaaagaaaaagatggcctctgatcaggagcagcttgcttctaagttagacaaggctttatctctgacaaaacaggacaaactcaaaagccccttcaaattctctgactctgccggtggcaaaagcaagacgtccggtggctgcgggaggtacttaaccccatatgacagcttactgggcaaaaaccgaaaggcgttggccaaaggcctgggattgagcctgaaatcatcccgggaggggaagcacaaacgggctgcaaaaaccaggaagatggaagttggattcaaagcccgaggccaacccaagagcgcccactctccctttgcctcagaggtttcttcatactcttacaacacggattcagaagaagatgaagagttcctgaaggatgaatggccagcacaaggaccatcatcttccaaactaactccttctctcctgtgctccatggtggccaagaattcaaaggccgccggaggacctaaacttactaagaggggcctcgcagccccaaggactttaaagcccaaaccagctacatcccgaaaacagcccttctgtttgctgcttcgtgaggccgaagccaggtcatcctttagtgactctagcgaggagtcgttcgaccaagacgaatcaagtgaagaagaggatgaagaggaagagctagaggaagaggacgaagcctcaggtggcgggtatcggctgggtgctagagagagggcactctcacccggcctcgaggagtccgggctgggtctgctggctaggtttgctgcctcagccctaccaagccccacagtgggcccgtccttaagcgtggtgcagctggaggcaaagcagaaggctcggaaaaaggaggagcggcagtctttgttaggcaccgaattcgagtacaccgactcagagagcgaagtgaaggtgaggaagcgttcacctgcaggcctactgcgacccaaaaaaggcctcggagagcctgggccaagcctcgccgccccaacacctggtgccagaggccctgacccgtcctctcccgacaaagcaaaactggcagtcgagaaaggcagaaaagcgaggaagttgcgcgggcctaaagaacctggctttgaagccggcccagaagctagcgacgacgacctgtggaccagaagaaggtccgaacgcatctttcttcacgacgcctcagccgcagcccctgcacccgtgagcacagcaccagcgacgaaaacaagcaggtgtgccaaagggggcccgctcagcccccgtaaagatgccggccgcgccaaagacagaaaggaccctcgaaagaaaaagaaaggaaaggaggctggaccaggtgcaggcctgcctccaccccgcgcccctgcacttcctagcgaagctagggccccacctccaccgcctccgccaccaccgccacacccaccgctgccaccccccccactgcccccgccccccctgcccctgagattgcctccattgcctcccccccccctgccacggcctcacccccccccaccgccgcccctgccgccacttctgcctcctcctcagacccgaacactccctgcggcccgtactatgagacaacctcctccacctcgattagccctgcctcgtcgtcggaggagtcccccacggcccccatctcgtcctgccaggagaggcccaaggcccaccccacaggcaagacgtcgccctcgaccgagccctcggagactgctccgcagccctcactctttgtgttctccccggctgcgtccaggccctcgagcagatcctcgtagagagcgggcctcaactagccctcccccacgcagttggcctagcgggagtgcgtgcagaccctggagaactggcccacgatccccaccatcatgccaacccggctcctccggctctggatcagcctctccccccagcggcgtcgcttag

SEQ ID NO: 306322 - DNA, 912 bp, Artificial Sequence
  derived and/or modified sequence
atggatggacgtgatttcggtcctcagagaagtgtgcacggcccacctccaccactgctatctggtttggccatggatagtcaccgcgtcggggctgccaccgccggtcggctgccggcctccggactgcctggacctcttccgcctggcaagtatatggctggcctgaacttgcatccccatcccgggaagtgcccagcaccctgtccttccccaccagtgtttcctggacgttcaacgaggcctggacctcctgtccactctcgccccggtctcggcgactcaccttccgtgggtcatggcggcgccggacgtctggggagccaaggctgggagactcctgggcccggagccaaggctgtcgagtcggtggcacggcttggctacctgttcaggagtgtgctgggcccccgggagcctaaggccggcgtagtagccagagctacgggggccataccaataccaggtgcccccgccgctagggcttgggctggggtatttaagatttgggcacgcaaagagcaaaccggcccagcacccagggagactccactacccgagttagaaagcttctcctggcagaccctgttattggccctggtgggacctcccggcttctgtagtcaactgcaccacagccgacgcgctgggtctctggctgtaacagagcgccgcggtatgcgcgagtatgccggaggatgcggtagtaccgtgacgcccgccctggggccttggcctcgtgggggtagagatgctccatttttccccggtagaacagctgccttgggaacgtgcacccccgtgggtggaaggcgcccccggcctagtggtactccttgtttccccgcccggaagcgtgttcggcggtgcgggagggacacagagaccggccctagccgatcccgaacgtag

SEQ ID NO: 306323 - DNA, 1602 bp, Artificial Sequence
  derived and/or modified sequence
atggaggagaagggcagcaagaggggcctggaggccgccggcaaggccggcctggccacagctggccctggcctgctgcccaggaagcccccaggcctggccgccggccctgctggcacctacggcaaggctgtgtccccaccacccagcccccgggccagccctgtggccgccctgaaggccaaggtgatccagaagctggaggatgtgtccaagcccccagcctatgcctacccagccacccccagcagccaccccaccagccccccaccagccagccccccacccaccccaggcatcaccaggaaggaggaggccccagaaaatgtggtggagaagaaggacctggagctggagaaggaggcccccagccccttccaggccctcttcagtgacatccccccacgctaccccttccaggccctgcccccccactacggccggccctaccccttcctgctgcagcccacagctgctgctgatgctgatggcctggccccagatgtgcccctgcctgcagatggccctgagcggctggccctgagccctgaggacaagcccatccggctgagccccagcaagatcacagagcccctgcgggagggccctgaggaggagcccctggccgagcgggaggtgaaggccgaggtggaggacatggatgagggccccacagagctgccccccctggagagccccctgcccctgcctgctgctgaggccatggccacccccagccctgctgggggctgcggcggcggcctgctggaggcccaggccctgagcgccaccggccagagctgtgccgagcccagtgaatgtcctgactttgtggagggccctgagccccgggtggacagccctggccgcacagagccctgcacagctgccctggacctgggcgtgcagctgaccccagagaccctggtggaggccaaggaggagcctgtggaggtgcctgtggccgtgcctgtggtggaggccgtgcctgaggagggcctggcccaggtggcccccagcgagagccagcccaccctggagatgtctgactgtgatgtgcctgctggggagggccagtgccccagcctggagccccaggaggccgtgcctgtgctgggcagcacctgcttcctggaggaggccagcagtgaccagttcctgcccagcctggaggaccccctggccggcatgaatgccctggccgctgctgctgagctgccccaggcccggcccctgcccagccctggagctgctggggcccaggccctggagaagctggaggccgctgagagcctggtgctggagcagagcttcctgcacggcatcaccctgctgtctgaaattgctgagctggagctggagaggaggagccccccccagggcctgcccccctgcatgggccagggcagccccatgcctgctggcctgcctgactgtgcccggggccctgcccccaccctgagcggctggccccggctgggggagcagagccgggtgggcctgcagcccggggtgtctgtgaagggcacccgctggaggggccctggcactggaccaccctggagcaagcccagccactacaggaagccccagtggtgctag

SEQ ID NO: 306324 - DNA, 3939 bp, Artificial Sequence
  derived and/or modified sequence
atggaggagaagggcagcaagaggggcctggaggccgccggcaaggccggcctggccacagctggccctggcctgctgcccaggaagcccccaggcctggccgccggccctgctggcacctacggcaaggctgtgtccccaccacccagcccccgggccagccctgtggccgccctgaaggccaaggtgatccagaagctggaggatgtgtccaagcccccagcctatgcctacccagccacccccagcagccaccccaccagccccccaccagccagccccccacccaccccaggcatcaccaggaaggaggaggccccagaaaatgtggtggagaagaaggacctggagctggagaaggaggcccccagccccttccaggccctcttcagtgacatccccccacgctaccccttccaggccctgcccccccactacggccggccctaccccttcctgctgcagcccacagctgctgctgatgctgatggcctggccccagatgtgcccctgcctgcagatggccctgagcggctggccctgagccctgaggacaagcccatccggctgagccccagcaagatcacagagcccctgcgggagggccctgaggaggagcccctggccgagcgggaggtgaaggccgaggtggaggacatggatgagggccccacagagctgccccccctggagagccccctgcccctgcctgctgctgaggccatggccacccccagccctgctgggggctgcggcggcggcctgctggaggcccaggccctgagcgccaccggccagagctgtgccgagcccagtgaatgtcctgactttgtggagggccctgagccccgggtggacagccctggccgcacagagccctgcacagctgccctggacctgggcgtgcagctgaccccagagaccctggtggaggccaaggaggagcctgtggaggtgcctgtggccgtgcctgtggtggaggccgtgcctgaggagggcctggcccaggtggcccccagcgagagccagcccaccctggagatgtctgactgtgatgtgcctgctggggagggccagtgccccagcctggagccccaggaggccgtgcctgtgctgggcagcacctgcttcctggaggaggccagcagtgaccagttcctgcccagcctggaggaccccctggccggcatgaatgccctggccgctgctgctgagctgccccaggcccggcccctgcccagccctggagctgctggggcccaggccctggagaagctggaggccgctgagagcctggtgctggagcagagcttcctgcacggcatcaccctgctgtctgaaattgctgagctggagctggagaggaggagccaggagatgggcggcgctgagcgggccctggtggcccggcccagcctggagagcctgctggccgccggcagccacatgctgcgggaggtgctggatggccctgtggtggaccccctgaagaacctgcggctgccccgggagctgaagcccaacaagaagtacagctggatgaggaagaaggaggagaggatgtatgccatgaagagcagcctggaggacatggatgccctggagctggacttcaggatgaggctggccgaggtgcagaggcagtacaaggagaagcagcgggagctggtgaagctgcagaggcggcgggacagcgaggaccggcgggaggagccccacaggagcctggcccggcggggccctggccggcccaggaagaggacccacgcccccagcgccctgagcccccccaggaagaggggcaagagcggccacagcagcggcaagctgagcagcaagagcctgctgaccagtgatgattatgagctgggcgccggcatcaggaagaggcacaagggcagcgaggaggagcatgatgccctgattggcatgggcaaggcccggggcaggaaccagacctgggatgaacatgaggccagcagtgacttcatcagccagctgaagatcaagaagaagaagatggccagtgaccaggagcagctggccagcaagctggacaaggccctgagcctgaccaagcaggacaagctgaagagccccttcaagttcagtgacagcgctgggggcaagagcaagaccagcggcggctgcggccgctacctgaccccctatgacagcctgctgggcaagaacaggaaggccctggccaagggcctgggcctgagcctgaagagcagccgggagggcaagcacaagagagctgccaagaccaggaagatggaggtgggcttcaaggcccggggccagcccaagagcgcccacagcccctttgccagcgaggtgtcctcctacagctacaacacagacagcgaggaggatgaggagttcctgaaggatgagtggccagcccagggccccagcagcagcaagctgacccccagcctgctgtgcagcatggtggccaagaacagcaaggctgctgggggccccaagctgaccaagaggggcctggccgcccccaggaccctgaagcccaagccagccaccagcaggaagcagcccttctgcctgctgctgcgggaggccgaggcccggagcagcttcagtgacagcagcgaggagagctttgaccaggatgagagcagcgaggaggaggatgaggaggaggagctggaggaggaggatgaggccagcggcggcggctaccgcctgggcgcccgggagcgggccctgagccctggcctggaggagagcggcctgggcctgctggccaggtttgctgccagcgccctgcccagccccaccgtgggccccagcctgtctgtggtgcagctggaggccaagcagaaggccaggaagaaggaggagcggcagagcctgctgggcacagaatttgagtacacagacagcgagagcgaggtgaaggtgaggaagaggagccctgctggcctgctgcggcccaagaagggcctgggggagcccggccccagcctggccgcccccacccctggggcccggggccctgaccccagcagcccagacaaggccaagctggccgtggagaagggcaggaaggccaggaagctgcggggccccaaggagcccggctttgaagctggccctgaggccagtgatgatgacctgtggacccggcggcgctctgagcgcatcttcctgcatgatgccagcgctgctgccccagcccctgtgtccacagccccagccaccaagaccagccgctgtgccaagggcggccccctgagccccaggaaggatgctggccgggccaaggacaggaaggaccccaggaagaagaagaagggcaaggaggccggccctggagctggcctgcccccaccccgggccccagccctgcccagcgaggcccgggcccctcctcctcctcctcctcctcctccaccccacccccccctgcccccaccacccctgcccccaccacccctgcccctgcggctgccccccctgcccccaccacccctgccccggccccaccccccacctcctccacccctgccccccctgctgcccccaccccagaccaggaccctgcctgctgcccggaccatgaggcagcccccaccaccccggctggccctgcccaggagaagaagaagccccccccggccccccagcaggcctgcccggcggggcccccggcccaccccccaggccaggagaagaccccggcccagcccccggcggctgctgcggagcccccacagcctgtgcagcccccggctgcggcccggccccagggctgacccccggcgggagcgggccagcaccagccccccacccaggtcctggcccagcggcagcgcctgccggccctggaggacaggccccaggagcccccccagctgccagcccggcagcagcggcagcggcagcgccagccccccatctggagtggcctag

SEQ ID NO: 306325 - DNA, 912 bp, Artificial Sequence
  derived and/or modified sequence
atggatggccgggactttggcccccagaggtctgtgcacggccccccaccacccctgctgagcggcctggccatggacagccaccgggtgggcgccgccacagctggccgcctgcctgccagcggcctgcccggccccctgcccccaggcaagtacatggccggcctgaacctgcacccccaccctgggaagtgcccagccccctgccccagcccccctgtgtttcctggccgcagcacccggcccggcccccctgtgcacagccggcccggcctgggggacagccccagcgtgggccacggcggggccggccgcctgggcagccagggctgggagaccccaggccctggggccaaggctgtggagagcgtggcccggctgggctacctgttccgctctgtgctgggcccccgggagcccaaggccggcgtggtggcccgggccactggagccatccccatccctggggccccagctgcccgggcctgggccggggtcttcaagatctgggccaggaaggagcagacaggccctgccccccgggagacccccctgcctgagctggagagcttctcctggcagaccctgctgctggccctggtgggccccccaggcttctgcagccagctgcaccacagccggcgggccggcagcctggccgtgacagagcggcggggcatgagagaatatgccggcggctgcggcagcacagtgaccccagccctgggcccctggccccggggcggcagagatgcccccttcttccctggccgcacagctgccctgggcacctgcacccctgtgggcggcagaagaccccggcccagcggcaccccctgcttccctgccaggaagagggtgcggcgctgtggccgggacacagagaccggccccagccgcagcaggacatag

SEQ ID NO: 306326 - DNA, 1602 bp, Artificial Sequence
  derived and/or modified sequence
atggaggagaagggcagcaagcggggcctggaggccgccggcaaggccggtctggccactgccggccctggcttgctgccccgaaaacctcctggtcttgccgcggggcctgccggaacatatggaaaggcagtgtcacctcccccttctcccagggcaagccctgttgccgctttgaaggccaaagtcatacagaaactggaggacgtatcaaagccgccagcttacgcctacccagcgaccccttcctcgcaccctacctcgccaccccccgcctcccctccaccaactccagggatcacccggaaggaagaagcacctgagaacgttgtggaaaaaaaagacctggagctcgagaaggaggccccctcaccatttcaggctctctttagcgacattcctcccagatatccattccaggctctgcctccacactatggtcggccctatccctttctgttgcagcccacagccgcggccgatgctgacggtttggcccctgatgtgcccctgccggccgatggccctgagcgccttgcactatctcccgaagacaaacctatacggttaagcccttctaaaattactgagcctttgagggaagggccagaggaggaacctctggcagagcgggaagtgaaagccgaggttgaggatatggacgagggccccacagagcttccacccctggagtcgcctctgcccctgcctgctgccgaagcaatggccacccccagtccggccggcggttgcggcggcggtctacttgaggcccaagccctttccgcgaccggccagtcctgtgctgagcccagcgaatgtcccgacttcgtggagggacctgagccacgagtagattccccaggtagaacagaaccatgcactgccgctctggatttgggggttcagctaacgcccgaaaccctcgtggaggcaaaagaggaaccagtcgaggtgccggtagccgttcccgtggtagaagctgtgcccgaagaagggctagcccaggtcgcgcccagcgaaagtcaacccactctggaaatgtctgattgtgatgttccagctggagaagggcaatgcccctcactcgagccccaagaggccgtacccgtgctgggttccacttgcttcctggaggaggcctcaagcgaccagttcctgccctctctggaggaccctctagctggcatgaatgccctggccgctgcagccgagctaccccaggctcgccccctgccttctcctggtgcggccggggcacaggctttggagaagctagaagctgccgaatcgcttgtcctggaacagtcctttttacacggcatcaccctgctctccgaaatcgccgaacttgagctggagagacgctctccaccgcagggtttgcctccttgtatggggcaaggcagcccaatgcccgctggtctgcctgactgtgctaggggtcccgcgcccactttgtctggctggcctcggctcggggaacagtccagagtcggccttcagccaggcgtgagtgtgaagggaacccggtggagaggccctggaacagggcctccatggagtaagccgagccactaccggaaacctcagtggtgttag

SEQ ID NO: 306327 - DNA, 3939 bp, Artificial Sequence
  derived and/or modified sequence
atggaggagaagggcagcaagcggggcctggaggccgccggcaaggccggcctggcaactgccggacccggcctgttgccacggaaaccaccagggcttgctgcaggcccagccggcacttatgggaaggcagtgtcacctccaccatccccaagagcctcacctgtggccgcccttaaggccaaggtgatacagaaactggaggatgtttccaaaccacctgcttatgcttaccccgcgacaccttcttctcacccaacctctcctccccctgcttctcctccacccacaccagggattacgcggaaagaggaagcaccagaaaacgtggtcgaaaagaaggatctggagttggagaaggaagccccttcaccatttcaggctttgtttagcgacatccctcctcgttacccatttcaggcacttcccccgcactatggtcgaccttatccttttctgctgcagccaactgccgcagccgacgctgatgggcttgctccagacgtcccgctgcctgccgacggtcccgaacgcttggcactctcgcccgaagacaagccaattcgcctctctcctagcaaaattacagagccgctgagggagggaccagaggaggaaccccttgcagagagggaggtgaaggcggaagtcgaggacatggacgagggtccaaccgagctcccaccattggagtctccactacctctgccggccgccgaggcaatggcgacaccatccccagctggcggctgtggcggcggtctactagaggcccaggctctctctgctactggccagtcatgcgcagagcctagtgagtgccctgatttcgtggagggtcctgagccacgcgtcgatagtcccggtcgcacggaaccctgcaccgcggcgctcgatcttggggtccagttgaccccagagacccttgtcgaggcgaaagaagagcctgtagaggttcccgttgccgtgccagtagtcgaggctgttcctgaggagggtctggcgcaagtggctcccagtgaatcacaacctaccctggagatgtccgattgcgacgttcccgctggggaaggacagtgtccttctctggagccccaggaggctgtgccagtcctcggtagcacttgtttcctggaagaggcatctagcgatcagtttctacctagtctagaagacccgctggctggtatgaatgccctggcagccgccgccgagctgccccaggcccgaccccttccttcgcctggagccgctggggcacaggctttggaaaaacttgaggccgcggaaagcctcgtgctggaacaatcatttctgcacggaattaccctcctgtccgagatagctgagctggagttagagaggagatcgcaagagatgggcggggcagagcgggcactggtggctcgcccctcgttggagtccctgttggctgcagggtcacacatgctgcgcgaagttttggacggccctgtggtcgacccccttaagaatctgcggctccctcgcgaactgaaacctaataaaaagtacagctggatgcgaaagaaggaagaacggatgtatgccatgaagtcctctctggaagacatggatgctttagaactcgattttagaatgcgcctggccgaggtacagaggcagtataaagagaaacaacgcgagctggtgaagttgcaaaggagaagggatagcgaagaccgcagggaagaacctcacagatcgctggctcgtcggggccccgggagaccccgtaaaaggacgcatgcaccctcagccttgagccctccaagaaagaggggtaaatccggacattcctctggcaaactcagttctaaaagcttgctcacatcggatgattacgagttaggagccggcatcagaaagaggcacaaaggctcggaggaggaacacgacgcactgatcggcatggggaaagctcgtggccgcaatcaaacatgggatgagcacgaagccagctctgacttcattagtcagctgaagattaaaaaaaaaaaaatggctagtgaccaggaacagctggcttctaagctggataaagccctgtctctgactaaacaggataagctaaaaagcccctttaagttttccgacagcgcaggcggcaagtccaaaacatccggaggctgcgggcggtacctgactccatacgacagcctgctaggaaaaaatcgcaaagcgctggcaaaggggctgggactctccctgaaatcgtctcgtgaaggcaagcacaaaagagccgcaaaaactaggaaaatggaggtaggctttaaagccagggggcaaccaaagtctgcccatagtcctttcgcgagcgaagtgtctagttatagctacaacacagattccgaggaagacgaggagttcctgaaggatgaatggcccgctcaggggccctcctccagcaaattaacgccttcccttctctgttctatggtggctaagaactctaaagctgctgggggaccaaagcttacaaagagggggctggctgctcctcgtacactcaaacccaagcccgcgaccagtcgaaagcagcccttttgcttgttgctcagagaggctgaagccagaagcagtttttcagatagcagcgaggagtctttcgatcaggatgaatctagtgaagaagaagacgaggaagaagaactggaggaggaagacgaggcatctggcgggggctataggctcggagcacgagaacgtgccctttctccaggactggaagagagcggcctgggcctccttgctaggtttgccgccagcgcattaccgagtcctaccgtgggacccagcctctcagtggtccagctggaggctaagcagaaggcccgcaagaaggaagaaaggcagagcctactgggaaccgaattcgagtacacagactctgaaagcgaagtgaaagtgagaaaacgtagtccagcaggactcctcaggcccaagaaggggctcggagaacccggacctagtttagctgcaccaaccccaggtgcgcgcggccctgatccttcttcccccgataaggcgaaattagcagtggagaaggggagaaaggctcggaaactgcgcggccccaaggaaccggggtttgaagccgggccggaagctagtgacgatgatttgtggacgcgccgtcgctctgagcgcatctttctgcacgacgccagtgccgctgctcccgcaccggtcagtaccgccccagccaccaagacatctagatgtgcaaaaggcgggcccttgtcaccaagaaaggacgcagggcgggctaaggaccgcaaagacccacggaagaaaaaaaaaggcaaagaggcaggacccggcgcaggcttgccgccgccccgagcacccgctttgccatcagaagcaagagctcctcctccgccccctcccccccccccccctcaccccccgctcccccctccccctttacctccgcccccattaccccttaggctgccccccctgcctcctcctcctctgccacggccccatccacctccgcccccgccgttaccccctctgcttccccctcctcagacgagaacacttcctgcagctagaacaatgcggcaacccccaccacctcgacttgccttgccaaggcgcagaaggagcccgcctcgcccaccaagcagacctgccagaaggggccccagacctactccacaagcccggaggcgtccgcgcccttcgccaagaaggttgctgcgcagcccccattcgctgtgttccccacgcctgaggccaggaccgcgtgctgatccccgccgggagagagcaagcactagcccacccccgcgctcatggccaagcgggtctgcatgccgcccttggcggacaggcccgagatctcccccatcttgtcagccagggagtagtgggagtggcagcgcgtctccccccagtggggtggcttag

SEQ ID NO: 306328 - DNA, 912 bp, Artificial Sequence
  derived and/or modified sequence
atggacggccgggacttcggcccccagcggagcgtgcacggcccccccccccccttgctgagtggcctggccatggatagtcatcgggtaggagctgcgactgccggccggctgccagcaagcggcttgccgggtcctcttccccccgggaaatatatggccggcctgaatctgcatcctcaccctggcaaatgcccagcgccttgcccttccccaccggtgttcccgggccgctctaccagacccggcccaccagtgcacagcagaccgggccttggggacagcccgagcgtggggcatggcggagcgggccgtttgggctcacaaggttgggagactccaggccccggcgcaaaggccgtggaatctgttgcccgcttgggctacctctttcgatctgtcttgggccctcgcgaacccaaggccggagtagtggctcgagcaacaggagccatcccaataccaggggcgccagcagcccgggcttgggctggggtcttcaaaatttgggcccggaaagaacagacaggacccgcaccccgggaaacaccacttccggaactagagtccttcagttggcagactttgctcctcgccctggtaggccctccggggttttgttctcagttgcaccatagtcgtcgtgccggcagcttagcggtcacagaacgcagaggcatgagggaatacgcagggggttgcgggtcgaccgtgacccctgcgttggggccctggccacgcggtggacgtgatgctccattttttcctggccgtactgcggctcttggtacttgcacccctgtggggggacggcgccctagaccatccggcactccctgctttccagcaagaaagcgggtgcgtcgatgtgggagggacacagagaccgggccttctaggtcaagaacgtag

SEQ ID NO: 306329 - DNA, 1602 bp, Artificial Sequence
  derived and/or modified sequence
atggaggagaagggctcaaaaagaggactggaggctgcaggcaaagcgggtttagcgacagctggccctgggttactgcccaggaagccacccggactggctgccggtcctgctggtacctatggcaaggcagtctcaccccctccctccccaagggcaagtcctgtagcagccttgaaagcaaaggtcatacaaaagttagaggatgtgagcaagcctccagcttacgcttatcccgcaacaccttctagtcatccaaccagcccacctcccgcaagtccacccccaacacctggaatcaccagaaaggaagaggctcctgagaacgtggtagaaaaaaaggatcttgagttagagaaggaagctcccagcccctttcaagccctcttctcagatatccctcccagataccccttccaggctctccccccacactatgggaggccctatccgtttctgcttcagccaacagctgcagcagatgccgatggcctggcgccagacgtgccactccccgctgacggtcctgagcgacttgcattaagcccagaggacaaaccaattcgactgtccccatccaagatcacagaacctctgcgcgaggggcctgaggaagaacctttggctgagagagaggttaaggccgaggtggaggacatggacgagggtcccaccgagctgcccccactggagtcacctctgcctcttccagccgcagaagcaatggcgaccccttctcccgcaggcggttgtggtggcggactcctggaggcacaagccctatccgcaaccggtcagagttgtgcggaacccagcgagtgcccagactttgtggaaggacctgagcctagggtcgatagccctgggcgtaccgaaccatgtaccgcagctctagacttgggtgtacaactgactcctgagaccctcgttgaggcgaaggaagagccagtggaggttcctgtggctgttcctgtggttgaggccgtgcccgaagaaggtctagcccaggtggccccatcagagagccagccgacactggagatgtcagattgcgacgtgcctgcaggagaggggcagtgccccagtcttgaaccgcaagaggccgttcctgtgctcgggagtacatgttttttggaggaagcgagttctgatcaatttcttccatcactcgaagaccctctcgcaggcatgaacgccctagccgcagccgcagagctgccacaggcaagaccacttccctcacccggtgctgccggtgcccaggcccttgagaagctcgaggctgccgagtccctcgtacttgagcaatcttttcttcacggcatcactctactgagcgaaatcgccgagctggagctggagcggcgttctcctccacagggcctacccccttgtatggggcaaggtagccctatgccagccggtctacctgattgcgcgagaggacccgcacccacattatcaggttggcctagactcggggaacagtccagggtaggcttgcagcccggtgtgtcggtcaagggaacccgatggcgtggacctggcaccggcccaccgtggtctaagccctcccattatagaaaaccccagtggtgttag

SEQ ID NO: 306330 - DNA, 3939 bp, Artificial Sequence
  derived and/or modified sequence
atggaagaaaagggaagtaagcgcggattagaggctgcgggaaaagctgggctcgccacggcaggtccagggctcctgcctagaaaacctcctgggctcgcggctggcccagcagggacttatggcaaagcagtgagcccgcctccgtctccccgtgcgtctcctgttgccgcactgaaggctaaggtgatccagaaactcgaggatgtgagtaagcctcctgcgtatgcctacccagcaactccctccagtcatccaacgagtcccccacccgcttcgcccccacctacccccggaatcacccgcaaagaggaagcacccgaaaacgttgttgaaaagaaggatctggagctggagaaggaagccccatctccttttcaggcactcttcagtgacatccctcccaggtacccctttcaagccctgcccccacactacggcagaccctatcccttcctgctgcagcctacagcagccgctgacgccgacgggctcgcccctgacgtgccgttacctgccgacgggccagagaggctcgctttgagccctgaagacaaacccatccgcctttccccatctaaaattacggagccactaagagagggccctgaagaggaaccacttgccgagcgcgaggtgaaggcagaggtggaggatatggacgaaggccctacagaactgccgccactggaatcacccctgcccctcccagctgctgaggccatggccaccccgtcccctgcagggggttgtggtgggggtctgttggaggcgcaggcacttagtgcgactggacagtcctgtgcggagccctccgagtgtccagactttgtggagggcccagaaccgagagtcgatagccctggtcgaactgagccgtgcacagctgcactggatcttggagttcagctgactccagaaactctggtggaggccaaagaggaacccgttgaggtgccagttgctgtacccgttgtcgaggcggtgcctgaagaggggttggcacaggtggctcccagcgagtcccagcctacgctggagatgtcagactgtgatgtgcccgcaggagagggtcagtgtccttccctggagccccaagaggcggtccccgtgttaggcagtacatgcttcctggaggaggcctcgagcgaccaattcctgccaagccttgaggaccctctggccggaatgaacgcgctggcggctgccgctgaactaccgcaggccaggccactcccgagtcctggagccgctggcgcacaggcgctcgagaagttggaggctgcggagtcccttgtgctggagcaaagtttcctccacggaattactcttttatctgaaattgccgagctggagctggagcgcagaagtcaggaaatgggcggagccgagcgggctctagtcgcaagaccaagtctagagtcactattagccgctggctcccacatgctcagagaagtccttgacgggcctgtggttgacccgctgaagaacctgaggctgcccagggagcttaaacctaataagaagtactcgtggatgcgtaagaaggaggagagaatgtatgcgatgaagagttctctcgaggatatggacgccttagagcttgacttcaggatgagactggccgaggttcagaggcagtataaggaaaaacagcgcgaactggtgaagctccagagaagacgcgactctgaagacaggcgagaggaaccgcacaggtccctggcacgcagaggcccaggacggcctcggaagaggacacatgccccaagtgcactctcgccaccaaggaaaaggggcaagtctggccatagttccggcaaactatcctccaaatcccttctcactagcgatgactacgagcttggggcaggcattcggaaacgtcacaaaggttcagaggaagagcacgatgcactgatcggcatgggaaaggccagaggacgcaatcagacatgggacgaacacgaggcttcatccgacttcatatcacagctgaaaatcaaaaaaaagaaaatggcgtctgatcaggaacagctcgcttctaagctggataaggcactgtcactgacaaagcaagacaaattgaagtccccttttaaatttagcgattccgcaggtggcaagtccaaaaccagtggcggatgcggcagatacctgacaccttatgacagtctgcttggtaagaaccgaaaagccctggctaagggactcggactttctctgaaaagctctcgtgaaggcaagcataaacgggctgcgaaaacgagaaaaatggaggtgggctttaaagctcgcggacagcccaaaagcgcccacagtcccttcgcatccgaggtgtcttcctactcctataacaccgattcagaggaggatgaggaattcctgaaagatgaatggccagctcaaggcccttcaagtagcaaactgacgccgtccctcctctgctcgatggttgcaaagaacagtaaggccgctgggggtcccaaattgactaagcgcggtttggccgctcccaggacattgaaacctaaacctgctacctccagaaagcagcccttttgcctgctgctcagggaagccgaggccaggagttctttctctgatagttccgaggagagttttgatcaggacgagagctcggaagaggaagacgaggaggaggagctggaggaggaggatgaggctagcggcggtgggtatcggcttggtgccagagagcgagcgctgtctcccggtttggaagaaagcggtctgggcttgcttgctcggttcgctgcaagtgcactcccctcacctacagtggggccaagcctgtcagtcgtgcagctggaggccaagcagaaggcgagaaagaaagaagaacgacagtcactgctgggcactgagtttgagtacaccgattcagaatcagaggtgaaagtgaggaaacggtcgccagctggtttgttaaggccaaaaaaaggacttggtgagccaggacccagtctggcagcccctacacctggcgcacgtggccctgacccatctagtccagacaaagccaaactggccgtcgagaaagggagaaaggctaggaagctccgcggaccaaaagagcctggatttgaggcgggtcctgaggcctccgacgacgacctatggacgaggcgacgcagtgagagaatctttctgcacgatgcttccgccgcagctcccgctcccgtatccactgcccctgccacgaagacctctagatgcgccaaaggtgggcctttgtcgcccaggaaagatgcaggccgagcaaaggaccgaaaagatcccagaaagaaaaaaaaaggaaaggaagcaggccctggggctggattgcccccaccacgggctccggcactgccctctgaggctagagcccctcccccaccccctcccccacccccaccacatccacctcttccgcctcccccattgccccctccaccacttcccctcagactgcccccattgcctcctccacccctgccacggccacacccacccccacctccccctcttcccccattgctccctcctcctcagacaaggacactgccagcagccaggacaatgaggcagccacctccccctaggctggcactcccacgcagacgaagaagcccacctaggccacccagcaggcccgcaagaagaggacctaggccaacgccacaggctagacggaggccaaggccttccccacgacgcctgctgcgttctccacattctctgtgttctcccagactcaggccgggtccccgagcagaccctaggagggagcgggcatccacatctcctcctccccgatcatggccatcaggcagtgcttgcaggccctggagaaccggacctcgcagtcctccctcctgccagcctgggtctagcggtagcggctccgcctctcccccatctggcgtcgcatag

SEQ ID NO: 306331 - DNA, 912 bp, Artificial Sequence
  derived and/or modified sequence
atggatggtagagactttggccctcaaagatcagtgcatgggccacctcctcctctgctttctggactggctatggactctcaccgagtcggagcggctacagcaggtaggctgccagccagtggcctgccagggcctctcccaccagggaagtacatggccggactcaatctgcaccctcatcctggtaaatgcccagctccttgcccttccccgcctgtattcccaggccgaagtaccaggcccggtccaccggtgcactccaggcctgggctcggggatagccctagcgttggacacgggggagctggcaggctgggaagccagggatgggagactccgggtcctggtgcgaaggcggttgaaagcgtggcccgtcttggctatctgttcagatcagttcttggacctcgtgaacccaaggccggagtggtcgcaagagccaccggagccattccaattcctggagcacccgcagcacgagcttgggctggcgtctttaaaatttgggccaggaaagagcaaacaggccctgcaccgcgtgaaaccccactgccagaattggaaagcttcagctggcaaactctgctcctggccctcgtagggccaccgggtttctgcagtcaactgcatcattccagacgcgcaggctccttggcggtcactgaacgcaggggaatgagagagtatgcgggtggctgcggcagcaccgtgactccggcactcgggccttggcctagagggggtcgggatgcaccattttttcccggaaggacagcagcattgggaacatgtacacctgttggcggacgacgacccaggccttccggcacaccttgtttccccgctcgcaagagagtccgcaggtgcggtcgtgataccgagacggggccatcaaggtctcgcacatag

SEQ ID NO: 306332 - DNA, 4786 bp, Artificial Sequence
  derived and/or modified sequence
ggccgcgggatggcgggcagcaggggcgcctagctgcgccgggagccggggccgccgccggagtcgttgtcgccggagcctggagccgtgaacccagccgcgccagacgccgtgtgcgccgcctcgcgcagctccgcctggccgcccggaggggccccaccgccggccgcctgtgcgccccgggccgcgggcccgccgccgagcgcaagccccgctggccgccgccatgcacgccgcggagcccccgccgcccgaggactctgggactacgccgaggccgaacttttaggtcccactgagctaggcctgcgggccgggtggggggctgatcgcggcactcccgcggaggatggatggccgagacttcgggccccagcggtccgtgcacggtcccccgccgccgctgctgtccggcctggccatggacagccaccgcgtgggcgcggccactgccggacgcttgcccgcctcgggcttgcccggcccgctgccgcccgggaagtacatggccggcctgaatctccatccgcacccgggcgaggccttcttgggcagctttgtggccagcgggatggggccctcggcctcgtcccatgggagcccagtgccactgccctctgacctgtctttccgctccccaacccctagcaacctgcccatggtgcagctgtgggccgcccacgcccatgaaggcttctcccacctgcccagtgggctgtacccatcctacctccacctgaaccacctggagccccccagcagtgggagccccctcctcagccagctgggtcagcccagcattttcgatacccagaaaggtcaggggccaggaggagacggtttctacctgcccaccgcgggggctccgggctccctgcactctcacgcgccctcggcccggacccctggcggcggccactcctcgggcgccccggccaaaggctcgtcgtcgcgggacggtccagccaaggagcgggcgggccgcggcggggagccgcctccgcttttcggcaagaaggacccgcgcgcccggggcgaggaggcctcggggccacggggcgtggtggacctgacccaggaggcgcgcgccgagggccgccaggaccgggggcccccgcgcctggctgagcgcctgtcgcccttcctggctgagtccaagaccaagaatgcggcgctgcagccgtcggtactgaccatgtgcaacggcggcgccggggacgtggggctgcccgcgctggtggccgaagcggggcgcgggggtgccaaggaggctgcccggcaggacgagggcgcgcggctgctgcggcgcacggagaccctgctccctgggccgcgcccctgcccctcaccgctgcccccgccgcccgcgccccccaaggggcctcctgcaccccccgcggccacccccgccggcgtctacaccgtcttccgcgagcagggccgtgagcaccgcgtggtggcgcccaccttcgtgccttccgtggaggccttcgacgagcgcccggggcccatccagatcgcatcccaggcgcgcgatgcccgggcccgcgagcgcgaggctggcaggccaggggtcctgcaggcgccccccggctccccgcggcctctggaccggcccgagggcctgcgcgagaagaactcggtcatccgctcgctcaagcggccgccccccgcggatgcccccacggtgcgggccacacgcgcctccccggacccccgcgcctacgtgcctgccaaggagctgctcaagcccgaggcggacccgaggccctgcgagcgtgcgccccgcggcccagccggtcctgcagcccaacaggccgccaagctcttcggcctggagcccgggcgccccccgcccaccggccctgagcataaatggaaacccttcgagctgggcaacttcgccgccacgcagatggccgtgctggccgcgcagcaccaccacagccgcgccgaagaggaggccgccgtggtcgctgcctcctcctccaagaaggcctacctggaccctggggctgtgctgccccgctcggcggccacctgcggccggccggtcgctgacatgcactctgcggcccacgggtctggagaggcctcggccatgcagagccttataaagtacagtggcagctttgcccgggacgccgtggccgtgcgccctggtggctgtggcaagaagagcccctttggaggtttgggcaccatgaaacccgagcctgcgcccacctctgcgggtgcctcccgagcccaggcccgtctcccacactccggaggccctgcagcgggcggcggccggcagctgaagcgggaccccgagaggcccgagagcgccaaagctttcgggcgcgagggctctggtgcccagggtgaggcagaagtgcgacacccgcctgtgggcattgcagtggctgtggcccggcagaaggacagtggcggcagtggccggctggggcctgggctggtagaccaggagcgctctctgtcgctgagtaacgtcaaagggcacggccgagcagatgaggactgtgtggacgaccgggccagacaccgggaggaacggctgctcggggcacggctggaccgggatcaggagaagctgctcagagagagtaaggagctggctgacctggcccgcctgcaccctaccagctgtgctcctaacggcctgaaccccaacctcatggtgacggggggcccggcgctggcgggctcaggtcgctggtctgccgaccccgcagcccatctggccacgcacccctggttgccccgctcgggcaacgcatccatgtggctcgctggacacccctacggcttgggtcccccatctctgcaccagggcatggcccctgcgttcccacctggcctggggggctccctcccgtcagcctaccagtttgtcagggacccccaatcgggccagctggtggtcattcccagtgatcaccttcctcactttgcggagctgatggagcgggccaccgtaccgcccctctggcccgccctgtacccgccgggccgcagccccctgcaccacgcccagcagctgcagctcttctcacagcagcacttcctgcggcagcaggagttcctgtacctgcagcagcaggcggcccaggccttggaactgcagaggagcgcccagctcgtgcaggagcggttgaaggcgcaggagcaccgggcggagatggaagagaaggggagcaagcggggcctggaggctgcgggcaaggctggcctggccaccgccggccccgggctgctgccgcggaagccccctggcctggccgccggccccgcgggcacctacggcaaggccgtgagcccgccaccatcaccccgcgcatcccctgtggctgccctgaaggccaaggtcatccagaagctggaggacgtgtccaagccacccgcctacgcctaccccgccacccccagctcccaccccaccagcccgccgcccgcctccccaccgcccaccccgggtatcacccgcaaggaggaggctcccgagaatgtggtcgagaagaaagacttggagttggagaaggaagcccccagccccttccaggccctgttctcagatatcccgcccaggtacccgttccaagccctgccaccgcactacgggaggccctaccctttcctgctgcagcccacggccgccgccgacgcggacggcttggcccctgatgtgccgctcccggctgatgggcccgagcgcctggcactctcacccgaagacaagcccatccgcttgtccccctccaagatcacagagccgctgcgggagggcccggaggaagaaccgctggctgagcgggaggtgaaggcagaggtggaggacatggacgagggccccacagagctgccgcctctggagtcgccgctgccactgcccgccgcggaagccatggctacccccagccctgcagggggttgtggaggtggcctgttggaggcccaggcgctgagtgccaccgggcagagctgcgcagagccctctgagtgtccagactttgtggaggggcctgaaccacgggtggattccccgggccggacagaaccctgcaccgccgccctggacctgggggtgcagctgacacccgagacactggtggaggccaaggaggagccggtggaggtgcctgtggcggtgcccgtggtggaggcagtgcccgaggaaggcctggcgcaggtggcaccgagcgagtcccagcccaccctagaaatgtcagactgtgacgtgcccgccggggagggacagtgcccgagcctggagccccaagaggccgtgcctgtactcggcagcacctgcttcctggaagaggcaagctctgaccagttcctgcccagtctggaggacccactggctggcatgaacgccctggcggcagctgcggagctgccccaggccaggcctctgccctccccgggtgctgctggagcccaggccttggagaagctggaagcagccgagagccttgtcttggagcagagcttcctgcatggcatcaccctgctaagtgagatcgcagagctggagctggagaggaggagcccaccccaaggcctcccaccgtgcatgggacagggcagcccgatgccagctggcctacctgactgtgccaggggccctgcccccaccctctcaggatggcctagacttggggaacagagccgggtggggttgcagcccggagtgtctgtcaaaggcaccaggtggagagggcccggcacaggcccaccctggtccaaaccctcacactacagaaaaccccaatggtgctga

SEQ ID NO: 306333 - DNA, 8935 bp, Artificial Sequence
  derived and/or modified sequence
ggccgcgggatggcgggcagcaggggcgcctagctgcgccgggagccggggccgccgccggagtcgttgtcgccggagcctggagccgtgaacccagccgcgccagacgccgtgtgcgccgcctcgcgcagctccgcctggccgcccggaggggccccaccgccggccgcctgtgcgccccgggccgcgggcccgccgccgagcgcaagccccgctggccgccgccatgcacgccgcggagcccccgccgcccgaggactctgggactacgccgaggccgaacttttaggtcccactgagctaggcctgcgggccgggtggggggctgatcgcggcactcccgcggaggatggatggccgagacttcgggccccagcggtccgtgcacggtcccccgccgccgctgctgtccggcctggccatggacagccaccgcgtgggcgcggccactgccggacgcttgcccgcctcgggcttgcccggcccgctgccgcccgggaagtacatggccggcctgaatctccatccgcacccgggcgaggccttcttgggcagctttgtggccagcgggatggggccctcggcctcgtcccatgggagcccagtgccactgccctctgacctgtctttccgctccccaacccctagcaacctgcccatggtgcagctgtgggccgcccacgcccatgaaggcttctcccacctgcccagtgggctgtacccatcctacctccacctgaaccacctggagccccccagcagtgggagccccctcctcagccagctgggtcagcccagcattttcgatacccagaaaggtcaggggccaggaggagacggtttctacctgcccaccgcgggggctccgggctccctgcactctcacgcgccctcggcccggacccctggcggcggccactcctcgggcgccccggccaaaggctcgtcgtcgcgggacggtccagccaaggagcgggcgggccgcggcggggagccgcctccgcttttcggcaagaaggacccgcgcgcccggggcgaggaggcctcggggccacggggcgtggtggacctgacccaggaggcgcgcgccgagggccgccaggaccgggggcccccgcgcctggctgagcgcctgtcgcccttcctggctgagtccaagaccaagaatgcggcgctgcagccgtcggtactgaccatgtgcaacggcggcgccggggacgtggggctgcccgcgctggtggccgaagcggggcgcgggggtgccaaggaggctgcccggcaggacgagggcgcgcggctgctgcggcgcacggagaccctgctccctgggccgcgcccctgcccctcaccgctgcccccgccgcccgcgccccccaaggggcctcctgcaccccccgcggccacccccgccggcgtctacaccgtcttccgcgagcagggccgtgagcaccgcgtggtggcgcccaccttcgtgccttccgtggaggccttcgacgagcgcccggggcccatccagatcgcatcccaggcgcgcgatgcccgggcccgcgagcgcgaggctggcaggccaggggtcctgcaggcgccccccggctccccgcggcctctggaccggcccgagggcctgcgcgagaagaactcggtcatccgctcgctcaagcggccgccccccgcggatgcccccacggtgcgggccacacgcgcctccccggacccccgcgcctacgtgcctgccaaggagctgctcaagcccgaggcggacccgaggccctgcgagcgtgcgccccgcggcccagccggtcctgcagcccaacaggccgccaagctcttcggcctggagcccgggcgccccccgcccaccggccctgagcataaatggaaacccttcgagctgggcaacttcgccgccacgcagatggccgtgctggccgcgcagcaccaccacagccgcgccgaagaggaggccgccgtggtcgctgcctcctcctccaagaaggcctacctggaccctggggctgtgctgccccgctcggcggccacctgcggccggccggtcgctgacatgcactctgcggcccacgggtctggagaggcctcggccatgcagagccttataaagtacagtggcagctttgcccgggacgccgtggccgtgcgccctggtggctgtggcaagaagagcccctttggaggtttgggcaccatgaaacccgagcctgcgcccacctctgcgggtgcctcccgagcccaggcccgtctcccacactccggaggccctgcagcgggcggcggccggcagctgaagcgggaccccgagaggcccgagagcgccaaagctttcgggcgcgagggctctggtgcccagggtgaggcagaagtgcgacacccgcctgtgggcattgcagtggctgtggcccggcagaaggacagtggcggcagtggccggctggggcctgggctggtagaccaggagcgctctctgtcgctgagtaacgtcaaagggcacggccgagcagatgaggactgtgtggacgaccgggccagacaccgggaggaacggctgctcggggcacggctggaccgggatcaggagaagctgctcagagagagtaaggagctggctgacctggcccgcctgcaccctaccagctgtgctcctaacggcctgaaccccaacctcatggtgacggggggcccggcgctggcgggctcaggtcgctggtctgccgaccccgcagcccatctggccacgcacccctggttgccccgctcgggcaacgcatccatgtggctcgctggacacccctacggcttgggtcccccatctctgcaccagggcatggcccctgcgttcccacctggcctggggggctccctcccgtcagcctaccagtttgtcagggacccccaatcgggccagctggtggtcattcccagtgatcaccttcctcactttgcggagctgatggagcgggccaccgtaccgcccctctggcccgccctgtacccgccgggccgcagccccctgcaccacgcccagcagctgcagctcttctcacagcagcacttcctgcggcagcaggagttcctgtacctgcagcagcaggcggcccaggccttggaactgcagaggagcgcccagctcgtgcaggagcggttgaaggcgcaggagcaccgggcggagatggaagagaaggggagcaagcggggcctggaggctgcgggcaaggctggcctggccaccgccggccccgggctgctgccgcggaagccccctggcctggccgccggccccgcgggcacctacggcaaggccgtgagcccgccaccatcaccccgcgcatcccctgtggctgccctgaaggccaaggtcatccagaagctggaggacgtgtccaagccacccgcctacgcctaccccgccacccccagctcccaccccaccagcccgccgcccgcctccccaccgcccaccccgggtatcacccgcaaggaggaggctcccgagaatgtggtcgagaagaaagacttggagttggagaaggaagcccccagccccttccaggccctgttctcagatatcccgcccaggtacccgttccaagccctgccaccgcactacgggaggccctaccctttcctgctgcagcccacggccgccgccgacgcggacggcttggcccctgatgtgccgctcccggctgatgggcccgagcgcctggcactctcacccgaagacaagcccatccgcttgtccccctccaagatcacagagccgctgcgggagggcccggaggaagaaccgctggctgagcgggaggtgaaggcagaggtggaggacatggacgagggccccacagagctgccgcctctggagtcgccgctgccactgcccgccgcggaagccatggctacccccagccctgcagggggttgtggaggtggcctgttggaggcccaggcgctgagtgccaccgggcagagctgcgcagagccctctgagtgtccagactttgtggaggggcctgaaccacgggtggattccccgggccggacagaaccctgcaccgccgccctggacctgggggtgcagctgacacccgagacactggtggaggccaaggaggagccggtggaggtgcctgtggcggtgcccgtggtggaggcagtgcccgaggaaggcctggcgcaggtggcaccgagcgagtcccagcccaccctagaaatgtcagactgtgacgtgcccgccggggagggacagtgcccgagcctggagccccaagaggccgtgcctgtactcggcagcacctgcttcctggaagaggcaagctctgaccagttcctgcccagtctggaggacccactggctggcatgaacgccctggcggcagctgcggagctgccccaggccaggcctctgccctccccgggtgctgctggagcccaggccttggagaagctggaagcagccgagagccttgtcttggagcagagcttcctgcatggcatcaccctgctaagtgagatcgcagagctggagctggagaggaggagccaagagatgggaggtgcggagcgggccctggtggcgcggccctccctggagagtctgctggcagctggcagccacatgctgagggaggtgctggatgggcccgtggtggacccactcaagaacctgcggctcccgcgggagctgaagcccaacaagaagtacagctggatgcgcaagaaggaggagcggatgtatgccatgaagtcctccctggaggacatggacgccctggagctggacttccggatgcggctggccgaggtgcagcgccagtacaaggagaagcagcgtgagctggtgaagctgcagcgccgccgggactccgaggacaggcgcgaggaaccccatagaagcttggcacgcagaggccctggcaggccgcggaaacggacccacgccccgagcgccctgtcgcccccccgcaagagagggaagagcggccacagtagcggaaagctgagcagcaagtctctgctgacatcagatgattatgagctgggagcagggataagaaagagacacaaggggtctgaggaggaacatgatgccctcatcggaatggggaaagccagggggaggaaccagacttgggatgaacatgaggcctcgtcggacttcatcagtcagctaaagattaagaagaagaagatggccagcgaccaggagcagttggcaagcaagctcgacaaggccctctccctcaccaagcaggacaagttgaagtcgcccttcaagttttcggacagtgctggggggaaatcgaaaactagcgggggctgcggcaggtacttgactccttacgacagcctgctggggaagaacaggaaggcgctggccaagggcctcggcctgtctctgaaatcctccagagaaggtaaacacaaaagggcagccaaaaccaggaagatggaggtggggttcaaggccagaggccagcccaagtcggcccattccccgtttgcctcggaagtgagcagctactcttacaatacggactcagaggaagacgaagaattcctgaaggacgagtggcccgcccaaggcccctccagctccaaactgacgccttccctcctgtgtagcatggtggcaaagaacagcaaggcagctggtggccccaagctgaccaagaggggcctggcggccccccggactctgaaacccaagccggccaccagcaggaagcagccgttttgtctgctgcttcgagaggccgaggcgcgttcctccttcagcgactcttcggaggaatcgtttgaccaagatgagagctcggaggaggaggacgaggaggaggagctcgaggaggaggacgaggccagcggtggtggctacaggctgggtgcccgggagcgggccctgtcaccgggcctggaggagagtgggctgggcctgctggcacgcttcgccgccagcgccctccccagccccacggtgggtccatccctgtctgtggtacagctggaggccaagcagaaggcccggaagaaagaggagcggcagagcctgctgggcacagagttcgagtacaccgactcagagagcgaggtcaaggtgcgcaagcggtcgcctgcggggctgctgcggcccaagaaggggctgggggagccgggaccctccctggccgcacccacgcctggcgcccgcggtcccgaccccagcagcccagacaaggccaagctggcggtggagaaggggcgcaaggcccggaagctgcggggccccaaggagcctggcttcgaggcggggcccgaggccagcgacgacgacctgtggacgcggcgccgcagcgagcgcatcttcctgcacgacgcctcggctgctgcacctgcgcccgtcagcaccgcgcccgccaccaagaccagccgctgcgccaagggcggccccctgagcccgcgcaaggacgccgggcgtgcaaaggacaggaaggaccccaggaagaagaagaaagggaaagaggctgggccaggagctgggctgccgccgccccgagctcctgccttgccctctgaggccagggctcctcctcctcctcctcctcctcctcctcctcatcctcctcttcctcctcctcctcttcctcctcctcctcttcctcttcgtcttcctcctcttcctcctcctcctcttcctcgtcctcatcctcctcctcctcctcctcttcctcctcttcttcctccaccacagacgaggactcttcctgcagctcggacgatgaggcagcccccgcccccacggctggcccttccgcgcaggcggcgctccccaccaaggccaccaagcaggccggcaaggcgcggccctcggcccactccccaggcaagaagacgcccgcgccccagccccaggcgcctcctccgcagcccacacagcctctgcagcccaaggctcaggccggggccaagagccgacccaagaagagagagggcgtccacctccccaccaccaaggagctggccaagcggcagcgcctgccgtccgtggagaaccggcccaagatcgccgccttcctgccagcccggcagctctggaagtggttcggcaagcccacccagcggcgtggcatgaagggcaaggcccgcaagctcttctacaaggccatcgtgcgcggcaaggagatgatccgtatcggggactgtgccgtgttcctctctgccggccgccccaacctgccctacatcggccgcatccagagcatgtgggagtcgtggggcaacaacatggtggtccgcgtcaagtggttctaccaccccgaggagaccagcccgggcaagcagttccaccagggccagcactgggaccagaagtccagccgcagcctcccggcggccctgcgggtctccagccagaggaaggacttcatggagcgcgcgctataccagtcctcgcatgtggacgaaaatgacgtgcagacggtgtcgcacaagtgcctggtggtgggcctggagcagtatgagcagatgctgaagaccaagaagtaccaggacagcgagggcctgtactacctcgcgggcacctacgagcccaccacgggcatgatcttctccacggacggcgtgcccgtgctctgctgagcccgccgggccctgcgggccacctgtgccccgagggcggccagggacccatctccatcactgccatggcgcggagaccacgtgcgttgtgtgcatgcgagcgctcctgcaggcgtgtgcatggggccaggtgtgcacgtggatgcccgggtgagtgtgtgtgcatgcacgtgtgtgcacgcatgtgcacatgcctccagccccaccttccaacccctcagtgcccccaggacaggggcccctcttagctatcagggtatggccggaccggcccttcctgcccagcacgttgcaagcacttggccaggccggccctccaggctgctgctgcgtgggggcccgggtgcccccaggtccatgcagactggggattcggtggggaggggcgcttctaaggaaccaaactgacgctcactctgggcttcccaagcacccttagcatggagcccaccccaaggcctcccaccgtgcatgggacagggcagcccgatgccagctggcctacctgactgtgccaggggccctgcccccaccctctcaggatggcctagacttggggaacagagccgggtggggttgcagcccggagtgtctgtcaaaggcaccaggtggagagggcccggcacaggcccaccctggtccaaaccctcacactacagaaaaccccaatggtgctgaaactgtcgcccggccacgcctggcccctccccacccaggagggaggtggcacttcttaacctgtacagttttattgtaccaagagactcgccccgcccctgtatcataagcctttaaatggagtcaactttttaattatatatataaagataaatatatataaatatatatataaactttttaaaactgtgaaaaatagctatgaaattataaaaaaaaacattctgacgtgcagaatattattttttatttcctgttagattatagtgtctagcaccggcttcaccggcctcccagtccccagcacaccccccgcccaccccaccaagtgtactgtactcaccccccaggatagagaagtgtttgttagggagagaagagggagaggcaggagccggcccaagcccagggtccctgcttgggccccagaaagcacttaaccaggccccaagccttcaagggaaaccaaggcctcaaccagacaatcttgagggaaggaaaagccagactttgggtttgttttttgggggaattattggtttttttttttatgtttcttttggaattttgtttgttggcaaattctgtgtgatcttttttcataaaaaaaaagaaaagatttaattgg

SEQ ID NO: 306334 - DNA, 1887 bp, Artificial Sequence
  derived and/or modified sequence
ggcaaggcttcacggttttaaaccccggagcatttgacgcctaggaataaaataggaggtttgtatttacgccgtctgggcgcagccgaggagccctccccggtttcgggaggacccggcagccgccgaggcagagtccgggctggggcgcagcgcgccaccgccgccggtcacttttccgagccaggtcccgggagcctgaagccgccggcggaaggagtttggatttcatttttcagtggaaaggggctactcccgatttcatttctggccactcagtcggcaccccccgatcctgaagggcgaggcgactttctgaaacttgttactttatttttttttcccttttttctttccccctttctatttcttccgcggcctgtctcctccccgccaagacgccgtgtgcgccgcctcgcgcagctccgcctggccgcccggaggggccccaccgccggccgcctgtgcgccccgggccgcgggcccgccgccgagcgcaagccccgctggccgccgccatgcacgccgcggagcccccgccgcccgaggactctgggactacgccgaggccgaacttttaggtcccactgagctaggcctgcgggccgggtggggggctgatcgcggcactcccgcggaggatggatggccgagacttcgggccccagcggtccgtgcacggtcccccgccgccgctgctgtccggcctggccatggacagccaccgcgtgggcgcggccactgccggacgcttgcccgcctcgggcttgcccggcccgctgccgcccgggaagtacatggccggcctgaatctccatccgcacccgggtaagtgccccgcgccgtgcccgtcccctcctgtcttcccagggagatccactcggccgggtcctcctgtgcactcgcggccggggctcggcgactctccttcggtcggccacgggggtgcgggcagactcggctcccagggctgggaaactcctggtcccggagccaaggcggtggagagtgtcgcgcggctcggctaccttttccgtagcgtgcttggccctcgtgagccgaaagccggtgtggtagcccgagccaccggggcgattccaatccccggggccccggcggcacgagcctgggctggagttttcaaaatctgggcgagaaaagaacaaaccggccccgcaccccgcgagacaccgctccccgagctcgaatctttttcttggcaaacgctacttttggcgctcgtgggccctcctgggttctgttcccagctccaccactcgcgccgagccgggtccctggcagttaccgagcgccgggggatgcgggagtacgccgggggatgcgggagtacggtgaccccagccttgggaccctggcctcggggcgggcgggatgcccctttcttccccgggagaacggcggccctgggaacctgcaccccggtaggagggcggcgaccccggccctcggggaccccttgttttccagcgcgaaagagggtgcggaggtgcggcagggacaccgaaaccggaccatcgcggtcccgaacctagggggaaagaagagagcgggtcgggcagggcccaggcggcggaggggaaaaccctgggtctcacatcgagctgctggaggaggtggccgagaaggtcccgcggcctccaccatttcccgagacgggctgcccaggcgcggtggggacggtacccgggcgggcgctgcgccggggcgggagactctccctccagtcagtccgcggccgctgcagccagaggggtgggaaggagactcggggacctccagacctgcccggcggccgccccaggacacctggtccctccttcccgggctgtccctggcttttgtgcttggcgtcccaagtctcgactt

SEQ ID NO: 306335 - DNA, 448 bp, Artificial Sequence
  derived and/or modified sequence
ggctcctggagcgaggtgagcgccccaggccgcggtcctgcgtacgccgggacagccatggcgactgggtcctgctccttcccggccggactgacgcggcctcccaggacccgagcacgtgcgtgatgggcgaggagggcctaggccgggcagaccagtgcagggagccgattcttcccggctcaccgtagacacaggagagagatggcctctccttaagcccaggagaacagaggaaacattaggaaacgcactgagaaacgaaattggcttgatttgtagttcacttatttgtagatcactgacagaagaccgaaaagctcgtagtaaaggcccctctaaatttagagataaaactcatcagtgctttgaaacaagcagctctgaaccaaagaaatcatttgattcaagtaaccattggatcttcccaaggcaatggtgaaagaaa

SEQ ID NO: 306336 - DNA, 1428 bp, Artificial Sequence
  derived and/or modified sequence
atgatccaccgccacaagcacgaaatgaccttgaagttcccctccattaagactgacaacatgttgtctgaccagacaccgactccaacccgcttccttaagaattgcgaggaggtgggcctgttttcggaactggactgctctctcgaacacgagttccgcaaagctcaggaggaggagtcctcaaagcggaatatatccatgcacaacgctgtgggtggtgccatgaccggacccggcacacaccagctctcaagcgccaggctgcccaatcatgatacaaatgtggtaatacagcaggctatgccgagtccccagtcctctagtgtgattacccaggctccctcaaccaaccgacagatcggccctgtccctggttccctttcctcacttctgcacctccataacaggcaaaggcagcctatgcctgcgagtatgcccggcaccctgccaaaccctaccatgcctggaagctctgcagtgttaatgccaatggaacgccagatgtctgttaactcttcaatcatggggatgcaaggtcctaaccttagtaatccatgtgcttcccctcaggtacagccaatgcacagcgaggctaaaatgcgcctaaaggctgctctaacacaccatccagcagctatgagcaatgggaatatgaacactatgggccatatgatggaaatgatggggtctcgacaggaccagactccacatcatcacatgcactctcatccccaccagcaccagacactccctcctcatcacccgtacccacatcagcaccagcaccctgcccaccatcctcacccccagcctcaccatcagcagaaccacccccaccaccacagtcacagccaccttcatgcgcacccagcacaccaccagactagcccacacccccctcttcataccgggaaccaggcgcaggtgagcccggccacacagcagatgcagcccacccagaccatccagcctccgcagcccacagggggcagacgccggagggtggtggatgaggatccagatgagaggagacggaaatttctcgaaaggaatcgtgccgctgccactcgctgtcggcagaagaggaaagtgtgggtcatgtcgttggagaaaaaggctgaagagctgacgcagaccaacatgcaactacaaaatgaagtttcaatgttgaaaaacgaagttgcccagctgaaacaactgcttctcacccacaaggattgcccaatcactgccatgcagaaggagagccagggttacctgtcaccagagagcagccctcccgcaagtccagttccagcatgcagccagcagcaggtgatccagcacaacaccatcaccacgagtagctctgtatcggaggtggtaggtagctctacacttagccaattgaccacccatcggaccgatctgaaccccattttgtag

SEQ ID NO: 306337 - DNA, 1506 bp, Artificial Sequence
  derived and/or modified sequence
atgaatttagagcaggaacgaccctttgtctgcagtgcacccggctgttctcagcgttttccaacagaggatcatttgatgattcacaggcataagcacgaaatgacactgaaattcccctcaattaaaaccgacaatatgctgtcagaccagacaccaaccccgaccagatttcttaagaactgtgaggaagtgggactcttttcagagctggattgcagcttagagcatgagtttagaaaggcccaggaagaggaaagctctaagaggaacattagcatgcacaatgccgtcgggggcgcaatgaccgggcccgggacacatcagctgtcgtcagcgcgtctgccaaatcatgacacaaacgtcgtcattcagcaggcgatgcctagcccacagagctcatccgtgatcacccaggctccatctaccaaccggcagatcggtcctgtgcctggatcactcagcagcctgctccatctccataaccggcaaaggcagccgatgcccgcatccatgcctgggactctgcccaatccaactatgcctggctcctccgccgtcctcatgcctatggaacgccagatgtccgttaatagtagtatcatggggatgcagggtcctaacttaagcaacccttgcgcttctcctcaggtgcagcctatgcactcagaagctaaaatgagactgaaagcggcactgacgcatcacccagctgcgatgagtaatggtaacatgaacacgatgggtcacatgatggagatgatgggaagtaggcaggatcagacgcctcatcaccacatgcactcgcacccacatcagcatcagacccttccgcctcaccatccatatcctcaccagcaccagcaccctgcccaccatccacatcctcagccccatcaccagcaaaaccatccacaccatcactcgcacagccatctgcatgcccatccggcccatcatcagacatcaccacacccaccactgcatacagggaatcaggctcaagttagccccgccacacagcaaatgcaaccaacgcagacaatacagccccctcagcccactggaggccgacgacgcagagtagtggacgaagacccggatgaacgccgtcgaaagtttctggagaggaaccgcgccgctgcaaccagatgtcgtcaaaagcgcaaggtctgggtgatgtcgctcgaaaagaaggcggaggagctcacccagactaatatgcagctgcagaacgaagtgtctatgcttaagaacgaggttgctcaactcaagcagctgctccttacacataaagactgtcccattacggccatgcagaaggagagccaagggtatttgtctccagagagctcccctcccgccagccctgtccccgcatgttcccaacaacaggtcatccagcataataccatcaccacttcttcgagcgtgtccgaggtggtcggctctagtactctgtcccagttaaccacccataggactgatctgaatcctatcctctag

SEQ ID NO: 306338 - DNA, 1428 bp, Artificial Sequence
  derived and/or modified sequence
atgatccaccgccataaacacgagatgaccctcaaatttccttctatcaaaaccgacaatatgctcagcgaccagacccccacaccaaccaggttccttaagaactgtgaggaggtgggactttttagtgagttagactgttccctcgaacacgaattcagaaaagcccaagaagaggaatcgtccaagcggaacatatccatgcacaacgcagtcggtggtgcaatgaccgggcccgggacccatcagctttcatcggcccggcttccaaatcatgacacaaacgtcgtgatccagcaagccatgccatctccccagagctcatccgtcattacacaggcgcctagcacaaaccgccagatcggtcctgttccaggatccctatcttctctgctgcacttgcataaccgtcaacgtcagccaatgccagcaagcatgccaggcactctgcctaaccctactatgcctggatcctctgccgttttaatgccgatggagcgccaaatgagtgtgaacagttcgattatgggtatgcaaggacccaacttgagtaacccctgtgcaagcccacaagtccagcccatgcactccgaagctaaaatgaggctgaaagctgcgcttacccatcacccagctgcaatgagcaacggcaatatgaatactatgggccacatgatggagatgatgggctccagacaggatcaaacacctcatcatcacatgcactcccacccccaccagcaccagaccctgcccccccaccacccgtacccccaccagcatcaacatcccgcccaccaccctcatccacagccccaccaccaacagaaccatccacatcatcacagccattctcacttgcacgcacaccctgcgcaccatcagacttctccccatccgcctctccacacaggcaatcaagcccaggtgagccccgccacacagcagatgcaacccacacagaccatccaacccccccagcccactggcggccggcggagacgggtagtcgatgaggaccccgacgagcggaggagaaagtttcttgaaaggaatcgagccgccgctactcgctgcagacagaagaggaaagtatgggttatgtcacttgaaaagaaggccgaggaactgacccagacaaatatgcagttgcaaaacgaggtgagtatgctcaagaacgaggtggcccagctgaagcagttgctcctaacgcataaggactgtcctattactgctatgcaaaaagagtctcagggatatctctcccctgaaagttcaccacccgcatcgcctgtgccagcatgctcacagcaacaggtgatccagcataataccattaccacaagctcaagtgttagtgaggtggtcggttcatctacattgtctcaactgactactcacaggacggatttaaaccctatactgtag

SEQ ID NO: 306339 - DNA, 348 bp, Artificial Sequence
  derived and/or modified sequence
atgaacctcgagcaagaacgaccattcgtgtgctcagcccctggctgtagccagcgtttcccaaccgaggaccatttgatgatacatcgacataagcacgagatgactctcaaatttccgagcatcaaaaccgataatatgttatcagatcagacacctacccctacccggttcctaaaaaattgtgaggaggtggggctgttctccgagctcgattgcagtctggagcatgagtttcgtaaagctcaggaggaggaatcgagcaagcgcaacattagtatgcacaatgccgtcggcggcgctatgaccgggcctggcacacaccagctgtccagcgcccggctgtag

SEQ ID NO: 306340 - DNA, 1428 bp, Artificial Sequence
  derived and/or modified sequence
atgatccaccgccacaagcatgagatgaccctgaagttccccagcatcaagacagacaacatgctgagtgaccagacccccacccccacccgcttcctgaagaactgtgaggaggtgggcctcttcagcgagctggactgcagcctggagcacgagttcaggaaggcccaggaggaggagagcagcaagaggaacatctccatgcacaatgctgtgggcggggccatgactggacctggcacccaccagctgagcagcgcccggctgcccaaccacgacaccaacgtggtgatccagcaggccatgcccagcccccagagcagcagcgtcatcacccaggcccccagcaccaaccggcagatcggccctgtgcccggcagcctgagcagcctgctgcacctgcacaaccggcagaggcagcccatgcctgcctccatgcctggcaccctgcccaaccccaccatgcctggcagcagcgctgtgctgatgcccatggagcggcagatgtctgtgaacagcagcatcatgggcatgcagggccccaacctgagcaacccctgtgccagcccccaggtgcagcccatgcacagcgaggccaagatgaggctgaaggccgccctgacccaccaccctgctgccatgagcaatggaaacatgaacaccatgggccacatgatggagatgatgggcagccggcaggaccagaccccccaccaccacatgcacagccacccccaccagcaccagaccctgcccccccaccacccctacccccaccagcaccagcacccagcccaccacccccacccccagccccaccaccagcagaaccacccccaccaccacagccacagccacctgcacgcccacccagcccaccaccagaccagcccccacccccccctgcacacaggcaaccaggcccaggtgtccccagccacccagcagatgcagcccacccagaccatccagcccccccagcccactggaggaagaagaagaagagtggtggatgaagatcctgatgagaggaggaggaagttcctggagaggaacagagctgctgccacccgctgccggcagaagaggaaggtgtgggtgatgagcctggagaagaaggccgaggagctgacccagaccaacatgcagctgcagaatgaggtgtccatgctgaagaatgaggtggcccagctgaagcagctgctgctgacccacaaggactgccccatcacagccatgcagaaggagagccagggctacctgagccctgagagcagccccccagccagccctgtgcctgcctgcagccagcagcaggtgatccagcacaacaccatcaccaccagcagctctgtgtctgaggtggtgggcagcagcaccctgagccagctgaccacccacaggacagacctgaaccccatcctgtag

SEQ ID NO: 306341 - DNA, 1506 bp, Artificial Sequence
  derived and/or modified sequence
atgaacctggagcaggagcggccctttgtgtgcagcgcccctggctgcagccagcgcttccccacagaggaccacctgatgatccaccgccacaagcatgagatgaccctgaagttccccagcatcaagacagacaacatgctgagtgaccagacccccacccccacccgcttcctgaagaactgtgaggaggtgggcctcttcagcgagctggactgcagcctggagcacgagttcaggaaggcccaggaggaggagagcagcaagaggaacatctccatgcacaatgctgtgggcggggccatgactggacctggcacccaccagctgagcagcgcccggctgcccaaccacgacaccaacgtggtgatccagcaggccatgcccagcccccagagcagcagcgtcatcacccaggcccccagcaccaaccggcagatcggccctgtgcccggcagcctgagcagcctgctgcacctgcacaaccggcagaggcagcccatgcctgcctccatgcctggcaccctgcccaaccccaccatgcctggcagcagcgctgtgctgatgcccatggagcggcagatgtctgtgaacagcagcatcatgggcatgcagggccccaacctgagcaacccctgtgccagcccccaggtgcagcccatgcacagcgaggccaagatgaggctgaaggccgccctgacccaccaccctgctgccatgagcaatggaaacatgaacaccatgggccacatgatggagatgatgggcagccggcaggaccagaccccccaccaccacatgcacagccacccccaccagcaccagaccctgcccccccaccacccctacccccaccagcaccagcacccagcccaccacccccacccccagccccaccaccagcagaaccacccccaccaccacagccacagccacctgcacgcccacccagcccaccaccagaccagcccccacccccccctgcacacaggcaaccaggcccaggtgtccccagccacccagcagatgcagcccacccagaccatccagcccccccagcccactggaggaagaagaagaagagtggtggatgaagatcctgatgagaggaggaggaagttcctggagaggaacagagctgctgccacccgctgccggcagaagaggaaggtgtgggtgatgagcctggagaagaaggccgaggagctgacccagaccaacatgcagctgcagaatgaggtgtccatgctgaagaatgaggtggcccagctgaagcagctgctgctgacccacaaggactgccccatcacagccatgcagaaggagagccagggctacctgagccctgagagcagccccccagccagccctgtgcctgcctgcagccagcagcaggtgatccagcacaacaccatcaccaccagcagctctgtgtctgaggtggtgggcagcagcaccctgagccagctgaccacccacaggacagacctgaaccccatcctgtag

SEQ ID NO: 306342 - DNA, 348 bp, Artificial Sequence
  derived and/or modified sequence
atgaacctggagcaggagcggccctttgtgtgcagcgcccctggctgcagccagcgcttccccacagaggaccacctgatgatccaccgccacaagcatgagatgaccctgaagttccccagcatcaagacagacaacatgctgagtgaccagacccccacccccacccgcttcctgaagaactgtgaggaggtgggcctcttcagcgagctggactgcagcctggagcacgagttcaggaaggcccaggaggaggagagcagcaagaggaacatctccatgcacaatgctgtgggcggggccatgactggacctggcacccaccagctgagcagcgcccggctgtag

SEQ ID NO: 306343 - DNA, 1428 bp, Artificial Sequence
  derived and/or modified sequence
atgatccaccggcacaagcacgagatgaccctgaagttccccagcattaagaccgacaatatgctgagcgaccaaacgcctacacccactcggtttcttaagaattgcgaggaggtaggcctgttcagtgaacttgactgcagccttgaacacgagttcagaaaggcacaggaagaggagagttcgaaacgtaacatcagcatgcataacgcggtgggtggcgccatgactggtcccggaacccaccagctctctagtgcgcgtctgcccaatcacgacactaatgtggtgattcaacaggcaatgccttcacctcaaagcagttcggtgataactcaggcacccagtactaacaggcagatcggtcccgttcctggaagcttgtcctcactgctccaccttcataacagacagcgccagcccatgcccgcatccatgcctgggactcttcccaacccaacaatgccggggtcctcagccgtgctgatgccaatggaaagacagatgtctgttaatagctcaattatggggatgcagggacctaatttgtctaatccctgtgcatctccccaggttcagccgatgcatagcgaagccaaaatgaggctgaaggccgccctcacacatcatcccgccgctatgtcaaacgggaacatgaacacaatgggccatatgatggagatgatgggatcccgacaggaccagacacctcaccaccatatgcactcccacccccatcagcatcagacacttcctcctcatcacccttacccacaccagcatcagcacccagcccatcatccccacccccagccacaccatcagcagaaccacccccatcatcacagccattcccatttgcacgcccaccccgctcaccatcagacaagcccacatccaccactccacacaggaaaccaggcacaagtatcaccggctacccaacagatgcagcctacacaaaccattcagccgcctcagccaacgggcggcagaaggcggcgtgtcgtcgacgaagacccagatgagcgtagaaggaagtttctggaacgcaaccgtgctgctgcaacaaggtgcagacagaaacggaaagtttgggtgatgtctttagaaaagaaggcagaggagcttacgcagactaacatgcagctccagaacgaggtttccatgctgaagaacgaggtggcacagcttaagcagcttctcctgactcataaagactgccccattacagcgatgcagaaagagagccaagggtacctgtcccccgaatcatctccccctgccagccctgtgcccgcctgttctcagcaacaggtaatccagcacaacacaattaccacatcatcgtcagtctcagaggtcgtaggatccagtacgctgtcgcagttgacaacccaccgcactgaccttaatcccatcctttag

SEQ ID NO: 306344 - DNA, 1506 bp, Artificial Sequence
  derived and/or modified sequence
atgaacctggagcaggagcggcccttcgtgtgcagcgcccccggctgtagtcaaaggttccctaccgaggaccaccttatgatacaccggcacaagcatgagatgacacttaaattcccctctataaaaaccgacaatatgctgtccgaccagacccctacaccgaccagatttctgaagaattgcgaagaggtgggactttttagcgagttggactgcagcttggaacatgaattcaggaaggcacaggaggaagagagttcaaaaaggaatatctccatgcataacgctgtgggcggagccatgaccggtcccgggactcatcagcttagctctgccagacttccaaatcacgacaccaacgtggtgatccagcaagctatgccgagtccccagagctccagtgtcattacgcaggcgccttcaaccaatcgccagataggacccgtgcccgggtccctttcaagcctgctgcacctccacaaccggcagaggcagcccatgcccgcttctatgcccggaacactgccaaacccaacaatgcccggctcctccgcagttctcatgccaatggagcggcagatgtccgtcaacagctcaataatgggcatgcaggggcccaatctctcaaatccctgtgcatctcctcaggtacagcctatgcattctgaggccaagatgcggctgaaggctgcactgacacatcacccagccgcaatgagcaatggaaacatgaatactatggggcatatgatggagatgatgggcagtagacaagaccagacaccccaccaccacatgcacagccatcctcatcaacaccagactttgccgccccaccacccatatccccatcaacatcagcaccctgcacaccatccccacccgcagccacatcaccaacagaaccaccctcaccatcactcccattcccatctccacgcccaccccgcccaccaccagacaagccctcacccccccctgcatactggtaaccaggcgcaggtttcccctgcgacccagcagatgcagccaacccagacaattcaaccaccacagccaacagggggacgccgcaggagggtggttgatgaggatccagatgagcggcggcgcaaattcctggagagaaacagggcagctgccactagatgtagacaaaaacgcaaggtctgggtgatgagccttgagaagaaagctgaagaactgacccaaactaatatgcagctgcagaatgaggttagcatgctgaaaaatgaggtggctcagctaaaacagcttcttttaactcacaaggactgccccatcacagcaatgcagaaagagtcccagggttacctgagtccagaatcgtcgccaccagcatctcctgtgccggcatgtagtcagcagcaggtgatacagcacaacactattactacctcctccagcgtgtccgaggtagtcggcagttcaacactgtctcaactcaccacccatcgcacggacctgaatcctattctatag

SEQ ID NO: 306345 - DNA, 1428 bp, Artificial Sequence
  derived and/or modified sequence
atgatccaccggcacaagcacgagatgaccctgaagttccccagcattaaaacagataacatgctgagcgaccagacaccgacccccaccagattcctcaagaactgtgaagaggtcggcttattctctgaactcgactgttcactcgagcacgagttccggaaagcccaggaagaagagagctccaagcggaatataagcatgcacaacgccgtcggtggggccatgaccggccctggcacccatcaactgagcagcgctcggttgcccaaccatgatacaaacgtggtgatacagcaggcgatgcccagcccccagtccagctccgtgattacacaggccccttctactaaccggcagattggcccggtgcccggaagcctcagttctctcctccatctccacaaccgccagcggcagccaatgccggcatcaatgcccgggacattgcccaatcccaccatgcccggctcatccgccgtccttatgcccatggagcgacaaatgagtgtgaacagctccatcatggggatgcaagggccaaacctgtctaacccctgcgcttctccgcaggtgcaaccaatgcattccgaggccaagatgcgtctgaaggctgcactaacccaccaccctgctgcaatgtccaatggtaatatgaacacaatgggccatatgatggagatgatggggtccagacaagatcagaccccacaccaccacatgcactcacaccctcatcagcatcagacccttccacctcatcacccttatccacaccaacaccaacaccccgctcatcacccccacccacaacctcatcaccaacagaatcaccctcatcatcactcgcactcgcacctacatgcacaccccgcccaccatcagaccagcccccaccctcccctacataccggaaatcaagcacaggtgagtcccgcaacacagcaaatgcagcccacccagactatccagccaccacagccaaccgggggccggcgccggcgcgtggtcgatgaggatcctgacgaaagacggaggaagttcctggaaagaaaccgagctgccgccacccgatgccggcagaaaaggaaagtgtgggtcatgagtctggagaaaaaggccgaagaactcacgcaaacaaatatgcagcttcagaacgaggttagtatgctgaaaaatgaagtcgctcagctgaagcagctactgctaacccataaggactgcccaattactgctatgcagaaggaatcccagggttacctaagtcccgagtcctctcctcccgcttcaccagttcccgcctgttcacaacagcaggtcattcaacacaatactattacaacttctagttcagtaagcgaggtggtgggctcatccacactgagccaacttaccacacacagaaccgacctgaatcccattttgtag

SEQ ID NO: 306346 - DNA, 348 bp, Artificial Sequence
  derived and/or modified sequence
atgaacctggagcaggagcggcccttcgtgtgcagcgcccccggctgttctcaacggtttcccactgaagaccacctcatgatccatcggcataagcatgagatgaccctgaaattccccagcatcaaaaccgacaatatgctcagtgaccagacccctactcccacaagattcctgaagaattgcgaagaggtggggctttttagcgagctggattgcagcctggagcacgagttccgtaaggctcaagaggaagaaagttctaaacgcaatatatcaatgcacaatgccgtcggcggggctatgaccgggccgggtacacaccaactttcctctgctcgactgtag

SEQ ID NO: 306347 - DNA, 1428 bp, Artificial Sequence
  derived and/or modified sequence
atgattcatcgacacaaacacgaaatgaccttgaagttcccttcaatcaagacagacaacatgctctccgaccagactccaactcccacccgcttccttaaaaattgcgaagaggtgggtctcttctccgagcttgactgcagcctagagcatgaattccgcaaggcacaggaggaggagtcatccaagcggaatatttccatgcataatgcggtcggtggcgctatgaccggacctggtacccaccagctttccagcgcaaggttgcctaatcatgacacaaatgttgtgatccagcaggcgatgcccagccctcagtccagctccgtaataacccaagcacctagcacaaaccgtcagatcggtccagtcccaggtagcctcagttctcttctgcatctgcataatagacaaagacagcccatgccagccagcatgcctggcacccttccaaatcccacaatgccagggtcctccgctgtcctgatgcctatggaaaggcagatgagtgtcaattcttctatcatggggatgcagggacctaatctgtcaaacccatgtgcatctccacaagtgcagccaatgcacagcgaagcaaaaatgcggctgaaagccgcactaacacatcaccctgctgctatgagtaatgggaatatgaacacaatgggccacatgatggagatgatgggttcgcgccaggatcagacaccacaccaccacatgcattctcatccccatcaacatcagaccctccctccacatcacccctacccacaccagcaccaacaccctgcccaccacccccatcctcagccccatcaccagcagaatcatccccatcaccactcccatagccaccttcacgcacaccctgctcaccatcagacctcaccccacccaccactccacactgggaatcaggcacaggtgagccctgccacacagcaaatgcaaccaacacaaaccatccagcctccacagcccacagggggtcgccgacgccgtgtcgtggacgaggacccagacgaacgacgcagaaagttccttgaacgaaaccgcgctgcggctactcgatgcaggcaaaaacgcaaggtgtgggtgatgtctctggagaagaaagctgaggagcttacccagaccaacatgcagctacagaacgaggtatcgatgctgaaaaacgaggtagcccaacttaagcagctgttgttaacccacaaggactgcccaatcacagctatgcagaaagaatcacaaggttatttatcccccgaatccagcccccctgccagccccgtaccagcctgctcccagcagcaggttatccagcataatactatcactacgagctcgtccgtgagcgaagtggtgggcagctctaccctctcacaactcactactcaccggaccgacctcaaccccatcttatag

SEQ ID NO: 306348 - DNA, 1506 bp, Artificial Sequence
  derived and/or modified sequence
atgaacttggaacaggaaaggccgttcgtgtgttcagcacccggatgcagtcaacggtttcctactgaggatcatttaatgattcatagacacaaacacgagatgactcttaaattcccatccattaagaccgacaatatgctatccgaccagacacccacgcccactcgctttctgaagaattgcgaagaagtgggcctattctctgagctggattgctctctggaacatgaattccggaaggcccaggaagaagagagctcaaagagaaacatcagcatgcacaatgctgtgggcggagccatgacgggccctggaacacaccagttaagcagtgccagattgccaaatcatgatactaatgtagtgatccagcaggccatgccaagcccacagtccagctcggtaatcacccaggccccaagcaccaaccgtcagatcggaccggttcctggatcactctcaagcctgttacatctccacaaccggcaaagacagcctatgcctgcctcaatgcctggtaccctgcccaaccccacgatgccaggtagtagcgccgttctcatgccaatggaacgacagatgtcagtgaatagttcgataatgggcatgcagggcccaaacttgtccaacccttgtgcctctccccaagtgcaaccaatgcactccgaagctaagatgcggcttaaagctgccctgacgcaccatcccgctgctatgtctaacggaaatatgaatacaatgggccatatgatggagatgatggggtcacggcaagaccagacaccacaccaccatatgcactcacatccccaccagcaccagacgttaccccctcatcatccctacccacaccagcaccagcaccctgctcaccacccccatccccagccgcatcaccaacagaatcatccccatcatcattcccacagccatctgcatgcacaccccgctcaccatcagacctcgcctcatccaccgctgcacacagggaatcaagcacaagtgtcgcctgccacccagcaaatgcagcccacccagactatccagccacctcaacctactggtggacgcaggcggagggtggtcgacgaggacccagacgaacgcaggcgtaaatttctcgagcggaaccgggctgcggctacacgttgccggcagaagcggaaagtatgggtgatgagcctagaaaaaaaggccgaggagttgacccaaaccaacatgcagctgcagaacgaggtcagtatgctgaaaaacgaagtcgcgcagctgaagcagctccttttgactcataaagattgccctattacagcaatgcagaaggaatcacaagggtacctgtcacccgaatccagcccaccagcttcaccagtacctgcctgctcacagcaacaggtgatccaacataacaccatcacaacctcatcaagcgtaagtgaagtggtcggaagcagcaccctctctcagcttacaacccaccgaactgacctgaaccccattctctag

SEQ ID NO: 306349 - DNA, 1428 bp, Artificial Sequence
  derived and/or modified sequence
atgattcaccgacataagcacgagatgacactgaaattccctagcattaaaactgataatatgctaagtgaccaaacgcctaccccaacccgtttcctcaagaactgcgaggaggtcggcctcttctccgaacttgactgctccctcgagcatgaatttcgtaaagcccaggaagaagaatcgagcaagaggaacatttccatgcacaacgcggttggtggcgctatgaccggaccagggactcaccagctgtcttccgcacgcctgcccaaccatgacacgaatgtagtaattcaacaggcaatgccttcgccccaatcttccagcgtgattactcaggcccctagcaccaaccgacagatcgggccagtgccaggatcacttagctctcttctgcatctgcataaccgacagcggcaaccaatgccggctagcatgccaggcacactgcctaatccaaccatgcctggatcctccgctgtgctcatgcccatggaaaggcagatgagcgtcaattcaagcattatgggtatgcaaggaccgaatttgagtaacccatgcgcatcccctcaagtgcagccaatgcacagcgaggctaagatgagattgaaagcagccctgacacaccatcccgcagccatgtcaaatgggaacatgaataccatggggcacatgatggaaatgatgggctcccgtcaggaccaaaccccccaccatcacatgcactctcacccacaccaacatcaaacccttcctccccatcacccttacccccaccagcaccaacaccccgctcatcatcctcatccccaaccacatcaccagcaaaatcacccccaccaccactcccattcccatctccatgcccatcctgcccaccaccagacaagcccacatcctccactgcataccggaaaccaagcacaggtgtcccccgctacgcagcagatgcaaccaacacaaaccatccaaccccctcaacccacaggtgggaggaggagacgtgtggtggatgaagaccccgacgagaggaggcgcaagttcctcgaacggaaccgcgcagctgctaccagatgtcgacaaaagaggaaggtgtgggtgatgtccttagaaaaaaaggcagaagaactcactcaaactaacatgcagctgcagaatgaggtcagcatgctgaagaacgaggtggctcagctcaagcagctgctcttaacacacaaagattgtccaataaccgcaatgcagaaagaatcacagggctatctctccccagagtccagcccacccgcttcccccgtccccgcttgctcccagcagcaggtgatccagcacaacaccattacaacatcctcgagtgtttcagaagtcgtgggatcatctactctgtcacagctcacaacccacaggacggatctgaaccctatcctctag

SEQ ID NO: 306350 - DNA, 348 bp, Artificial Sequence
  derived and/or modified sequence
atgaacctggaacaggagaggccatttgtgtgctccgcaccaggatgcagtcagaggttcccaactgaggaccaccttatgatccaccggcacaaacacgaaatgaccctgaaattcccttccatcaagacagacaacatgctatctgatcagacgcccacccccactagattccttaagaattgcgaggaagtcggtctcttctctgagttagactgttccctggagcatgaattcaggaaggcacaggaggaagagtccagcaagcggaatatctccatgcacaacgcagtgggcggtgccatgacgggtccaggaacccaccagttgtcctctgctaggctctag

SEQ ID NO: 306351 - DNA, 2294 bp, Artificial Sequence
  derived and/or modified sequence
gatctgatgaatccaaggagtggagcaagaggcagattttggacacggttatgagaatgacagaaactgcctaaagcatttatgctctggcattcgtccctgtttctggaggtccagtaagcgcttcccaacagaggaccatctgatgattcataggcacaaacatgaaatgactttgaagtttccttcaataaaaacagacaatatgttatcagatcaaactccgaccccaacgagattcctgaagaactgcgaggaggtgggcctcttcagcgagctggactgctccctggagcacgagttcaggaaggctcaggaagaggagagcagcaagcggaatatctcgatgcataatgcagttggtggggccatgacggggcccggaactcaccagcttagcagcgctcggctgcccaaccatgacaccaacgttgtgattcagcaagccatgccgtcgcctcagtccagctctgtcatcactcaggcaccttccaccaaccgccagatcgggcctgtcccaggctctctatcttctctgctacatctccacaacagacagagacagcccatgccagcctccatgcctgggaccctgcccaaccctacaatgccaggatcttccgccgtcttgatgccaatggagcgacaaatgtcagtgaactccagcatcatggggatgcaaggtccaaatctcagcaacccctgtgcttctccccaggtccagccaatgcattcagaagccaaaatgaggttgaaggctgcattgactcaccaccctgctgccatgtcaaatgggaacatgaacaccatgggacacatgatggagatgatgggctcccggcaggaccagacgccacaccatcacatgcactcgcacccgcatcagcaccagacactgccaccccatcacccttacccacaccagcaccagcacccagcacaccatcctcaccctcaaccccatcaccagcagaaccatccacatcaccactcccattcccaccttcatgcacacccagcacatcaccagacctcgccacatccgcccctgcacaccggcaaccaagcacaggtttcaccagcaacacaacagatgcagccaacccagacaatacagccaccccagcccacaggggggcgccggcgaagggtggtagacgaggatccggacgagaggcggcggaaatttctggaacggaaccgggcagctgccacccgctgcagacagaagaggaaggtctgggtgatgtcattggaaaagaaagcagaagaactcacccagacaaacatgcagcttcagaatgaagtgtctatgttgaaaaatgaggtggcccagctgaaacagttgttgttaacacataaagactgcccaataacagccatgcagaaagaatcacaaggatatctaagtccagagagtagccctcctgctagtcctgtcccagcttgctcccagcaacaagtcatccagcataataccatcactacttcctcatcggtcagcgaggtggtaggaagctccaccctcagccagctcaccactcacagaacagacctgaatccgattctttaaaatgcaccatcagacctggcctccaagaagagctgtagcgtaccatgcgtcctttcttttaagggcatttttagaattaactcagacctggaagactcctcagttcttcaaagactggctttcatttttatagttattatggaaatgttgtcttttatacttagttatataagaaaaaagggagttatgcaattaatatctatcagcttgggaaacgctttggtgcttttctccagttttctggtaccagttacttgtttataaactgaaccttttctgtatatagccatggtttcattcttatcagtccaaccctttgcctgaaacattgaatcttgttaaaccacagcttttagctaaaatgaggtatacctagatgtcaagtaagacagatccaaggtaactgggtaggaaatcttttgacatcttaactcatgttgagtttgtgctgtggtgtcaccagaattccagataaacacacagcctttcccatacctttttttttcttactataaaatattataagatccattgatgtccaaataataccaccaagcatctcttcacctctcctcctcttggtccacttgctaatgcccagttttcttctccatttccactttttcttaggctccctatttactattcattttgacttccttctgttttatttttttccctttagcattgcatgtgaataagaaaataatgtttaaagaaa

SEQ ID NO: 306352 - DNA, 1944 bp, Artificial Sequence
  derived and/or modified sequence
ctttcaagagcactaggcagtgacgggaagcggagtgatataacggtagcctgagaaggaaacagtttttttaaaaattaaaggatagccgagctggagtttgtcaagaacaagaaaccagtgagacagaagggcgcttcccaacagaggaccatctgatgattcataggcacaaacatgaaatgactttgaagtttccttcaataaaaacagacaatatgttatcagatcaaactccgaccccaacgagattcctgaagaactgcgaggaggtgggcctcttcagcgagctggactgctccctggagcacgagttcaggaaggctcaggaagaggagagcagcaagcggaatatctcgatgcataatgcagttggtggggccatgacggggcccggaactcaccagcttagcagcgctcggctgcccaaccatgacaccaacgttgtgattcagcaagccatgccgtcgcctcagtccagctctgtcatcactcaggcaccttccaccaaccgccagatcgggcctgtcccaggctctctatcttctctgctacatctccacaacagacagagacagcccatgccagcctccatgcctgggaccctgcccaaccctacaatgccaggatcttccgccgtcttgatgccaatggagcgacaaatgtcagtgaactccagcatcatggggatgcaaggtccaaatctcagcaacccctgtgcttctccccaggtccagccaatgcattcagaagccaaaatgaggttgaaggctgcattgactcaccaccctgctgccatgtcaaatgggaacatgaacaccatgggacacatgatggagatgatgggctcccggcaggaccagacgccacaccatcacatgcactcgcacccgcatcagcaccagacactgccaccccatcacccttacccacaccagcaccagcacccagcacaccatcctcaccctcaaccccatcaccagcagaaccatccacatcaccactcccattcccaccttcatgcacacccagcacatcaccagacctcgccacatccgcccctgcacaccggcaaccaagcacaggtttcaccagcaacacaacagatgcagccaacccagacaatacagccaccccagcccacaggggggcgccggcgaagggtggtagacgaggatccggacgagaggcggcggaaatttctggaacggaaccgggcagctgccacccgctgcagacagaagaggaaggtctgggtgatgtcattggaaaagaaagcagaagaactcacccagacaaacatgcagcttcagaatgaagtgtctatgttgaaaaatgaggtggcccagctgaaacagttgttgttaacacataaagactgcccaataacagccatgcagaaagaatcacaaggatatctaagtccagagagtagccctcctgctagtcctgtcccagcttgctcccagcaacaagtcatccagcataataccatcactacttcctcatcggtcagcgaggtggtaggaagctccaccctcagccagctcaccactcacagaacagacctgaatccgattctttaaaatgcaccatcagacctggcctccaagaagagctgtagcgtaccatgcgtcctttcttttaagggcatttttagaattaactcagacctggaagactcctcagttcttcaaagactggctttcatttttatagttattatggaaatgttgtcttttatacttagttatataagaaaaaagggagttatgcaattaatatctatcagcttgggaaacgctttggtgcttttctccagttttctggtaccagttacttgtttataaactgaaccttttctgtatatagccatggtttcattcttatcagtccaaccctttgcctgaaacattgaatcttgttaaaccacagcttttagct

SEQ ID NO: 306353 - DNA, 1428 bp, Artificial Sequence
  derived and/or modified sequence
atgatccacagacacaagcacgagatgaccctgaagttccccagcatcaagaccgacaacatgctgagcgaccagacccccacccccaccagattcctgaagaactgcgaggaggtgggcctgttcagcgagctggactgcagcctggagcacgagttcagaaaggcccaggaggaggagagcagcaagagaaacatcagcatgcacaacgccgtgggcggcgccatgaccggccccggcacccaccagctgagcagcgccagactgcccaaccacgacaccaacgtggtgatccagcaggccatgcccagcccccagagcagcagcgtgatcacccaggcccccagcaccaacagacagatcggccccgtgcccggcagcctgagcagcctgctgcacctgcacaacagacagagacagcccatgcccgccagcatgcccggcaccctgcccaaccccaccatgcccggcagcagcgccgtgctgatgcccatggagagacagatgagcgtgaacagcagcatcatgggcatgcagggccccaacctgagcaacccctgcgccagcccccaggtgcagcccatgcacagcgaggccaagatgagactgaaggccgccctgacccaccaccccgccgccatgagcaacggcaacatgaacaccatgggccacatgatggagatgatgggcagcagacaggaccagaccccccaccaccacatgcacagccacccccaccagcaccagaccctgcccccccaccacccctacccccaccagcaccagcaccccgcccaccacccccacccccagccccaccaccagcagaaccacccccaccaccacagccacagccacctgcacgcccaccccgcccaccaccagaccagcccccacccccccctgcacaccggcaaccaggcccaggtgagccccgccacccagcagatgcagcccacccagaccatccagcccccccagcccaccggcggcagaagaagaagagtggtggacgaggaccccgacgagagaagaagaaagttcctggagagaaacagagccgccgccaccagatgcagacagaagagaaaggtgtgggtgatgagcctggagaagaaggccgaggagctgacccagaccaacatgcagctgcagaacgaggtgagcatgctgaagaacgaggtggcccagctgaagcagctgctgctgacccacaaggactgccccatcaccgccatgcagaaggagagccagggctacctgagccccgagagcagcccccccgccagccccgtgcccgcctgcagccagcagcaggtgatccagcacaacaccatcaccaccagcagcagcgtgagcgaggtggtgggcagcagcaccctgagccagctgaccacccacagaaccgacctgaaccccatcctgtag

SEQ ID NO: 306354 - DNA, 1506 bp, Artificial Sequence
  derived and/or modified sequence
atgaacctggagcaggagagacccttcgtgtgcagcgcccccggctgcagccagagattccccaccgaggaccacctgatgatccacagacacaagcacgagatgaccctgaagttccccagcatcaagaccgacaacatgctgagcgaccagacccccacccccaccagattcctgaagaactgcgaggaggtgggcctgttcagcgagctggactgcagcctggagcacgagttcagaaaggcccaggaggaggagagcagcaagagaaacatcagcatgcacaacgccgtgggcggcgccatgaccggccccggcacccaccagctgagcagcgccagactgcccaaccacgacaccaacgtggtgatccagcaggccatgcccagcccccagagcagcagcgtgatcacccaggcccccagcaccaacagacagatcggccccgtgcccggcagcctgagcagcctgctgcacctgcacaacagacagagacagcccatgcccgccagcatgcccggcaccctgcccaaccccaccatgcccggcagcagcgccgtgctgatgcccatggagagacagatgagcgtgaacagcagcatcatgggcatgcagggccccaacctgagcaacccctgcgccagcccccaggtgcagcccatgcacagcgaggccaagatgagactgaaggccgccctgacccaccaccccgccgccatgagcaacggcaacatgaacaccatgggccacatgatggagatgatgggcagcagacaggaccagaccccccaccaccacatgcacagccacccccaccagcaccagaccctgcccccccaccacccctacccccaccagcaccagcaccccgcccaccacccccacccccagccccaccaccagcagaaccacccccaccaccacagccacagccacctgcacgcccaccccgcccaccaccagaccagcccccacccccccctgcacaccggcaaccaggcccaggtgagccccgccacccagcagatgcagcccacccagaccatccagcccccccagcccaccggcggcagaagaagaagagtggtggacgaggaccccgacgagagaagaagaaagttcctggagagaaacagagccgccgccaccagatgcagacagaagagaaaggtgtgggtgatgagcctggagaagaaggccgaggagctgacccagaccaacatgcagctgcagaacgaggtgagcatgctgaagaacgaggtggcccagctgaagcagctgctgctgacccacaaggactgccccatcaccgccatgcagaaggagagccagggctacctgagccccgagagcagcccccccgccagccccgtgcccgcctgcagccagcagcaggtgatccagcacaacaccatcaccaccagcagcagcgtgagcgaggtggtgggcagcagcaccctgagccagctgaccacccacagaaccgacctgaaccccatcctgtag

SEQ ID NO: 306355 - DNA, 348 bp, Artificial Sequence
  derived and/or modified sequence
atgaacctggagcaggagagacccttcgtgtgcagcgcccccggctgcagccagagattccccaccgaggaccacctgatgatccacagacacaagcacgagatgaccctgaagttccccagcatcaagaccgacaacatgctgagcgaccagacccccacccccaccagattcctgaagaactgcgaggaggtgggcctgttcagcgagctggactgcagcctggagcacgagttcagaaaggcccaggaggaggagagcagcaagagaaacatcagcatgcacaacgccgtgggcggcgccatgaccggccccggcacccaccagctgagcagcgccagactgtag

SEQ ID NO: 306356 - DNA, 72 bp, Artificial Sequence
  derived and/or modified sequence
atgcactcgatgatttcctccgtagacgttaagtcggaagtacccgtgggactggagccaataagtccttag

SEQ ID NO: 306357 - DNA, 550 bp, Artificial Sequence
  derived and/or modified sequence
aatattataacggatacagaaaagttcagaaggactgagctagtttgcgaaaccacagcacactttggcaaagagggaatgcacaacaaaacggatggggtggctggacgagagcagctcttggctcagcaaagaatgcacagtatgatcagctcagtggatgtgaagtcagaagttcctgtgggcctggagcccatctcacctttagacctaaggacagacctcaggatgatgatgcccgtggtggaccctgttgtccgtgagaagcaattgcagcaggaattacttcttatccagcagcagcaacaaatccagaagcagcttctgatagcagagtttcagaaacagcatgagaacttgacacggcagcaccaggctcagcttcaggagcatatcaagttgcaacaggaacttctagccataaaacagcaacaagaactcctagaaaaggagcagaaactggagcagcagaggcaagaacaggaagtagagaggcatcgcagagaacagcagcttcctcctctcagaggcaaagatagaggacgagaaa

SEQ ID NO: 306358 - DNA, 602 bp, Artificial Sequence
  derived and/or modified sequence
gagtatacttagagtatggagctgacaaacattctctttccttctcctcctcctcctcctcattctgttgaattgctggtttctgtagtctattaggcttcttattaatagtaataaaatgttcattcattaactctctcatgcctgcataccagctatagtaactgtctttgcccccaagttatgcagtctttataaagtcgttcagtagcagggcaatgagttgggaaaactgatattgcatctgtagcatcaggtactatttaaccagtgggagggactgataaaattagcaagttgactaaccacttcccttccttgtggctctttaatattataacggatacagaaaagttcagaaggactgagctagtttgcgaaaccacagcacactttggcaaagagggaatgcacaacaaaacgggagtacctggtaaaatgctgtggtgtatggagacagttatgagaaactggagggaggatgatagttgagatggggtggctggacgagagcagctcttggctcagcaaagaatgcacagtatgatcagctcagtggatgtgaagtcagaagttcctgtgggcctggagcccatctcacc

SEQ ID NO: 306359 - DNA, 72 bp, Artificial Sequence
  derived and/or modified sequence
atgcacagcatgatcagctctgtggatgtgaagtctgaggtgcctgtgggcctggagcccatcagcccctag

SEQ ID NO: 306360 - DNA, 72 bp, Artificial Sequence
  derived and/or modified sequence
atgcacagcatgatcagcagcgtggacgtgaagagcgaggtgcccgtggggctggaacctatctccccatag

SEQ ID NO: 306361 - DNA, 72 bp, Artificial Sequence
  derived and/or modified sequence
atgcactctatgatcagcagtgtggacgtcaagtccgaggtcccagtcggactggaacctatcagtccgtag

SEQ ID NO: 306362 - DNA, 72 bp, Artificial Sequence
  derived and/or modified sequence
atgcacagcatgatcagcagcgtggacgtgaagagcgaggtgcccgtgggcctggagcccatcagcccctag

SEQ ID NO: 306363 - protein, 138 aa, Artificial Sequence
  derived and/or modified sequence
MHSMISSVDVKSEVPVGLEPISPLDLRTDLRMMMPVVDPVVREKQLQQELLLIQQQQQIQKQLLIAEFQKQHENLTRQHQAQLQEHIKLQQELLAIKQQQELLEKEQKLEQQRQEQEVERHRREQQLPPLRGKDRGRE

SEQ ID NO: 306364 - protein, 1069 aa, Artificial Sequence
  derived and/or modified sequence
MHSMISSVDVKSEVPVGLEPISPLDLRTDLRMMMPVVDPVVREKQLQQELLLIQQQQQIQKQLLIAEFQKQHENLTRQHQAQLQEHIKLQQELLAIKQQQELLEKEQKLEQQRQEQEVERHRREQQLPPLRGKDRGRERAVASTEVKQKLQEFLLSKSATKDTPTNGKNHSVSRHPKLWYTAAHHTSLDQSSPPLSGTSPSYKYTLPGAQDAKDDFPLRKTASEPNLKVRSRLKQKVAERRSSPLLRRKDGNVVTSFKKRMFEVTESSVSSSSPGSGPSSPNNGPTGSVTENETSVLPPTPHAEQMVSQQRILIHEDSMNLLSLYTSPSLPNITLGLPAVPSQLNASNSLKEKQKCETQTLRQGVPLPGQYGGSIPASSSHPHVTLEGKPPNSSHQALLQHLLLKEQMRQQKLLVAGGVPLHPQSPLATKERISPGIRGTHKLPRHRPLNRTQSAPLPQSTLAQLVIQQQHQQFLEKQKQYQQQIHMNKLLSKSIEQLKQPGSHLEEAEEELQGDQAMQEDRAPSSGNSTRSDSSACVDDTLGQVGAVKVKEEPVDSDEDAQIQEMESGEQAAFMQQPFLEPTHTRALSVRQAPLAAVGMDGLEKHRLVSRTHSSPAASVLPHPAMDRPLQPGSATGIAYDPLMLKHQCVCGNSTTHPEHAGRIQSIWSRLQETGLLNKCERIQGRKASLEEIQLVHSEHHSLLYGTNPLDGQKLDPRILLGDDSQKFFSSLPCGGLGVDSDTIWNELHSSGAARMAVGCVIELASKVASGELKNGFAVVRPPGHHAEESTAMGFCFFNSVAITAKYLRDQLNISKILIVDLDVHHGNGTQQAFYADPSILYISLHRYDEGNFFPGSGAPNEVGTGLGEGYNINIAWTGGLDPPMGDVEYLEAFRTIVKPVAKEFDPDMVLVSAGFDALEGHTPPLGGYKVTAKCFGHLTKQLMTLADGRVVLALEGGHDLTAICDASEACVNALLGNELEPLAEDILHQSPNMNAVISLQKIIEIQSKYWKSVRMVAVPRGCALAGAQLQEETETVSALASLTVDVEQPFAQEDSRTAGEPMEEEPAL

SEQ ID NO: 306365 - DNA, 4659 bp, Artificial Sequence
  derived and/or modified sequence
ggggaagagaggcacagacacagataggagaagggcaccggctggagccacttgcaggactgagggtttttgcaacaaaaccctagcagcctgaagaactctaagccagatggggtggctggacgagagcagctcttggctcagcaaagaatgcacagtatgatcagctcagtggatgtgaagtcagaagttcctgtgggcctggagcccatctcacctttagacctaaggacagacctcaggatgatgatgcccgtggtggaccctgttgtccgtgagaagcaattgcagcaggaattacttcttatccagcagcagcaacaaatccagaagcagcttctgatagcagagtttcagaaacagcatgagaacttgacacggcagcaccaggctcagcttcaggagcatatcaaggaacttctagccataaaacagcaacaagaactcctagaaaaggagcagaaactggagcagcagaggcaagaacaggaagtagagaggcatcgcagagaacagcagcttcctcctctcagaggcaaagatagaggacgagaaagggcagtggcaagtacagaagtaaagcagaagcttcaagagttcctactgagtaaatcagcaacgaaagacactccaactaatggaaaaaatcattccgtgagccgccatcccaagctctggtacacggctgcccaccacacatcattggatcaaagctctccaccccttagtggaacatctccatcctacaagtacacattaccaggagcacaagatgcaaaggatgatttcccccttcgaaaaactgcctctgagcccaacttgaaggtgcggtccaggttaaaacagaaagtggcagagaggagaagcagccccttactcaggcggaaggatggaaatgttgtcacttcattcaagaagcgaatgtttgaggtgacagaatcctcagtcagtagcagttctccaggctctggtcccagttcaccaaacaatgggccaactggaagtgttactgaaaatgagacttcggttttgccccctacccctcatgccgagcaaatggtttcacagcaacgcattctaattcatgaagattccatgaacctgctaagtctttatacctctccttctttgcccaacattaccttggggcttcccgcagtgccatcccagctcaatgcttcgaattcactcaaagaaaagcagaagtgtgagacgcagacgcttaggcaaggtgttcctctgcctgggcagtatggaggcagcatcccggcatcttccagccaccctcatgttactttagagggaaagccacccaacagcagccaccaggctctcctgcagcatttattattgaaagaacaaatgcgacagcaaaagcttcttgtagctggtggagttcccttacatcctcagtctcccttggcaacaaaagagagaatttcacctggcattagaggtacccacaaattgccccgtcacagacccctgaaccgaacccagtctgcacctttgcctcagagcacgttggctcagctggtcattcaacagcaacaccagcaattcttggagaagcagaagcaataccagcagcagatccacatgaacaaactgctttcgaaatctattgaacaactgaagcaaccaggcagtcaccttgaggaagcagaggaagagcttcagggggaccaggcgatgcaggaagacagagcgccctctagtggcaacagcactaggagcgacagcagtgcttgtgtggatgacacactgggacaagttggggctgtgaaggtcaaggaggaaccagtggacagtgatgaagatgctcagatccaggaaatggaatctggggagcaggctgcttttatgcaacagcctttcctggaacccacgcacacacgtgcgctctctgtgcgccaagctccgctggctgcggttggcatggatggattagagaaacaccgtctcgtctccaggactcactcttcccctgctgcctctgttttacctcacccagcaatggaccgccccctccagcctggctctgcaactggaattgcctatgaccccttgatgctgaaacaccagtgcgtttgtggcaattccaccacccaccctgagcatgctggacgaatacagagtatctggtcacgactgcaagaaactgggctgctaaataaatgtgagcgaattcaaggtcgaaaagccagcctggaggaaatacagcttgttcattctgaacatcactcactgttgtatggcaccaaccccctggacggacagaagctggaccccaggatactcctaggtgatgactctcaaaagtttttttcctcattaccttgtggtggacttggggtggacagtgacaccatttggaatgagctacactcgtccggtgctgcacgcatggctgttggctgtgtcatcgagctggcttccaaagtggcctcaggagagctgaagaatgggtttgctgttgtgaggccccctggccatcacgctgaagaatccacagccatggggttctgcttttttaattcagttgcaattaccgccaaatacttgagagaccaactaaatataagcaagatattgattgtagatctggatgttcaccatggaaacggtacccagcaggccttttatgctgaccccagcatcctgtacatttcactccatcgctatgatgaagggaactttttccctggcagtggagccccaaatgaggttggaacaggccttggagaagggtacaatataaatattgcctggacaggtggccttgatcctcccatgggagatgttgagtaccttgaagcattcaggaccatcgtgaagcctgtggccaaagagtttgatccagacatggtcttagtatctgctggatttgatgcattggaaggccacacccctcctctaggagggtacaaagtgacggcaaaatgttttggtcatttgacgaagcaattgatgacattggctgatggacgtgtggtgttggctctagaaggaggacatgatctcacagccatctgtgatgcatcagaagcctgtgtaaatgcccttctaggaaatgagctggagccacttgcagaagatattctccaccaaagcccgaatatgaatgctgttatttctttacagaagatcattgaaattcaaagcaagtattggaagtcagtaaggatggtggctgtgccaaggggctgtgctctggctggtgctcagttgcaagaggagacagagaccgtttctgccctggcctccctaacagtggatgtggaacagccctttgctcaggaagacagcagaactgctggtgagcctatggaagaggagccagccttgtgaagtgccaagtccccctctgatatttcctgtgtgtgacatcattgtgtatccccccaccccagtaccctcagacatgtcttgtctgctgcctgggtggcacagattcaatggaacataaacactgggcacaaaattctgaacagcagcttcacttgttctttggatggacttgaaagggcattaaagattccttaaacgtaaccgctgtgattctagagttacagtaaaccacgattggaagaaactgcttccagcatgcttttaatatgctgggtgacccactcctagacaccaagtttgaactagaaacattcagtacagcactagatattgttaatttcagaagctatgacagccagtgaaattttgggcaaaacctgagacatagtcattcctgacattctgatcagctttttttggggtaatttgtttttcaaacagtcttaacttgtttacaagatttgcttttagctatgaacggatcgtaattccacccagaatgtaatgtttcttgtttgtttgttttgttttgttagggtttttttctcaactttaacacacagttcaactgttcctagtaaaagttcaagatggaggaactagcatgaggcttttttcagtatctcgaagtccaaatgccaaaggaacctcacacactgtttgtaatggtgcaatattttatatcacttttttttaaacatccccaacatctttgtgttctcacacacaggcaatttgcaatgttgcaattgtgttggagaatgaagtccccccacctcccagccacacacacatcctttgttctcatgacagtaggtctgagcaaatgttccaccaagcattttcagtgtctttgaaaagcacgtaacttttcaaaggtggtcttaatttgttgcatatctatcaaggacttattcactcacctttccttttctgccctctatcaattgatttcttcttacctttcatcattcattccttcctttagaaaaactgaagattacccataatctcctcttattacttgagggccttgactatttagtttattttgtttactttacaggttaacacagttgttttgtctgattgcattttattaactgtgaagccgttgaaatgaatatcacttaagcaacgttgctaaatttctatgtgtttgaaatgtgttaatgaaggcactgcttatttgtagtcaccttgaactgacttaacctagaagctgtgccttcttgtgaaaaaaaaaaaaaacaaaaacaaaaaacagcctttaaacaagtttccttagtgtcaaaagttaaaaataaa

SEQ ID NO: 306366 - protein, 1025 aa, Artificial Sequence
  derived and/or modified sequence
MHSMISSVDVKSEVPVGLEPISPLDLRTDLRMMMPVVDPVVREKQLQQELLLIQQQQQIQKQLLIAEFQKQHENLTRQHQAQLQEHIKLQQELLAIKQQQELLEKEQKLEQQRQEQEVERHRREQQLPPLRGKDRGRERAVASTEVKQKLQEFLLSKSATKDTPTNGKNHSVSRHPKLWYTAAHHTSLDQSSPPLSGTSPSYKYTLPGAQDAKDDFPLRKTESSVSSSSPGSGPSSPNNGPTGSVTENETSVLPPTPHAEQMVSQQRILIHEDSMNLLSLYTSPSLPNITLGLPAVPSQLNASNSLKEKQKCETQTLRQGVPLPGQYGGSIPASSSHPHVTLEGKPPNSSHQALLQHLLLKEQMRQQKLLVAGGVPLHPQSPLATKERISPGIRGTHKLPRHRPLNRTQSAPLPQSTLAQLVIQQQHQQFLEKQKQYQQQIHMNKLLSKSIEQLKQPGSHLEEAEEELQGDQAMQEDRAPSSGNSTRSDSSACVDDTLGQVGAVKVKEEPVDSDEDAQIQEMESGEQAAFMQQPFLEPTHTRALSVRQAPLAAVGMDGLEKHRLVSRTHSSPAASVLPHPAMDRPLQPGSATGIAYDPLMLKHQCVCGNSTTHPEHAGRIQSIWSRLQETGLLNKCERIQGRKASLEEIQLVHSEHHSLLYGTNPLDGQKLDPRILLGDDSQKFFSSLPCGGLGVDSDTIWNELHSSGAARMAVGCVIELASKVASGELKNGFAVVRPPGHHAEESTAMGFCFFNSVAITAKYLRDQLNISKILIVDLDVHHGNGTQQAFYADPSILYISLHRYDEGNFFPGSGAPNEVGTGLGEGYNINIAWTGGLDPPMGDVEYLEAFRTIVKPVAKEFDPDMVLVSAGFDALEGHTPPLGGYKVTAKCFGHLTKQLMTLADGRVVLALEGGHDLTAICDASEACVNALLGNELEPLAEDILHQSPNMNAVISLQKIIEIQSKYWKSVRMVAVPRGCALAGAQLQEETETVSALASLTVDVEQPFAQEDSRTAGEPMEEEPAL

SEQ ID NO: 306367 - DNA, 3078 bp, Artificial Sequence
  derived and/or modified sequence
atgcatagcatgattagttccgtggatgtcaagtcagaggtcccggtgggcttggagcccatctccccgctcgatcttagaacagacctccgcatgatgatgcccgtggtggacccggtggtgcgggaaaagcagctgcagcaggagttgctcctgatccagcagcagcagcagatacagaagcagctgcttattgccgaattccagaaacagcatgagaatttgactcgtcagcaccaggcccagttgcaggagcacatcaaactgcaacaggagctgttagcaatcaagcaacagcaggagcttctggagaaggagcagaagctggaacagcagaggcaggaacaagaagtcgagcgccataggcgcgaacagcagcttcccccactgcgcggcaaagatagagggcgtgagagggcagtggccagtacagaggtaaagcagaaactgcaggagttcctcttgtcaaaatcagcaactaaagacacacccacaaacggaaagaatcactcggtgtcacgccacccaaagttgtggtacactgccgctcatcacacgtcactcgatcagagttcaccgcctctctccggtacatccccaagttataagtacacactccccggcgctcaggacgcaaaggacgatttccccttgaggaagaccgaatccagcgtctcctcgagcagtccaggctctggtcctagttccccaaacaatggtcctacaggtagcgtcaccgaaaacgaaacgtcggtccttccaccaactcctcacgccgaacagatggtgtctcaacagcggatcctaattcacgaggatagcatgaatttgttaagcctctacacttccccaagtctgcctaatattaccctgggtctgcccgctgtgccctcacagctgaatgcttccaattccttaaaggaaaaacagaaatgcgagacacagaccctcagacaaggcgtcccattacccggccagtacggcggctctatcccagcctctagttcacacccccatgtcaccctcgaaggaaagccacccaacagtagtcaccaagccctgcttcagcatctcctgctgaaagagcagatgcggcagcagaaactgctcgtggccgggggagtaccactgcacccccagagtcccctggcaaccaaagagaggatttcccctggaatcagaggcacacacaagctcccccggcacaggccgctgaataggactcagtctgccccactgccgcaatcaactctcgctcagctagttatccagcagcaacaccaacaattcttagagaaacaaaaacagtaccaacaacagatccacatgaataaactgctttcaaaatctatcgaacagctgaaacaacccggcagccatctggaggaggctgaagaagaactacagggggaccaggccatgcaagaggatagagccccaagcagcggaaacagcaccaggtctgattcttccgcctgtgtggacgacacactcgggcaggttggtgccgtgaaagtgaaagaggagcccgtagacagtgacgaggacgcccaaattcaggagatggagagcggggaacaggccgcattcatgcaacagccctttctagaacctacccacactagggcactcagtgtgcgtcaggcacctcttgccgcggtcggcatggacgggcttgaaaagcaccgactggtctcccgcacacattctagtccagctgcctctgtgctgccccatcccgctatggaccgtcccctgcagcccggttccgcaacagggatcgcttatgacccactaatgctgaaacaccagtgtgtatgcgggaactccactacccatcccgagcacgctggcagaatccagtccatctggtctagattgcaggagacagggctgctaaacaaatgtgaaagaatccaggggcgtaaggcctctctggaggaaatccagttagtgcactctgaacaccattccctgttgtatggaactaaccccctggacggccaaaagcttgatcctagaatcctgttaggtgatgatagccaaaaattttttagtagcttgccatgtgggggactcggagtcgacagcgacacaatttggaacgagttacactccagtggagctgctcgaatggcagtcggctgcgttattgagctagccagcaaggtggccagcggggaactcaaaaacggctttgcagtggtgcgacccccagggcatcatgcagaagagagtacagctatggggttctgcttctttaacagtgttgcaatcactgctaaataccttcgtgaccagctgaacatcagtaagatcctgatcgtggacttagatgtgcaccatggaaatggaactcaacaggcattctacgccgatcccagcatactatacatctcacttcaccggtacgacgaggggaatttcttccccgggtcaggagctcccaatgaagtcggcactggcctgggggagggttacaacataaacatcgcttggaccggaggactcgatccccctatgggcgatgtggagtacctggaagcgtttcggaccatcgtcaagcccgtcgcgaaagagtttgaccctgatatggtcctggtctctgcaggatttgacgcacttgagggccacacaccgcccctgggaggctacaaggttacggccaaatgctttggtcacctgacaaagcagctcatgactctcgccgacgggcgggtggtgctggccttagagggggggcacgacctgactgcaatttgcgacgcatccgaagcctgcgttaacgcacttttagggaacgagctggagcccctggcagaggatattctgcaccagagtcctaacatgaacgccgtgatctctctacagaagataattgagatacagtctaaatattggaagagtgttagaatggtggccgtcccgcggggatgtgctctggccggagcgcagcttcaagaggagacggaaactgtctcagccctggcttcactgacagtggatgtggaacaacctttcgcacaggaagattcgagaacagcgggcgaaccgatggaagaggagcccgccctttag

SEQ ID NO: 306368 - DNA, 3254 bp, Artificial Sequence
  derived and/or modified sequence
atggggtggctggacgagagcagctcttggctcagcaaagaatgcacagtatgatcagctcagtggatgtgaagtcagaagttcctgtgggcctggagcccatctcacctttagacctaaggacagacctcaggatgatgatgcccgtggtggaccctgttgtccgtgagaagcaattgcagcaggaattacttcttatccagcagcagcaacaaatccagaagcagcttctgatagcagagtttcagaaacagcatgagaacttgacacggcagcaccaggctcagcttcaggagcatatcaagttgcaacaggaacttctagccataaaacagcaacaagaactcctagaaaaggagcagaaactggagcagcagaggcaagaacaggaagtagagaggcatcgcagagaacagcagcttcctcctctcagaggcaaagatagaggacgagaaagggcagtggcaagtacagaagtaaagcagaagcttcaagagttcctactgagtaaatcagcaacgaaagacactccaactaatggaaaaaatcattccgtgagccgccatcccaagctctggtacacggctgcccaccacacatcattggatcaaagctctccaccccttagtggaacatctccatcctacaagtacacattaccaggagcacaagatgcaaaggatgatttcccccttcgaaaaactgaatcctcagtcagtagcagttctccaggctctggtcccagttcaccaaacaatgggccaactggaagtgttactgaaaatgagacttcggttttgccccctacccctcatgccgagcaaatggtttcacagcaacgcattctaattcatgaagattccatgaacctgctaagtctttatacctctccttctttgcccaacattaccttggggcttcccgcagtgccatcccagctcaatgcttcgaattcactcaaagaaaagcagaagtgtgagacgcagacgcttaggcaaggtgttcctctgcctgggcagtatggaggcagcatcccggcatcttccagccaccctcatgttactttagagggaaagccacccaacagcagccaccaggctctcctgcagcatttattattgaaagaacaaatgcgacagcaaaagcttcttgtagctggtggagttcccttacatcctcagtctcccttggcaacaaaagagagaatttcacctggcattagaggtacccacaaattgccccgtcacagacccctgaaccgaacccagtctgcacctttgcctcagagcacgttggctcagctggtcattcaacagcaacaccagcaattcttggagaagcagaagcaataccagcagcagatccacatgaacaaactgctttcgaaatctattgaacaactgaagcaaccaggcagtcaccttgaggaagcagaggaagagcttcagggggaccaggcgatgcaggaagacagagcgccctctagtggcaacagcactaggagcgacagcagtgcttgtgtggatgacacactgggacaagttggggctgtgaaggtcaaggaggaaccagtggacagtgatgaagatgctcagatccaggaaatggaatctggggagcaggctgcttttatgcaacagcctttcctggaacccacgcacacacgtgcgctctctgtgcgccaagctccgctggctgcggttggcatggatggattagagaaacaccgtctcgtctccaggactcactcttcccctgctgcctctgttttacctcacccagcaatggaccgccccctccagcctggctctgcaactggaattgcctatgaccccttgatgctgaaacaccagtgcgtttgtggcaattccaccacccaccctgagcatgctggacgaatacagagtatctggtcacgactgcaagaaactgggctgctaaataaatgtgagcgaattcaaggtcgaaaagccagcctggaggaaatacagcttgttcattctgaacatcactcactgttgtatggcaccaaccccctggacggacagaagctggaccccaggatactcctaggtgatgactctcaaaagtttttttcctcattaccttgtggtggacttggggtggacagtgacaccatttggaatgagctacactcgtccggtgctgcacgcatggctgttggctgtgtcatcgagctggcttccaaagtggcctcaggagagctgaagaatgggtttgctgttgtgaggccccctggccatcacgctgaagaatccacagccatggggttctgcttttttaattcagttgcaattaccgccaaatacttgagagaccaactaaatataagcaagatattgattgtagatctggatgttcaccatggaaacggtacccagcaggccttttatgctgaccccagcatcctgtacatttcactccatcgctatgatgaagggaactttttccctggcagtggagccccaaatgaggttggaacaggccttggagaagggtacaatataaatattgcctggacaggtggccttgatcctcccatgggagatgttgagtaccttgaagcattcaggaccatcgtgaagcctgtggccaaagagtttgatccagacatggtcttagtatctgctggatttgatgcattggaaggccacacccctcctctaggagggtacaaagtgacggcaaaatgttttggtcatttgacgaagcaattgatgacattggctgatggacgtgtggtgttggctctagaaggaggacatgatctcacagccatctgtgatgcatcagaagcctgtgtaaatgcccttctaggaaatgagctggagccacttgcagaagatattctccaccaaagcccgaatatgaatgctgttatttctttacagaagatcattgaaattcaaagcaagtattggaagtcagtaaggatggtggctgtgccaaggggctgtgctctggctggtgctcagttgcaagaggagacagagaccgtttctgccctggcctccctaacagtggatgtggaacagccctttgctcaggaagacagcagaactgctggtgagcctatggaagaggagccagccttgtgaagtgccaagtccccctctgatatttcctgtgtgtgacatcattgtgtatccccccaccccagtaccctcagacatgtcttgtctgctgcctgggtggcacagattcaatggaacataaacactgggcacaaaatt

SEQ ID NO: 306369 - DNA, 799 bp, Artificial Sequence
  derived and/or modified sequence
gctttagccaacttgagctgagagagactgagaaagggggaagagaggcacagacacagataggagaagggcaccggctggagccacttgcaggactgagggtttttgcaacaaaaccctagcagcctgaagaactctaagccaggtttaattggtttctttttctcgtgggtagacttaataattttctacgtattctgacaaagaaataaccccgaagcacgttcctatttcccacctgcttgtagtttccgggataacctaaactccagagagctatagcatccactctgtcctttctgctttgcacacagatggggtggctggacgagagcagctcttggctcagcaaagaatgcacagtatgatcagctcagtggatgtgaagtcagaagttcctgtgggcctggagcccatctcacctttagacctaaggacagacctcaggatgatgatgcccgtggtggaccctgttgtccgtgagaagcaattgcagcaggaattacttcttatccagcagcagcaacaaatccagaagcagcttctgatagcagagtttcagaaacagcatgagaacttgacacggcagcaccaggctcagcttcaggagcatatcaagttgcaacaggaacttctagccataaaacagcaacaagaactcctagaaaaggagcagaaactggagcagcagaggcaagaacaggaagtagagaggcatcgcagagaacagcagcttcctcctctcagaggcaaagatagaggacgagaaagggcagtggcaagtacagaagtaaagcag

SEQ ID NO: 306370 - DNA, 3078 bp, Artificial Sequence
  derived and/or modified sequence
atgcacagcatgatcagctctgtggatgtgaagtctgaggtgcctgtgggcctggagcccatcagccccctggacctgaggacagacctgaggatgatgatgcctgtggtggaccctgtggtgcgggagaagcagctgcagcaggagctgctgctgatccagcagcagcagcagatccagaagcagctgctgattgctgagttccagaagcagcacgagaacctgacccggcagcaccaggcccagctgcaggagcacatcaagctgcagcaggagctgctggccatcaagcagcagcaggagctgctggagaaggagcagaagctggagcagcagaggcaggagcaggaggtggagcggcaccggcgggagcagcagctgccccccctgcggggcaaggaccggggccgggagagagctgtggccagcacagaggtgaagcagaagctgcaggagttcctgctgagcaagagcgccaccaaggacacccccaccaacgggaagaaccacagcgtgagccgccaccccaagctgtggtacacagctgcccaccacaccagcctggaccagagcagcccccccctgagcggcaccagccccagctacaagtacaccctgcccggggcccaggatgccaaggatgacttccccctgaggaagacagagagctctgtgagcagcagcagccctggcagcggccccagcagccccaacaacggccccaccggctctgtgacagaaaatgagacctctgtgctgccccccacccctcatgctgagcagatggtgtcccagcagaggatcctgattcatgaggacagcatgaacctgctgagcctgtacaccagccccagcctgcccaacatcaccctgggcctgcctgctgtgcccagccagctgaatgccagcaacagcctgaaggagaagcagaagtgtgagacccagaccctgcggcagggcgtgcccctgcccggccagtatggaggcagcatcccagccagcagcagccacccccacgtgaccctggagggcaagccacccaacagcagccaccaggccctgctgcagcacctgctgctgaaggagcagatgaggcagcagaagctgctggtggccggcggcgtgcccctgcacccccagagccccctggccaccaaggagcgcatcagccctggcatccggggcacccacaagctgcccaggcaccggcccctgaacagaacccagagcgcccccctgccccagagcaccctggcccagctggtgatccagcagcagcaccagcagttcctggagaagcagaagcagtaccagcagcagatccacatgaacaagctgctgagcaagagcattgagcagctgaagcagcccggcagccacctggaggaggccgaggaggagctgcagggcgaccaggccatgcaggaggaccgggcccccagcagcggcaacagcaccaggagtgacagcagcgcctgtgtggatgacaccctgggccaggtgggcgctgtgaaggtgaaggaggagcctgtggacagtgatgaagatgcccagatccaggagatggagagcggggagcaggccgccttcatgcagcagcccttcctggagcccacccacacccgggccctgtctgtgcggcaggcccccctggccgctgtgggcatggatggcctggagaagcaccggctggtgtccaggacccacagcagccctgctgcctctgtgctgccccacccagccatggaccggcccctgcagcccggcagcgccaccggcatcgcctatgaccccctgatgctgaagcaccagtgtgtgtgtggcaacagcaccacccaccctgagcacgccggccgcatccagagcatctggagccggctgcaggagaccggcctgctgaacaagtgtgagcgcatccagggcaggaaggccagcctggaggagatccagctggtgcacagcgagcaccacagcctgctgtatggcaccaaccccctggatggccagaagctggacccccgcatcctgctgggagatgacagccagaagttcttcagcagcctgccctgtggcggcctgggcgtggacagcgacaccatctggaatgagctgcacagcagtggagctgccaggatggctgtgggctgcgtcatcgagctggccagcaaggtggccagcggggagctgaagaatggatttgctgtggtgcggcccccaggccaccacgccgaggagagcacagccatgggcttctgcttcttcaacagcgtggccatcacagccaagtacctgcgggaccagctgaacatcagcaagatcctgattgtggacctggatgtgcaccacggcaatggcacccagcaggccttctacgccgaccccagcatcctgtacatcagcctgcacagatatgatgagggcaacttcttccctggcagcggggccccaaatgaggtgggcaccggcctgggggagggctacaacatcaacatcgcctggacaggaggcctggacccccccatgggagatgtggagtacctggaggccttccgcaccatcgtgaagcctgtggccaaggagtttgatcctgacatggtgctggtgtctgctggctttgatgccctggagggccacaccccacccctgggcggctacaaggtgacagccaagtgcttcggccacctgaccaagcagctgatgaccctggctgatggccgggtggtgctggccctggagggcggccatgacctgacagccatctgtgatgccagcgaggcctgtgtgaatgccctgctgggcaatgagctggagcccctggccgaggacatcctgcaccagagccccaacatgaatgctgtgatcagcctgcagaagatcatcgagatccagagcaagtactggaagtctgtgaggatggtggccgtgccccggggctgtgccctggccggggcccagctgcaggaggagacagagaccgtgtctgccctggccagcctgactgtggatgtggagcagccctttgcccaggaggacagcaggacagctggggagcccatggaggaggagcccgccctgtag

SEQ ID NO: 306371 - DNA, 3078 bp, Artificial Sequence
  derived and/or modified sequence
atgcacagcatgatcagcagcgtggacgtgaagagcgaggtgcccgtcggtctcgaacccattagcccactcgacctgagaacggatttgcgcatgatgatgcccgttgttgatccggtcgtgagagaaaagcaactgcagcaggagctactgttaattcagcagcagcagcagatacagaaacagctgcttattgccgagttccagaagcaacatgagaatttgacccgtcagcatcaggctcagcttcaggaacacatcaagttgcaacaggaactgctggcaattaaacaacagcaggaactattggagaaggagcagaaactggagcagcagcgccaggagcaggaggtcgaaagacacagacgcgagcagcagctgcctccactgcggggaaaagaccgcggccgagagagagctgttgccagcacagaggtcaagcagaaactgcaggagtttctgctctctaagtccgccactaaagatacacctaccaatgggaaaaatcattcagttagtcggcaccccaaactgtggtacaccgcagcccaccatacaagccttgaccagagctctcctcccctaagtggcacttctcctagctacaagtataccttgccaggtgcccaggacgctaaggatgattttccccttaggaagacggaatctagcgtgtctagcagcagccctggctcaggtcctagtagcccgaacaatggccccacgggctctgtgactgaaaatgagacctctgtactgccccccacccctcacgctgaacagatggtgtcccagcagaggatacttatccatgaggactcaatgaacctcctcagcctgtatacttccccaagccttcccaacattactctgggcctgccggccgttccaagccagctcaacgcctccaattccttgaaagagaaacagaagtgtgaaacgcagactctacgtcaaggcgtcccactgccagggcagtatggaggtagtatcccagcgagttctagccatccccacgtgacgttagaaggaaagcctcccaactcaagccaccaggctttattgcagcaccttctcctgaaagaacagatgaggcagcagaagctgctggtggccgggggggtgccacttcacccgcaatccccactcgccacaaaggagaggatttcacctggcatccgaggaacccataagttacctcgacacagacctctcaacagaactcagagcgcccctctgccccagtccacactcgcgcagctggtgattcagcagcagcaccaacagtttctggagaaacagaaacagtatcagcagcaaatccatatgaataaactgctgagtaaaagcatcgagcagcttaagcagccaggctcacacctggaggaggctgaggaggaactacagggggaccaagcaatgcaagaggatcgcgctcctagcagcggcaattctaccaggtccgatagcagcgcctgtgtggatgacaccctggggcaagtgggagccgttaaagtgaaagaagagcctgttgattccgacgaggacgcccagatccaggaaatggagagcggtgagcaggcggcctttatgcagcaaccatttctcgagcctactcacaccagagccttatcagtgagacaggctcccttagcagccgtagggatggacgggctggaaaaacataggttggtgtccagaacacatagcagcccagccgcctccgtgctcccgcacccggcaatggaccggccattacagcctggctccgctactggaattgcctatgacccactcatgttaaagcaccagtgtgtctgcggtaacagcactactcatcctgagcacgctgggcgcattcagtccatatggagtcgccttcaagaaacaggactccttaacaagtgcgagagaatacaaggtcggaaagcttccctggaggagattcagctggtacacagcgaacaccactccctgctctatggcacgaatccactggacgggcaaaagctagatccgcgcatcctactgggcgacgatagccaaaaatttttctcatccctgccctgcggcgggctgggcgtcgatagcgataccatatggaatgagctacactcctcaggcgcagccaggatggccgtgggatgcgtcatcgaattggctagcaaggtggcctctggcgagttaaaaaatggatttgctgtagtgagaccgcccggccatcatgccgaggagtccactgcgatgggcttctgtttttttaacagtgtcgccatcaccgccaaatacttacgagatcagctgaacatctccaagattttgattgtggatctcgacgtgcaccatggcaacgggactcagcaggccttttacgccgacccctccatactgtacatctctctgcaccgatatgacgaaggcaattttttcccaggctcaggcgcacccaatgaggtcggtaccggtctgggtgagggttataatatcaatattgcctggaccgggggacttgaccctcctatgggggatgtcgaatacctcgaagcgttccgcactatcgtaaaaccagtggctaaagagtttgatcctgacatggttctcgtatctgctggattcgacgcacttgaaggccacacgccccctcttggaggttacaaggtgacagctaagtgttttggacaccttaccaaacagctcatgaccctcgccgatggacgggtggtgcttgctctcgaagggggccatgatcttactgccatctgcgacgccagcgaggcatgcgtcaacgctctcctcgggaatgaactggaaccacttgcggaagacatcctgcatcagtcacccaatatgaatgccgtgatatccttgcagaagatcatcgagattcagagcaagtactggaagagtgtgcggatggtggccgtccctaggggatgtgctcttgcgggggctcagttacaggaggagacagagacagtgtctgcactggcctccctgactgtcgatgtcgagcagccgttcgcccaggaggatagccgaaccgcaggagaacccatggaagaggagcccgcactctag

SEQ ID NO: 306372 - DNA, 3078 bp, Artificial Sequence
  derived and/or modified sequence
atgcacagcatgatctctagcgtggatgtcaagtccgaggtgcccgtagggctggagccaatcagtcccctcgatctgaggaccgatctccgcatgatgatgccagtggtcgacccagttgtgagggagaaacagctgcagcaggaattgttgctgattcagcaacagcagcagatccagaaacagctcttaatcgctgagttccaaaagcagcacgaaaatctgacaaggcagcatcaagcccagctgcaggagcacattaaattacagcaggagctgttagctattaagcagcaacaggagctattggagaaggagcaaaaactggagcagcagcgccaggaacaggaggtggagaggcacagacgagagcagcaattgcctccactacgcggtaaggaccgtgggagggagagagccgtggcatctacagaagtcaagcaaaagctgcaggagtttcttctcagcaaaagtgctactaaagatactcctacgaacgggaaaaaccattctgtgagtcgacatcctaaactctggtacacagcagctcaccatacctcattggaccaatcttcccccccactcagcggaaccagtccaagctataagtatacactacccggagcacaagatgccaaggacgacttccccttgcgtaaaacggagtcctccgtgtcatcctcctcaccaggctccggaccctcgagtcccaacaacggcccaacagggtcggtcaccgagaacgaaaccagcgtgctccctcccacacctcacgctgagcagatggtgtcacagcagaggattctcatccatgaggatagcatgaatctgctcagtttatataccagtccctcgctgccaaacatcaccctgggcctgcccgctgtcccctcccagctgaacgccagcaattctctgaaggagaaacagaaatgtgagacccagaccctgcggcagggagtgcccctgcccggacagtacggtgggagcataccggcatcctcgtcccatccacatgtgacccttgaggggaagcctccgaattcatcccaccaggctttgcttcaacacttactcctgaaagagcagatgcgccagcagaagttgcttgtggccggtggagttccactccacccccagtcacctctggcaacaaaagaacgcatcagtcccggaattagagggacacataagctccccagacaccgcccactcaatagaactcaatccgccccactccctcagtccaccctcgcgcagttggtgattcagcagcagcaccagcagttcttagaaaagcagaaacagtaccagcaacagattcacatgaacaaacttctgtctaagtctattgagcagctgaagcagcccggttctcacttggaggaggcagaagaagaactccagggagatcaggccatgcaagaggatcgcgctccttcttccgggaacagtaccaggtctgactcttctgcctgcgtcgatgataccctcggtcaagtcggcgctgtgaaggtgaaagaagagcccgtggacagcgatgaggacgcgcagattcaggagatggagagtggcgagcaggccgcattcatgcagcaaccatttctggagccaacccacacacgcgcattgagcgtgcgtcaggcgccactcgccgcagtgggcatggatggtctcgagaagcacagactggtctcaaggacacactccagtcccgcagcttctgtgctgccacatcctgccatggatcggcctctgcagccgggaagcgcaaccggtatagcttatgacccattaatgctgaaacatcagtgcgtatgtggaaactctactacccacccagaacatgcaggtcgtatccagtctatctggagcagactacaggagactggactgctgaacaagtgtgagaggattcagggtcgaaaggcatcactggaggaaattcagcttgtgcactctgagcaccatagcctgctgtatggcactaaccctctcgacggccagaaactggatcccagaatcctgctgggagatgattcccaaaagttcttcagctccctcccgtgtggcggattaggagtggattcggatacaatttggaatgaattgcacagcagcggagccgctcgcatggccgttggctgtgtcatcgagctggcctctaaagtcgcctccggagaacttaagaacggttttgccgtagtgcggccaccaggacatcacgcagaagagtccactgccatgggcttttgtttttttaacagcgtggcaatcaccgccaaatatttacgagaccagctgaatatatccaagattttaatcgtcgatttagatgtgcatcacggcaatgggactcaacaagccttctatgccgacccttctattctttacatttctctgcacagatacgacgaaggcaatttcttccccggaagcggtgcacctaatgaagtcggaaccggtctgggagagggctacaatatcaacattgcttggaccggaggacttgaccccccaatgggcgacgtcgagtacttggaagcgtttcggacgatagtaaagcccgtagctaaagagttcgacccagatatggtcctcgtgagcgcaggtttcgatgcactggagggccacacccctccactgggagggtataaggttacagcaaaatgctttgggcatctgaccaaacagttgatgacactggctgacggaagagtagttctggccctggaaggagggcacgacctcaccgctatctgcgacgcaagtgaggcttgtgtcaacgccctgcttggtaatgagctggaacccctagctgaggacatcctgcatcagagtcctaacatgaacgcggtaatttctctccagaaaattatcgaaatccagagcaagtattggaaaagcgttcgcatggtcgctgtgcctaggggatgcgcccttgcgggagcacagctgcaagaggaaactgagactgtgtccgcgcttgccagcttaacagttgacgtcgaacagccctttgcccaggaggattcccggacagctggagagcctatggaagaagagcctgctctgtag

SEQ ID NO: 306373 - DNA, 3078 bp, Artificial Sequence
  derived and/or modified sequence
atgcacagcatgatcagcagcgtggacgtgaagagcgaggtgcccgtgggcctggagcccatcagccccctggacctgagaaccgacctgagaatgatgatgcccgtggtggaccccgtggtgagagagaagcagctgcagcaggagctgctgctgatccagcagcagcagcagatccagaagcagctgctgatcgccgagttccagaagcagcacgagaacctgaccagacagcaccaggcccagctgcaggagcacatcaagctgcagcaggagctgctggccatcaagcagcagcaggagctgctggagaaggagcagaagctggagcagcagagacaggagcaggaggtggagagacacagaagagagcagcagctgccccccctgagaggcaaggacagaggcagagagagagccgtggccagcaccgaggtgaagcagaagctgcaggagttcctgctgagcaagagcgccaccaaggacacccccaccaacggcaagaaccacagcgtgagcagacaccccaagctgtggtacaccgccgcccaccacaccagcctggaccagagcagcccccccctgagcggcaccagccccagctacaagtacaccctgcccggcgcccaggacgccaaggacgacttccccctgagaaagaccgagagcagcgtgagcagcagcagccccggcagcggccccagcagccccaacaacggccccaccggcagcgtgaccgagaacgagaccagcgtgctgccccccaccccccacgccgagcagatggtgagccagcagagaatcctgatccacgaggacagcatgaacctgctgagcctgtacaccagccccagcctgcccaacatcaccctgggcctgcccgccgtgcccagccagctgaacgccagcaacagcctgaaggagaagcagaagtgcgagacccagaccctgagacagggcgtgcccctgcccggccagtacggcggcagcatccccgccagcagcagccacccccacgtgaccctggagggcaagccccccaacagcagccaccaggccctgctgcagcacctgctgctgaaggagcagatgagacagcagaagctgctggtggccggcggcgtgcccctgcacccccagagccccctggccaccaaggagagaatcagccccggcatcagaggcacccacaagctgcccagacacagacccctgaacagaacccagagcgcccccctgccccagagcaccctggcccagctggtgatccagcagcagcaccagcagttcctggagaagcagaagcagtaccagcagcagatccacatgaacaagctgctgagcaagagcatcgagcagctgaagcagcccggcagccacctggaggaggccgaggaggagctgcagggcgaccaggccatgcaggaggacagagcccccagcagcggcaacagcaccagaagcgacagcagcgcctgcgtggacgacaccctgggccaggtgggcgccgtgaaggtgaaggaggagcccgtggacagcgacgaggacgcccagatccaggagatggagagcggcgagcaggccgccttcatgcagcagcccttcctggagcccacccacaccagagccctgagcgtgagacaggcccccctggccgccgtgggcatggacggcctggagaagcacagactggtgagcagaacccacagcagccccgccgccagcgtgctgccccaccccgccatggacagacccctgcagcccggcagcgccaccggcatcgcctacgaccccctgatgctgaagcaccagtgcgtgtgcggcaacagcaccacccaccccgagcacgccggcagaatccagagcatctggagcagactgcaggagaccggcctgctgaacaagtgcgagagaatccagggcagaaaggccagcctggaggagatccagctggtgcacagcgagcaccacagcctgctgtacggcaccaaccccctggacggccagaagctggaccccagaatcctgctgggcgacgacagccagaagttcttcagcagcctgccctgcggcggcctgggcgtggacagcgacaccatctggaacgagctgcacagcagcggcgccgccagaatggccgtgggctgcgtgatcgagctggccagcaaggtggccagcggcgagctgaagaacggcttcgccgtggtgagaccccccggccaccacgccgaggagagcaccgccatgggcttctgcttcttcaacagcgtggccatcaccgccaagtacctgagagaccagctgaacatcagcaagatcctgatcgtggacctggacgtgcaccacggcaacggcacccagcaggccttctacgccgaccccagcatcctgtacatcagcctgcacagatacgacgagggcaacttcttccccggcagcggcgcccccaacgaggtgggcaccggcctgggcgagggctacaacatcaacatcgcctggaccggcggcctggacccccccatgggcgacgtggagtacctggaggccttcagaaccatcgtgaagcccgtggccaaggagttcgaccccgacatggtgctggtgagcgccggcttcgacgccctggagggccacaccccccccctgggcggctacaaggtgaccgccaagtgcttcggccacctgaccaagcagctgatgaccctggccgacggcagagtggtgctggccctggagggcggccacgacctgaccgccatctgcgacgccagcgaggcctgcgtgaacgccctgctgggcaacgagctggagcccctggccgaggacatcctgcaccagagccccaacatgaacgccgtgatcagcctgcagaagatcatcgagatccagagcaagtactggaagagcgtgagaatggtggccgtgcccagaggctgcgccctggccggcgcccagctgcaggaggagaccgagaccgtgagcgccctggccagcctgaccgtggacgtggagcagcccttcgcccaggaggacagcagaaccgccggcgagcccatggaggaggagcccgccctgtag

SEQ ID NO: 306374 - protein, 513 aa, Artificial Sequence
  derived and/or modified sequence
MMMPVVDPVVREKQLQQELLLIQQQQQIQKQLLIAEFQKQHENLTRQHQAQLQEHIKELLAIKQQQELLEKEQKLEQQRQEQEVERHRREQQLPPLRGKDRGRERAVASTEVKQKLQEFLLSKSATKDTPTNGKNHSVSRHPKLWAAHHTSLDQSSPPLSGTSPSYKYTLPGAQDAKDDFPLRKTESSVSSSSPGSGPSSPNNGPTGSVTENETSVLPPTPHAEQMVSQQRILIHEDSMNLLSLYTSPSLPNITLGLPAVPSQLNASNSLKEKQKCETQTLRQGVPLPGQYGGSIPASSSHPHVTLEGKPPNSSHQALLQHLLLKEQMRQQKLLVAGGVPLHPQSPLATKERISPGIRGTHKLPRHRPLNRTQSAPLPQSTLAQLVIQQQHQQFLEKQKQYQQQIHMNKLLSKSIEQLKQPGSHLEEAEEELQGDQAMQEDRAPSSGNSTRSDSSACVDDTLGQVGAVKVKEEPVDSDEDAQIQEMESGEQAAFMQQVIGKDLAPGFVIKVII

SEQ ID NO: 306375 - DNA, 2199 bp, Artificial Sequence
  derived and/or modified sequence
tttatcaatgggtaggtgggagaaccaggggaagactgtcagctacgattttctctagcctcaagaagactgagaccgagccaaactcctggccaacgtgctttgtggattcacagtgtagcttgagaaaaatgtggatgtgaagtcagaagttcctgtgggcctggagcccatctcacctttagacctaaggacagacctcaggatgatgatgcccgtggtggaccctgttgtccgtgagaagcaattgcagcaggaattacttcttatccagcagcagcaacaaatccagaagcagcttctgatagcagagtttcagaaacagcatgagaacttgacacggcagcaccaggctcagcttcaggagcatatcaaggaacttctagccataaaacagcaacaagaactcctagaaaaggagcagaaactggagcagcagaggcaagaacaggaagtagagaggcatcgcagagaacagcagcttcctcctctcagaggcaaagatagaggacgagaaagggcagtggcaagtacagaagtaaagcagaagcttcaagagttcctactgagtaaatcagcaacgaaagacactccaactaatggaaaaaatcattccgtgagccgccatcccaagctctgggctgcccaccacacatcattggatcaaagctctccaccccttagtggaacatctccatcctacaagtacacattaccaggagcacaagatgcaaaggatgatttcccccttcgaaaaactgaatcctcagtcagtagcagttctccaggctctggtcccagttcaccaaacaatgggccaactggaagtgttactgaaaatgagacttcggttttgccccctacccctcatgccgagcaaatggtttcacagcaacgcattctaattcatgaagattccatgaacctgctaagtctttatacctctccttctttgcccaacattaccttggggcttcccgcagtgccatcccagctcaatgcttcgaattcactcaaagaaaagcagaagtgtgagacgcagacgcttaggcaaggtgttcctctgcctgggcagtatggaggcagcatcccggcatcttccagccaccctcatgttactttagagggaaagccacccaacagcagccaccaggctctcctgcagcatttattattgaaagaacaaatgcgacagcaaaagcttcttgtagctggtggagttcccttacatcctcagtctcccttggcaacaaaagagagaatttcacctggcattagaggtacccacaaattgccccgtcacagacccctgaaccgaacccagtctgcacctttgcctcagagcacgttggctcagctggtcattcaacagcaacaccagcaattcttggagaagcagaagcaataccagcagcagatccacatgaacaaactgctttcgaaatctattgaacaactgaagcaaccaggcagtcaccttgaggaagcagaggaagagcttcagggggaccaggcgatgcaggaagacagagcgccctctagtggcaacagcactaggagcgacagcagtgcttgtgtggatgacacactgggacaagttggggctgtgaaggtcaaggaggaaccagtggacagtgatgaagatgctcagatccaggaaatggaatctggggagcaggctgcttttatgcaacaggtaataggcaaagatttagctccaggatttgtaattaaagtcattatctgaacatgaaatgcattgcaggtttggtaaatggatatgatttcctatcagtttatatttctctatgatttgagttcagtgtttaaggattctacctaatgcagatatatgtatatatctatatagaggtctttctatatactgatctctatatagatatcaatgtttcattgaaaatccactggtaaggaaatacctgttatactaaaattatgatacataatatctgagcagttaataggctttaaatttatcccaaagcctgctacaccaattacttctaaagaaaacaaattcactgttattttgagtttatgtgttgagatcagtgactgctggatagtctcccagtctgatcaatgaagcattcgattagtttttgattttttgcaacatctagaatttaattttcacatcactgtacataatgtatcatactatagtcttgaacactg

SEQ ID NO: 306376 - DNA, 1335 bp, Artificial Sequence
  derived and/or modified sequence
atgggctctagcagattgagggtgttcgatccccacctcgagagaaaggacagcgcagccgcacttagcgatcgggaactcccgctgcccactttcgacgtgccctacttcaagtacattgatgaggaagacgaggatgacgaatggtctagccgttcccagtcttccacagaagacgattcagtcgactcacttttatccgaccgatatgtagtagtgagtgggaccccagaaaaaatcctggagcacctgttgaatgacctgcatctggaggaggtgcaggataaggaaacagagactctgctcgacgacttcctcttaacttatactgtcttcatgacaacagatgatctgtgccaggcacttctgaggatatactccgcaaagaaatatcagggtaaggaagagaactccgatgtcccacgtcgcaaaaggaaggttctgcatctcgtatcgcagtggatcgctctgtacaaagattggttacctgaagatgaacactccaagatgtttttgaagaccatttatcgtaatgtcctggatgatgtatacgaataccctatcctagaaaaagagctgaaggaatttcagaaaatcctcggaatgcacaggagacataccgtggacgagtactcccctcaaaaaaagaacaaagccctttttcatcagttcagcctgaaagaaaattggctgcaacacagggggacagtgacagagacggaggagatattctgccatgtgtatattacggaacattcatatgtgtctgtcaaagctaaagtgagctccatcgcccaggagattctactgtgctcccagctggggaagcgagtccagctcgtaaaaaagttcatcaagattgcggcacattgtaaggcacagagaaacttgaattccttctttgctatcgtcatggggctcaacactgccagtgttagtaggcttagccagacatgggaaaagatccctggcaagtttaagaaactcttcagtgagctggaatcactaactgacccatcactgaaccacaaggcctatcgtgatgcgtttaaaaaaatgaagcccccaaagattccatttatgcccctgttgttgaaagacgtgacctttatccatgagggcaataagacctttctggataacctggtgaattttgagaagctgcacatgatagccgatactgtgaggaccctgcgtcattgccgcacgaaccagtttggagacctgtcaccaaaagaacaccaggaactgaagagttacgtcaaccacttgtacgtgattgatagtcagcaggctttgttcgaactgtctcatcggattgaaccacgggtgtag

SEQ ID NO: 306377 - DNA, 1335 bp, Artificial Sequence
  derived and/or modified sequence
atgggcagcagccggctgcgggtgtttgacccccacctggagaggaaggacagcgctgctgccctgagtgaccgggagctgcccctgcccacctttgatgtgccctacttcaagtacattgatgaagaagatgaagatgatgagtggagcagccgcagccagagcagcacagaagatgattctgtggacagcctgctgagtgaccgctacgtggtggtgtctggcaccccagagaagatcctggagcacctgctgaatgacctgcacctggaggaggtgcaggacaaggagacagagaccctgctggatgacttcctgctgacctacaccgtcttcatgaccacagatgacctgtgccaggccctgctgcgcatctacagcgccaagaagtaccagggcaaggaggagaacagtgatgtgcccaggaggaagaggaaggtgctgcacctggtgtcccagtggatcgccctgtacaaggactggctgcctgaagatgagcacagcaagatgttcctgaagaccatctacagaaatgtgctggatgatgtgtatgagtaccccatcctggagaaggagctgaaggagttccagaagatcctgggcatgcaccggcggcacacagtggatgagtacagcccccagaagaagaacaaggccctcttccaccagttcagcctgaaggagaactggctgcagcaccggggcaccgtgacagaaacagaggagatcttctgccacgtgtacatcacagagcacagctatgtgtctgtgaaggccaaggtgagcagcatcgcccaggagatcctgctgtgcagccagctgggcaagagggtgcagctggtgaagaagttcatcaagattgctgcccactgcaaggcccagaggaacctgaacagcttctttgccatcgtgatgggcctgaacacagcctctgtgtcccggctgagccagacctgggagaagatccctgggaagttcaagaagctgttcagcgagctggagagcctgacagaccccagcctgaaccacaaggcctacagagatgccttcaagaagatgaagccacccaagatccccttcatgcccctgctgctgaaggatgtgaccttcatccacgagggcaacaagaccttcctggacaacctggtgaactttgagaagctgcacatgattgctgacacagtgaggaccctgcggcactgcaggaccaaccagtttggagacctgagccccaaggagcaccaggagctgaagagctatgtgaaccacctgtatgtgattgacagccagcaggccctgtttgagctgagccaccgcatcgagccccgggtgtag

SEQ ID NO: 306378 - DNA, 5450 bp, Artificial Sequence
  derived and/or modified sequence
atgggcagctcccggctgagggtctttgaccctcatttggagaggaaagattccgccgcggcgctctcagaccgagagctgcccttgcctaccttcgatgtgccttatttcaaatacatcgacgaggaggatgaggacgatgaatggagcagccgctcgcagtcttccaccgaggatgactcagtggactctctgctctctgacagatatgtggtggtgtccgggaccccggagaagattttggagcaccttttgaatgacttgcacctggaagaagtccaggacaaagaaacagagaccctcctggatgacttccttctcacgtacactgtcttcatgacaactgatgacttgtgccaggctctgttaagaatctattctgctaagaagtatcaaggcaaagaggaaaactcagacgttccgcgtaggaaacgtaaagtcttgcatcttgtttcccagtggattgctctgtacaaagactggttacctgaagatgaacattcaaaaatgtttttaaagaccatatataggaatgtactggatgatgtttatgaatatccaatacttgaaaaagaattgaaagaatttcaaaagatacttggaatgcaccgtcgtcacactgtagatgaatattcaccacaaaaaaagaataaagcccttttccaccaattcagtcttaaggagaactggctccagcatagaggaactgtgactgaaacggaggaaattttctgccacgtgtatataacagagcactcctatgtcagtgtgaaggcaaaagtttccagtatagcccaagagattctgctctgcagccagctgggcaagcgagtgcagctggtgaaaaaattcatcaaaattgcggctcactgcaaagcccagagaaacctgaattctttctttgccattgtgatgggtctcaacactgcttctgtcagtcgactgtcgcagacctgggagaaaatccctgggaagtttaagaaacttttctctgaacttgaaagtttaacagatccttccctaaatcacaaagcctacagagatgcattcaaaaagatgaagccaccaaaaatccctttcatgcccttattgcttaaagatgtaacatttattcatgaaggaaataaaacttttttggataatcttgtcaattttgaaaagctgcatatgatcgcagacactgtccgaaccctgagacactgcaggactaaccagtttggtgacctgtctccaaaagagcatcaagagttaaagtcctatgttaatcacctgtatgtcattgacagccagcaggctctgtttgagctctcacacaggatcgagcctcgggtgtgagccccactgcctcacctcccctgtatctgcagcactttgagctacgggaatgtctatgccaagcacgttgctttcctgtgagaaaagaagttgctgagttttatcagtataacccaagacattcacaggaaagccagccaaagcgtgttcaggaagtgatgtcagccaccagagagggggagaggtttctccatgctactctcgggacaagaaggcagaaggagagtcagaagcattcttgagatggagaaggctggtttcttatgatcacattgttgatccagtccagttttcaatatgagatgtgccagcatcaagacaagacaacgtcttgacatgcaatgaccaaatatttcattaagagcgtgcatgaaacaggaaggagtttttactttgcctagttttagattactgtccataagctgtcaaagaagtcattcttttgaacacctgatgacagagacagcatctctagatctccagggaggagaggtttctgttgatacaacctgtgacatcaccaaaagccacttgtgtctagggagttagtgaggactgcagctagcatccatgctctgatgggcagatgaacaatgtcaaggtgtgcatcactttgcaccacaatcaactattgacacatgcttgcaggtgaaattagtttctgtacaactgatttgcagctataggcaaggtagatgaagttgctttgccagtaaggaaaaatagtaatctttaagaaattgactcattgtttaatttctggggattttctttatacttctaagcaggctcttatcttttattggacataatatgattttgaaaaagcacagtgcctgacacattgcaaacactcaccaactgcttgctgaggtgacagagtcacaaaagtctgcattcttgtgcctgatgatgcattttgcgtacctcatacaggctccttgcccacactatggaatgacagcagccagtgcagggaggttaagtgacatttaatgagtgaagcacttagcactctctaggtaataagatagtggtaattactagtgttttggcaaatgaaaaatgccctgaaatagccaaatgtctgattaatgttggcaacttagaagtcctataatccaactaccagccaaagcagggagcctttctataatttgcctttttttttttttttttcaaaatctgagtcttctaaaatcttattattcccatttttaccaattgaggctcctgtagcaaataagacctcttgatattttcaaggactggttagaggatttctttcaaccttcacatgaacaaaacagcctatgggtcaaaataatgaaatccacccctgcctgctagatacttgtcaccttgctaaaatgcaagggcctggtccattcattttccaaatgcaggagtcttggtgcacttctcactcttcctgcctgttcatctctttcatgcccacacagacctgtttcctttttgtctcatcaacgcctcattcatcctcattactgaggcgtgtccaatgctttttgacatctttatagcagtgctgtttcctgggctcaggaaccacactgagcttgagatactgctggaaggaaccatgtggagagaaggtttgggagaactttgagagagacttagtttggcccagcatgtaaaacttcagtcctgaacatttatagggttttatagaagggcatcctccagggctggtccattcagagaaatgctgcatgctgccgtcatggaatgtggcccacaggacaccagagccgtgagaaccggagagcagacttccctcacggctgggctgagcaaaccctccaaagccctcctcacgcagttactaacaatagcatgggcttacagcacaagcacgtgttctcacctttttcctatgccctggactaaggtttggccagtgtaatcatataaggccatcctgacattgtttctgtgtttcaaaatttggatttttatttacattagaactacattgctcctagtagaacattacctttaggggactaattttccatggagaactatttcagcatattgcatgctgctcagaccccaagtcagatatgcccaccaagccagatgaagctacacaaatgtggtatttaaatgcattttgtacagtgacttcagagtatctcacatgacatgggtgtaaactggctggggagaaaatgatgcttgttcacctcttcctccagccgtggttaggtggtcctaggggtagcagagggaagggaggattttgtgcagtcaagatttgcttttccatccttgtcttctgaatgtctaaaatctctgcatctttctgaagtttaacaactgtctccagaggtttgccaggcagcagctctcagaagtttccaaagctttgcagaatcttagatctggaattaaagaattcaagcccgaattgtgagaaccagatattactcaacagaaagctctttctaaggaatctgagctgttcactggtggacagtggtggggcttgagtgctccttgttaataggatgggccatgcaccctctctggatattcaccaaggcctcttcagaatagggtttgttctggctagaagcgtggtctagaagatggctaagctctttgccagctctcatttggagttttattattgcataaaatcttcgctcactctgcaaatcttacgtaatctggcaccttcggcaccaggtggtgcaggggcacttctaagtgggctctttttgttacagcacaactctcagacagtcctgtgggtctttggattcgtcagcattccagcaaactagccctgcttagaagttagcacaagacagcagaatgcaggaccccgtaggcaaaatcacaaccttgctattaaaaaaaattttgttttacatacacatttgcaggtgttccctagagtgtggtgttttgaatttgctctttgtcatctgtataattgccaaatgattatagtgatacacatgacctgcattcacttttttctagtttccttaattatgtttagaataaattcatttccctagaccgagaaccacaaacaggtagtgtggagcatacaccgaatttagaagcatgtggataaggtcagtgctcacactgcctagtccacagggagaggatgctgcatgaatatatacttgcctctgagtggaggagaaatcgtggcatgaaagagagagtaccagtgatgacttcttatccctggagctgggctttcactgctacccatatcccagccctgcgagtctgttctagccagcacagacaccgcagatccggaactgaatgttcctaaatggcgcagccaatccaggcttttcagaaactgggcaaaaacattaaaatggggacgatcgggtcttccgcagtggtccaacacaggatttcttttaaatgtttcaaaaacatgtccttaaaatttcagcctgcttcttagcgagtgggccagttttgcttaaaactggtgggggggcgggggggaagtttttaaaaattgccaaaaagttagatgcaaatgtattactgtataaagcaaagctgtatatactaaacattttttagcagagtaatatttatttgcatagtctatttattgtattcgtatcacactgttattaaatactgggatgaaatcagtgacctgaagcaagaaatcttgccttttaatgtatcattaattagggctgctgtgatattgtcagcttgcattaacaattagaagatagagaacccgccatcagggtgtctacctaacttctcagggactacacttggtagttttccaccatttaaagaactggtaaatatgaaacatttgttgagttaccagaattgccattaacagtgttttctttcccatattccatgctttctgcctctgtgtatatatataatatatatgtatatgactgtgctgtgtatttatcgaagctagtaagcaataatttatatgtaaaaatggccaagcaatataaggttaaaacttatataagtaacccttaccttatcttgtattttcaatttttttttaaaactgcttttccaaatatgagactatgttaaagacactattcatgcctctt

SEQ ID NO: 306379 - DNA, 6095 bp, Artificial Sequence
  derived and/or modified sequence
agtttccctgcagccacagaggcacgcgctcccgtttccttttccctgcctgccttcccttcccttgctccatctcactcgctctctgcctcctctaccctccctccctctcttttctctccgcctctccagcgttctagctgactgcagagctcttagcagccagatggactcagttcccagtgaaaggacagggatggcaagatcttttagcatttaggggatgcctttgttagtaaccgttcacaatgggcagctcccggctgagggtctttgaccctcatttggagaggaaagattccgccgcggcgctctcagaccgagagctgcccttgcctaccttcgatgtgccttatttcaaatacatcgacgaggaggatgaggacgatgaatggagcagccgctcgcagtcttccaccgaggatgactcagtggactctctgctctctgacagatatgtggtggtgtccgggaccccggagaagattttggagcaccttttgaatgacttgcacctggaagaagtccaggacaaagaaacagagaccctcctggatgacttccttctcacgtacactgtcttcatgacaactgatgacttgtgccaggctctgttaaggcactattctgctaagaagtatcaaggcaaagaggaaaactcagacgttccgcgtaggaaacgtaaagtcttgcatcttgtttcccagtggattgctctgtacaaagactggttacctgaagatgaacattcaaaaatgtttttaaagaccatatataggaatgtactggatgatgtttatgaatatccaatacttgaaaaagaattgaaagaatttcaaaagatacttggaatgcaccgtcgtcacactgtagatgaatattcaccacaaaaaaagaataaagcccttttccaccaattcagtcttaaggagaactggctccagcatagaggaactgtgactgaaacggaggaaattttctgccacgtgtatataacagagcactcctatgtcagtgtgaaggcaaaagtttccagtatagcccaagagatcctaaaagtcgtggcagaaaagatccagtatgcagaagaggatctggctctggtggccatcacattctctggggaaaagcatgaacttcagccaaatgacttagtcatctccaaatccctcgaggcatctggtcgaatatatgtctaccggaaagacctggcggacactttgaacccatttgcagaaaatgaggaatcacagcaaaggtcgatgaggattttgggaatgaacacttgggatcttgctctggaattaatgaattttgattggagtctattcaattcaattcacgagcaagagctgatctacttcacgttcagcagacagggaagtggggaacacactgcaaatctcagccttctgctccagagatgcaatgaggtccagctttgggtggccacggagattctgctctgcagccagctgggcaagcgagtgcagctggtgaaaaaattcatcaaaattgcggctcactgcaaagcccagagaaacctgaattctttctttgccattgtgatgggtctcaacactgcttctgtcagtcgactgtcgcagacctgggagaaaatccctgggaagtttaagaaacttttctctgaacttgaaagtttaacagatccttccctaaatcacaaagcctacagagatgcattcaaaaagatgaagccaccaaaaatccctttcatgcccttattgcttaaagatgtaacatttattcatgaaggaaataaaacttttttggataatcttgtcaattttgaaaagctgcatatgatcgcagacactgtccgaaccctgagacactgcaggactaaccagtttggtgacctgtctccaaaagagcatcaagagttaaagtcctatgttaatcacctgtatgtcattgacagccagcaggctctgtttgagctctcacacaggatcgagcctcgggtgtgagccccactgcctcacctcccctgtatctgcagcactttgagctacgggaatgtctatgccaagcacgttgctttcctgtgagaaaagaagttgctgagttttatcagtataacccaagacattcacaggaaagccagccaaagcgtgttcaggaagtgatgtcagccaccagagagggggagaggtttctccatgctactctcgggacaagaaggcagaaggagagtcagaagcattcttgagatggagaaggctggtttcttatgatcacattgttgatccagtccagttttcaatatgagatgtgccagcatcaagacaagacaacgtcttgacatgcaatgaccaaatatttcattaagagcgtgcatgaaacaggaaggagtttttactttgcctagttttagattactgtccataagctgtcaaagaagtcattcttttgaacacctgatgacagagacagcatctctagatctccagggaggagaggtttctgttgatacaacctgtgacatcaccaaaagccacttgtgtctagggagttagtgaggactgcagctagcatccatgctctgatgggcagatgaacaatgtcaaggtgtgcatcactttgcaccacaatcaactattgacacatgcttgcaggtgaaattagtttctgtacaactgatttgcagctataggcaaggtagatgaagttgctttgccagtaaggaaaaatagtaatctttaagaaattgactcattgtttaatttctggggattttctttatacttctaagcaggctcttatcttttattggacataatatgattttgaaaaagcacagtgcctgacacattgcaaacactcaccaactgcttgctgaggtgacagagtcacaaaagtctgcattcttgtgcctgatgatgcattttgcgtacctcatacaggctccttgcccacactatggaatgacagcagccagtgcagggaggttaagtgacatttaatgagtgaagcacttagcactctctaggtaataagatagtggtaattactagtgttttggcaaatgaaaaatgccctgaaatagccaaatgtctgattaatgttggcaacttagaagtcctataatccaactaccagccaaagcagggagcctttctataatttgcctttttttttttttttttcaaaatctgagtcttctaaaatcttattattcccatttttaccaattgaggctcctgtagcaaataagacctcttgatattttcaaggactggttagaggatttctttcaaccttcacatgaacaaaacagcctatgggtcaaaataatgaaatccacccctgcctgctagatacttgtcaccttgctaaaatgcaagggcctggtccattcattttccaaatgcaggagtcttggtgcacttctcactcttcctgcctgttcatctctttcatgcccacacagacctgtttcctttttgtctcatcaacgcctcattcatcctcattactgaggcgtgtccaatgctttttgacatctttatagcagtgctgtttcctgggctcaggaaccacactgagcttgagatactgctggaaggaaccatgtggagagaaggtttgggagaactttgagagagacttagtttggcccagcatgtaaaacttcagtcctgaacatttatagggttttatagaagggcatcctccagggctggtccattcagagaaatgctgcatgctgccgtcatggaatgtggcccacaggacaccagagccgtgagaaccggagagcagacttccctcacggctgggctgagcaaaccctccaaagccctcctcacgcagttactaacaatagcatgggcttacagcacaagcacgtgttctcacctttttcctatgccctggactaaggtttggccagtgtaatcatataaggccatcctgacattgtttctgtgtttcaaaatttggatttttatttacattagaactacattgctcctagtagaacattacctttaggggactaattttccatggagaactatttcagcatattgcatgctgctcagaccccaagtcagatatgcccaccaagccagatgaagctacacaaatgtggtatttaaatgcattttgtacagtgacttcagagtatctcacatgacatgggtgtaaactggctggggagaaaatgatgcttgttcacctcttcctccagccgtggttaggtggtcctaggggtagcagagggaagggaggattttgtgcagtcaagatttgcttttccatccttgtcttctgaatgtctaaaatctctgcatctttctgaagtttaacaactgtctccagaggtttgccaggcagcagctctcagaagtttccaaagctttgcagaatcttagatctggaattaaagaattcaagcccgaattgtgagaaccagatattactcaacagaaagctctttctaaggaatctgagctgttcactggtggacagtggtggggcttgagtgctccttgttaataggatgggccatgcaccctctctggatattcaccaaggcctcttcagaatagggtttgttctggctagaagcgtggtctagaagatggctaagctctttgccagctctcatttggagttttattattgcataaaatcttcgctcactctgcaaatcttacgtaatctggcaccttcggcaccaggtggtgcaggggcacttctaagtgggctctttttgttacagcacaactctcagacagtcctgtgggtctttggattcgtcagcattccagcaaactagccctgcttagaagttagcacaagacagcagaatgcaggaccccgtaggcaaaatcacaaccttgctattaaaaaaaattttgttttacatacacatttgcaggtgttccctagagtgtggtgttttgaatttgctctttgtcatctgtataattgccaaatgattatagtgatacacatgacctgcattcacttttttctagtttccttaattatgtttagaataaattcatttccctagaccgagaaccacaaacaggtagtgtggagcatacaccgaatttagaagcatgtggataaggtcagtgctcacactgcctagtccacagggagaggatgctgcatgaatatatacttgcctctgagtggaggagaaatcgtggcatgaaagagagagtaccagtgatgacttcttatccctggagctgggctttcactgctacccatatcccagccctgcgagtctgttctagccagcacagacaccgcagatccggaactgaatgttcctaaatggcgcagccaatccaggcttttcagaaactgggcaaaaacattaaaatggggacgatcgggtcttccgcagtggtccaacacaggatttcttttaaatgtttcaaaaacatgtccttaaaatttcagcctgcttcttagcgagtgggccagttttgcttaaaactggtgggggggcgggggggaagtttttaaaaattgccaaaaagttagatgcaaatgtattactgtataaagcaaagctgtatatactaaacattttttagcagagtaatatttatttgcatagtctatttattgtattcgtatcacactgttattaaatactgggatgaaatcagtgacctgaagcaagaaatcttgccttttaatgtatcattaattagggctgctgtgatattgtcagcttgcattaacaattagaagatagagaacccgccatcagggtgtctacctaacttctcagggactacacttggtagttttccaccatttaaagaactggtaaatatgaaacatttgttgagttaccagaattgccattaacagtgttttctttcccatattccatgctttctgcctctgtgtatatatataatatatatgtatatgactgtgctgtgtatttatcgaagctagtaagcaataatttatatgtaaaaatggccaagcaatataaggttaaaacttatataagtaacccttaccttatcttgtattttcaatttttttttaaaactgcttttccaaatatgagactatgttaaagacactat

SEQ ID NO: 306380 - DNA, 5864 bp, Artificial Sequence
  derived and/or modified sequence
atgggcagctcccggctgagggtctttgaccctcatttggagaggaaagattccgccgcggcgctctcagaccgagagctgcccttgcctaccttcgatgtgccttatttcaaatacatcgacgaggaggatgaggacgatgaatggagcagccgctcgcagtcttccaccgaggatgactcagtggactctctgctctctgacagatatgtggtggtgtccgggaccccggagaagattttggagcaccttttgaatgacttgcacctggaagaagtccaggacaaagaaacagagaccctcctggatgacttccttctcacgtacactgtcttcatgacaactgatgacttgtgccaggctctgttaagaatctattctgctaagaagtatcaaggcaaagaggaaaactcagacgttccgcgtaggaaacgtaaagtcttgcatcttgtttcccagtggattgctctgtacaaagactggttacctgaagatgaacattcaaaaatgtttttaaagaccatatataggaatgtactggatgatgtttatgaatatccaatacttgaaaaagaattgaaagaatttcaaaagatacttggaatgcaccgtcgtcacactgtagatgaatattcaccacaaaaaaagaataaagcccttttccaccaattcagtcttaaggagaactggctccagcatagaggaactgtgactgaaacggaggaaattttctgccacgtgtatataacagagcactcctatgtcagtgtgaaggcaaaagtttccagtatagcccaagagatcctaaaagtcgtggcagaaaagatccagtatgcagaagaggatctggctctggtggccatcacattctctggggataaagaaaagcatgaacttcagccaaatgacttagtcatctccaaatccctcgaggcatctggtcgaatatatgtctaccggaaagacctggcggacactttgaacccatttgcagaaaatgaggaatcacagcaaaggtcgatgaggattttgggaatgaacacttgggatcttgctctggaattaatgaattttgattggagtctattcaattcaattcacgagcaagagctgatctacttcacgttcagcagacagggaagtggggaacacactgcaaatctcagccttctgctccagagatgcaatgaggtccagctttgggtggccacggagattctgctctgcagccagctgggcaagcgagtgcagctggtgaaaaaattcatcaaaattgcggctcactgcaaagcccagagaaacctgaattctttctttgccattgtgatgggtctcaacactgcttctgtcagtcgactgtcgcagacctgggagaaaatccctgggaagtttaagaaacttttctctgaacttgaaagtttaacagatccttccctaaatcacaaagcctacagagatgcattcaaaaagatgaagccaccaaaaatccctttcatgcccttattgcttaaagatgtaacatttattcatgaaggaaataaaacttttttggataatcttgtcaattttgaaaagctgcatatgatcgcagacactgtccgaaccctgagacactgcaggactaaccagtttggtgacctgtctccaaaagagcatcaagagttaaagtcctatgttaatcacctgtatgtcattgacagccagcaggctctgtttgagctctcacacaggatcgagcctcgggtgtgagccccactgcctcacctcccctgtatctgcagcactttgagctacgggaatgtctatgccaagcacgttgctttcctgtgagaaaagaagttgctgagttttatcagtataacccaagacattcacaggaaagccagccaaagcgtgttcaggaagtgatgtcagccaccagagagggggagaggtttctccatgctactctcgggacaagaaggcagaaggagagtcagaagcattcttgagatggagaaggctggtttcttatgatcacattgttgatccagtccagttttcaatatgagatgtgccagcatcaagacaagacaacgtcttgacatgcaatgaccaaatatttcattaagagcgtgcatgaaacaggaaggagtttttactttgcctagttttagattactgtccataagctgtcaaagaagtcattcttttgaacacctgatgacagagacagcatctctagatctccagggaggagaggtttctgttgatacaacctgtgacatcaccaaaagccacttgtgtctagggagttagtgaggactgcagctagcatccatgctctgatgggcagatgaacaatgtcaaggtgtgcatcactttgcaccacaatcaactattgacacatgcttgcaggtgaaattagtttctgtacaactgatttgcagctataggcaaggtagatgaagttgctttgccagtaaggaaaaatagtaatctttaagaaattgactcattgtttaatttctggggattttctttatacttctaagcaggctcttatcttttattggacataatatgattttgaaaaagcacagtgcctgacacattgcaaacactcaccaactgcttgctgaggtgacagagtcacaaaagtctgcattcttgtgcctgatgatgcattttgcgtacctcatacaggctccttgcccacactatggaatgacagcagccagtgcagggaggttaagtgacatttaatgagtgaagcacttagcactctctaggtaataagatagtggtaattactagtgttttggcaaatgaaaaatgccctgaaatagccaaatgtctgattaatgttggcaacttagaagtcctataatccaactaccagccaaagcagggagcctttctataatttgcctttttttttttttttttcaaaatctgagtcttctaaaatcttattattcccatttttaccaattgaggctcctgtagcaaataagacctcttgatattttcaaggactggttagaggatttctttcaaccttcacatgaacaaaacagcctatgggtcaaaataatgaaatccacccctgcctgctagatacttgtcaccttgctaaaatgcaagggcctggtccattcattttccaaatgcaggagtcttggtgcacttctcactcttcctgcctgttcatctctttcatgcccacacagacctgtttcctttttgtctcatcaacgcctcattcatcctcattactgaggcgtgtccaatgctttttgacatctttatagcagtgctgtttcctgggctcaggaaccacactgagcttgagatactgctggaaggaaccatgtggagagaaggtttgggagaactttgagagagacttagtttggcccagcatgtaaaacttcagtcctgaacatttatagggttttatagaagggcatcctccagggctggtccattcagagaaatgctgcatgctgccgtcatggaatgtggcccacaggacaccagagccgtgagaaccggagagcagacttccctcacggctgggctgagcaaaccctccaaagccctcctcacgcagttactaacaatagcatgggcttacagcacaagcacgtgttctcacctttttcctatgccctggactaaggtttggccagtgtaatcatataaggccatcctgacattgtttctgtgtttcaaaatttggatttttatttacattagaactacattgctcctagtagaacattacctttaggggactaattttccatggagaactatttcagcatattgcatgctgctcagaccccaagtcagatatgcccaccaagccagatgaagctacacaaatgtggtatttaaatgcattttgtacagtgacttcagagtatctcacatgacatgggtgtaaactggctggggagaaaatgatgcttgttcacctcttcctccagccgtggttaggtggtcctaggggtagcagagggaagggaggattttgtgcagtcaagatttgcttttccatccttgtcttctgaatgtctaaaatctctgcatctttctgaagtttaacaactgtctccagaggtttgccaggcagcagctctcagaagtttccaaagctttgcagaatcttagatctggaattaaagaattcaagcccgaattgtgagaaccagatattactcaacagaaagctctttctaaggaatctgagctgttcactggtggacagtggtggggcttgagtgctccttgttaataggatgggccatgcaccctctctggatattcaccaaggcctcttcagaatagggtttgttctggctagaagcgtggtctagaagatggctaagctctttgccagctctcatttggagttttattattgcataaaatcttcgctcactctgcaaatcttacgtaatctggcaccttcggcaccaggtggtgcaggggcacttctaagtgggctctttttgttacagcacaactctcagacagtcctgtgggtctttggattcgtcagcattccagcaaactagccctgcttagaagttagcacaagacagcagaatgcaggaccccgtaggcaaaatcacaaccttgctattaaaaaaaattttgttttacatacacatttgcaggtgttccctagagtgtggtgttttgaatttgctctttgtcatctgtataattgccaaatgattatagtgatacacatgacctgcattcacttttttctagtttccttaattatgtttagaataaattcatttccctagaccgagaaccacaaacaggtagtgtggagcatacaccgaatttagaagcatgtggataaggtcagtgctcacactgcctagtccacagggagaggatgctgcatgaatatatacttgcctctgagtggaggagaaatcgtggcatgaaagagagagtaccagtgatgacttcttatccctggagctgggctttcactgctacccatatcccagccctgcgagtctgttctagccagcacagacaccgcagatccggaactgaatgttcctaaatggcgcagccaatccaggcttttcagaaactgggcaaaaacattaaaatggggacgatcgggtcttccgcagtggtccaacacaggatttcttttaaatgtttcaaaaacatgtccttaaaatttcagcctgcttcttagcgagtgggccagttttgcttaaaactggtgggggggcgggggggaagtttttaaaaattgccaaaaagttagatgcaaatgtattactgtataaagcaaagctgtatatactaaacattttttagcagagtaatatttatttgcatagtctatttattgtattcgtatcacactgttattaaatactgggatgaaatcagtgacctgaagcaagaaatcttgccttttaatgtatcattaattagggctgctgtgatattgtcagcttgcattaacaattagaagatagagaacccgccatcagggtgtctacctaacttctcagggactacacttggtagttttccaccatttaaagaactggtaaatatgaaacatttgttgagttaccagaattgccattaacagtgttttctttcccatattccatgctttctgcctctgtgtatatatataatatatatgtatatgactgtgctgtgtatttatcgaagctagtaagcaataatttatatgtaaaaatggccaagcaatataaggttaaaacttatataagtaacccttaccttatcttgtattttcaatttttttttaaaactgcttttccaaatatgagactatgttaaagacactattcatgcctctt

SEQ ID NO: 306381 - DNA, 1335 bp, Artificial Sequence
  derived and/or modified sequence
atgggcagcagccggctgcgggtgttcgacccccacctggagcggaaagactctgccgcagcactgtcagatcgcgagctgcccctcccaacgtttgatgtcccctattttaaatatattgacgaagaggatgaggatgacgaatggtcttcccgatcgcaatctagcactgaggatgatagcgtggacagcctgttatctgatcgttatgtggttgtctcaggcaccccagagaagattctcgaacaccttctgaatgatctgcacctggaagaagtccaggataaagagacagagaccctgctggatgactttctgctgacgtacaccgtcttcatgacaacagatgatctgtgtcaggccctacttcggatttactccgcgaaaaaataccaagggaaggaggagaatagcgacgtgcccaggagaaagaggaaagtgctacacctagtgtcccagtggattgcattgtataaagattggctgccagaagacgagcacagcaagatgttcctgaagacaatctatcgcaacgtacttgacgatgtctatgagtaccccattcttgaaaaggagctaaaggagtttcaaaaaatcctcgggatgcatcgtcggcataccgtagatgagtatagcccccaaaaaaaaaacaaggctctgtttcaccagttcagcctgaaggaaaactggctgcaacatcgaggaaccgtgactgagactgaggaaatattttgtcacgtatacatcaccgaacacagctatgtgtcggtgaaagcaaaggtgagctctattgctcaggaaattctgctgtgcagtcagttggggaaaagagtccagctagtgaagaaatttatcaagatcgctgcgcattgcaaggctcaaagaaacttgaactcgttcttcgccatcgtaatggggctaaacactgcatccgttagccgcctgtcccaaacttgggagaagatcccgggtaaatttaagaagctatttagcgagctggaaagcctaaccgaccccagcctcaaccataaagcctatagagacgcgttcaaaaaaatgaagccgccaaagattcccttcatgccattgctcctgaaagatgtgacatttattcacgagggtaataaaacatttctggacaatctggtgaattttgagaagcttcacatgatcgcagatactgttagaacccttagacactgccgtaccaaccagttcggagatttgagccctaaagaacaccaagagctgaagagctatgtcaatcacttgtacgttatagactctcagcaggccctcttcgagctgagtcataggattgagccccgagtctag

SEQ ID NO: 306382 - DNA, 1335 bp, Artificial Sequence
  derived and/or modified sequence
atggggagctccagacttagagttttcgatccacacttagaacgcaaggattcagcagccgcactgagcgatagggagttgccactgcctacattcgatgttccatatttcaaatatatcgatgaggaggatgaagacgacgaatggtcctcacgttcacagtcaagcactgaggacgattccgttgattccctgctcagcgatcgatacgtggtggtttctggcactcccgagaagattctggagcatttgctcaatgatctgcacctggaggaagtccaagacaaggaaacagaaacgttattagatgacttccttctgacttacacagtgtttatgacaaccgatgacctctgccaggcactgcttcggatctattcagctaagaaataccagggcaaagaagaaaatagcgatgttccacgacggaagcgcaaggtgctgcatcttgtgagccagtggattgccctatacaaagactggcttccagaggatgaacacagcaagatgtttctcaagactatttatagaaatgtgcttgacgatgtgtatgaatatccgatcctggaaaaggagctaaaagagtttcaaaaaatcctggggatgcaccgacgacatacagtggatgaatactcgccacagaagaaaaacaaagctttgttccaccagttttctctgaaggagaactggctccagcatagggggacggtgactgagacagaggaaatattttgccatgtctacatcaccgaacacagttatgtctccgtgaaagccaaggtgtcgagcattgctcaggagattctgctgtgttcacaactcgggaagcgcgtccagctggtgaagaagtttataaaaatagccgcacactgtaaggcgcagcgaaatctgaattctttctttgctatcgtgatggggttgaacacggctagcgtttcgaggctgtcgcagacgtgggagaagattcccggaaagtttaagaagctgttttccgagctggagtctttaaccgatccaagcctaaatcacaaggcttaccgggatgcatttaagaagatgaaacccccaaaaatcccttttatgcccttgctattaaaagacgtgacatttatccacgaaggcaacaagacattcttagataatctggttaatttcgaaaagcttcatatgattgccgataccgtgagaaccctgagacactgccggacaaaccagtttggcgatttatcacctaaagagcatcaggagctgaaatcttacgtgaatcacctgtatgtcattgatagtcagcaagcgctatttgagctgagccaccgaattgagccgcgtgtctag

SEQ ID NO: 306383 - DNA, 1335 bp, Artificial Sequence
  derived and/or modified sequence
atgggcagcagcagactgagagtgttcgacccccacctggagagaaaggacagcgccgccgccctgagcgacagagagctgcccctgcccaccttcgacgtgccctacttcaagtacatcgacgaggaggacgaggacgacgagtggagcagcagaagccagagcagcaccgaggacgacagcgtggacagcctgctgagcgacagatacgtggtggtgagcggcacccccgagaagatcctggagcacctgctgaacgacctgcacctggaggaggtgcaggacaaggagaccgagaccctgctggacgacttcctgctgacctacaccgtgttcatgaccaccgacgacctgtgccaggccctgctgagaatctacagcgccaagaagtaccagggcaaggaggagaacagcgacgtgcccagaagaaagagaaaggtgctgcacctggtgagccagtggatcgccctgtacaaggactggctgcccgaggacgagcacagcaagatgttcctgaagaccatctacagaaacgtgctggacgacgtgtacgagtaccccatcctggagaaggagctgaaggagttccagaagatcctgggcatgcacagaagacacaccgtggacgagtacagcccccagaagaagaacaaggccctgttccaccagttcagcctgaaggagaactggctgcagcacagaggcaccgtgaccgagaccgaggagatcttctgccacgtgtacatcaccgagcacagctacgtgagcgtgaaggccaaggtgagcagcatcgcccaggagatcctgctgtgcagccagctgggcaagagagtgcagctggtgaagaagttcatcaagatcgccgcccactgcaaggcccagagaaacctgaacagcttcttcgccatcgtgatgggcctgaacaccgccagcgtgagcagactgagccagacctgggagaagatccccggcaagttcaagaagctgttcagcgagctggagagcctgaccgaccccagcctgaaccacaaggcctacagagacgccttcaagaagatgaagccccccaagatccccttcatgcccctgctgctgaaggacgtgaccttcatccacgagggcaacaagaccttcctggacaacctggtgaacttcgagaagctgcacatgatcgccgacaccgtgagaaccctgagacactgcagaaccaaccagttcggcgacctgagccccaaggagcaccaggagctgaagagctacgtgaaccacctgtacgtgatcgacagccagcaggccctgttcgagctgagccacagaatcgagcccagagtgtag

SEQ ID NO: 306384 - protein, 59 aa, Artificial Sequence
  derived and/or modified sequence
MPPPADIVKVAIEWPGAYPKLMEIDQKKPLSAIIKEVCDGWSLANHEYFALQHADSSNF

SEQ ID NO: 306385 - protein, 81 aa, Artificial Sequence
  derived and/or modified sequence
MPPPADIVKVAIEWPGAYPKLMEIDQKKPLSAIIKEVCDGWSLANHEYFALQHADSSNFYITEKNRNEIKNGTILRLTTSP

SEQ ID NO: 306386 - protein, 149 aa, Artificial Sequence
  derived and/or modified sequence
MPPPADIVKVAIEWPGAYPKLMEIDQKKPLSAIIKEVCDGWSLANHEYFALQHADSSNFYITEKNRNEIKNGTILRLTTSPAQNAQQLHERIQSSSMDAKLEALKDLASLSRDVTFAQEFINLDGISLLTQMVESGTERYQKLQKIMKP

SEQ ID NO: 306387 - DNA, 180 bp, Artificial Sequence
  derived and/or modified sequence
atgcctccacccgcggatattgtcaaagtggccattgagtggcctggtgcataccccaaactgatggagatcgatcagaaaaaaccactgagcgccataattaaggaagtgtgcgacggatggagcctggcaaaccatgaatactttgctttacagcacgccgactcaagcaatttctag

SEQ ID NO: 306388 - DNA, 246 bp, Artificial Sequence
  derived and/or modified sequence
atgcctccaccagctgacattgtcaaggtcgccattgaatggcccggtgcttacccaaaactgatggagatagatcagaaaaaacctctgtctgctataattaaggaagtttgtgacggatggagcctggccaatcacgaatacttcgctctccagcatgcagattcctccaatttctatataacagaaaaaaacaggaacgagatcaaaaacggaactattctgaggctgaccacttcaccatag

SEQ ID NO: 306389 - DNA, 450 bp, Artificial Sequence
  derived and/or modified sequence
atgcccccacctgcagacattgtaaaagtggctatcgagtggccaggagcttaccccaaattgatggaaattgatcagaagaagcccttatccgccattatcaaggaggtgtgtgatggatggtccctcgctaaccatgagtacttcgccctgcagcatgccgatagtagtaacttttacataactgagaaaaacaggaacgagatcaagaacggaacaatcttacggcttacaacttcacccgctcagaacgcgcagcagctgcacgaacggattcagtcctcttccatggacgccaaattggaggctttgaaagacctggcctccctgagccgggatgttaccttcgcacaggaatttatcaacttggacgggatctcactactcacgcaaatggtggagtcaggaaccgaaaggtaccaaaagctgcagaagataatgaaaccttag

SEQ ID NO: 306390 - DNA, 180 bp, Artificial Sequence
  derived and/or modified sequence
atgcctcctcctgctgacatcgtgaaggtggccatcgagtggccaggggcctaccccaagctgatggagattgaccagaagaagcccctgagcgccatcatcaaggaggtgtgtgatggctggagcctggccaaccacgagtactttgccctgcagcacgccgacagcagcaacttctag

SEQ ID NO: 306391 - DNA, 246 bp, Artificial Sequence
  derived and/or modified sequence
atgcctcctcctgctgacatcgtgaaggtggccatcgagtggccaggggcctaccccaagctgatggagattgaccagaagaagcccctgagcgccatcatcaaggaggtgtgtgatggctggagcctggccaaccacgagtactttgccctgcagcacgccgacagcagcaacttctacatcacagagaagaacagaaatgagatcaagaatggcaccatcctgcggctgaccaccagcccctag

SEQ ID NO: 306392 - DNA, 450 bp, Artificial Sequence
  derived and/or modified sequence
atgcctcctcctgctgacatcgtgaaggtggccatcgagtggccaggggcctaccccaagctgatggagattgaccagaagaagcccctgagcgccatcatcaaggaggtgtgtgatggctggagcctggccaaccacgagtactttgccctgcagcacgccgacagcagcaacttctacatcacagagaagaacagaaatgagatcaagaatggcaccatcctgcggctgaccaccagccctgcccagaatgcccagcagctgcacgagcgcatccagagcagctccatggatgccaagctggaggccctgaaggacctggccagcctgagcagagatgtgacctttgcccaggagttcatcaacctggatggcatcagcctgctgacccagatggtggagagcggcacagagcgctaccagaagctgcagaagatcatgaagccctag

SEQ ID NO: 306393 - DNA, 180 bp, Artificial Sequence
  derived and/or modified sequence
atgcccccccccgccgacatcgtgaaggtggccatcgagtggcccggcgcctatccaaagttgatggagatcgatcagaaaaagccactaagcgccatcatcaaagaggtctgcgacgggtggtcactggccaatcatgagtattttgctctgcagcacgccgattcctcgaatttttag

SEQ ID NO: 306394 - DNA, 246 bp, Artificial Sequence
  derived and/or modified sequence
atgcccccccccgccgacatcgtgaaggtggccatcgagtggcccggtgcctacccaaaactgatggagatcgaccagaaaaaacccctgagcgctatcataaaggaggtgtgcgatggttggtctctggccaatcatgagtattttgcactacaacatgcggattcctccaatttctacattacggagaaaaacaggaatgagataaagaatggcacgattcttagactaaccacctccccttag

SEQ ID NO: 306395 - DNA, 450 bp, Artificial Sequence
  derived and/or modified sequence
atgcccccccccgccgacatcgtgaaggtggccatcgagtggcccggcgcatatcccaagctcatggagatcgatcagaagaagcctctgtctgccatcatcaaggaagtatgtgacggctggtctctggcaaatcacgaatactttgccctgcagcatgctgatagcagcaatttttatattaccgagaagaaccggaatgaaattaaaaatgggactatccttagactgacgacaagccccgcgcaaaacgctcagcagctacatgagcgaatccagtctagcagcatggatgccaaacttgaggccctcaaggacctggcctccctgtcgagggatgtgactttcgcccaggagtttattaacctcgatggcatttccctgttgacacagatggtggagtctgggactgagcggtatcagaagttgcagaaaattatgaagccttag

SEQ ID NO: 306396 - DNA, 180 bp, Artificial Sequence
  derived and/or modified sequence
atgcctccgccagcggacatcgtgaaagtggccatcgaatggcccggagcataccccaagcttatggagattgaccagaaaaagcccctgtcagccataattaaagaagtttgcgatgggtggtccctcgctaaccatgaatattttgcactgcaacacgccgatagctccaacttttag

SEQ ID NO: 306397 - DNA, 246 bp, Artificial Sequence
  derived and/or modified sequence
atgcccccaccagccgacatagtcaaagtggcgattgaatggccaggtgcctatccaaagcttatggagatcgatcagaagaagcctctgtccgccataataaaggaggtgtgtgatggctggtcgctcgctaaccatgagtacttcgccctgcagcacgccgacagcagcaatttctacatcactgagaagaatagaaacgagattaaaaatggaacaattctccggctgaccacctccccttag

SEQ ID NO: 306398 - DNA, 450 bp, Artificial Sequence
  derived and/or modified sequence
atgccccctcccgcagacatcgtcaaggtggccattgagtggcccggagcatatcccaaactgatggagatcgaccagaagaagccccttagcgctatcattaaggaagtttgtgacggatggagtcttgccaatcacgagtattttgcgctgcagcacgcggacagctccaacttttacatcactgagaagaatagaaacgaaattaagaatggcaccatccttcgattaacgacatctcccgctcagaacgcccagcagctgcacgaacggatacagtcttcgtccatggacgctaagcttgaagcgctgaaagaccttgcatccctgtccagggatgtgacctttgcccaggaatttatcaacctcgacgggatctcccttctaactcagatggtggagtccggaaccgagagataccagaagttacagaagatcatgaaaccatag

SEQ ID NO: 306399 - DNA, 180 bp, Artificial Sequence
  derived and/or modified sequence
atgcccccccccgccgacatcgtgaaggtggccatcgagtggcccggcgcctaccccaagctgatggagatcgaccagaagaagcccctgagcgccatcatcaaggaggtgtgcgacggctggagcctggccaaccacgagtacttcgccctgcagcacgccgacagcagcaacttctag

SEQ ID NO: 306400 - DNA, 246 bp, Artificial Sequence
  derived and/or modified sequence
atgcccccccccgccgacatcgtgaaggtggccatcgagtggcccggcgcctaccccaagctgatggagatcgaccagaagaagcccctgagcgccatcatcaaggaggtgtgcgacggctggagcctggccaaccacgagtacttcgccctgcagcacgccgacagcagcaacttctacatcaccgagaagaacagaaacgagatcaagaacggcaccatcctgagactgaccaccagcccctag

SEQ ID NO: 306401 - DNA, 450 bp, Artificial Sequence
  derived and/or modified sequence
atgcccccccccgccgacatcgtgaaggtggccatcgagtggcccggcgcctaccccaagctgatggagatcgaccagaagaagcccctgagcgccatcatcaaggaggtgtgcgacggctggagcctggccaaccacgagtacttcgccctgcagcacgccgacagcagcaacttctacatcaccgagaagaacagaaacgagatcaagaacggcaccatcctgagactgaccaccagccccgcccagaacgcccagcagctgcacgagagaatccagagcagcagcatggacgccaagctggaggccctgaaggacctggccagcctgagcagagacgtgaccttcgcccaggagttcatcaacctggacggcatcagcctgctgacccagatggtggagagcggcaccgagagataccagaagctgcagaagatcatgaagccctag

SEQ ID NO: 306402 - DNA, 858 bp, Artificial Sequence
  derived and/or modified sequence
atagcagatctgaggcatgcatggtgtttgacatttctgtcttttaagtagggggacttcaaaaagtcgtgggcatccccctaggcaaagtgcagtgggcagggaccaggcagggtgcgggcgcaaggcgaacgcgcagaccacgagtgtcctggcgcaggtgccgggggcggcggctgcaactccgcagcgtccgctcgggaggagagttcgcggctgatctccggatgccttgcagatgcaaaatgtgtctctggccagcaggaggaaggaagaggaagtgagagcagcggcagccggcggtgcagcagccggccgacccagagtgtaagtgcgtgtgctggggcgagcgggagcgggcgaggatgggcacaggatagaggcagagccacccacgccgccgcggccccacgctgggcgacagagcctccagttccccttcaatggtggcgggtcgccggagctctgatcgccgggaacccttgccgctgctgtcctgcgaccccaagcagggggcagagcagggagcacttataccatacaaggcagagaagatacagatcaagatatgcccaaggcccttctagttcagcctctccttggagtaggtatagacacgtgtggccgtttacgctgtaggatcctcattcccactggctttgaacattttggggacttacaatgccgccacccgcggacatcgtcaaggtggccatagaatggccgggcgcctaccccaaactcatggaaattgatcagaaaaaaccactgtctgcaataataaaggaagtctgtgatgggtggtctcttgccaaccatgaatattttgcactccagcatgccgatagttcaaacttc

SEQ ID NO: 306403 - DNA, 503 bp, Artificial Sequence
  derived and/or modified sequence
agatgcaaaatgtgtctctggccagcaggaggaaggaagaggaagtgagagcagcggcagccggcggtgcagcagccggccgacccagagtggggcagagcagggagcacttataccatacaaggcagagaagatacagatcaagatatgcccaaggcccttctagttcagcctctccttggagtaggtatagacacgtgtggccgtttacgctgtaggatcctcattcccactggctttgaacattttggggacttacaatgccgccacccgcggacatcgtcaaggtggccatagaatggccgggcgcctaccccaaactcatggaaattgatcagaaaaaaccactgtctgcaataataaaggaagtctgtgatgggtggtctcttgccaaccatgaatattttgcactccagcatgccgatagttcaaacttctatatcacagaaaagaaccgcaatgagataaaaaatggcactatccttcgattaaccacatctcca

SEQ ID NO: 306404 - DNA, 650 bp, Artificial Sequence
  derived and/or modified sequence
gaccatgacttcctgggcaatctgtccttcctcagactgttgagtgccagacgtttatatgcatgtctggacagagagtgagcctggctcattcagaccctgggcaccattcagagcagaactcagtggtatagacacgtgtggccgtttacgctgtaggatcctcattcccactggctttgaacattttggggacttacaatgccgccacccgcggacatcgtcaaggtggccatagaatggccgggcgcctaccccaaactcatggaaattgatcagaaaaaaccactgtctgcaataataaaggaagtctgtgatgggtggtctcttgccaaccatgaatattttgcactccagcatgccgatagttcaaacttctatatcacagaaaagaaccgcaatgagataaaaaatggcactatccttcgattaaccacatctccagctcagaacgcccagcagctccatgaacgaatccagtcctcgagtatggatgccaagctggaagccctgaaggacttggccagcctctcccgggatgtcacgtttgcccaggagtttataaacctggacggtatctctctcctcacgcagatggtggagagcggcactgagcgataccagaaattgcagaagatcatgaagccttg

SEQ ID NO: 306405 - DNA, 1146 bp, Artificial Sequence
  derived and/or modified sequence
gtgacccacgagaccatcgtggagcagcagaagaacctggagggctacgtgggcttcgccaacctgcccaaccaggtgtacagaaagagcgtgaagagaggcttcgagttcaccctgatggtggtgggcgagagcggcctgggcaagagcaccctgatcaacagcctgttcctgaccgacctgtacagccccgagtaccccggccccagccacagaatcaagaagaccgtgcaggtggagcagagcaaggtgctgatcaaggagggcggcgtgcagctgctgctgaccatcgtggacacccccggcttcggcgacgccgtggacaacagcaactgctggcagcccgtgatcgactacatcgacagcaagttcgaggactacctgaacgccgagagcagagtgaacagaagacagatgcccgacaacagagtgcagtgctgcctgtacttcatcgcccccagcggccacggcctgaagcccctggacatcgagttcatgaagagactgcacgagaaggtgaacatcatccccctgatcgccaaggccgacaccctgacccccgaggagtgccagcagttcaagaagcagatcatgaaggagatccaggagcacaagatcaagatctacgagttccccgagaccgacgacgaggaggagaacaagctggtgaagaagatcaaggacagactgcccctggccgtggtgggcagcaacaccatcatcgaggtgaacggcaagagagtgagaggcagacagtacccctggggcgtggccgaggtggagaacggcgagcactgcgacttcaccatcctgagaaacatgctgatcagaacccacatgcaggacctgaaggacgtgaccaacaacgtgcactacgagaactacagaagcagaaagctggccgccgtgacctacaacggcgtggacaacaacaagaacaagggccagctgaccaagagccccctggcccagatggaggaggagagaagagagcacgtggccaagatgaagaagatggagatggagatggagcaggtgttcgagatgaaggtgaaggagaaggtgcagaagctgaaggacagcgaggccgaggtgatcagcctgatcagccacctgctggccgacatcgtgttcctgttcaagtag

SEQ ID NO: 306406 - DNA, 1146 bp, Artificial Sequence
  derived and/or modified sequence
gtcacgcatgagactattgtggagcaacagaaaaacctcgagggctacgtcgggttcgccaatttgccaaaccaagtctatcggaaatcagtcaaacgggggtttgaatttaccctaatggttgtgggtgaatctggtttgggtaaaagtacgctgatcaattctctgtttctcacagacctctactctccagagtacccagggccctctcacaggatcaagaaaacggtacaagtcgaacagagcaaagtgcttatcaaggaaggaggagtccagctgcttctcacaatcgttgacactccaggtttcggtgatgcagttgataatagtaactgctggcagcctgttattgattacatcgactccaagttcgaggactatctgaatgccgaaagccgcgtcaataggagacaaatgcccgataatcgagtccaatgttgtctctacttcatcgctcctagtggccacggactcaaaccactggacatcgaatttatgaagcgcttgcacgaaaaagtgaacatcattcctctaatcgccaaagctgatacccttacaccagaggaatgccagcaattcaagaagcagattatgaaagagattcaggagcacaagatcaagatctatgagtttccagaaacagacgacgaggaggagaataagttagttaagaaaattaaggacagactgcccttggctgtcgtggggtccaatactattatcgaggtgaatggtaagagggtgcggggacggcaatacccttggggtgtggcggaggtggaaaatggggaacactgcgactttactattctccgcaatatgttaattcgcactcacatgcaggaccttaaggatgtgacgaacaacgtgcactatgagaactacaggtccagaaaacttgcggccgtcacatacaacggcgtcgacaataataaaaacaaaggtcaacttaccaagtcacccctggcacagatggaggaggagaggagagagcacgtggcaaagatgaaaaagatggagatggaaatggagcaggtcttcgaaatgaaggtaaaagagaaggtccagaagctgaaggactccgaagccgaggttattagcctgatttcccacctgctcgccgacatcgtattcctgttcaagtag

SEQ ID NO: 306407 - DNA, 1146 bp, Artificial Sequence
  derived and/or modified sequence
gtcacccatgagaccatcgtggagcagcagaagaacctggagggctacgtgggctttgccaacctgcccaaccaggtgtacaggaagtctgtgaagaggggctttgagttcaccctgatggtggtgggggagagcggcctgggcaagagcaccctcatcaacagcctcttcctgacagacctgtacagccctgagtacccaggccccagccaccgcatcaagaagacagtgcaggtggagcagagcaaggtgctgatcaaggagggcggcgtgcagctgctgctgaccatcgtggacaccccaggctttggagatgctgtggacaacagcaactgctggcagcctgtgattgactacatcgacagcaagtttgaggactacctgaatgctgagagccgggtgaacagacggcagatgccagacaacagagtgcagtgctgcctgtacttcatcgcccccagcggccacggcctgaagcccctggacatcgagttcatgaagaggctgcacgagaaggtgaacatcatccccctgattgccaaggctgacaccctgaccccagaggagtgccagcagttcaagaagcagatcatgaaggagatccaggagcacaagatcaagatctatgagttccctgagacagatgatgaggaggagaacaagctggtgaagaagatcaaggaccggctgcccctggccgtggtgggcagcaacaccatcatcgaggtgaatggcaagagggtgcggggccggcagtacccctggggcgtggccgaggtggagaatggagagcactgtgacttcaccatcctgaggaacatgctgatccgcacccacatgcaggacctgaaggatgtgaccaacaacgtgcactatgagaactaccgcagcaggaagctggccgctgtgacctacaacggggtggacaacaacaagaacaagggccagctgaccaagagccccctggcccagatggaggaggagcggcgggagcacgtggccaagatgaagaagatggagatggagatggagcaggtgtttgagatgaaggtgaaggagaaggtgcagaagctgaaggacagcgaggccgaggtgatcagcctcatcagccacctgctggccgacatcgtgttcctgttcaagtag

SEQ ID NO: 306408 - DNA, 1146 bp, Artificial Sequence
  derived and/or modified sequence
gtgacccacgagaccatcgtggagcagcagaagaacctggagggctacgtgggcttcgcgaacctgcccaatcaagtctacaggaaaagtgttaagcgcggcttcgaatttacattaatggtggtgggcgagagtggtctcggcaaaagtaccctgatcaacagtctttttttgactgacctttacagtcctgaatatcctgggcctagtcatcgaataaagaagactgttcaagtggaacagtcaaaggtgctcattaaagaaggaggtgtgcaactactgcttactatcgtcgacacaccaggcttcggagacgccgtggataattctaactgctggcaacctgtgatcgactacattgatagcaagtttgaggactacttaaatgccgaatctagggttaatcgccggcaaatgccggacaatcgagtccaatgctgcttgtactttattgccccctcggggcatggactgaagccattggatattgaattcatgaaacgactgcacgagaaagtgaatatcattcctctcattgcaaaggctgatacactgacacctgaggaatgccagcagtttaaaaagcagatcatgaaggagattcaggaacacaaaatcaaaatttacgaattccctgagactgacgatgaggaagagaacaaactcgtcaaaaaaataaaagacaggctaccgctcgccgtggttgggtcaaatactataatcgaagtaaatggcaagagagtgagaggacgtcagtacccttggggtgttgctgaggttgaaaacggcgagcattgcgatttcaccatcctgaggaacatgctgatcagaacccacatgcaggatcttaaagacgtcaccaacaatgtccactatgagaactatcgctctcgtaaactggcggctgtcacgtacaacggcgtcgataataataagaacaagggccagcttactaaatccccattggcccagatggaagaggagcgccgcgagcatgtcgccaagatgaaaaagatggaaatggagatggagcaggtattcgaaatgaaggtgaaggaaaaggttcagaagctgaaggactccgaagctgaagtcatctctttgatttcccatttgctagcagatattgtgttcctgttcaagtag

SEQ ID NO: 306409 - DNA, 1146 bp, Artificial Sequence
  derived and/or modified sequence
gttacccatgaaaccattgtcgagcaacagaagaatttggaaggttatgtcgggtttgctaatttacctaatcaggtttataggaagagtgtgaaacgaggatttgaattcacccttatggtcgtgggggagtccggcttaggtaaaagcacccttattaactctctgtttctcactgacctgtactcccccgaatatccaggacccagccaccgaatcaagaaaactgtgcaagtcgagcagtcaaaggttctcatcaaggagggaggggttcaactcctgctcacaatcgtggacacacctgggttcggagacgccgttgataattctaactgttggcagcctgttattgattatattgactctaagtttgaggattatctgaacgccgagtccagggtaaaccgtagacagatgccagataatcgagtccagtgttgcctgtatttcatagccccatccggtcatgggctcaagcccctggatattgagtttatgaaaaggcttcacgaaaaggtgaatattatccccctgattgccaaagccgacactctcacacctgaggaatgtcaacagttcaaaaagcagatcatgaaggagatccaagaacataaaattaaaatttacgagttccccgaaactgacgacgaggaggagaataagctcgtcaaaaaaattaaggaccgacttcctctcgctgtggtgggatccaataccattatagaagtcaatggcaagcgcgtccggggacggcaatacccgtggggtgtcgctgaggtggaaaatggcgaacactgtgactttacgattttgagaaatatgctgattcgcacacatatgcaagacctgaaagatgtgactaataatgtacactacgaaaactaccggtcgcgtaagctggctgccgtaacctataatggggtcgacaataataaaaacaagggacagttaacgaagagtcctctcgcccaaatggaggaggaaaggcgggagcacgtggccaaaatgaagaaaatggagatggagatggagcaagtctttgagatgaaggtgaaggagaaggtgcagaaattaaaggattccgaagcagaagtcatctctcttatcagccacctgttagccgatattgtttttctcttcaagtag

SEQ ID NO: 306410 - DNA, 6976 bp, Artificial Sequence
  derived and/or modified sequence
gttactcacgaaactattgttgagcaacagaagaaccttgaaggctatgtgggatttgccaatctcccaaatcaagtatacagaaaatcggtgaagagaggttttgaattcacgcttatggtagtgggtgaatctggattgggaaagtcgacattaatcaactcattattcctcacagatttgtattctccagagtatccaggtccttctcatagaattaaaaagactgtacaggtggaacaatccaaagttttaatcaaagaaggtggtgttcagttgctgctcacaatagttgataccccaggatttggagatgcagtggataatagtaattgctggcagcctgttatcgactacattgatagtaaatttgaggactacctaaatgcagaatcacgagtgaacagacgtcagatgcctgataacagggtgcagtgttgtttatacttcattgctccttcaggacatggacttaaaccattggatattgagtttatgaagcgtttgcatgaaaaagtgaatatcatcccacttattgccaaagcagacacactcacaccagaggaatgccaacagtttaaaaaacagataatgaaagaaatccaagaacataaaattaaaatatacgaatttccagaaacagatgatgaagaagaaaataaacttgttaaaaagataaaggaccgtttacctcttgctgtggtaggtagtaatactatcattgaagttaatggcaaaagggtcagaggaaggcagtatccttggggtgttgctgaagttgaaaatggtgaacattgtgattttacaatcctaagaaatatgttgataagaacacacatgcaggacttgaaagatgttactaataatgtccactatgagaactacagaagcagaaaacttgcagctgtgacttataatggagttgataacaacaagaataaagggcagctgactaagagccctctggcacaaatggaagaagaaagaagggagcatgtagctaaaatgaagaagatggagatggagatggagcaggtgtttgagatgaaggtcaaagaaaaagttcaaaaactgaaggactctgaagctgaggtaatcagtctaatatcccatctcttagcagacattgtgttcctttttaagtagtatcttcagtaaaatttatagataatataacctttttatacatattttttcaaaattaataccctagtgtaacaaaacggataaatttctagaagcaagcaccgtgtttataataaaataatacatacttcaatatgcaagtgcttggacgtagtatattaggtaggacagtgtaatagaatacttataatgaattattagttataatgaacaagtttgagttgtgaaaaataaaattacaaaccattccatacaggtggcataagaacactaaagatgagagtttgggggtggatttatgcacacaaactgtgttaggataataataattgaccatatttatttgtgtatgagtgaaaaagagggaaataacctttattgaactaaagacatgcctggataaattccacacaattaaagaagagaaaattagggaatgtgatatttttgttaacaggttaggccttctttatttataatgtagtgtcaaggtagttcctggtgttacaacattgggcagggtaatgacaaaacatcccagaagacatacctactatcttgaaacccttctagatgttgagttatacatttagtttctattaatcaaaaagaccttggagacatttccttcaataggtggcaagaaagaaaagttggagaaaaagataaactgaacattaaaaatccatagagcagttagtttgatagatgtctgagaatagtagaaaaaaaactatgggtaatcccaaaataacagtggtttcagtatgaagttttcttcacataaatttgttataattaaaaattataaaatagcctgggcatggtggctcatgcctgtaacgccagcactttgggaggctgaggcacacagatcacttgagttcagaagttcgagactagcctggccaacatggtgaaacctcatctctattaaaaatacaaaaattagctggatgtggtggtgagtgcctgtaatcccagctacttgggaggctgaggctggagaatcgcttgaacctgggaggcggaggttgcactgaactgagatcacgtcactgcactcccgcctgggcgacagatcaagactttgcctcaaaaaacaaacagacaaacaaaaagccctataaaataataaattattttaaaatatgtgagatgaggtccaggtgtggtggctcacatctgtaatcccagcagtttgggaggccaaagaagaaggattgcttgagtccaggagtttgagaccagcctgggcaacatggcaagacccaatccctataaaaaatttttaaaaatagttgggcatgatggcctgcacctatggtcccaactactcaggaggctgagacaggaagattacttgagcctgggagatagaggctgtagtgagccatgattgtgccactgcatcccagcctgggtgacagagctagaccttgtctcaaaattatatacatatatatatatggatgacagtaatataaaatagttttaaaacaatctttaatgataaaatttagtaagatccctgttttatgtggcttcactaatatttgtatctaagtgtatgaagaagagattcagatctctcgttatattcttacagttgatctcattgcttttgtaattaccgcataaaatatggaaaccttttttgactaaaggcataacaaaagtatgctaatccattgagtaaatagaatgcacggaatgagaaagtattaaataatttcgaggaaatgtttttattccacatcatttctcttacattattgggcttttcttgtaatttcttattaaaatctttcactgttgttatatttgttgtgagtttaatttagcaggggtatggaataattcctcctggtttcagacgctgagcactacaggattagcatccctggcactgccactaaatgctaatagcagtgccctcctatcatagggcaaaccaaaatgtgcatacacacacacccctaatcaaaagtcactgtcttagctattgctgttgtattataaatgaataattaaagttcttaacatgacattttggagattaatttatcagcatgttgtaaatatatgcattgagtctctacctcttcagtaattcacatataatctggaaaatctatatccaaaagggggaaaaaaacaggaataatcaagagtctactacattatctccacacttagattccattgagaatctaaaagtagtttaacttatatttgaggcagatgtattttaggacatgttgctaaaagtaaatattacgaacaagtaattgtgaacctgtagccaaggaaccctttgggaattttaatgattactgtgaatggtgaagacagttttgaagaactattctttgaaggatggaatgttaacatttcaaggacctgtgaagagctctgggccaaggttcccaccagatactctaagccattagagaattaggcatgctcattctagattctttgtcttttatgaaaccacatctagagtgtatttaccaacatccctgtgataatgagtttgcaaatcatcatgtatatgatacatgatatatattgtgtaaatatacgtgtgaatacataaataggtaaagaaacccttttagccttgtttaatacagtctctccttaaatccattatgctggaaatacttgtttggggcacagctagcagcacagtacatcagccacagcaccaagcaactttcatttattgtgttgtctagtgcacaccacagccctacaaggtagatattattgcccatctctcctttatagataagaaggataaattaacttagtatgccagcatttgaacccagttaatttttaagttaagctagataggtccacagtcctgtttttcacaatttcagaatggaaaaaactctgaaaactgcaaaacctaacatgaactaagttttaatcctacatattgtgaatatttatatattttactgaaacaaataaaaagtaatgtgtttgattatacttgttgccccagatagcccaggaggtattttataaatatagtgtatactcctttctaagcggtgttgtcgttttaataactgaaaaatgttgaacttcaaaaggcatctgaccccatgggtttcttaagagtgagattgtgacctgtacctttatctacatgcagttaacacaaaagataattacttatatgtaacaagttaaagaatgatgaacactgtaagcctactacctggcttaaaaaaatagaatgttatcaactcatttgaagatgctgtgtgcctgtcccctattgtatccctctctctcattcccagaggtaactactattccgaattgtgtatatgtgactcttttcatttaaaaaaaataactagagacattttcttatgttcctactttctgacatttcttagtaacttgtttgctgtcatcaggaagatatcacctcagatttgattcatgtttgcttaagtgtgtcttaggtgattttgttttgtaggaattgcatgaaataattgaaataggaataaatctgaagtcacttcgggcttgcaaaaaaaaattgtatgcaaaattatagtaacatatataatatgtatataatatataatacatataatagttatatattaacattatgttaatgttaactcaccagtgtagtaaaatctgtaacagaacataattcctggataactgaaggttttgaatagtccttgggtatttggcatagaaggatttaatctgatttttaaaatttgttgacttttttttttttcagaaatggattgacttgcacctaaatgaaattacttatctaatgatctcttggacttaaagcactttgtttctgcagttacttcgcatgagtgtttactgcctctcagtcagcattctttacagtattaatacacagagaaggaaggaccagctgcattagaatcactgtaacttgttgaaaatccacatttccagacttaacacccagatattctaattcagtacgtctgagtgaggtccaggattctatatttttaacaaacatcccaggtgatttgcatgaagaccaatgtctgagaaccactgcttacaggaatcagagtactttgctggcatctttgagctcttagggtcctaaactacctgctttcttttcacttgtcttagctttctaaacttggaattaggaggcttattcaagtcctggttcttccactttctggctagcaatcttgggcaagtcacttaaattctgcaactgtttcctcatctgtacaatgagaacagtgatgtgttcactgcccagcctccaacatatttgtgattaaagaaaaacgagataagatagtaattttccattataaagtactccacactgttaagtttgttgctttttttttttttcctgtttcccaagattattgtcttgggtcactggccttttgggtggcaggtcctaaaggaggaggagtccttgaccagagtacttccaggtagtactctgaatttacaacagggctattcaaatagtgctcatactccttatcattagggtgtctggatgaaacatacctctgcttctgatttcttaaatagttttgttttatatattgtgctatgatttagctccagcggcgccatgagcaaatgaaaaagaatttggaagcacagcacaaagaattggaggaaaaacgtcgtcagttcgaggatgagaaagcaaactgggaagctcaacaacgtattttagaacaacagaactcttcaagaaccttggaaaagaacaagaagaaagggaagatcttttaaactctctattgaccaccagttaacgtattagttgccaatatgccagcttggacatcagtgtttgttggatccgtttgaccaatttgcaccagttttatccataatgatggatttaacagcatgacaaaaattatttttttttttgttcttgatggagattaagatgccttgaattgtctagggtgttctgtacttagaaagtaagagctctaagtacctttcctacattttctttttttattaaacagatatcttcagtttaatgcaagagaacattttactgttgtacaatcatgttctggtggtttgattgtttacaggatattccaaaataaaaggactctggaagattttcattgaggataaattgccataatatgatgcaaactgtgcttctctatgataattacaatacaaaggttccattcagtgcagcatatacaataatgtaatttagtctaacacagttgaccctattttttgacacttccattgtttaaaaatacacatggaaaaaaaaaaaaccctatatgcttactgtgcacctagagcttttttataacaacgtctttttgtttgtttgttttggattctttaaatatatattattctcatttagtgccctctttagccagaatctcattactgcttcatttttgtaataacatttaatttagatattttccatatattggcactgctaaaatagaatatagcatctttcatatggtaggaaccaacaaggaaactttcctttaactccctttttacactttatggtaagtagcagggggggaaatgcatttatagatcatttctaggcaaaattgtgaagctaatgaccaacctgtttctacctatatgcagtctctttattttactagaaatgggaatcatggcctcttgaagagaaaaaagtcaccattctgcatttagctgtattcatatattgcatttctgtattttttgtttgtattgtaaaaaattcacataataaacgatgttgtgatgt

SEQ ID NO: 306411 - protein, 88 aa, Artificial Sequence
  derived and/or modified sequence
MKKMEMEMEQVFEMKVKEKVQKLKDSEAELQRRHEQMKKNLEAQHKELEEKRRQFEDEKANWEAQQRILEQQNSSRTLEKNKKKGKIF

SEQ ID NO: 306412 - protein, 228 aa, Artificial Sequence
  derived and/or modified sequence
MVDYYEVLGVQRHASPEDIKKAYRKLALKWHPDKNPENKEEAERKFKQVAEAYEVLSDAKKRDIYDKYGKEGLNGGGGGGSHFDSPFEFGFTFRNPDDVFREFFGGRDPFSFDFFEDPFEDFFGNRRGPRGSRSRGTGSFFSAFSGFPSFGSGFSSFDTGFTSFGSLGHGGLTSFSSTSFGGSGMGNFKSISTSTKMVNGRKITTKRIVENGQERVEVEEDGQLKSLT

SEQ ID NO: 306413 - protein, 215 aa, Artificial Sequence
  derived and/or modified sequence
MVDYYEVLGVQRHASPEDIKKAYRKLALKWHPDKNPENKEEAERKFKQVAEAYEVLSDAKKRDIYDKYGKEGLNGGGGGGSHFDSPFEFGFTFRNPDDVFREFFGGRDPFSFDFFEDPFEDFFGNRRGPRGSRSRGTGSFFSAFSGFPSFGSGFSSFDTGFTSFGSLGHGGLTSFSSTSFGGSGMGNFKSISTSTKWLMAEKSLQRELSRTVKKE

SEQ ID NO: 306414 - DNA, 183 bp, Artificial Sequence
  derived and/or modified sequence
atgaaccccgcagcagaggctgagttcaatatcctgcttgccaccgattcttacaaggtaacgcattataagcagtacccgcccaatacttctaaggtgtacagctatttcgaatgtagagagaaaaaaactgaaaactccaagcttaggaaggtcaagtatgaggagacagttttctactag

SEQ ID NO: 306415 - DNA, 267 bp, Artificial Sequence
  derived and/or modified sequence
atgaatcccgccgcagaagcagagtttaacatattgttagccactgatagctacaaagttacacattataagcagtatccaccgaataccagcaaggtgtattcctacttcgagtgtagagagaaaaaaactgagaactccaaactgaggaaagtgaagtatgaagagactgtgttctacggattgcagtatatcctcaacaaatacctgaagggtaaagtcgtgaccaaggaaaagattcaagaagcgaaggatgtatacaagtag

SEQ ID NO: 306416 - DNA, 183 bp, Artificial Sequence
  derived and/or modified sequence
atgaacccagctgctgaggccgagttcaacatcctgctggccacagacagctacaaggtgacccactacaagcagtacccacccaacaccagcaaggtgtacagctactttgagtgccgggagaagaagacagagaacagcaagctgaggaaggtgaagtatgaggagaccgtcttctactag

SEQ ID NO: 306417 - DNA, 267 bp, Artificial Sequence
  derived and/or modified sequence
atgaacccagctgctgaggccgagttcaacatcctgctggccacagacagctacaaggtgacccactacaagcagtacccacccaacaccagcaaggtgtacagctactttgagtgccgggagaagaagacagagaacagcaagctgaggaaggtgaagtatgaggagaccgtcttctacggcctgcagtacatcctgaacaagtacctgaagggcaaggtggtgaccaaggagaagatccaggaggccaaggatgtgtacaagtag

SEQ ID NO: 306418 - DNA, 183 bp, Artificial Sequence
  derived and/or modified sequence
atgaaccccgccgccgaggccgagttcaacatcctgctggccaccgacagctacaaagtaacccattacaagcagtaccccccaaatacgtccaaagtctactcgtatttcgagtgccgagaaaagaagaccgagaatagtaagctgcgcaaggtgaaatacgaagagaccgtgttttactag

SEQ ID NO: 306419 - DNA, 267 bp, Artificial Sequence
  derived and/or modified sequence
atgaaccccgccgccgaggccgagttcaacatcctgctggccaccgattcttataaagtcacccattataaacaatacccgccaaacacatccaaggtctattcttattttgaatgccgcgagaaaaagacagagaattccaaactccggaaagtgaaatatgaagaaactgttttttacggactgcagtatattctcaacaaatatctaaaaggcaaggttgtcacaaaagaaaaaattcaggaagcgaaggacgtttataagtag

SEQ ID NO: 306420 - DNA, 300 bp, Artificial Sequence
  derived and/or modified sequence
gtcaggaggatcaggagggacaagagggatggaggcgaaaggctggatccttaatccaggccggagacaaagccgcgccagggagctcgcggcgcgcggcccctgtcctccggcccgagatgaatcctgcggcagaagccgagttcaacatcctcctggccaccgactcctacaaggttactcactataaacaatatccacccaacacaagcaaagtttattcctactttgaatgccgtgaaaagaagacagaaaactccaaattaaggaaggtgaaatatgaggaaacagtattttatg

SEQ ID NO: 306421 - DNA, 1147 bp, Artificial Sequence
  derived and/or modified sequence
tagtgttgactgaggttgtctttattagaagtctcagccatgcctccagtttcgagatgaatctcaattcacaagttccactatgaatctcaattcacaagttccactaccaccaccaccatcactgcccccagatagaatgagacttctaataacttgaaagacaagtctataaatatcctgtaatcgttttcactgtatcactttttcctggctacttttatccgataaaaacctcaatttatttttaagctattaaacatgcggacaaagggaatcttagttttatgcaaaaacgcaaccacgcatgagaactgcgcaagtctttcttggaatggtctgtatttgggtgaagtcatcagacgtcattacacttctttattttggggttgccaactcgtttcccaggatttaaagactataacgatgataaaagtcagtgtcgcaccctgtcaaaggcttggcccgttgccttttccttcccggcaatactcggttcaattaggtcttgtcccctcattatctgtgaggactgaattccacccccgcttttcaacgcaggctctttgctcgggaaaagtcaaaccatctctcaaaggatcaaagagctcagccatagacagagccgccggaggaaagcggagtcgctgcatcagatgaaaggggcccctcagcctcactcctcaccgcagctcctgggatcttaaagacagggtcaggaggatcaggagggacaagagggatggaggcgaaaggctggatccttaatccaggccggagacaaagtgacttaagcaacggagcgcggtgaagctcatttttctccttcctcgcagccgcgccagggagctcgcggcgcgcggcccctgtcctccggcccgagatgaatcctgcggcagaagccgagttcaacatcctcctggccaccgactcctacaaggttactcactataaacaatatccacccaacacaagcaaagtttattcctactttgaatgccgtgaaaagaagacagaaaactccaaattaaggaaggtgaaatatgaggaaacagtattttatgggttgcagtacattcttaataagtacttaaaaggtaaagtagtaaccaaagagaaaatccaggaagccaaagatgtctacaaa

SEQ ID NO: 306422 - DNA, 183 bp, Artificial Sequence
  derived and/or modified sequence
atgaatccggctgcggaggccgagttcaacattctgctcgccacggatagctacaaagtgacccactacaagcagtaccctccaaacacttctaaggtgtactcatacttcgagtgtagagagaagaaaactgagaactcaaagttgcgtaaagtcaagtacgaggagactgttttttattag

SEQ ID NO: 306423 - DNA, 267 bp, Artificial Sequence
  derived and/or modified sequence
atgaacccagcagcagaagccgagttcaacattttactggcaaccgatagctacaaggttactcactataaacagtatccgccaaacacttccaaagtgtattcttatttcgaatgcagggaaaaaaaaacagaaaatagcaagctgcgaaaagttaagtacgaagaaaccgtgttttacgggcttcagtatatccttaacaaatatctgaagggtaaggtggtgacgaaagagaagattcaggaagccaaggacgtatacaagtag

SEQ ID NO: 306424 - DNA, 183 bp, Artificial Sequence
  derived and/or modified sequence
atgaaccccgccgccgaggccgagttcaacatcctgctggccaccgacagctacaaggtgacccactacaagcagtacccccccaacaccagcaaggtgtacagctacttcgagtgcagagagaagaagaccgagaacagcaagctgagaaaggtgaagtacgaggagaccgtgttctactag

SEQ ID NO: 306425 - DNA, 267 bp, Artificial Sequence
  derived and/or modified sequence
atgaaccccgccgccgaggccgagttcaacatcctgctggccaccgacagctacaaggtgacccactacaagcagtacccccccaacaccagcaaggtgtacagctacttcgagtgcagagagaagaagaccgagaacagcaagctgagaaaggtgaagtacgaggagaccgtgttctacggcctgcagtacatcctgaacaagtacctgaagggcaaggtggtgaccaaggagaagatccaggaggccaaggacgtgtacaagtag

SEQ ID NO: 306426 - protein, 1643 aa, Artificial Sequence
  derived and/or modified sequence
MEDEERQKKLEAGKAKIEELSLAFLVRQLAQFRQRKAQSDGQSPSKKQKKKRKTSSSKHDVSAHHDLNIDQSQCNEMYINSSQRVESTVIPESTIMRTLHSGEITSHEQGFSVELESEISTTADDCSSEVNGCSFVMRTGKPTNLLREEEFGVDDSYSEQGAQDSPTHLEMMESELAGKQHEIEELNRELEEMRVTYGTEGLQQLQEFEAAIKQRDGIITQLTANLQQARREKDETMREFLELTEQSQKLQIQFQQLQASETLRNSTHSSTAADLLQAKQQILTHQQQLEEQDHLLEDYQKKKEDFTMQISFLQEKIKVYEMEQDKKVENSNKEEIQEKETIIEELNTKIIEEEKKTLELKDKLTTADKLLGELQEQIVQKNQEIKNMKLELTNSKQKERQSSEEIKQLMGTVEELQKRNHKDSQFETDIVQRMEQETQRKLEQLRAELDEMYGQQIVQMKQELIRQHMAQMEEMKTRHKGEMENALRSYSNITVNEDQIKLMNVAINELNIKLQDTNSQKEKLKEELGLILEEKCALQRQLEDLVEELSFSREQIQRARQTIAEQESKLNEAHKSLSTVEDLKAEIVSASESRKELELKHEAEVTNYKIKLEMLEKEKNAVLDRMAESQEAELERLRTQLLFSHEEELSKLKEDLEIEHRINIEKLKDNLGIHYKQQIDGLQNEMSQKIETMQFEKDNLITKQNQLILEISKLKDLQQSLVNSKSEEMTLQINELQKEIEILRQEEKEKGTLEQEVQELQLKTELLEKQMKEKENDLQEKFAQLEAENSILKDEKKTLEDMLKIHTPVSQEERLIFLDSIKSKSKDSVWEKEIEILIEENEDLKQQCIQLNEEIEKQRNTFSFAEKNFEVNYQELQEEYACLLKVKDDLEDSKNKQELEYKSKLKALNEELHLQRINPTTVKMKSSVFDEDKTFVAETLEMGEVVEKDTTELMEKLEVTKREKLELSQRLSDLSEQLKQKHGEISFLNEEVKSLKQEKEQVSLRCRELEIIINHNRAENVQSCDTQVSSLLDGVVTMTSRGAEGSVSKVNKSFGEESKIMVEDKVSFENMTVGEESKQEQLILDHLPSVTKESSLRATQPSENDKLQKELNVLKSEQNDLRLQMEAQRICLSLVYSTHVDQVREYMENEKDKALCSLKEELIFAQEEKIKELQKIHQLELQTMKTQETGDEGKPLHLLIGKLQKAVSEECSYFLQTLCSVLGEYYTPALKCEVNAEDKENSGDYISENEDPELQDYRYEVQDFQENMHTLLNKVTEEYNKLLVLQTRLSKIWGQQTDGMKLEFGEENLPKEETEFLSIHSQMTNLEDIDVNHKSKLSSLQDLEKTKLEEQVQELESLISSLQQQLKETEQNYEAEIHCLQKRLQAVSESTVPPSLPVDSVVITESDAQRTMYPGSCVKKNIDGTIEFSGEFGVKEETNIVKLLEKQYQEQLEEEVAKVIVSMSIAFAQQTELSRISGGKENTASSKQAHAVCQQEQHYFNEMKLSQDQIGFQTFETVDVKFKEEFKPLSKELGEHGKEILLSNSDPHDIPESKDCVLTISEEMFSKDKTFIVRQSIHDEISVSSMDASRQLMLNEEQLEDMRQELVRQYQEHQQATELLRQAHMRQMERQREDQEQLQVRVL

SEQ ID NO: 306427 - DNA, 12012 bp, Artificial Sequence
  derived and/or modified sequence
gacgaagatggcggcggcggcggcggtgacggcgcttcccgtgcggctgaggacgatccgccagtgagcgcggagactgcttccacttcgggcgggggagcgccggaccgaatcggctctctaggccgtggagcttgccgtcccacctccgtccaaatcgacctttcctttctatccccaaccacccctcaacccctgttttcccctgccttccttgcagaggccatggaggacgaggagagacagaagaagctggaggccggcaaagccaagattgaagaactctctttagcttttcttgtcagacagcttgcccagtttcgacaaagaaaagctcagtcggatgggcagagtccttccaagaagcagaaaaaaaagagaaaaacgtcaagcagtaaacatgatgtgtcagcacaccatgatttgaatattgatcaatcacagtgtaatgaaatgtacataaatagttctcagagagtagaatcaactgtgattcctgaatctacaataatgagaactctacatagtggagaaataaccagtcatgagcagggcttctctgtggaactggaaagtgaaatttcaaccacagcagatgactgcagttcagaggtaaatggttgcagttttgtgatgagaacaggaaagcctacaaatttattaagggaagaagaatttggtgttgatgattcttattctgaacaaggagcacaagacagtccgactcatctagagatgatggaaagtgagttggctgggaagcagcatgagattgaagagctaaacagagagctggaagaaatgagggttacctatgggactgaaggactgcagcagttacaagaatttgaagctgccattaaacaaagagatggcattataacccagctcactgctaatttacaacaagcaagaagagaaaaggatgagacaatgagagaatttttagagttgacagaacagagtcaaaaattacagattcaatttcagcaattacaggctagtgaaactctgagaaacagcactcatagtagcacagctgcagacttactacaagccaaacaacagatcctcactcatcaacagcagcttgaagaacaagaccacttattagaagattatcagaaaaagaaagaagacttcacaatgcaaattagtttcttgcaagagaaaattaaagtatatgaaatggaacaagataaaaaagtagaaaactcaaataaagaagaaatacaggaaaaggagacaatcattgaagaattaaacacaaaaataatagaagaagaaaagaaaactcttgagctaaaggataaattaacaactgctgataaattactaggagaattacaagaacagattgtgcaaaagaaccaagaaataaaaaacatgaaattagagctgactaattctaagcaaaaagaaagacagtcttctgaagaaataaaacagttaatggggacagtcgaagaacttcagaagagaaatcataaagacagccagttcgaaactgatatagtacaacgaatggaacaagaaacacaaagaaagttagaacaactccgggcagagctggatgagatgtatgggcagcagatagtgcaaatgaaacaagaattaataagacaacacatggcacagatggaggaaatgaaaacacggcataagggagaaatggagaatgctttaaggtcatattcaaatattacagttaatgaagatcagataaagttaatgaatgtggcaataaatgaactgaatataaaattgcaagatactaactctcaaaaggaaaaactcaaggaagaactaggactaattttagaagaaaagtgtgctctacagagacagcttgaagaccttgttgaagaattgagcttttcaagggaacagattcagagagctagacagacaatagctgaacaagaaagtaaacttaatgaagcacataagtcccttagtacagtggaagatttgaaagctgagattgtttctgcatctgaatccagaaaggaactagaattaaaacatgaagcagaagttacaaattacaagataaaacttgaaatgttagaaaaagaaaagaatgctgtgttagacagaatggctgaatcacaagaagctgaattagagaggctgagaacacagcttctatttagtcacgaagaagagctttccaaactgaaggaagatttagaaattgaacatcgaataaatattgaaaaacttaaagataatttaggcattcactataaacagcagatagatggtttacagaatgaaatgagtcaaaagatagaaaccatgcagtttgaaaaggacaatttgataactaagcagaatcaattaattttggaaatttcaaagctaaaagatttacagcagtctcttgtaaattcaaagtcagaagaaatgactcttcaaatcaatgaacttcaaaaagaaattgaaatactcagacaagaagaaaaagaaaagggtacacttgaacaagaagttcaagaattacaacttaaaacagaattgttagaaaaacagatgaaggaaaaagagaatgatcttcaagaaaaatttgcacaacttgaagcagagaatagcattcttaaagatgaaaagaaaacccttgaagacatgttgaaaatacatactcctgttagccaagaagaaagattgattttcttagactccattaagtccaaatccaaagactctgtgtgggaaaaagaaatagaaatacttatagaggaaaatgaggacctcaaacaacaatgtattcagctaaatgaagagattgaaaagcaaaggaacactttttcatttgctgaaaaaaactttgaagttaactatcaagagttacaagaggagtatgcttgccttctcaaagtaaaagatgatttagaagacagtaaaaataaacaggaattagagtataaaagtaaacttaaagcacttaatgaagagcttcatttgcaaagaataaatccaactacagtgaaaatgaaaagttctgtctttgatgaagacaaaacttttgtagcagaaacattggaaatgggtgaggttgttgaaaaggatacaacagaactcatggaaaaacttgaggtaaccaagcgagagaaattagagctgtcacagagactgtctgatctttctgaacaattgaaacagaaacatggtgagattagttttctaaatgaagaagttaaatctttaaagcaagagaaagaacaagtttcattgagatgtagagagctagaaatcattattaaccacaacagggcagaaaatgtacagtcatgtgatactcaagtaagctctttattagatggagttgtgaccatgacaagcaggggtgctgaaggatcagtttctaaagtaaataaaagttttggtgaagaatcaaaaataatggtggaagataaagtttcttttgaaaatatgactgttggagaagaaagtaagcaagaacagttgattttggatcacttaccatctgtaacaaaggaatcatcacttagagcaactcaaccaagtgaaaatgataaacttcagaaagaactcaatgtacttaaatcagaacagaatgatttaaggctacagatggaagcccaacgcatttgcctctctctggtttattcaactcatgtggatcaggttcgtgaatatatggaaaatgaaaaagataaagctctttgcagtcttaaagaagagcttatttttgctcaagaggaaaagatcaaggaacttcagaaaatacaccagttagaactacagactatgaaaacacaagaaacaggtgatgaaggaaagcctttacatctgctcattggaaaacttcaaaaggcagtgtctgaagaatgttcttattttttacagactttatgcagtgtccttggtgaatattatactcctgctttaaaatgtgaagtaaatgcagaagacaaagagaattctggtgattacatttctgaaaatgaagatccagaattacaagattatagatatgaagttcaagactttcaagaaaatatgcacactcttctcaacaaagtaacagaagaatacaacaaactcttggtacttcaaacacgactaagcaagatctggggacagcagacagatggtatgaaacttgaatttggagaagaaaaccttccaaaagaggaaacagagtttttatcaatccattctcagatgaccaatttggaagacattgatgtcaatcataaaagcaagttatcttctctgcaagatcttgaaaaaactaaacttgaagaacaagttcaagaattagaaagcctcatatcctctttgcagcaacagttgaaagaaactgaacaaaactatgaggcagagatccactgtttacagaagaggcttcaagctgttagtgagtccacggttccgccaagcttacctgttgattcggtggtaattacagaatctgatgcacagagaacaatgtaccctggaagttgtgtgaaaaagaatattgatggtacaatagagttttctggtgaatttggagtgaaagaggaaacaaatatcgttaagttgcttgaaaaacaataccaagaacaattagaagaagaagtagctaaggttattgtgtcaatgagtatagcatttgctcaacaaactgaactgtctagaatatctgggggaaaagaaaatactgcatcatcaaagcaagcacatgctgtgtgtcagcaagaacaacattattttaatgaaatgaaattatcacaggatcaaattggttttcagacttttgagacagtggatgtgaaatttaaagaagaatttaaaccacttagtaaagagttaggagaacatggaaaggaaattttattatcaaatagtgatccccatgatataccagaatcaaaggactgtgtgctgactatttcagaagaaatgttctccaaagataaaacatttatagttagacagtctattcatgatgagatttcagtgtcaagcatggatgcttctagacaactaatgttgaatgaagaacagttggaagatatgagacaggaacttgtacgacaataccaagaacatcaacaggcaacggaattgttaaggcaagcacatatgcggcaaatggagagacagcgagaagaccaggaacagctacaagaagagattaagagacttaatagacaattagcccagagatcctccatagataatgaaaacctggtttcagagagagagagggtgcttttagaggagctggaagcactaaagcagctgtctttagctggaagagagaagctgtgttgtgagctgcgcaacagcagtacgcaaacacagaatggaaatgaaaaccaaggagaagttgaagaacaaacatttaaagaaaaggaattagacagaaaacctgaagatgtgcctcctgagattttgtctaatgaaaggtatgcactccagaaagctaataatagacttttgaagatcctcttagaagttgtaaagacaacagcagctgttgaagaaacaattggtcgccatgtccttgggattctagatagatctagtaaaagccagtcatctgccagcctaatttggaggtcagaagcagaggcatctgtaaagtcatgtgtccatgaggaacatacaagagttacagatgaatccattccctcttattctggaagtgatatgccaagaaatgacattaacatgtggtcaaaagtaactgaggaaggaacagagctgtcacaacgacttgtgaggagtggttttgctggaactgaaatagaccctgaaaatgaagaacttatgctgaacattagctctcgactacaagcagcagttgaaaaactcctagaagccataagtgaaactagcagtcagcttgaacatgcgaaagtgacacagacagagttgatgcgtgagtcatttagacagaaacaagaagcaacagagtcccttaagtgccaagaggaacttcgagagcgccttcatgaggagtccagggccagagaacagctagctgtggagctcagtaaggctgagggcgtcattgatggctatgcagatgaaaaaactctttttgaaaggcaaattcaggaaaaaactgatataatagatcgtcttgagcaggagttgttatgtgcaagtaacaggttgcaagaattggaggcagagcaacagcagatccaagaagaaagagaattactgtccagacaaaaggaagctatgaaagcagaggcaggcccagttgaacaacaattactacaggagacagaaaaattaatgaaggaaaaactagaagtacaatgtcaagctgaaaaagtacgtgatgaccttcaaaaacaagtgaaagctctagaaatagatgtggaagaacaagtcagtaggtttatagagctggaacaagaaaaaaatactgaactaatggatttaagacagcaaaaccaagcattggaaaagcagttagaaaaaatgagaaaatttttagatgagcaagccattgacagagaacatgagagagatgtattccaacaggaaatacagaaactagaacagcaacttaaggttgttcctcgattccagcctatcagtgaacatcaaactagagaggttgaacagttagcaaatcatctgaaagaaaaaacagacaaatgcagtgagcttttgctctctaaagagcagcttcaaagggatatacaagaaaggaatgaagaaatagagaaactggagttcagagtaagagaactggagcaggcgcttcttgtagaggaccgaaaacactttggagctgtagaagctaaaccagaattgtccctagaagtacaattgcaggctgaacgagatgccatagacagaaaggaaaaagagattacaaacttagaagagcaattagaacagtttagagaagaactggaaaataagaatgaagaagttcaacaattacatatgcaattagaaatacagaaaaaggaatctactacccgcctacaagaacttgaacaggaaaacaaattatttaaggatgacatggagaaactgggacttgccataaaggaatctgatgccatgtctactcaagaccaacatgtgctatttgggaaatttgctcaaataatacaggaaaaagaggtagaaattgaccaattaaatgaacaagttacgaaactccagcagcaacttaaaattacaacagataacaaggttattgaagaaaaaaatgaactgataagggatcttgaaacccaaatagaatgtttgatgagtgatcaagaatgtgtgaagagaaatagagaagaagaaatagagcagctcaatgaagtgattgaaaaacttcaacaggaattggcaaatattggacagaagacatcaatgaatgctcattccctctcagaagaagcagacagtttaaaacatcaattggatgtggttatagctgaaaagctggccttggaacagcaagtagaaaccgctaatgaagaaatgaccttcatgaaaaatgtacttaaagaaaccaattttaaaatgaatcagctaacacaggaattattcagcttaaagagagaacgtgaaagtgtggaaaagattcaaagcataccagagaatagtgttaacgtggctatagatcatctgagcaaagacaaacctgaactagaagtagtccttacagaggatgctcttaaatccctagaaaatcagacatacttcaaatcttttgaagaaaatggcaaaggttccataattaatttggaaacaaggttgctacaacttgagagcactgttagtgcaaaggacttagaacttacccagtgttataaacaaataaaagacatgcaagaacaaggccagtttgaaacagaaatgcttcaaaagaagattgtaaacctacagaaaatagttgaagaaaaagtggctgctgctcttgtcagtcaaatccaacttgaggcagttcaggaatatgcaaaattctgtcaagataatcaaacaatttcatcagaacctgaaagaacaaatattcagaatttaaatcaactaagagaagatgagttggggtcagatatatcagcattaaccttgagaatatcagaattagaaagccaggttgttgaaatgcatactagtttgattttagaaaaagaacaagtagaaattgcagaaaaaaatgttttagaaaaagaaaagaagctgctagaactacagaagctattggagggcaatgagaaaaaacagagagagaaagaaaagaaaagaagccctcaagatgttgaagttctcaagacaactactgagctatttcatagcaatgaagaaagtggattttttaatgaactcgaggctcttagagctgaatcagtggctaccaaagcagaacttgccagttataaagaaaaggctgaaaaacttcaagaagagcttttggtaaaagaaacaaatatgacatctcttcagaaagacttaagccaagttagggatcacctcgcagaggcaaaagagaaattgtccattttagaaaaagaagatgagactgaggtacaagaaagcaaaaaggcctgcatgtttgagccacttcctataaaactgagtaagagcattgcatcccagacagatgggactctgaagatcagtagcagcaatcagactccacaaattcttgttaaaaatgcaggaatacaaattaatttacagagtgaatgttcctcagaagaagttactgaaataatcagtcagtttactgaaaaaattgagaagatgcaagaactacatgctgctgaaattttggacatggaatccagacatatttcagaaactgaaaccttaaagagggaacactatgttgccgttcagttactgaaagaggaatgtggtaccttgaaggcagtgatacagtgtctgagaagtaaagagggatcctcaattcctgagctagcacattctgatgcttaccagactagagaaatatgctccagtgattctggatcagactggggtcagggaatttatcttacacacagtcagggatttgacatagcatcagaaggccgaggagaagaaagtgaaagtgcaacagattcctttccaaagaaaataaagggattactgagagctgtccataatgaaggcatgcaggtgctttctctcactgagtctccctatagtgatggagaggaccattctattcagcaggtttcagaaccttggctagaagagagaaaagcttacatcaatacaatctcatctctaaaggatttaattacaaagatgcaactgcaaagagaagccgaggtttatgatagttctcaatctcatgagagcttctcagactggcgaggtgaactactgcttgcccttcaacaagttttcttagaagagcgtagtgttttactagcagcatttcggacggagctgacagctctaggtactacagatgcagttggtttactaaactgtttggaacagagaatacaagaacagggtgttgaatatcaagcagctatggaatgcctccagaaagcagatagaaggagtttgttatctgaaattcaggcactgcatgcacaaatgaatggtaggaaaattactctgaaaagagaacaagagagtgagaaaccaagccaagaactcttggaatataatatacagcagaagcagtctcaaatgctggagatgcaagtggagctcagcagtatgaaagacagagcaacggaactgcaggagcagctgagttctgagaaaatggtggttgctgaactgaagagtgagcttgcacaaactaaattggaactagaaacaacactcaaggcacagcataaacacctaaaagaattggaggctttcaggttggaagttaaagataagacagatgaagtacatttgcttaatgacacattagcaagtgaacagaaaaaatcaagagagctccagtgggctttggagaaagagaaagccaagttgggacgcagtgaagaacgggataaagaagaacttgaggatctgaagttttcacttgagagtcagaaacaaaggaatcttcagctaaatctacttttggaacaacagaaacaactactgaacgaatcccagcaaaaaatagaatcacagagaatgctatatgatgcccagttgtcagaagaacaaggtcgaaacttagagcttcaggtacttcttgaatctgagaaagttcgaattcgggaaatgagtagtaccctagatagggagcgggaattgcacgcacagctgcagagcagtgatggtactggacagtctcggccacccttgccctcagaggacctactgaaagagctgcagaaacagctagaggaaaaacacagtcgcatagtagaattgttaaatgagactgaaaaatataaactggattctttgcaaacacgacagcaaatggaaaaagataggcaggttcacaggaaaacactgcagacagaacaggaggccaacactgagggacagaaaaaaatgcatgagctccagtccaaagtggaagatcttcagcgccagctggaagagaaaagacaacaagtttataagttagaccttgaaggacagcgactacaaggaatcatgcaggaattccagaagcaagaactagaacgagaagaaaaacgagaaagtagaagaattctgtatcagaaccttaatgagccaaccacgtggagcttaaccagtgatagaactagaaattgggttcttcaacagaaaatagaaggagaaacaaaagaatcaaactacgctaaattgattgaaatgaatggaggaggaaccggctgtaatcatgaattagaaatgatcagacaaaagcttcaatgtgtagcttcaaaactacaggttctaccccagaaagcctctgagagactacagtttgaaacagcagatgatgaagatttcatttgggttcaggaaaatattgatgaaattattttacaactacagaaattaactggccagcaaggtgaagagcccagcttggtgtccccaagtacttcttgtggctcattgactgaaagactactgagacaaaatgctgagctgacagggcatatcagtcaactgactgaagagaagaatgacttaaggaacatggttatgaagctggaagagcagatcaggtggtatcgacagacaggagctggtagagataattcttccaggttttcattgaatggtggtgccaacattgaagccatcattgcctctgaaaaagaagtatggaacagagaaaaattgactctccagaaatctttgaaaagggcagaggctgaagtatacaaactgaaagctgaactaagaaatgactctttacttcaaactctgagccctgattctgaacatgtcactttaaagagaatttatggtaaatacttgagggcagaaagttttcgaaaggctctcatttaccagaagaaatacctgctgctgttactgggtgggttccaggaatgtgaagatgccaccttggccctgcttgcccggatgggggggcagccagctttcacggatctagaggtgatcaccaatcgcccaaagggcttcaccaggtttcggtcggccgtcagagtatccattgcaatttccagaatgaaatttttggttcgacggtggcatcgagtcacaggttctgtttccatcaatattaacagagatggctttggactgaatcaaggtgcagaaaagactgactcattttatcattcttctggtgggctggagttatatggagaaccaagacatactacgtatcgctcaagatcagatctggactatattaggtcccctttaccatttcagaataggtacccaggcactccagctgatttcaatcctggttctttagcatgttctcagcttcagaattacgatcctgacagagccctaacagattatatcactcggctagaggcactgcaaagacgacttggaactatacagtcaggtgctctgagtttaaccacatcttggcagcaccacagtgcgagacccacagctcccttctttgaaattctttcacactcattaggataa

SEQ ID NO: 306428 - protein, 3857 aa, Artificial Sequence
  derived and/or modified sequence
MEDEERQKKLEAGKAKIEELSLAFLVRQLAQFRQRKAQSDGQSPSKKQKKKRKTSSSKHDVSAHHDLNIDQSQCNEMYINSSQRVESTVIPESTIMRTLHSGEITSHEQGFSVELESEISTTADDCSSEVNGCSFVMRTGKPTNLLREEEFGVDDSYSEQGAQDSPTHLEMMESELAGKQHEIEELNRELEEMRVTYGTEGLQQLQEFEAAIKQRDGIITQLTANLQQARREKDETMREFLELTEQSQKLQIQFQQLQASETLRNSTHSSTAADLLQAKQQILTHQQQLEEQDHLLEDYQKKKEDFTMQISFLQEKIKVYEMEQDKKVENSNKEEIQEKETIIEELNTKIIEEEKKTLELKDKLTTADKLLGELQEQIVQKNQEIKNMKLELTNSKQKERQSSEEIKQLMGTVEELQKRNHKDSQFETDIVQRMEQETQRKLEQLRAELDEMYGQQIVQMKQELIRQHMAQMEEMKTRHKGEMENALRSYSNITVNEDQIKLMNVAINELNIKLQDTNSQKEKLKEELGLILEEKCALQRQLEDLVEELSFSREQIQRARQTIAEQESKLNEAHKSLSTVEDLKAEIVSASESRKELELKHEAEVTNYKIKLEMLEKEKNAVLDRMAESQEAELERLRTQLLFSHEEELSKLKEDLEIEHRINIEKLKDNLGIHYKQQIDGLQNEMSQKIETMQFEKDNLITKQNQLILEISKLKDLQQSLVNSKSEEMTLQINELQKEIEILRQEEKEKGTLEQEVQELQLKTELLEKQMKEKENDLQEKFAQLEAENSILKDEKKTLEDMLKIHTPVSQEERLIFLDSIKSKSKDSVWEKEIEILIEENEDLKQQCIQLNEEIEKQRNTFSFAEKNFEVNYQELQEEYACLLKVKDDLEDSKNKQELEYKSKLKALNEELHLQRINPTTVKMKSSVFDEDKTFVAETLEMGEVVEKDTTELMEKLEVTKREKLELSQRLSDLSEQLKQKHGEISFLNEEVKSLKQEKEQVSLRCRELEIIINHNRAENVQSCDTQVSSLLDGVVTMTSRGAEGSVSKVNKSFGEESKIMVEDKVSFENMTVGEESKQEQLILDHLPSVTKESSLRATQPSENDKLQKELNVLKSEQNDLRLQMEAQRICLSLVYSTHVDQVREYMENEKDKALCSLKEELIFAQEEKIKELQKIHQLELQTMKTQETGDEGKPLHLLIGKLQKAVSEECSYFLQTLCSVLGEYYTPALKCEVNAEDKENSGDYISENEDPELQDYRYEVQDFQENMHTLLNKVTEEYNKLLVLQTRLSKIWGQQTDGMKLEFGEENLPKEETEFLSIHSQMTNLEDIDVNHKSKLSSLQDLEKTKLEEQVQELESLISSLQQQLKETEQNYEAEIHCLQKRLQAVSESTVPPSLPVDSVVITESDAQRTMYPGSCVKKNIDGTIEFSGEFGVKEETNIVKLLEKQYQEQLEEEVAKVIVSMSIAFAQQTELSRISGGKENTASSKQAHAVCQQEQHYFNEMKLSQDQIGFQTFETVDVKFKEEFKPLSKELGEHGKEILLSNSDPHDIPESKDCVLTISEEMFSKDKTFIVRQSIHDEISVSSMDASRQLMLNEEQLEDMRQELVRQYQEHQQATELLRQAHMRQMERQREDQEQLQEEIKRLNRQLAQRSSIDNENLVSERERVLLEELEALKQLSLAGREKLCCELRNSSTQTQNGNENQGEVEEQTFKEKELDRKPEDVPPEILSNERYALQKANNRLLKILLEVVKTTAAVEETIGRHVLGILDRSSKSQSSASLIWRSEAEASVKSCVHEEHTRVTDESIPSYSGSDMPRNDINMWSKVTEEGTELSQRLVRSGFAGTEIDPENEELMLNISSRLQAAVEKLLEAISETSSQLEHAKVTQTELMRESFRQKQEATESLKCQEELRERLHEESRAREQLAVELSKAEGVIDGYADEKTLFERQIQEKTDIIDRLEQELLCASNRLQELEAEQQQIQEERELLSRQKEAMKAEAGPVEQQLLQETEKLMKEKLEVQCQAEKVRDDLQKQVKALEIDVEEQVSRFIELEQEKNTELMDLRQQNQALEKQLEKMRKFLDEQAIDREHERDVFQQEIQKLEQQLKVVPRFQPISEHQTREVEQLANHLKEKTDKCSELLLSKEQLQRDIQERNEEIEKLEFRVRELEQALLVSADTFQKVEDRKHFGAVEAKPELSLEVQLQAERDAIDRKEKEITNLEEQLEQFREELENKNEEVQQLHMQLEIQKKESTTRLQELEQENKLFKDDMEKLGLAIKESDAMSTQDQHVLFGKFAQIIQEKEVEIDQLNEQVTKLQQQLKITTDNKVIEEKNELIRDLETQIECLMSDQECVKRNREEEIEQLNEVIEKLQQELANIGQKTSMNAHSLSEEADSLKHQLDVVIAEKLALEQQVETANEEMTFMKNVLKETNFKMNQLTQELFSLKRERESVEKIQSIPENSVNVAIDHLSKDKPELEVVLTEDALKSLENQTYFKSFEENGKGSIINLETRLLQLESTVSAKDLELTQCYKQIKDMQEQGQFETEMLQKKIVNLQKIVEEKVAAALVSQIQLEAVQEYAKFCQDNQTISSEPERTNIQNLNQLREDELGSDISALTLRISELESQVVEMHTSLILEKEQVEIAEKNVLEKEKKLLELQKLLEGNEKKQREKEKKRSPQDVEVLKTTTELFHSNEESGFFNELEALRAESVATKAELASYKEKAEKLQEELLVKETNMTSLQKDLSQVRDHLAEAKEKLSILEKEDETEVQESKKACMFEPLPIKLSKSIASQTDGTLKISSSNQTPQILVKNAGIQINLQSECSSEEVTEIISQFTEKIEKMQELHAAEILDMESRHISETETLKREHYVAVQLLKEECGTLKAVIQCLRSKEGLLRAVHNEGMQVLSLTESPYSDGEDHSIQQVSEPWLEERKAYINTISSLKDLITKMQLQREAEVYDSSQSHESFSDWRGELLLALQQVFLEERSVLLAAFRTELTALGTTDAVGLLNCLEQRIQEQGVEYQAAMECLQKADRRSLLSEIQALHAQMNGRKITLKREQESEKPSQELLEYNIQQKQSQMLEMQVELSSMKDRATELQEQLSSEKMVVAELKSELAQTKLELETTLKAQHKHLKELEAFRLEVKDKTDEVHLLNDTLASEQKKSRELQWALEKEKAKLGRSEERDKEELEDLKFSLESQKQRNLQLNLLLEQQKQLLNESQQKIESQRMLYDAQLSEEQGRNLELQVLLESEKVRIREMSSTLDRERELHAQLQSSDGTGQSRPPLPSEDLLKELQKQLEEKHSRIVELLNETEKYKLDSLQTRQQMEKDRQVHRKTLQTEQEANTEGQKKMHELQSKVEDLQRQLEEKRQQVYKLDLEGQRLQGIMQEFQKQELEREEKRESRRILYQNLNEPTTWSLTSDRTRNWVLQQKIEGETKESNYAKLIEMNGGGTGCNHELEMIRQKLQCVASKLQVLPQKASERLQFETADDEDFIWVQENIDEIILQLQKLTGQQGEEPSLVSPSTSCGSLTERLLRQNAELTGHISQLTEEKNDLRNMVMKLEEQIRWYRQTGAGRDNSSRFSLNGGANIEAIIASEKEVWNREKLTLQKSLKRAEAEVYKLKAELRNDSLLQTLSPDSEHVTLKRIYGKYLRAESFRKALIYQKKYLLLLLGGFQECEDATLALLARMGGQPAFTDLEVITNRPKGFTRFRSAVRVSIAISRMKFLVRRWHRVTGSVSININRDGFGLNQGAEKTDSFYHSSGGLELYGEPRHTTYRSRSDLDYIRSPLPFQNRYPGTPADFNPGSLACSQLQNYDPDRALTDYITRLEALQRRLGTIQSGSTTQFHAGMRR

SEQ ID NO: 306429 - protein, 3911 aa, Artificial Sequence
  derived and/or modified sequence
MEDEERQKKLEAGKAKIEELSLAFLVRQLAQFRQRKAQSDGQSPSKKQKKKRKTSSSKHDVSAHHDLNIDQSQCNEMYINSSQRVESTVIPESTIMRTLHSGEITSHEQGFSVELESEISTTADDCSSEVNGCSFVMRTGKPTNLLREEEFGVDDSYSEQGAQDSPTHLEMMESELAGKQHEIEELNRELEEMRVTYGTEGLQQLQEFEAAIKQRDGIITQLTANLQQARREKDETMREFLELTEQSQKLQIQFQQLQASETLRNSTHSSTAADLLQAKQQILTHQQQLEEQDHLLEDYQKKKEDFTMQISFLQEKIKVYEMEQDKKVENSNKEEIQEKETIIEELNTKIIEEEKKTLELKDKLTTADKLLGELQEQIVQKNQEIKNMKLELTNSKQKERQSSEEIKQLMGTVEELQKRNHKDSQFETDIVQRMEQETQRKLEQLRAELDEMYGQQIVQMKQELIRQHMAQMEEMKTRHKGEMENALRSYSNITVNEDQIKLMNVAINELNIKLQDTNSQKEKLKEELGLILEEKCALQRQLEDLVEELSFSREQIQRARQTIAEQESKLNEAHKSLSTVEDLKAEIVSASESRKELELKHEAEVTNYKIKLEMLEKEKNAVLDRMAESQEAELERLRTQLLFSHEEELSKLKEDLEIEHRINIEKLKDNLGIHYKQQIDGLQNEMSQKIETMQFEKDNLITKQNQLILEISKLKDLQQSLVNSKSEEMTLQINELQKEIEILRQEEKEKGTLEQEVQELQLKTELLEKQMKEKENDLQEKFAQLEAENSILKDEKKTLEDMLKIHTPVSQEERLIFLDSIKSKSKDSVWEKEIEILIEENEDLKQQCIQLNEEIEKQRNTFSFAEKNFEVNYQELQEEYACLLKVKDDLEDSKNKQELEYKSKLKALNEELHLQRINPTTVKMKSSVFDEDKTFVAETLEMGEVVEKDTTELMEKLEVTKREKLELSQRLSDLSEQLKQKHGEISFLNEEVKSLKQEKEQVSLRCRELEIIINHNRAENVQSCDTQVSSLLDGVVTMTSRGAEGSVSKVNKSFGEESKIMVEDKVSFENMTVGEESKQEQLILDHLPSVTKESSLRATQPSENDKLQKELNVLKSEQNDLRLQMEAQRICLSLVYSTHVDQVREYMENEKDKALCSLKEELIFAQEEKIKELQKIHQLELQTMKTQETGDEGKPLHLLIGKLQKAVSEECSYFLQTLCSVLGEYYTPALKCEVNAEDKENSGDYISENEDPELQDYRYEVQDFQENMHTLLNKVTEEYNKLLVLQTRLSKIWGQQTDGMKLEFGEENLPKEETEFLSIHSQMTNLEDIDVNHKSKLSSLQDLEKTKLEEQVQELESLISSLQQQLKETEQNYEAEIHCLQKRLQAVSESTVPPSLPVDSVVITESDAQRTMYPGSCVKKNIDGTIEFSGEFGVKEETNIVKLLEKQYQEQLEEEVAKVIVSMSIAFAQQTELSRISGGKENTASSKQAHAVCQQEQHYFNEMKLSQDQIGFQTFETVDVKFKEEFKPLSKELGEHGKEILLSNSDPHDIPESKDCVLTISEEMFSKDKTFIVRQSIHDEISVSSMDASRQLMLNEEQLEDMRQELVRQYQEHQQATELLRQAHMRQMERQREDQEQLQEEIKRLNRQLAQRSSIDNENLVSERERVLLEELEALKQLSLAGREKLCCELRNSSTQTQNGNENQGEVEEQTFKEKELDRKPEDVPPEILSNERYALQKANNRLLKILLEVVKTTAAVEETIGRHVLGILDRSSKSQSSASLIWRSEAEASVKSCVHEEHTRVTDESIPSYSGSDMPRNDINMWSKVTEEGTELSQRLVRSGFAGTEIDPENEELMLNISSRLQAAVEKLLEAISETSSQLEHAKVTQTELMRESFRQKQEATESLKCQEELRERLHEESRAREQLAVELSKAEGVIDGYADEKTLFERQIQEKTDIIDRLEQELLCASNRLQELEAEQQQIQEERELLSRQKEAMKAEAGPVEQQLLQETEKLMKEKLEVQCQAEKVRDDLQKQVKALEIDVEEQVSRFIELEQEKNTELMDLRQQNQALEKQLEKMRKFLDEQAIDREHERDVFQQEIQKLEQQLKVVPRFQPISEHQTREVEQLANHLKEKTDKCSELLLSKEQLQRDIQERNEEIEKLEFRVRELEQALLVSADTFQKVEDRKHFGAVEAKPELSLEVQLQAERDAIDRKEKEITNLEEQLEQFREELENKNEEVQQLHMQLEIQKKESTTRLQELEQENKLFKDDMEKLGLAIKESDAMSTQDQHVLFGKFAQIIQEKEVEIDQLNEQVTKLQQQLKITTDNKVIEEKNELIRDLETQIECLMSDQECVKRNREEEIEQLNEVIEKLQQELANIGQKTSMNAHSLSEEADSLKHQLDVVIAEKLALEQQVETANEEMTFMKNVLKETNFKMNQLTQELFSLKRERESVEKIQSIPENSVNVAIDHLSKDKPELEVVLTEDALKSLENQTYFKSFEENGKGSIINLETRLLQLESTVSAKDLELTQCYKQIKDMQEQGQFETEMLQKKIVNLQKIVEEKVAAALVSQIQLEAVQEYAKFCQDNQTISSEPERTNIQNLNQLREDELGSDISALTLRISELESQVVEMHTSLILEKEQVEIAEKNVLEKEKKLLELQKLLEGNEKKQREKEKKRSPQDVEVLKTTTELFHSNEESGFFNELEALRAESVATKAELASYKEKAEKLQEELLVKETNMTSLQKDLSQVRDHLAEAKEKLSILEKEDETEVQESKKACMFEPLPIKLSKSIASQTDGTLKISSSNQTPQILVKNAGIQINLQSECSSEEVTEIISQFTEKIEKMQELHAAEILDMESRHISETETLKREHYVAVQLLKEECGTLKAVIQCLRSKEVFGFYNMCFSTLCDSGSDWGQGIYLTHSQGFDIASEGRGEESESATDSFPKKIKGLLRAVHNEGMQVLSLTESPYSDGEDHSIQQVSEPWLEERKAYINTISSLKDLITKMQLQREAEVYDSSQSHESFSDWRGELLLALQQVFLEERSVLLAAFRTELTALGTTDAVGLLNCLEQRIQEQGVEYQAAMECLQKADRRSLLSEIQALHAQMNGRKITLKREQESEKPSQELLEYNIQQKQSQMLEMQVELSSMKDRATELQEQLSSEKMVVAELKSELAQTKLELETTLKAQHKHLKELEAFRLEVKDKTDEVHLLNDTLASEQKKSRELQWALEKEKAKLGRSEERDKEELEDLKFSLESQKQRNLQLNLLLEQQKQLLNESQQKIESQRMLYDAQLSEEQGRNLELQVLLESEKVRIREMSSTLDRERELHAQLQSSDGTGQSRPPLPSEDLLKELQKQLEEKHSRIVELLNETEKYKLDSLQTRQQMEKDRQVHRKTLQTEQEANTEGQKKMHELQSKVEDLQRQLEEKRQQVYKLDLEGQRLQGIMQEFQKQELEREEKRESRRILYQNLNEPTTWSLTSDRTRNWVLQQKIEGETKESNYAKLIEMNGGGTGCNHELEMIRQKLQCVASKLQVLPQKASERLQFETADDEDFIWVQENIDEIILQLQKLTGQQGEEPSLVSPSTSCGSLTERLLRQNAELTGHISQLTEEKNDLRNMVMKLEEQIRWYRQTGAGRDNSSRFSLNGGANIEAIIASEKEVWNREKLTLQKSLKRAEAEVYKLKAELRNDSLLQTLSPDSEHVTLKRIYGKYLRAESFRKALIYQKKYLLLLLGGFQECEDATLALLARMGGQPAFTDLEVITNRPKGFTRFRSAVRVSIAISRMKFLVRRWHRVTGSVSININRDGFGLNQGAEKTDSFYHSSGGLELYGEPRHTTYRSRSDLDYIRSPLPFQNRYPGTPADFNPGSLACSQLQNYDPDRALTDYITRLEALQRRLGTIQSGSTTQFHAGMRR

SEQ ID NO: 306430 - DNA, 11574 bp, Artificial Sequence
  derived and/or modified sequence
atggaggatgaggagcggcagaagaagctagaggccgggaaagccaaaatcgaagagctgagcctcgccttcctggtacgccaacttgctcagtttcgtcagagaaaggcccagtccgacggacagtcaccgtccaaaaagcagaagaaaaaacgaaaaacgagctctagtaagcacgatgtaagcgcccaccacgatcttaacatcgaccaatcacagtgcaatgagatgtatattaactctagccaacgggtcgaaagcacagtaatacccgagtcaacaattatgcgtacattgcatagcggggaaatcacctctcacgagcaggggttctctgtggagcttgagtccgagatctctaccactgccgacgactgcagtagcgaagttaatggctgtagcttcgtgatgagaaccggcaagccaactaatctgctccgcgaggaggagtttggcgtagatgactcctactccgagcagggggcacaggacagccctacccatctcgagatgatggagtcagagcttgcaggaaaacaacatgaaatcgaagagttaaatcgcgaactagaagagatgcgcgttacctatggcactgagggactgcagcagctgcaggaattcgaagctgcaatcaaacagagagacgggattatcacccagctgactgccaatctgcagcaggctagacgagagaaggacgaaactatgcgtgagttcctcgagctgaccgagcagagccagaaattacagatccagtttcagcagctccaagcctccgaaacactccgcaattctacacactcgtccaccgccgccgacctgttgcaagctaaacaacaaatacttacacaccaacagcagcttgaggaacaagatcatctactggaggactatcagaaaaaaaaggaggactttacgatgcagatctcattcttacaggaaaagataaaagtatatgaaatggagcaggataagaaagtggagaattcgaataaagaagagattcaggagaaggagaccattatcgaagaactgaacactaaaattattgaagaagagaagaaaacattagagcttaaagacaagttaacgactgccgacaagcttctgggagagctacaggagcagattgtccagaaaaaccaggagatcaaaaacatgaaactcgaactgacaaattccaaacagaaagagaggcagagcagcgaagagattaaacaactgatgggaactgttgaagagctgcagaagagaaaccacaaggactcccagtttgagaccgatatcgtccaacgcatggagcaagagacccaaagaaagctggaacagttaagggctgagcttgacgaaatgtacggacagcaaatcgtgcagatgaagcaggagcttatccgtcagcacatggcccagatggaggagatgaaaacccggcataaaggggagatggaaaatgccctcaggtcctattcaaatatcactgtgaatgaggaccaaataaaacttatgaacgtcgctataaacgagctgaatattaagctgcaggacaccaattcccagaaggagaagctcaaggaggagttgggactgatactcgaggagaagtgtgccctccagagacagctagaagatctggtcgaggagctgagtttctccagagaacagatacagagagcccggcagacgatcgcggagcaggaaagtaagctcaacgaggcacacaagagtttgagtacagttgaggatctgaaggccgaaattgtatctgccagtgaaagccgcaaggaattggagttaaaacatgaggctgaggtgactaattataagattaaactggaaatgctggagaaggaaaagaatgcagtcctggataggatggctgagtcccaggaggcggagctcgagcggctgcggacgcagctgttattcagccatgaggaagaactttccaagctgaaagaggatcttgaaatagaacaccgaattaacatcgagaaattgaaggacaatcttggaattcactacaagcaacagatcgatggtctgcaaaacgaaatgtcccagaagattgaaacgatgcagttcgagaaggacaacttgatcaccaagcagaaccaattgatcctggagatctccaaattgaaagatctgcagcagtctctggtaaactctaagtctgaagagatgacactgcagatcaatgaactgcagaaggagatcgagatcctgagacaggaagagaaagagaaaggaactcttgagcaggaagtgcaagagttacagctgaaaactgagcttcttgagaaacagatgaaagaaaaggaaaacgacttgcaggaaaagttcgcccagctcgaagctgaaaatagcatcttaaaggatgagaaaaagactctagaagacatgttaaaaatccataccccggtctcacaggaggaaaggctcatcttcctagactctatcaagtccaaaagcaaggatagcgtctgggaaaaggagatcgagatcctcatagaggagaacgaggacttgaaacaacagtgcatccagcttaatgaggagatcgaaaagcagcgtaacaccttttcctttgccgaaaaaaactttgaagtgaactatcaggaactccaggaagagtacgcatgcctgctcaaagtaaaagacgacctggaggatagtaagaacaaacaagagctggagtacaaaagtaagctaaaggctctcaatgaagagttgcaccttcagcgtattaatccaaccacagtcaagatgaaatcatctgtgttcgacgaagacaagacttttgtggccgaaacattggagatgggggaagttgtggagaaggacacaacagagttgatggagaagcttgaggtgaccaagcgggaaaaattggagctgtcacagcggttaagcgacctgtcggagcagttaaaacagaagcacggcgaaatcagtttcctgaacgaggaagttaagtcactgaagcaggaaaaggagcaggtctctctcagatgcagggagctggagattattataaatcataacagagctgaaaatgtccagtcctgtgacacacaagtctcttcgctactggacggggtggtcaccatgacttcgcgaggcgctgagggcagtgtttccaaagttaataaaagctttggagaagagtcaaaaatcatggtggaggacaaggtctcttttgagaacatgaccgtgggcgaggaaagcaaacaggagcagcttatcctggatcacctcccttccgtgaccaaggaatcttcactgagggccacgcagccctctgagaacgacaaacttcagaaggaactgaatgtgctaaagagcgagcagaacgacttacgactgcagatggaagcccagcggatctgcctgtccctggtgtactccacccacgtggatcaagtccgggaatacatggagaacgaaaaagacaaagcactttgttcactgaaagaggagcttatctttgcccaggaggaaaaaatcaaagagttacaaaagatccaccaattggagctgcagaccatgaagacacaggagaccggcgacgagggcaagccactgcacctactaatcggcaagctgcagaaggctgtaagcgaggagtgtagttatttcctgcagactctgtgtagcgtgttgggcgaatattatactcctgcacttaaatgcgaagtgaacgcagaggacaaggaaaattcaggggattatatctccgaaaacgaggaccctgaactacaagattacagatatgaagtgcaggatttccaggagaatatgcacactctgctgaacaaggtcacagaggagtacaataagctgctagtattgcagacacgactatctaagatttggggacaacagactgacgggatgaagttggaatttggggaggagaaccttcccaaggaggagacagaatttctatcaattcactcccagatgaccaatctggaggacatcgatgtgaatcacaagagtaagctgtcgtccctgcaggatctggagaagacaaagctggaagaacaggtgcaggagttggagagcctgatctccagcctacagcagcagttgaaagagactgagcagaattacgaggccgaaatccattgcttacagaaacgcttacaggcagttagcgagtctaccgtgcctccctccctccctgtggattccgttgtcatcactgaaagtgacgcccaacgaaccatgtatccgggcagctgtgtgaagaagaatattgatggcaccatcgagttctccggcgaatttggagttaaggaggagactaatatagtcaaattgctggaaaaacaataccaggagcagctagaagaggaagttgcaaaagtaattgtttctatgtccatcgcatttgcccagcagactgagctgtccagaatctcagggggtaaggaaaatacggccagctcaaagcaggcccatgctgtttgtcagcaggaacagcattattttaacgaaatgaagctttctcaggaccagattggctttcagacttttgagactgtggacgtgaaattcaaggaggagttcaagcctctgtctaaggaattgggagagcacggcaaggaaatcctcctttcaaactccgatccccacgatatccccgagtcaaaggattgtgtgctgacgatctccgaagagatgtttagtaaggataagaccttcatcgttaggcagagcattcatgacgaaatctccgtgtcctcgatggacgcttctaggcagcttatgttgaatgaagaacaacttgaggatatgcgacaagaactcgtgcgccaatatcaggaacaccaacaggcaacagaacttctgcgccaggctcacatgcgacagatggagaggcaacgggaagaccaggagcaattacaggaggagattaagcggctcaataggcagctggcccagagatctagcattgacaacgaaaacctggtatccgagcgggagcgcgttctcctggaggaactggaagccctgaagcagctgtccctcgccggtcgggagaaattgtgctgcgaactgagaaattcaagcacccagacccagaacggcaacgagaaccagggcgaggtggaggagcagacatttaaggagaaagagctggatcggaagccagaggatgtgcccccagaaattttaagtaatgaacggtatgccttgcagaaggccaataatcggctgttgaagattctgctcgaagtagttaaaaccactgccgcagtggaagaaacgatcggtaggcatgttctcgggatcctagaccgtagctcaaagtcacagagcagcgcctcactcatctggcgcagtgaggctgaggccagtgtcaagagctgtgtccatgaggagcatacaagagtgaccgacgaatctattccatcatatagcggatcagatatgccgagaaacgatatcaacatgtggagcaaggtaacagaggagggtacggagttaagtcagcggttggttcgcagcggatttgcagggactgagatcgaccccgagaacgaggagctcatgctcaacatcagcagccggctgcaggctgccgttgagaaactgcttgaggccatatcggagacctcctcacaactcgaacacgcaaaggtcacccagaccgagctgatgcgggagagttttcgtcagaagcaggaggcaacggaatctctgaagtgtcaggaggagctgcgagagaggttgcacgaggagagccgcgcccgcgagcagctcgcagttgaactctccaaggcagagggtgtgatcgatgggtacgcagatgaaaagaccctgttcgaacgtcagatacaggagaagacggacatcatcgatagactggagcaagagttgctgtgcgcgagcaaccgactgcaagaacttgaagccgaacagcaacaaattcaggaggagagggaactcctctcccgtcagaaggaggccatgaaggccgaggcgggacctgtcgagcagcagttgctccaagagacggaaaagctgatgaaagagaagctggaagtgcaatgtcaggccgaaaaagtaagagatgatctgcaaaaacaagtgaaggcactcgaaatcgacgtcgaagaacaggtcagtcgcttcatcgaactggagcaggagaagaataccgaactgatggacttacgccagcaaaatcaggccctagaaaaacagctggaaaagatgcggaagttcttagacgagcaggctattgatcgcgagcatgaacgggatgtgttccagcaggagatacagaaattggagcagcagctaaaagtggtgccacggtttcaacctatcagtgagcatcagacccgcgaggtggagcaattagccaatcacctaaaagagaagactgacaagtgctccgagctgctgctgtcaaaagagcaactgcagcgcgatatacaagagcgtaatgaagagatagagaaactcgagttccgggtgagggaactcgagcaggctcttctggtttcagccgataccttccagaaggtggaagaccgcaagcattttggtgctgtggaggctaaaccggaactgtccttggaggttcaattacaggctgaacgggacgccattgaccgtaaagagaaggaaatcaccaatctggaagagcaacttgaacagtttagagaagagctggaaaacaagaatgaggaggtgcagcagttgcatatgcaacttgaaattcaaaaaaaggagagtacaactcgattgcaagagttggagcaggagaacaagctgttcaaggatgatatggaaaagctcgggctggcgataaaggaaagtgacgcaatgtccacccaagaccagcacgtcctgtttgggaaattcgcacagattatccaggagaaagaagttgaaatcgatcagctaaacgagcaggttaccaaactccagcagcagctcaagatcaccactgataacaaggttatagaggaaaagaatgagctaatccgggatctcgaaactcagatcgagtgcctgatgtccgatcaggaatgcgtgaagagaaaccgggaggaagagatagagcagctgaacgaggttattgaaaaactccagcaggaactggctaacatcgggcagaaaacatcgatgaatgctcattctctgtctgaggaggctgattctttaaaacatcagctggatgtagtcatcgccgaaaaactcgcacttgagcaacaggtagaaacggccaacgaagagatgactttcatgaaaaacgtccttaaggaaactaatttcaagatgaatcagctgacccaggagttgttctctctcaaacgggaaagggagtctgtggagaagattcagtccattcctgagaatagtgtgaacgtggctatcgatcacctatccaaagataagcctgagcttgaggtggtgcttaccgaggacgcactgaagtcccttgagaatcaaacctatttcaaatccttcgaagagaacggcaagggtagcataataaaccttgaaacaaggcttttgcagctggagtcgacagtctcggctaaagacctggagttaacacaatgttataagcagattaaagacatgcaggaacaggggcaattcgaaacagagatgcttcagaaaaagatcgttaatttacagaagattgtcgaagaaaaagttgctgccgctttggtgtcacagatccagctcgaagctgtccaagagtacgccaagttctgtcaggacaatcaaacgatcagcagcgagcccgaacgaaccaacattcagaatctgaatcagctcagggaagatgagctggggagcgatattagcgccttgacgctgcggattagcgagctggagagccaggtggtggagatgcatacatcccttatcttggagaaggagcaggtagaaattgccgagaagaatgtactggagaaggagaagaagctattagagctgcagaaacttcttgagggaaatgagaaaaagcagcgcgagaaggaaaaaaaaaggtcccctcaggacgtggaagtgttgaagactactactgagctttttcattcaaacgaggaatctggttttttcaacgaactcgaggcactacgggcagagtccgtcgcgacaaaggcagagttagctagttacaaggagaaagctgaaaaattgcaagaggaattgctcgtgaaggaaacaaacatgacctcccttcaaaaagacctgagccaagtcagagaccaccttgctgaagccaaagaaaagctttctatcttggaaaaagaagacgaaacagaagtgcaggaatcaaaaaaggcatgtatgttcgagccactgcctatcaagctatcaaagtcaatcgccagtcagacagacgggacgctaaagatatcttcgagtaaccagaccccacagatcctggtgaaaaacgctgggatccagatcaatctgcaaagcgagtgtagctctgaagaggtcaccgagatcattagccagtttacagagaagattgagaagatgcaggaactccacgccgcagaaattcttgacatggagtctaggcacatcagcgagacagagactctgaaaagggaacactacgtagcggtgcaattgctgaaagaggagtgcggaacattaaaggccgtgatccagtgcctgcggtctaaagagggactgctgcgggccgtgcacaatgaggggatgcaggtgctgtccctgacagagagcccctattctgatggggaagaccactccattcagcaggttagcgagccttggctggaagaacgcaaagcctacattaacaccatatcttcccttaaagacctgattaccaaaatgcagctccagcgcgaggccgaggtctatgacagcagtcagtcacatgaatcattcagcgattggcgtggtgaattgctgctagcactgcagcaagtttttctggaggaacgcagtgtgctgctggcagccttccgcaccgaattgacggctctcggcactaccgatgccgtcggtctgttaaactgtctcgagcagcgcattcaggaacagggcgtggaataccaagccgcaatggagtgtctgcagaaggcagaccgacgcagcctcctgtctgagatccaggccttgcatgctcagatgaacgggaggaaaatcacactcaagagggagcaagaaagcgagaaaccgtcccaagagctgttagagtacaatatacagcagaaacagagccagatgttggaaatgcaggtcgagcttagtagcatgaaggacagggcaaccgagcttcaagagcagctgtcatcggagaaaatggtggtagctgaactgaaatctgaactggcacagaccaagttagagctcgagactacgctgaaggcccagcataagcaccttaaggaacttgaagcatttaggttggaggtgaaggacaagactgatgaagtgcacctgctcaacgataccctcgcaagcgagcaaaagaagtcacgcgaacttcagtgggctctggaaaaagagaaggcgaagcttgggagatctgaagaaagggacaaagaagagttggaagatctaaaattctccctcgaatcacagaaacagcggaatctgcagctaaacctgttgttagagcagcagaagcagctcctaaatgagtcacaacaaaagatcgagtcccagcgcatgttgtacgacgcccagctctccgaggagcaaggcagaaatctcgagctccaggtacttctcgagtccgagaaggtgcggattagggaaatgagcagcacactcgaccgggagagagaactgcacgctcagctgcaaagtagcgatgggactggtcaaagtaggcctccattacctagtgaggacctattaaaggaactccagaagcagctggaggaaaaacacagccggatagtggagctgctgaacgagactgaaaaatataagttagacagccttcagactaggcagcagatggagaaggaccggcaggtgcaccgtaagactctccagactgagcaggaggcgaacaccgaagggcagaaaaaaatgcacgaacttcaaagtaaggtcgaagacttgcagagacagctggaagagaaacgacagcaggtttataagctggatttggagggtcagaggctgcagggaatcatgcaggagtttcagaagcaggaactggaaagagaggagaaacgcgaatcccgcaggattctctaccagaacttgaatgagcccacaacgtggagccttacctccgaccgtactaggaattgggtgcttcagcagaaaattgaaggcgagacgaaggagtcgaactacgctaaactgatcgaaatgaacgggggcgggactgggtgcaatcacgagttggagatgatcaggcagaagttacagtgcgtggcctctaagcttcaagtgctcccgcagaaggctagcgagcggctacagttcgagacagccgacgatgaagactttatctgggtgcaagaaaatatcgatgagatcattctgcaactccagaaattgacaggccagcagggcgaggagccctcgcttgtgagcccttcaaccagctgtgggagtctgacggagcggctgctacgtcagaacgctgagcttactgggcacattagccagttgaccgaagaaaagaacgaccttcggaatatggtcatgaagctagaggagcagattagatggtaccgccagacgggtgctggtagggataacagttcaagattcagcctgaacggaggggccaatattgaagctattatagcatctgagaaagaagtgtggaatcgagagaaactaactctgcagaagagtctgaaaagggcagaggccgaggtatacaagctgaaggccgaactgagaaacgacagtctgctgcagacgttgagccccgatagtgaacacgtcaccctgaaacggatttatggaaagtacttgcgtgccgaatcattcagaaaagcactgatctaccagaaaaaatacttgttgctgttactcggcggattccaggagtgcgaggatgccacactggccttgctggcaaggatgggcggccagcccgcatttactgacctcgaagtaatcaccaaccgccccaaaggattcactcggttccgatccgctgtgcgcgtgtccattgccatcagcagaatgaaattcctggttaggcggtggcacagggtcactgggagtgttagcatcaacatcaatagagacgggttcggtctcaatcaaggtgctgaaaagacggactccttctatcattcttcaggcggactggaactctacggggaaccccgccacacaacttatagatctagaagcgatttggattacatccgatcccccctgccttttcaaaacaggtacccaggcacccctgcagactttaatcccggatctctggcttgtagtcaactacagaattacgatcctgaccgcgctctcacggactacattaccaggctcgaagcactccagcgacgactgggaaccatccagagcggtagcactacacaatttcacgccggcatgcgaaggtag

SEQ ID NO: 306431 - DNA, 11736 bp, Artificial Sequence
  derived and/or modified sequence
atggaggacgaagaaagacaaaagaaactggaggccgggaaagctaaaatagaagaattatctctagcatttctggttcgtcagctggcccagtttcggcagagaaaggcccagtccgatggccagagcccctcaaaaaaacaaaagaagaagcgcaaaacctctagctccaaacatgacgttagcgcgcatcacgatctgaatattgaccagtctcagtgcaatgagatgtacataaactcctctcagagagtggaatccaccgtgattcctgagtctaccattatgaggacgttgcactctggggagataacctcgcacgaacaggggttcagtgtggaactcgagtctgaaatatctacaaccgccgacgattgctcctctgaggtcaatggctgttcctttgtcatgagaaccggaaaacccactaatctacttcgcgaggaggaattcggggtggacgatagttactctgaacagggagcccaagactccccgacgcatctcgagatgatggagtcagaattggctggcaaacagcacgagatcgaggagctaaatagggagctggaagaaatgagagtgacttacggcacggagggcttgcaacagctgcaagagtttgaggcagccatcaaacagcgggacgggattataacgcaattaacggctaacctgcagcaggcacgccgggaaaaggatgaaactatgcgggaattcctggagctaacggaacagtctcagaagcttcaaatccagtttcagcagttacaggcatctgagacgctccgcaatagcacccacagtagtacggccgcggacctgctgcaggccaaacaacagatcctgacgcatcagcagcagctggaagaacaggaccacctcctggaagattaccagaagaagaaggaggactttaccatgcaaatcagctttctccaagagaagatcaaggtgtacgaaatggagcaggataagaaagtggagaacagcaataaggaagaaatacaggaaaaggaaaccatcatcgaagaactgaacacaaaaattatcgaggaagaaaaaaaaaccctggaactgaaagataagctcaccaccgcagacaaattgctaggggagttgcaggagcagatcgtgcaaaagaatcaagagatcaagaatatgaagctggagcttactaatagtaaacaaaaggaacgtcagtctagcgaggagatcaaacagcttatggggaccgttgaagaactccagaagcgcaaccataaggactcacagtttgagaccgacatagtccagagaatggagcaggagactcagcggaaactggagcagttaagggccgaactggacgagatgtacggacaacagatcgtacagatgaagcaagagctgatcagacaacatatggctcagatggaagagatgaaaaccaggcacaaaggcgagatggaaaatgccctacgttcatattccaatattacggtcaacgaagatcaaattaagctaatgaatgttgctatcaatgaactcaatattaaattgcaggacaccaattcccagaaggagaagctgaaggaggaacttggactcatactggaggagaagtgtgctttacagcgacagctggaggatcttgttgaagaactctctttttcccgcgaacagatccagagggctcggcagaccatcgccgaacaggaatccaaactcaacgaggcacataagtccttgagcacagtagaggacctgaaggccgagattgtatccgcgtctgaatcccgtaaggagcttgagttaaaacacgaagctgaagtgactaactacaagatcaaattggaaatgctcgaaaaggagaagaacgccgttctcgacagaatggctgagagccaagaggccgaattggagcgtctgcggacgcagctgctgttttcgcacgaagaggagttaagcaaattgaaggaggatttggagatcgagcatagaatcaacatcgaaaagcttaaggacaacctgggcatacattataaacagcagatcgatggattacagaatgaaatgtcccagaaaattgaaactatgcagtttgaaaaggacaacctcatcacgaaacagaatcagctcattctcgagatatccaaactgaaagacttacaacagagtttagtcaactccaagtctgaggagatgactttgcagattaacgagctgcagaaggagatagagattctgagacaggaagagaaagagaaggggaccctggaacaggaggtgcaggaattgcaactcaaaactgaattattggaaaaacaaatgaaggaaaaggagaacgatcttcaggagaagtttgcccagttggaagccgaaaactctatattgaaagatgaaaagaaaacactcgaggacatgctcaagatacatacccctgtgtcacaagaagagaggcttatctttctcgactcaatcaaatcaaagagcaaagactcagtctgggaaaaggaaattgagatcctgattgaggaaaacgaagacctgaagcaacagtgtatccaactgaatgaggagatcgagaaacagaggaatacattctcatttgcagagaaaaattttgaagtgaactaccaggagctgcaggaggagtatgcctgtttactcaaggttaaggacgatttggaagattctaagaacaagcaggagctggagtataagtcaaagctgaaggctctgaatgaagagcttcatcttcagcgcatcaaccccacgactgttaaaatgaagtcttcagtttttgatgaagataagactttcgtagccgaaactcttgaaatgggggaagtggtggagaaagataccaccgaactcatggagaaactcgaggtgactaaacgggagaagttagagttatcacagcgcctgtcagacctgtcagagcaactgaaacagaaacacggagagatatcctttttgaacgaggaagtgaaatcactgaagcaggaaaaggaacaggtttctctccgctgtcgcgagttagagattatcattaaccacaaccgagccgagaacgtccaatcctgcgacacccaggtgagctcactgttggatggcgtagttacaatgactagccgtggcgcagaaggaagcgtgagcaaggttaataaatcttttggcgaagagagtaagataatggtggaagataaggtttcctttgagaatatgacagtcggtgaggagtccaagcaggaacaattgattctggatcacctcccatccgtcactaaggagagctcccttagagctacccagccaagcgagaacgacaagcttcagaaagaactcaatgtgctcaagtcagaacaaaatgacttgcgtctccagatggaagcccagcgcatttgcctgagtctggtgtactcaacccacgttgatcaggtgagggagtacatggagaacgagaaagataaggccttgtgctcccttaaggaagagttgatcttcgcccaggaagagaagatcaaggaattgcagaagatacaccagctcgaattgcagaccatgaaaacgcaggagactggggacgaagggaagccgctgcaccttctgatcggcaagctgcagaaagcggtctccgaagaatgctcttacttcctccagaccctgtgtagcgtgttaggcgaatattacacaccggctctgaagtgcgaagttaacgctgaggacaaagaaaattccggggattatatctctgagaatgaagatccagagctgcaggactacaggtatgaagtgcaagacttccaggagaatatgcataccttgctgaataaggtaaccgaagaatacaataaactgctggtcctccaaacccgcctctcaaagatctggggacagcagacagatgggatgaaactggaattcggggaggaaaatctgcccaaggaagaaacagaattcctaagtatacattcacagatgactaatctcgaggatattgatgttaatcataagagtaagctatccagtttgcaggatctcgagaagaccaaactggaggagcaagtacaggaattggagtccctgatctccagtctccaacagcagctgaaggagaccgagcagaattacgaagcagaaatccattgtttgcagaagcgtcttcaggccgtcagcgagagtactgtcccgcctagtcttccagtggatagcgttgtaatcacagaaagtgatgcacagaggacaatgtaccccgggtcatgtgtcaagaagaatatcgatggaacaatcgaattctccggcgagtttggggttaaggaggagaccaacatcgtgaaactcctggagaagcagtaccaggaacagctggaagaggaagttgctaaggtgatcgtgtccatgtctattgcattcgcccagcagacagaactctctcggatctcgggcgggaaggaaaatacggcaagcagcaagcaggcccacgctgtgtgtcaacaagagcagcattacttcaacgaaatgaaactttctcaggatcaaatagggttccaaaccttcgagaccgtggatgtgaagttcaaagaggagttcaaacccctgtcaaaagaactgggcgagcacggcaaagaaattttgttgtccaactctgatccccacgacattcctgagtcaaaggactgtgttcttactatttctgaagagatgttctcaaaggataaaactttcatcgtcaggcagtctatccatgacgagatctcagtctcaagcatggacgcctcgcgtcaactcatgctcaatgaggagcaactcgaggatatgagacaggaactcgtcaggcaataccaggaacaccagcaggccactgagttattgaggcaagctcacatgcgacagatggagcggcaacgggaggatcaggagcaattgcaggaagaaatcaaacggctaaatcgccagctggcccagagatcctccatcgacaatgaaaacctggttagtgaacgcgaaagagttctcctggaggaacttgaggcactcaaacagctgagtctggctggtcgggaaaagctctgctgtgaactgagaaattcctccacacagactcagaatggcaacgagaatcagggtgaagtggaagagcaaaccttcaaggagaaggagctcgatcggaaacctgaggacgtacctcctgagattttatctaatgagagatacgctctgcagaaggcaaataaccgtctgctcaagatcctactggaagtcgtaaagacaacagctgctgtagaagagaccatcgggaggcacgtgctgggaatcctcgaccgaagtagcaaatcccagtcctccgctagtttgatatggcggtccgaagcagaggcctcggtcaagagctgcgtacacgaggaacatactcgcgtgactgacgagagcatcccatcctatagcggatccgacatgcctaggaacgatatcaatatgtggtctaaggtcaccgaggaggggacggaattgagtcagagactcgtgcgctccgggttcgccgggacagaaatcgatcccgagaatgaggaattaatgttgaacattagcagcaggctccaggccgccgttgaaaagctgctcgaggccatctccgagaccagctctcaactagagcatgccaaagttactcagacagagttgatgagggagagctttcggcagaagcaggaagccacagagagcttgaaatgccaggaagagctgagggagcgcctgcacgaagagagtcgtgctagagagcagctagcagtggagctgagcaaagccgaaggagtgatcgatggatacgcagacgagaaaacgctgttcgaacgacagattcaggaaaagaccgacatcatcgaccggttggagcaggagctgctttgcgccagcaatcgactccaggagctggaggccgagcagcaacagatccaggaagagcgggagctcctttcaaggcagaaagaggctatgaaagctgaggctgggcccgtggaacagcagctcctgcaggagacagagaaactgatgaaggaaaagctcgaagttcaatgccaggccgaaaaagtcagggacgacctgcagaagcaggtgaaggccctggagatagatgttgaggaacaggtatccagattcattgaactggagcaagagaagaacactgaattgatggacctaaggcaacagaatcaggctctggagaagcaactggagaaaatgagaaagtttctggatgaacaagccattgatagagaacacgaaagggacgttttccagcaggagattcagaagctcgagcagcagctaaaagtcgtcccacgtttccagccaatttcagagcatcagacccgcgaggtggagcagctggccaaccatctgaaggaaaagaccgacaagtgttctgagctgctcctgagtaaggagcagctccagagagacatacaggagcggaacgaagagattgagaaacttgaattccgagtgcgggagttggaacaggccctgctagtgtctgcagacacattccagaaggtggaagatagaaagcactttggcgccgtcgaagccaaaccggaattatctctggaggtgcagctacaggccgaacgcgacgcgatcgatcggaaggaaaaagaaattaccaaccttgaggagcagctggagcaatttagggaagagctggagaacaagaacgaggaagtgcaacagctccacatgcagctggagatccagaaaaaggagtcaaccacaaggcttcaggagcttgagcaagagaataagctgttcaaggatgatatggaaaagctcggacttgctattaaggaatccgatgcaatgtcaactcaggaccagcatgtgctctttggtaagtttgctcagatcattcaggagaaagaagtggaaatcgaccaattgaatgagcaggtgacaaagctgcagcagcagttgaaaatcacaacagacaacaaggtgattgaagagaagaacgagttgatcagggacctggagacacagattgagtgcctgatgagtgatcaggagtgtgttaaaaggaaccgcgaggaggaaatcgagcagctgaacgaagtgattgaaaaactgcagcaggagctggccaacattgggcagaagacctccatgaacgcgcattctttatctgaagaggcggattctctcaaacatcaattggacgtagtcatcgccgagaagctcgcccttgagcagcaagtcgaaacggcaaatgaggagatgacattcatgaaaaacgtgttaaaggaaactaactttaaaatgaatcaactcacccaggagcttttctctttgaagagggagcgcgagtccgtagagaagatccagagcatccctgagaattccgtgaacgtggcgattgaccatctctccaaagataagcccgagttggaggtcgtgttaactgaggacgctttgaagagcctggagaaccagacatacttcaagagttttgaggaaaacgggaagggctccatcataaacctggagactcgcctgcttcaactggagtctaccgtgagcgcgaaggatctggaactcacccagtgttataagcagatcaaggacatgcaagaacagggccagttcgagacagaaatgctccagaaaaaaatcgttaatctacagaaaatcgttgaagaaaaagtggccgctgcgctggtcagccagatacagctcgaggctgtccaggaatatgctaaattctgtcaggacaaccaaaccatctctagtgagccagaacggaccaacattcaaaacctcaaccagcttagggaagatgagctgggtagtgatattagcgcacttacactgcgtatatccgagctagagagtcaggtggtcgagatgcatacgagcctcatactagagaaagagcaagttgagattgctgagaaaaacgtcctcgagaaggagaagaagttgcttgaactgcaaaaactgttagaaggcaacgagaagaaacagcgggagaaggagaagaagcggagcccccaagacgtggaggtcctgaaaactaccacagaattgtttcactccaacgaagaatccggcttttttaacgagcttgaagccctgcgagccgaatctgttgcgaccaaggccgaactggcgagttacaaagagaaagctgagaagctgcaggaggaactcttggtcaaagaaaccaacatgacaagcctgcaaaaggatctatcccaggtgcgggaccacttagctgaagccaaagaaaagctcagtatactggagaaggaggacgaaacagaggtacaggaatccaagaaggcatgcatgttcgagccgctcccaatcaagcttagcaaaagtatagctagtcagaccgacggcaccctgaaaatttctagcagcaaccagaccccccagattctggtgaagaatgcaggcatacagattaatttacagtctgaatgcagcagcgaggaagttactgagattattagtcagtttaccgaaaaaatagagaaaatgcaagaactccacgccgcggagattctggatatggagtcaagacacatttccgaaaccgagacacttaagcgcgagcactacgtggccgtccaacttctgaaggaagaatgcggcaccttgaaagccgtcatccagtgccttagaagcaaagaggttttcgggttctacaatatgtgcttttccactctgtgtgactcggggagcgactggggacaagggatttacctgacgcattctcagggatttgacattgcttccgagggtagaggagaggagtccgaaagcgccacagacagttttccgaaaaagatcaaaggcctcctgcgggcagtgcataacgagggaatgcaagtgctgagccttaccgaaagcccgtattccgatggagaggatcactctatccagcaagtgtccgagccatggttggaggagcgtaaagcatacataaacacaatcagctccctgaaggatctcatcaccaagatgcaactgcagcgggaagctgaggtgtacgactcttcacaatcccatgaaagtttttctgattggcgaggagaattgcttttagcgctccagcaagtgtttttggaggaacggagtgtgctgctggccgcgttccggaccgaattaacggctttgggcacgacagacgccgttggacttctgaattgtctggaacaaagaatccaagaacaaggtgtggaataccaagccgccatggagtgcctgcagaaggccgatcgccggtcacttctcagtgaaatacaggccttgcacgcccagatgaacgggcggaagattaccttaaagcgagagcaggagtctgagaagccgagccaggagctgttagaatacaatattcagcagaagcagtctcagatgttagagatgcaggtggaactgtcatctatgaaggatcgggctaccgagctgcaagaacagctttccagtgagaaaatggttgtggcagagctgaagagcgagctggcccagacaaagctggagctcgagaccacacttaaagctcagcataagcatcttaaagaattggaggccttccgcctggaggtaaaagacaagaccgatgaggttcatctcctcaacgatacgctggcgtctgagcagaagaagtctcgggagttgcaatgggccttggaaaaagaaaaagcgaagctgggaaggtctgaggagcgggataaagaggaattggaggatcttaagttttccctcgaatctcaaaagcagaggaacctgcagctgaacctgctgctggagcaacagaaacagctcctgaatgagtcacaacagaagatcgagtcacagcggatgctctacgacgcccaactgtcggaggaacaggggaggaacctagagctacaggtcttactcgagagcgaaaaggtccgcatccgcgagatgagttcaactctagatcgcgagcgagagcttcacgctcagcttcagagtagcgatgggaccggccagtcccgacccccgctgccctccgaagacctcttgaaggagctccaaaaacagctggaggagaaacacagccggatcgtggagctgctcaatgagactgaaaagtataagctggactccctccaaacacggcagcagatggagaaggatagacaggtgcacagaaagaccctgcagactgagcaggaggcaaatacagagggacagaagaagatgcatgagctgcagagtaaggtcgaggacttacagagacaactcgaggagaagcgccagcaggtatacaagctagatctcgaggggcagcggctacaaggtatcatgcaggagtttcaaaagcaggagctggaacgcgaggagaaacgggaatcgagaagaattctttaccagaatcttaacgagcccaccacctggtctctgaccagcgatagaaccaggaactgggtcctgcaacagaaaatagaaggagaaaccaaggagagcaactatgcaaaacttattgaaatgaacggaggggggacgggatgtaatcacgaacttgagatgatccgccaaaagctccagtgcgttgcatctaaactgcaggtgctgcctcaaaaagcatctgaacgtctgcagtttgagaccgcagacgacgaggatttcatctgggtgcaggaaaacatcgacgagatcatactccaactccagaaactcacaggtcagcagggagaggaaccatcccttgtgtcgccttccacttcttgtgggagtctcaccgaacggctgctgaggcagaatgctgagttgactgggcacatctcacagctgaccgaggagaagaatgaccttagaaacatggtcatgaagctcgaagagcaaatccgatggtatcgccagacaggcgccggccgggacaattcgtctcgtttctccctgaatggaggagccaacatagaggccatcatcgcgtccgagaaagaggtgtggaaccgtgaaaagttgacccttcagaagtctctaaagagagctgaggccgaagtttacaaactgaaagctgagctcagaaatgactcacttttgcagacattgtctcccgacagtgagcacgtgactctgaaacgtatttatgggaaatacctgagggctgaatcattccggaaggctctcatctatcagaagaaatacctgctactgttgctcggtggatttcaggagtgcgaagatgcgactctcgcattgcttgcacggatggggggacagcccgcctttactgacttggaagttatcacgaaccggcccaagggttttacaagatttaggtcagccgtacgcgtgtctattgcgatctcacgtatgaagtttctcgtgaggcgctggcaccgggtcaccggtagcgtttccattaacatcaacagggatgggttcggcctgaaccaaggggcagaaaaaaccgattcattctatcactcaagcggggggctcgagctttacggagaacctaggcacactacctatcgttcacgttccgacctggattacattagatctccattaccttttcagaatcggtatccagggacacctgctgactttaaccctgggtcgctcgcatgctctcaactccaaaattacgaccctgatcgggcactgactgactacattacaagactggaagctctccagaggagattgggaacaattcaatccggctccaccacgcagttccatgctgggatgcgtcggtag

SEQ ID NO: 306432 - DNA, 11574 bp, Artificial Sequence
  derived and/or modified sequence
atggaggatgaggagcggcagaagaagctggaggccggcaaggccaagattgaggagctgagcctggccttcctggtgcggcagctggcccagttccggcagaggaaggcccagagtgatggccagagccccagcaagaagcagaagaagaagaggaagaccagcagcagcaagcatgatgtgtctgcccaccacgacctgaacatcgaccagagccagtgcaatgagatgtacatcaacagcagccagagggtggagagcaccgtcatccctgagagcaccatcatgaggaccctgcacagcggggagatcaccagccatgagcagggcttctctgtggagctggagagcgagatcagcaccacagcagatgactgcagcagcgaggtgaatggctgcagctttgtgatgaggacaggcaagcccaccaacctgctgcgggaggaggagtttggagtggatgacagctacagcgagcagggcgcccaggacagccccacccacctggagatgatggagagcgagctggccggcaagcagcatgaaattgaggagctgaaccgggagctggaggagatgagggtgacctatggaacagagggcctgcagcagctgcaggagtttgaggccgccatcaagcagagagatggcatcatcacccagctgacagccaacctgcagcaggcccggcgggagaaggatgagaccatgagggagttcctggagctgacagagcagagccagaagctgcagatccagttccagcagctgcaggccagcgagaccctgaggaacagcacccacagcagcacagctgctgacctgctgcaggccaagcagcagatcctgacccaccagcagcagctggaggagcaggaccacctgctggaggactaccagaagaagaaggaggacttcaccatgcagatctccttcctgcaggagaagatcaaggtgtatgagatggagcaggacaagaaggtggagaacagcaacaaggaggagatccaggagaaggagaccatcatcgaggagctgaacaccaagatcatcgaggaggagaagaagaccctggagctgaaggacaagctgaccacagctgacaagctgctgggggagctgcaggagcagatcgtgcagaagaaccaggagatcaagaacatgaagctggagctgaccaacagcaagcagaaggagcggcagagcagcgaggagatcaagcagctgatgggcaccgtggaggagctgcagaagaggaaccacaaggacagccagtttgaaacagacatcgtgcagaggatggagcaggagacccagaggaagctggagcagctgcgggcagagctggatgagatgtatggccagcagatcgtgcagatgaagcaggagctgatccggcagcacatggcccagatggaggagatgaagaccaggcacaagggggagatggagaatgccctgcggagctacagcaacatcaccgtgaatgaagaccagatcaagctgatgaatgtggccatcaatgagctgaacatcaagctgcaggacaccaacagccagaaggagaagctgaaggaggagctgggcctcatcctggaggagaagtgtgccctgcagaggcagctggaggacctggtggaggagctgtccttcagccgggagcagatccagagggcccggcagaccatcgccgagcaggagagcaagctgaatgaggcccacaagagcctgagcacagtggaggacctgaaggccgagatcgtgtctgccagcgagagcaggaaggagctggagctgaagcatgaagctgaggtgaccaactacaagatcaagctggagatgctggagaaggagaagaatgctgtgctggacaggatggccgagagccaggaggccgagctggagcggctgcggacccagctgctcttcagccatgaggaggagctgagcaagctgaaggaggacctggagattgagcaccgcatcaacatcgagaagctgaaggacaacctgggcatccactacaagcagcagattgatggcctgcagaatgagatgagccagaagattgagaccatgcagtttgagaaggacaacctgatcaccaagcagaaccagctgatcctggagatcagcaagctgaaggacctgcagcagagcctggtgaacagcaagtctgaggagatgaccctgcagatcaatgagctgcagaaggagattgagatcctgcggcaggaggagaaggagaagggcaccctggagcaggaggtgcaggagctgcagctgaagacagagctgctggagaagcagatgaaggagaaggaaaatgacctgcaggagaagtttgcccagctggaggccgagaacagcatcctgaaggatgagaagaagaccctggaggacatgctgaagatccacacccctgtgtcccaggaggagcggctcatcttcctggacagcatcaagagcaagagcaaggacagcgtgtgggagaaggagattgagatcctgattgaggagaatgaagacctgaagcagcagtgcatccagctgaatgaggagattgagaagcagaggaacaccttctcctttgctgagaagaactttgaggtgaactaccaggagctgcaggaggagtatgcctgcctgctgaaggtgaaggatgacctggaggacagcaagaacaagcaggagctggagtacaagagcaagctgaaggccctgaatgaggagctgcacctgcagaggatcaaccccaccaccgtgaagatgaagagctctgtgtttgatgaggacaagacctttgtggccgagaccctggagatgggagaggtggtggagaaggacaccacagagctgatggagaagctggaggtgaccaagcgggagaagctggagctgagccagaggctgagtgacctgtctgagcagctgaagcagaagcacggggagatctccttcctgaatgaggaggtgaagagcctgaagcaggagaaggagcaggtgtccctgcgctgccgggagctggagatcatcatcaaccacaacagagcagaaaatgtgcagagctgtgacacccaggtgagcagcctgctggatggagtggtgaccatgaccagcagaggagctgagggctctgtgtccaaggtgaacaagagctttggagaggagagcaagatcatggtggaggacaaggtgtcctttgagaacatgacagtgggggaggagagcaagcaggagcagctgatcctggaccacctgcccagcgtgaccaaggagagcagcctgcgggccacccagcccagtgaaaatgacaagctgcagaaggagctgaatgtgctgaagtctgagcagaatgacctgcggctgcagatggaggcccagaggatctgcctgagcctggtgtacagcacccacgtggaccaggtgcgggagtacatggagaatgagaaggacaaggccctgtgcagcctgaaggaggagctgatctttgcccaggaggagaagatcaaggagctgcagaagatccaccagctggagctgcagaccatgaagacccaggagactggagatgagggcaagcccctgcacctgctgattggcaagctgcagaaggctgtgtctgaggagtgcagctacttcctgcagaccctgtgcagcgtgctgggggagtactacaccccagccctgaagtgtgaggtgaatgctgaggacaaggagaacagcggggactacatcagtgaaaatgaagatcctgagctgcaggactaccgctatgaggtgcaggacttccaggagaacatgcacaccctgctgaacaaggtgacagaggagtacaacaagctgctggtgctgcagacccggctgagcaagatctggggccagcagacagatggcatgaagctggagtttggagaggagaacctgcccaaggaggagacagagttcctgagcatccacagccagatgaccaacctggaggacattgatgtgaaccacaagagcaagctgagcagcctgcaggacctggagaagaccaagctggaggagcaggtgcaggagctggagagcctcatcagcagcctgcagcagcagctgaaggagacagagcagaactatgaagctgagatccactgcctgcagaagaggctgcaggccgtgtctgagagcacagtgccccccagcctgcctgtggacagcgtggtgatcacagaaagtgatgcccagaggaccatgtacccaggcagctgtgtgaagaagaacattgatggcaccatcgagttctctggagaatttggagtgaaggaggagaccaacatcgtgaagctgctggagaagcagtaccaggagcagctggaggaggaggtggccaaggtgattgtgtccatgagcatcgcctttgcccagcagacagagctgagccgcatcagcggcggcaaggaaaatacagccagcagcaagcaggcccatgctgtgtgccagcaggagcagcactacttcaatgagatgaagctgagccaggaccagatcggcttccagacctttgaaacagtggatgtgaagttcaaggaggagttcaagcccctgagcaaggagctgggggagcacggcaaggagatcctgctgagcaacagcgacccccatgacatccctgagagcaaggactgtgtgctgaccatcagcgaggagatgttcagcaaggacaagaccttcatcgtgcggcagagcatccatgatgagatctctgtgtcctccatggatgccagccggcagctgatgctgaatgaggagcagctggaggacatgaggcaggagctggtgcggcagtaccaggagcaccagcaggccacagagctgctgcggcaggcccacatgaggcagatggagcggcagcgggaggaccaggagcagctgcaggaggagatcaagaggctgaaccggcagctggcccagaggagcagcattgacaatgaaaacctggtgtctgagcgggagcgggtgctgctggaggagctggaggccctgaagcagctgagcctggccggccgggagaagctgtgctgtgagctgaggaacagcagcacccagacccagaatggaaatgaaaaccagggcgaggtggaggagcagaccttcaaggagaaggagctggacaggaagccagaagatgtgcccccagagatcctgagcaatgaaagatatgccctgcagaaggccaacaaccggctgctgaagatcctgctggaggtggtgaagaccacagctgctgtggaggagaccatcggccgccacgtgctgggcatcctggacaggagcagcaagagccagagcagcgccagcctcatctggaggtctgaggccgaggcctctgtgaagagctgtgtgcatgaggagcacaccagggtgacagatgagagcatccccagctacagcggcagtgacatgcccagaaatgacatcaacatgtggagcaaggtgacagaggagggcacagagctgagccagaggctggtgcgcagcggctttgctggaacagaaattgatcctgaaaatgaggagctgatgctgaacatcagcagccggctgcaggccgctgtggagaagctgctggaggccatcagcgagaccagcagccagctggagcacgccaaggtgacccagacagagctgatgagggagagcttccggcagaagcaggaggccacagagagcctgaagtgccaggaggagctgcgggagcggctgcacgaggagagccgggcccgggagcagctggccgtggagctgagcaaggccgagggcgtgattgatggctatgcagatgagaagaccctgtttgagcggcagatccaggagaagacagacatcatcgaccggctggagcaggagctgctgtgtgccagcaaccggctgcaggagctggaggccgagcagcagcagatccaggaggagcgggagctgctgagccggcagaaggaggccatgaaggccgaggccggccctgtggagcagcagctgctgcaggagacagagaagctgatgaaggagaagctggaggtgcagtgccaggccgagaaggtgagagatgacctgcagaagcaggtgaaggccctggagattgatgtggaggagcaggtgagccgcttcatcgagctggagcaggagaagaacacagagctgatggacctgcggcagcagaaccaggccctggagaagcagctggagaagatgaggaagttcctggatgagcaggccatcgaccgggagcacgagagagatgtgttccagcaggagatccagaagctggagcagcagctgaaggtggtgccccgcttccagcccatcagcgagcaccagacccgggaggtggagcagctggccaaccacctgaaggagaagacagacaagtgcagcgagctgctgctgagcaaggagcagctgcagagggacatccaggagagaaatgaggagattgagaagctggagttccgggtgcgggagctggagcaggccctgctggtgtctgctgacaccttccagaaggtggaggacaggaagcactttggagctgtggaggccaagccagagctgagcctggaggtgcagctgcaggccgagagagatgccatcgacaggaaggagaaggagatcaccaacctggaggagcagctggagcagttccgggaggagctggagaacaagaatgaggaggtgcagcagctgcacatgcagctggagatccagaagaaggagagcaccacccggctgcaggagctggagcaggagaacaagctgttcaaggatgacatggagaagctgggcctggccatcaaggagagtgatgccatgagcacccaggaccagcacgtgctgtttgggaagtttgcccagatcatccaggagaaggaggtggagattgaccagctgaatgagcaggtgaccaagctgcagcagcagctgaagatcaccacagacaacaaggtgattgaggagaagaatgaactcatccgggacctggagacccagatcgagtgcctgatgtctgaccaggagtgtgtgaagaggaaccgggaggaggagattgagcagctgaatgaagtcatcgagaagctgcagcaggagctggccaacatcggccagaagacctccatgaatgcccacagcctgtctgaggaggccgacagcctgaagcaccagctggatgtggtgattgctgagaagctggccctggagcagcaggtggagacagccaatgaggagatgaccttcatgaagaatgtgctgaaggagaccaacttcaagatgaaccagctgacccaggagctgttcagcctgaagcgggagcgggagagcgtggagaagatccagagcatccctgagaacagcgtgaatgtggccatcgaccacctgagcaaggacaagccagagctggaggtggtgctgacagaagatgccctgaagagcctggagaaccagacctacttcaagagctttgaggagaatggcaagggcagcatcatcaacctggagacccggctgctgcagctggagagcacagtgtctgccaaggacctggagctgacccagtgctacaagcagatcaaggacatgcaggagcagggccagtttgaaacagagatgctgcagaagaagatcgtgaacctgcagaagatcgtggaggagaaggtggccgccgccctggtgtcccagatccagctggaggccgtgcaggagtatgccaagttctgccaggacaaccagaccatcagcagcgagcctgagaggaccaacatccagaacctgaaccagctgcgggaggatgagctgggcagtgacatcagcgccctgaccctgcgcatcagcgagctggagagccaggtggtggagatgcacaccagcctcatcctggagaaggagcaggtggagattgctgagaagaatgtgctggagaaggagaagaagctgctggagctgcagaagctgctggagggcaatgagaagaagcagcgggagaaggagaagaagaggagcccccaggatgtggaggtgctgaagaccaccacagagctgttccacagcaatgaggagagcggcttcttcaatgagctggaggccctgcgggcagagagcgtggccaccaaggccgagctggccagctacaaggagaaggccgagaagctgcaggaggagctgctggtgaaggagaccaacatgaccagcctgcagaaggacctgagccaggtgcgggaccacctggccgaggccaaggagaagctgagcatcctggagaaggaggatgaaacagaggtgcaggagagcaagaaggcctgcatgtttgagcccctgcccatcaagctgagcaagagcatcgccagccagacagatggcaccctgaagatcagcagcagcaaccagaccccccagatcctggtgaagaatgccggcatccagatcaacctgcagagtgaatgtagcagcgaggaggtgacagagatcatcagccagttcacagagaagattgagaagatgcaggagctgcacgccgctgagatcctggacatggagagccgccacatcagcgagacagagaccctgaagcgggagcactacgtggccgtgcagctgctgaaggaggagtgtggcaccctgaaggctgtgatccagtgcctgcggagcaaggagggcctgctgcgggctgtgcacaatgaaggcatgcaggtgctgagcctgacagagagcccctacagtgatggagaggaccacagcatccagcaggtgtctgagccctggctggaggagaggaaggcctacatcaacaccatcagcagcctgaaggacctgatcaccaagatgcagctgcagcgggaggccgaggtgtatgacagcagccagagccatgagagcttcagtgactggagaggagagctgctgctggccctgcagcaggtgttcctggaggagaggtctgtgctgctggccgccttcagaacagagctgacagccctgggcaccacagatgctgtgggcctgctgaactgcctggagcagaggatccaggagcagggcgtggagtaccaggccgccatggagtgcctgcagaaggctgacagaagaagcctgctgtctgagatccaggccctgcacgcccagatgaatggaaggaagatcaccctgaagcgggagcaggagagcgagaagcccagccaggagctgctggagtacaacatccagcagaagcagagccagatgctggagatgcaggtggagctgagctccatgaaggaccgggccacagagctgcaggagcagctgagcagcgagaagatggtggtggccgagctgaagtctgagctggcccagaccaagctggagctggagaccaccctgaaggcccagcacaagcacctgaaggagctggaggccttccggctggaggtgaaggacaagacagatgaggtgcacctgctgaatgacaccctggccagcgagcagaagaagagccgggagctgcagtgggccctggagaaggagaaggccaagctgggccgctctgaggagcgggacaaggaggagctggaggacctgaagttcagcctggagagccagaagcagaggaacctgcagctgaacctgctgctggagcagcagaagcagctgctgaatgaaagccagcagaagattgagagccagaggatgctgtatgatgcccagctgtctgaggagcagggcaggaacctggagctgcaggtgctgctggagagcgagaaggtgcgcatccgggagatgagcagcaccctggaccgggagcgggagctgcacgcccagctgcagagcagtgatggcaccggccagagcaggcctcccctgcccagcgaggacctgctgaaggagctgcagaagcagctggaggagaagcacagcagaattgtggagctgctgaatgaaacagagaagtacaagctggacagcctgcagacccggcagcagatggagaaggaccggcaggtgcacaggaagaccctgcagacagagcaggaggccaacacagagggccagaagaagatgcatgagctgcagagcaaggtggaggacctgcagaggcagctggaggagaagaggcagcaggtgtacaagctggacctggagggccagaggctgcagggcatcatgcaggagttccagaagcaggagctggagcgggaggagaagcgggagagccgccgcatcctgtaccagaacctgaatgagcccaccacctggagcctgaccagtgacaggaccaggaactgggtgctgcagcagaagattgaaggagagaccaaggagagcaactatgccaagctgattgagatgaatggaggcggcaccggctgcaaccacgagctggagatgatccggcagaagctgcagtgtgtggccagcaagctgcaggtgctgccccagaaggccagcgagcggctgcagtttgaaacagcagatgatgaggacttcatctgggtgcaggagaacattgatgagatcatcctgcagctgcagaagctgaccggccagcagggcgaggagcccagcctggtgagccccagcaccagctgtggcagcctgacagagcggctgctgcggcagaatgctgagctgaccggccacatcagccagctgacagaggagaagaatgacctgaggaacatggtgatgaagctggaggagcagatccgctggtaccggcagacaggagctggccgggacaacagcagccgcttcagcctgaatggaggagccaacatcgaggccatcatcgccagcgagaaggaggtgtggaaccgggagaagctgaccctgcagaagagcctgaagagagctgaggccgaggtgtacaagctgaaggccgagctgagaaatgacagcctgctgcagaccctgagcccagattctgaacatgtgaccctgaagaggatctacggcaagtacctgcgggcagagagcttcaggaaggccctgatctaccagaagaagtacctgctgctgctgctgggcggcttccaggagtgtgaagatgccaccctggccctgctggccaggatgggcggccagcctgccttcacagacctggaggtgatcaccaaccggcccaagggcttcacccgcttccgctctgctgtgcgggtgtccatcgccatcagcaggatgaagttcctggtgcggcgctggcaccgggtgactggatctgtgtccatcaacatcaacagagatggcttcggcctgaaccagggcgctgagaagacagacagcttctaccacagcagcggcggcctggagctgtatggagagcccaggcacaccacctaccgcagcagaagtgacctggactacatccgcagccccctgcccttccagaaccgctacccaggcaccccagctgacttcaaccctggcagcctggcctgcagccagctgcagaactatgaccctgaccgggccctgacagactacatcacccggctggaggccctgcagaggcggctgggcaccatccagagcggcagcaccacccagttccacgccggcatgagaagatag

SEQ ID NO: 306433 - DNA, 11736 bp, Artificial Sequence
  derived and/or modified sequence
atggaggatgaggagcggcagaagaagctggaggccggcaaggccaagattgaggagctgagcctggccttcctggtgcggcagctggcccagttccggcagaggaaggcccagagtgatggccagagccccagcaagaagcagaagaagaagaggaagaccagcagcagcaagcatgatgtgtctgcccaccacgacctgaacatcgaccagagccagtgcaatgagatgtacatcaacagcagccagagggtggagagcaccgtcatccctgagagcaccatcatgaggaccctgcacagcggggagatcaccagccatgagcagggcttctctgtggagctggagagcgagatcagcaccacagcagatgactgcagcagcgaggtgaatggctgcagctttgtgatgaggacaggcaagcccaccaacctgctgcgggaggaggagtttggagtggatgacagctacagcgagcagggcgcccaggacagccccacccacctggagatgatggagagcgagctggccggcaagcagcatgaaattgaggagctgaaccgggagctggaggagatgagggtgacctatggaacagagggcctgcagcagctgcaggagtttgaggccgccatcaagcagagagatggcatcatcacccagctgacagccaacctgcagcaggcccggcgggagaaggatgagaccatgagggagttcctggagctgacagagcagagccagaagctgcagatccagttccagcagctgcaggccagcgagaccctgaggaacagcacccacagcagcacagctgctgacctgctgcaggccaagcagcagatcctgacccaccagcagcagctggaggagcaggaccacctgctggaggactaccagaagaagaaggaggacttcaccatgcagatctccttcctgcaggagaagatcaaggtgtatgagatggagcaggacaagaaggtggagaacagcaacaaggaggagatccaggagaaggagaccatcatcgaggagctgaacaccaagatcatcgaggaggagaagaagaccctggagctgaaggacaagctgaccacagctgacaagctgctgggggagctgcaggagcagatcgtgcagaagaaccaggagatcaagaacatgaagctggagctgaccaacagcaagcagaaggagcggcagagcagcgaggagatcaagcagctgatgggcaccgtggaggagctgcagaagaggaaccacaaggacagccagtttgaaacagacatcgtgcagaggatggagcaggagacccagaggaagctggagcagctgcgggcagagctggatgagatgtatggccagcagatcgtgcagatgaagcaggagctgatccggcagcacatggcccagatggaggagatgaagaccaggcacaagggggagatggagaatgccctgcggagctacagcaacatcaccgtgaatgaagaccagatcaagctgatgaatgtggccatcaatgagctgaacatcaagctgcaggacaccaacagccagaaggagaagctgaaggaggagctgggcctcatcctggaggagaagtgtgccctgcagaggcagctggaggacctggtggaggagctgtccttcagccgggagcagatccagagggcccggcagaccatcgccgagcaggagagcaagctgaatgaggcccacaagagcctgagcacagtggaggacctgaaggccgagatcgtgtctgccagcgagagcaggaaggagctggagctgaagcatgaagctgaggtgaccaactacaagatcaagctggagatgctggagaaggagaagaatgctgtgctggacaggatggccgagagccaggaggccgagctggagcggctgcggacccagctgctcttcagccatgaggaggagctgagcaagctgaaggaggacctggagattgagcaccgcatcaacatcgagaagctgaaggacaacctgggcatccactacaagcagcagattgatggcctgcagaatgagatgagccagaagattgagaccatgcagtttgagaaggacaacctgatcaccaagcagaaccagctgatcctggagatcagcaagctgaaggacctgcagcagagcctggtgaacagcaagtctgaggagatgaccctgcagatcaatgagctgcagaaggagattgagatcctgcggcaggaggagaaggagaagggcaccctggagcaggaggtgcaggagctgcagctgaagacagagctgctggagaagcagatgaaggagaaggaaaatgacctgcaggagaagtttgcccagctggaggccgagaacagcatcctgaaggatgagaagaagaccctggaggacatgctgaagatccacacccctgtgtcccaggaggagcggctcatcttcctggacagcatcaagagcaagagcaaggacagcgtgtgggagaaggagattgagatcctgattgaggagaatgaagacctgaagcagcagtgcatccagctgaatgaggagattgagaagcagaggaacaccttctcctttgctgagaagaactttgaggtgaactaccaggagctgcaggaggagtatgcctgcctgctgaaggtgaaggatgacctggaggacagcaagaacaagcaggagctggagtacaagagcaagctgaaggccctgaatgaggagctgcacctgcagaggatcaaccccaccaccgtgaagatgaagagctctgtgtttgatgaggacaagacctttgtggccgagaccctggagatgggagaggtggtggagaaggacaccacagagctgatggagaagctggaggtgaccaagcgggagaagctggagctgagccagaggctgagtgacctgtctgagcagctgaagcagaagcacggggagatctccttcctgaatgaggaggtgaagagcctgaagcaggagaaggagcaggtgtccctgcgctgccgggagctggagatcatcatcaaccacaacagagcagaaaatgtgcagagctgtgacacccaggtgagcagcctgctggatggagtggtgaccatgaccagcagaggagctgagggctctgtgtccaaggtgaacaagagctttggagaggagagcaagatcatggtggaggacaaggtgtcctttgagaacatgacagtgggggaggagagcaagcaggagcagctgatcctggaccacctgcccagcgtgaccaaggagagcagcctgcgggccacccagcccagtgaaaatgacaagctgcagaaggagctgaatgtgctgaagtctgagcagaatgacctgcggctgcagatggaggcccagaggatctgcctgagcctggtgtacagcacccacgtggaccaggtgcgggagtacatggagaatgagaaggacaaggccctgtgcagcctgaaggaggagctgatctttgcccaggaggagaagatcaaggagctgcagaagatccaccagctggagctgcagaccatgaagacccaggagactggagatgagggcaagcccctgcacctgctgattggcaagctgcagaaggctgtgtctgaggagtgcagctacttcctgcagaccctgtgcagcgtgctgggggagtactacaccccagccctgaagtgtgaggtgaatgctgaggacaaggagaacagcggggactacatcagtgaaaatgaagatcctgagctgcaggactaccgctatgaggtgcaggacttccaggagaacatgcacaccctgctgaacaaggtgacagaggagtacaacaagctgctggtgctgcagacccggctgagcaagatctggggccagcagacagatggcatgaagctggagtttggagaggagaacctgcccaaggaggagacagagttcctgagcatccacagccagatgaccaacctggaggacattgatgtgaaccacaagagcaagctgagcagcctgcaggacctggagaagaccaagctggaggagcaggtgcaggagctggagagcctcatcagcagcctgcagcagcagctgaaggagacagagcagaactatgaagctgagatccactgcctgcagaagaggctgcaggccgtgtctgagagcacagtgccccccagcctgcctgtggacagcgtggtgatcacagaaagtgatgcccagaggaccatgtacccaggcagctgtgtgaagaagaacattgatggcaccatcgagttctctggagaatttggagtgaaggaggagaccaacatcgtgaagctgctggagaagcagtaccaggagcagctggaggaggaggtggccaaggtgattgtgtccatgagcatcgcctttgcccagcagacagagctgagccgcatcagcggcggcaaggaaaatacagccagcagcaagcaggcccatgctgtgtgccagcaggagcagcactacttcaatgagatgaagctgagccaggaccagatcggcttccagacctttgaaacagtggatgtgaagttcaaggaggagttcaagcccctgagcaaggagctgggggagcacggcaaggagatcctgctgagcaacagcgacccccatgacatccctgagagcaaggactgtgtgctgaccatcagcgaggagatgttcagcaaggacaagaccttcatcgtgcggcagagcatccatgatgagatctctgtgtcctccatggatgccagccggcagctgatgctgaatgaggagcagctggaggacatgaggcaggagctggtgcggcagtaccaggagcaccagcaggccacagagctgctgcggcaggcccacatgaggcagatggagcggcagcgggaggaccaggagcagctgcaggaggagatcaagaggctgaaccggcagctggcccagaggagcagcattgacaatgaaaacctggtgtctgagcgggagcgggtgctgctggaggagctggaggccctgaagcagctgagcctggccggccgggagaagctgtgctgtgagctgaggaacagcagcacccagacccagaatggaaatgaaaaccagggcgaggtggaggagcagaccttcaaggagaaggagctggacaggaagccagaagatgtgcccccagagatcctgagcaatgaaagatatgccctgcagaaggccaacaaccggctgctgaagatcctgctggaggtggtgaagaccacagctgctgtggaggagaccatcggccgccacgtgctgggcatcctggacaggagcagcaagagccagagcagcgccagcctcatctggaggtctgaggccgaggcctctgtgaagagctgtgtgcatgaggagcacaccagggtgacagatgagagcatccccagctacagcggcagtgacatgcccagaaatgacatcaacatgtggagcaaggtgacagaggagggcacagagctgagccagaggctggtgcgcagcggctttgctggaacagaaattgatcctgaaaatgaggagctgatgctgaacatcagcagccggctgcaggccgctgtggagaagctgctggaggccatcagcgagaccagcagccagctggagcacgccaaggtgacccagacagagctgatgagggagagcttccggcagaagcaggaggccacagagagcctgaagtgccaggaggagctgcgggagcggctgcacgaggagagccgggcccgggagcagctggccgtggagctgagcaaggccgagggcgtgattgatggctatgcagatgagaagaccctgtttgagcggcagatccaggagaagacagacatcatcgaccggctggagcaggagctgctgtgtgccagcaaccggctgcaggagctggaggccgagcagcagcagatccaggaggagcgggagctgctgagccggcagaaggaggccatgaaggccgaggccggccctgtggagcagcagctgctgcaggagacagagaagctgatgaaggagaagctggaggtgcagtgccaggccgagaaggtgagagatgacctgcagaagcaggtgaaggccctggagattgatgtggaggagcaggtgagccgcttcatcgagctggagcaggagaagaacacagagctgatggacctgcggcagcagaaccaggccctggagaagcagctggagaagatgaggaagttcctggatgagcaggccatcgaccgggagcacgagagagatgtgttccagcaggagatccagaagctggagcagcagctgaaggtggtgccccgcttccagcccatcagcgagcaccagacccgggaggtggagcagctggccaaccacctgaaggagaagacagacaagtgcagcgagctgctgctgagcaaggagcagctgcagagggacatccaggagagaaatgaggagattgagaagctggagttccgggtgcgggagctggagcaggccctgctggtgtctgctgacaccttccagaaggtggaggacaggaagcactttggagctgtggaggccaagccagagctgagcctggaggtgcagctgcaggccgagagagatgccatcgacaggaaggagaaggagatcaccaacctggaggagcagctggagcagttccgggaggagctggagaacaagaatgaggaggtgcagcagctgcacatgcagctggagatccagaagaaggagagcaccacccggctgcaggagctggagcaggagaacaagctgttcaaggatgacatggagaagctgggcctggccatcaaggagagtgatgccatgagcacccaggaccagcacgtgctgtttgggaagtttgcccagatcatccaggagaaggaggtggagattgaccagctgaatgagcaggtgaccaagctgcagcagcagctgaagatcaccacagacaacaaggtgattgaggagaagaatgaactcatccgggacctggagacccagatcgagtgcctgatgtctgaccaggagtgtgtgaagaggaaccgggaggaggagattgagcagctgaatgaagtcatcgagaagctgcagcaggagctggccaacatcggccagaagacctccatgaatgcccacagcctgtctgaggaggccgacagcctgaagcaccagctggatgtggtgattgctgagaagctggccctggagcagcaggtggagacagccaatgaggagatgaccttcatgaagaatgtgctgaaggagaccaacttcaagatgaaccagctgacccaggagctgttcagcctgaagcgggagcgggagagcgtggagaagatccagagcatccctgagaacagcgtgaatgtggccatcgaccacctgagcaaggacaagccagagctggaggtggtgctgacagaagatgccctgaagagcctggagaaccagacctacttcaagagctttgaggagaatggcaagggcagcatcatcaacctggagacccggctgctgcagctggagagcacagtgtctgccaaggacctggagctgacccagtgctacaagcagatcaaggacatgcaggagcagggccagtttgaaacagagatgctgcagaagaagatcgtgaacctgcagaagatcgtggaggagaaggtggccgccgccctggtgtcccagatccagctggaggccgtgcaggagtatgccaagttctgccaggacaaccagaccatcagcagcgagcctgagaggaccaacatccagaacctgaaccagctgcgggaggatgagctgggcagtgacatcagcgccctgaccctgcgcatcagcgagctggagagccaggtggtggagatgcacaccagcctcatcctggagaaggagcaggtggagattgctgagaagaatgtgctggagaaggagaagaagctgctggagctgcagaagctgctggagggcaatgagaagaagcagcgggagaaggagaagaagaggagcccccaggatgtggaggtgctgaagaccaccacagagctgttccacagcaatgaggagagcggcttcttcaatgagctggaggccctgcgggcagagagcgtggccaccaaggccgagctggccagctacaaggagaaggccgagaagctgcaggaggagctgctggtgaaggagaccaacatgaccagcctgcagaaggacctgagccaggtgcgggaccacctggccgaggccaaggagaagctgagcatcctggagaaggaggatgaaacagaggtgcaggagagcaagaaggcctgcatgtttgagcccctgcccatcaagctgagcaagagcatcgccagccagacagatggcaccctgaagatcagcagcagcaaccagaccccccagatcctggtgaagaatgccggcatccagatcaacctgcagagtgaatgtagcagcgaggaggtgacagagatcatcagccagttcacagagaagattgagaagatgcaggagctgcacgccgctgagatcctggacatggagagccgccacatcagcgagacagagaccctgaagcgggagcactacgtggccgtgcagctgctgaaggaggagtgtggcaccctgaaggctgtgatccagtgcctgcggagcaaggaggtgtttggcttctacaacatgtgcttcagcaccctgtgtgacagcggcagtgactggggccagggcatctacctgacccacagccagggctttgatattgccagcgagggccgcggggaggagagcgagagcgccacagacagcttccccaagaagatcaagggcctgctgcgggctgtgcacaatgaaggcatgcaggtgctgagcctgacagagagcccctacagtgatggagaggaccacagcatccagcaggtgtctgagccctggctggaggagaggaaggcctacatcaacaccatcagcagcctgaaggacctgatcaccaagatgcagctgcagcgggaggccgaggtgtatgacagcagccagagccatgagagcttcagtgactggagaggagagctgctgctggccctgcagcaggtgttcctggaggagaggtctgtgctgctggccgccttcagaacagagctgacagccctgggcaccacagatgctgtgggcctgctgaactgcctggagcagaggatccaggagcagggcgtggagtaccaggccgccatggagtgcctgcagaaggctgacagaagaagcctgctgtctgagatccaggccctgcacgcccagatgaatggaaggaagatcaccctgaagcgggagcaggagagcgagaagcccagccaggagctgctggagtacaacatccagcagaagcagagccagatgctggagatgcaggtggagctgagctccatgaaggaccgggccacagagctgcaggagcagctgagcagcgagaagatggtggtggccgagctgaagtctgagctggcccagaccaagctggagctggagaccaccctgaaggcccagcacaagcacctgaaggagctggaggccttccggctggaggtgaaggacaagacagatgaggtgcacctgctgaatgacaccctggccagcgagcagaagaagagccgggagctgcagtgggccctggagaaggagaaggccaagctgggccgctctgaggagcgggacaaggaggagctggaggacctgaagttcagcctggagagccagaagcagaggaacctgcagctgaacctgctgctggagcagcagaagcagctgctgaatgaaagccagcagaagattgagagccagaggatgctgtatgatgcccagctgtctgaggagcagggcaggaacctggagctgcaggtgctgctggagagcgagaaggtgcgcatccgggagatgagcagcaccctggaccgggagcgggagctgcacgcccagctgcagagcagtgatggcaccggccagagcaggcctcccctgcccagcgaggacctgctgaaggagctgcagaagcagctggaggagaagcacagcagaattgtggagctgctgaatgaaacagagaagtacaagctggacagcctgcagacccggcagcagatggagaaggaccggcaggtgcacaggaagaccctgcagacagagcaggaggccaacacagagggccagaagaagatgcatgagctgcagagcaaggtggaggacctgcagaggcagctggaggagaagaggcagcaggtgtacaagctggacctggagggccagaggctgcagggcatcatgcaggagttccagaagcaggagctggagcgggaggagaagcgggagagccgccgcatcctgtaccagaacctgaatgagcccaccacctggagcctgaccagtgacaggaccaggaactgggtgctgcagcagaagattgaaggagagaccaaggagagcaactatgccaagctgattgagatgaatggaggcggcaccggctgcaaccacgagctggagatgatccggcagaagctgcagtgtgtggccagcaagctgcaggtgctgccccagaaggccagcgagcggctgcagtttgaaacagcagatgatgaggacttcatctgggtgcaggagaacattgatgagatcatcctgcagctgcagaagctgaccggccagcagggcgaggagcccagcctggtgagccccagcaccagctgtggcagcctgacagagcggctgctgcggcagaatgctgagctgaccggccacatcagccagctgacagaggagaagaatgacctgaggaacatggtgatgaagctggaggagcagatccgctggtaccggcagacaggagctggccgggacaacagcagccgcttcagcctgaatggaggagccaacatcgaggccatcatcgccagcgagaaggaggtgtggaaccgggagaagctgaccctgcagaagagcctgaagagagctgaggccgaggtgtacaagctgaaggccgagctgagaaatgacagcctgctgcagaccctgagcccagattctgaacatgtgaccctgaagaggatctacggcaagtacctgcgggcagagagcttcaggaaggccctgatctaccagaagaagtacctgctgctgctgctgggcggcttccaggagtgtgaagatgccaccctggccctgctggccaggatgggcggccagcctgccttcacagacctggaggtgatcaccaaccggcccaagggcttcacccgcttccgctctgctgtgcgggtgtccatcgccatcagcaggatgaagttcctggtgcggcgctggcaccgggtgactggatctgtgtccatcaacatcaacagagatggcttcggcctgaaccagggcgctgagaagacagacagcttctaccacagcagcggcggcctggagctgtatggagagcccaggcacaccacctaccgcagcagaagtgacctggactacatccgcagccccctgcccttccagaaccgctacccaggcaccccagctgacttcaaccctggcagcctggcctgcagccagctgcagaactatgaccctgaccgggccctgacagactacatcacccggctggaggccctgcagaggcggctgggcaccatccagagcggcagcaccacccagttccacgccggcatgagaagatag

SEQ ID NO: 306434 - DNA, 11574 bp, Artificial Sequence
  derived and/or modified sequence
atggaggacgaggagcggcagaagaagctggaggccggcaaggccaagatcgaagagctgtccctggcctttctcgtcagacagctggcccagtttcgccaaagaaaggcacaatctgacggtcaatctccttcaaagaagcaaaagaagaagcggaagacttcctccagcaaacatgacgtgtctgctcaccacgacctgaacatcgaccagtcccagtgtaatgagatgtatattaacagctcccaacgggtcgaaagtacggtgataccagagagcacaattatgcgcacgcttcattctggtgaaatcactagtcacgaacaggggttctcagttgagctcgagtcagaaatctccaccacggcggacgattgtagctctgaagttaatggctgctcttttgtgatgcggactggaaagcccactaacctcctccgagaagaggagttcggtgtagatgacagctactctgaacaaggggctcaggattctcccactcacctcgaaatgatggaatctgagctggcaggcaagcaacacgaaatcgaagaactgaatcgggaactcgaggagatgcgggttacctatggcaccgaagggctccagcagcttcaggaattcgaagcagcaattaagcagcgggatggcattatcactcagctgacagctaaccttcaacaggccagaagagagaaggatgagacaatgcgggaatttctagaactgacagagcagagtcaaaagctgcaaatccagtttcagcagttgcaggcaagcgagactctgagaaactctactcatagttctaccgccgcagatctgctgcaggccaagcaacaaattcttactcaccagcaacaactggaggagcaggaccacttgctcgaagattaccagaaaaaaaaggaagatttcacgatgcagattagtttcctccaggagaaaatcaaagtctatgagatggaacaggacaaaaaggtggaaaatagtaacaaggaagaaatccaagaaaaggagaccatcatcgaggagctgaacaccaaaattatagaagaggagaagaaaacacttgaactcaaagataagcttaccacggcagataaattgttgggggaacttcaggaacagatcgtgcaaaaaaaccaggagatcaaaaacatgaagctggaactcaccaactccaagcaaaaagaacgccaaagctccgaagaaataaagcaactgatggggaccgtcgaggagcttcagaagaggaatcacaaggactcccagtttgaaaccgatattgtgcagagaatggaacaggaaacacagagaaagttggagcagctgcgggcggagctagacgagatgtatgggcaacagattgttcagatgaaacaggagctgatcagacaacatatggcacaaatggaagagatgaaaactagacataagggagaaatggagaatgccctccgctcctattcaaacattactgtcaacgaggaccagatcaagttaatgaacgtggccatcaatgagcttaacataaagctgcaggacaccaactcccagaaagaaaaacttaaggaggagttgggattaatcctggaagaaaaatgcgcactacaacgtcagcttgaggacttagtcgaggaactgtcttttagcagagagcagatccagagagcacgccagacaatcgccgaacaggagagtaaacttaatgaggcacataagagtttgtcaacggtggaggatctaaaggccgaaatcgtgtccgcaagtgagtctaggaaggagctggaactaaagcacgaagccgaggtcaccaattacaagatcaaactcgagatgctggagaaggaaaagaatgctgttttagaccggatggccgagagccaggaggccgaactggagcgtctgaggacacaactgctgttcagccacgaggaggagctcagtaagcttaaagaggatcttgaaatcgagcatagaatcaatattgagaagctgaaagataacctagggatacattataaacagcagatcgatggactacagaatgagatgagtcagaaaatcgagactatgcagttcgaaaaggataatctgattacaaagcagaaccagctcatactggagatttccaagctgaaggatctgcagcagtccctcgtaaactcaaagagtgaagaaatgaccctgcaaataaacgagctgcagaaagagatcgagatcttaagacaagaagagaaagagaagggtacactagagcaggaagtccaggagctgcagctgaaaactgaactgcttgagaaacagatgaaagaaaaggagaacgacctgcaagaaaagtttgctcagctggaggcggagaatagtatcctgaaagacgagaagaagacgctcgaggacatgctgaagatccacacccctgttagccaggaggaacggcttatcttcctggactcaattaagtctaaaagcaaagattccgtatgggaaaaagaaatcgagatcctgattgaagagaatgaggacctcaaacagcagtgtatccagcttaatgaggaaatagagaagcagagaaacacattttcctttgccgagaagaatttcgaggtcaactaccaagagctgcaggaggaatatgcctgccttctgaaagttaaggacgatctcgaagactcgaagaataagcaggaactggagtataagtccaaactgaaggcactaaatgaggagctgcacttgcagagaattaacccgaccacagtcaagatgaagtcctcagtgtttgacgaagataaaactttcgttgccgaaacactggagatgggggaggtggtggaaaaagataccaccgagcttatggaaaagcttgaggtgacgaagcgtgaaaaactggagctttcccaacggctcagcgatttgtccgagcagctgaagcagaagcatggggaaatctccttccttaatgaggaggtcaaatctctcaaacaggagaaagagcaggtgtcccttcgctgccgcgaactagaaatcattataaaccacaaccgagccgagaatgtgcagagttgcgacacacaggtgtcaagcctactggatggggtggtcacaatgacttctagaggcgccgagggcagtgtaagcaaggtgaacaagtcatttggcgaggagtccaagattatggtcgaggacaaggtcagctttgagaacatgaccgtgggtgaggagtccaagcaagagcagttaattttagaccacctcccctccgtgactaaggagtcatccctgcgcgccacccaaccctctgagaatgataagttgcagaaagagctgaatgtgctgaagagtgaacagaatgatctgcgcctgcaaatggaggcacagaggatctgcctgagtcttgtgtacagcacacacgtggaccaggtacgcgagtacatggaaaatgaaaaagacaaggctttgtgtagcttgaaggaagaattaatattcgcccaggaggagaagatcaaagaactgcagaaaattcaccagctcgagctacagactatgaaaacccaggaaactggagacgaaggaaagccactccacctcctcatcggcaaactccagaaagcggtgtccgaagaatgtagctactttctacagacactgtgcagcgtgttaggtgaatattatactcctgccctcaaatgcgaggtcaatgctgaagacaaggagaactccggtgattatatctctgagaacgaggatccagagctgcaagactaccggtacgaagtccaagactttcaggaaaatatgcataccctcttgaacaaggtgacagaagagtacaacaagctgctggtgctgcagacccgtctcagcaagatttggggccagcagactgatggaatgaaactggaattcggcgaggagaacttgcccaaggaagagaccgaattcctgtccattcattcacagatgacaaacctcgaggacattgatgtaaatcacaagtccaaattgtcatctttgcaggacctcgagaagacaaagcttgaggaacaggtgcaggagctggagtcacttatctcttccttacagcaacagttaaaggagactgaacagaattacgaggctgagatccactgtctgcagaagcgcctccaagctgtaagtgagagcaccgtgccgcccagcttacctgtggatagtgtcgtgatcaccgaatccgacgcccagcggaccatgtatccggggtcttgcgttaagaagaacatcgacgggaccatcgagttcagtggggaattcggagttaaggaggaaacaaatattgtgaagctgctggagaagcagtaccaggaacagctcgaagaagaagtggctaaggtgattgtctctatgtcgattgcattcgctcagcagactgaactgtccagaatctccggggggaaagagaatactgcttcttctaagcaggcccacgctgtatgccagcaagagcagcattactttaatgaaatgaagctttcccaagaccagattggatttcaaacatttgagacggttgatgtaaagtttaaagaggagtttaaaccactgagtaaagaactcggtgagcacggcaaagaaatactactctcaaacagtgacccccacgacattccggaaagcaaggactgtgtcctgactatctctgaggagatgttctccaaagacaagacatttattgtgcgccagagcatccacgatgagatcagcgtttcgagtatggatgcctcaaggcagctcatgctgaacgaagagcagctggaagacatgcgacaggaactcgtacgccagtatcaggaacaccagcaagcgaccgagctgctccggcaggcgcacatgagacagatggagagacaacgggaagaccaggaacaactccaagaggaaataaagcgcctcaaccggcaattggcgcagagatcttccattgacaacgagaacctggtgtccgagagggagcgggtgctgctggaagaacttgaggcccttaaacaactgtccctcgccggacgcgaaaagctttgttgtgagctaagaaactcgtcaactcagacgcagaatgggaatgaaaatcagggcgaggtggaagagcagacttttaaggagaaggaattggaccgtaagcccgaggacgttccccccgaaatcctgtccaatgaacggtacgcgctgcaaaaggctaataaccgactcctgaaaattctgttggaggtggtgaaaacgacggcagcagtggaagagactatagggagacatgtgctgggtattcttgacagatctagtaaatctcagagctctgccagcctcatttggagaagcgaggccgaggcctccgtgaagtcctgcgtccacgaagagcatacccgggtgactgatgaatccattccctcatactctggatccgacatgcccagaaacgatattaatatgtggagcaaagttactgaggaagggactgagctaagccagaggttagtcagaagtggattcgctggaaccgaaattgaccccgaaaatgaagaactaatgctcaacatctcgagcaggctgcaagcggccgtggaaaagttgttggaggccatcagtgaaacatcgtcacagctagagcacgccaaagtcactcagacagaactgatgagagaaagttttcgtcagaaacaggaggcaaccgagtctttgaagtgtcaggaggaacttcgtgaaagactgcatgaggaatctcgtgccagggagcagttggccgtggagttgtcaaaggcggagggcgtaatcgacggttacgctgacgagaaaacactctttgagcgacagatacaagaaaaaacagacatcattgatagattggagcaggagctactgtgcgcctctaacagactccaggagctggaggcggaacaacagcaaattcaggaagaaagagaactactctcacgccagaaggaggctatgaaagctgaggctggccccgtcgagcagcagctgctgcaagagaccgagaaattaatgaaagagaaacttgaggtccagtgccaagcggaaaaagtacgcgacgatctccaaaaacaagtcaaggctctggaaattgacgttgaggagcaggttagtcggttcatcgaactggaacaagagaaaaacaccgagctgatggatctgcgccagcagaaccaggctctggaaaaacaactcgaaaagatgaggaagtttttggatgaacaggccatcgatcgcgaacatgaaagagacgtcttccagcaggagatccagaagctggaacagcagctcaaagtcgtgcctcggttccaaccaatcagcgagcaccagaccagagaggtggaacagctggccaatcacctgaaagaaaaaacagataaatgtagcgagcttcttctttccaaggaacagctgcagcgagacatccaggagcggaatgaggagattgagaagctggagttccgtgttcgcgaactggagcaggcactcttggtgtccgctgacactttccagaaggtcgaagatcggaaacattttggagctgttgaagcaaagcctgaattgtccctcgaagtccagcttcaagcagaacgagatgccatcgatcgaaaagagaaggaaattactaatctcgaggagcagctcgaacagtttcgagaggagctagagaataagaatgaggaggtgcagcagctacacatgcagttggagatacagaagaaagagtctaccacccggcttcaggaactagagcaggaaaacaaactctttaaggatgacatggagaagctgggtttggctattaaagagtcggatgccatgagcacccaggatcaacatgttctgttcggaaagttcgctcaaatcattcaagaaaaggaggttgaaattgaccagctgaacgaacaggtgaccaaactccagcagcagttgaagatcactacagataataaggtcattgaagaaaaaaatgagttaattcgtgacctggaaactcagattgagtgtctgatgtcagatcaggaatgcgtgaaacgaaatcgagaagaagagatcgagcagttgaacgaagtaatcgagaagctccaacaagagctcgccaatattggacagaaaaccagcatgaatgcgcacagtctgagcgaggaggcggatagcctgaagcatcagctggacgtagtgatagccgagaagcttgcattggagcagcaagtagagacggcaaatgaggagatgacattcatgaaaaatgtgcttaaggaaacaaactttaaaatgaaccagctgacccaggaacttttttctctcaagcgcgagcgcgagagcgtggaaaaaatccaatcaattccggaaaattcggtgaacgtggctatagatcacctgagcaaggataagccggagttggaggtggtgctcactgaggacgccctgaagagtctcgagaaccaaacatactttaagtcctttgaagaaaacggtaaggggtcaattataaatctcgagacgaggctgctgcagctggagagcacagtgtccgccaaggacttggagctcacccagtgctataaacaaatcaaggatatgcaagaacagggccagttcgagactgaaatgctgcagaaaaaaatcgtgaatctacagaagattgtggaggagaaggtggcggcggcactggttagtcaaattcagctggaggctgtccaagaatacgcaaaattctgccaggataaccagaccattagcagcgagccagagcgcacaaatattcagaacctcaatcaactcagggaggacgagctgggcagcgacatttccgcgctcaccctgcgcatctctgaactggagagccaggtggtggagatgcataccagtctcattttggagaaggagcaagttgagatagctgagaagaacgtgctggaaaaagagaagaagctattggagctgcagaagctgctcgaaggtaatgaaaagaaacagagagagaaggagaaaaaaagatccccccaggatgttgaggtccttaagacaaccactgagctcttccattcgaacgaggaaagcggattctttaacgagctggaggcactccgtgccgagtctgtggccacgaaggcggaactcgcgtcttataaggagaaagccgaaaaactccaggaggagctgctcgtcaaagagactaacatgacttccttacagaaggacctcagccaggttagggatcatctcgccgaggccaaggaaaagctctccatcctcgaaaaggaggacgagactgaggtacaagaaagtaagaaagcttgcatgttcgagcctctgcctataaagctgagtaagtctatcgccagtcaaaccgatggaacgctcaaaatcagttctagtaaccagacgcctcagatcttggtgaaaaacgcaggtatccagatcaacttgcagtctgagtgctcgtccgaggaggtgactgagatcattagtcagttcaccgagaaaatagagaaaatgcaggaactacacgcagccgagatcctggatatggagtcacgccacatttccgagacagagacgcttaaaagagagcattatgtcgcggtccagttgcttaaggaggagtgcggaaccctcaaggccgtaatccagtgcctgcgatcaaaggagggactgctgagagcagttcacaatgaggggatgcaggtgctctctctcaccgaatcaccctattccgatggcgaagatcacagtatacagcaagtcagcgagccttggctggaggaacggaaagcctatattaacactatttcctcccttaaggacctcatcactaaaatgcagctgcaacgagaagccgaggtctatgatagcagccagagtcacgaatctttctcggactggcgaggcgaactcctgctggccctgcaacaggtgtttctcgaagagaggagcgtgttactcgcagcgtttaggacggaactgacggccttaggcaccaccgacgcggtggggttactaaattgcttggagcaacgcattcaggagcagggcgtggagtaccaggctgctatggaatgcctgcaaaaagctgaccgtaggagcctcctgtcagaaatccaggcactgcacgctcagatgaacggcagaaagattactcttaaaagagagcaggagtccgaaaagccctcccaggaacttctagagtacaacattcaacagaaacagagccagatgcttgaaatgcaagtggagttaagcagtatgaaggaccgcgccacagaactccaggagcaactatctagcgagaagatggtggtggccgagctgaaaagcgagctggcacagaccaagttggaactggagactaccctcaaggcccagcacaaacacctcaaagagctggaagccttccgactcgaagtgaaggataagacagatgaggtgcatttgcttaatgatactctggccagcgaacagaagaaatctagggagctgcagtgggccttggagaaggaaaaagctaaactcggacggagcgaggagcgggataaggaggagcttgaggacttaaagttttcgctcgagtcgcaaaagcagcgtaacctgcagctcaatttgcttctggaacagcaaaaacaacttctcaatgaaagtcagcaaaaaattgagagccagcggatgctgtacgatgcccagttgagcgaggaacaaggccggaacctagagctacaggtactgctggagagtgaaaaagtgcgcattcgagaaatgtcatccacactcgaccgagagagggagctgcatgcgcaacttcagtctagcgacggaactgggcaaagtcgcccaccactgccttctgaggatttgctgaaggagctgcagaaacagttagaggaaaagcatagtcggatcgtcgaactgttgaatgagactgaaaagtataagctggatagcctccagacacgacaacaaatggagaaggatcgtcaagtgcaccgcaagactctgcagactgaacaggaagcaaatacagaaggccaaaagaaaatgcatgaactgcaaagtaaggtggaggatctgcagcggcagttggaggagaagcggcaacaggtgtacaaacttgacctggaaggccagcggctccaaggcatcatgcaggaattccagaagcaagaactcgaacgggaagagaagcgcgagtcccggcgaattctttaccagaacttaaacgagccaacgacatggagtctgacaagtgatcggacccggaactgggtgctccagcagaagattgagggagagaccaaggagagcaattatgcaaaacttatcgagatgaatggggggggcacgggttgcaaccatgagctcgagatgatccgccagaagctacagtgtgtagcatcgaaactgcaagtgttgccccagaaggccagcgagcgcctgcagtttgagaccgccgatgatgaggattttatttgggtacaggaaaacatcgacgagattatcctacagcttcagaagcttactgggcaacaaggcgaagaaccctccctggtctctccatcaacctcctgtggaagccttactgaacgattactccggcagaacgccgagcttactggccatattagccaactcaccgaagagaaaaatgatctgcgtaacatggtcatgaagttagaagagcagattaggtggtaccggcagacgggcgctggccgcgacaacagctcccgcttctccctgaacggtggagcaaacatcgaagccatcattgcaagcgagaaggaggtgtggaatagggagaaactgacactccagaagagtctgaagagagccgaggccgaggtgtacaagttaaaggcagaattgcggaatgactccttactccaaaccctcagtcccgatagcgagcatgtcaccctgaaacggatctatggcaagtacctcagggcagagagtttcagaaaagctcttatctaccagaaaaaatacctgctactgcttctcggaggctttcaggaatgtgaagacgccaccctggcattgctggctcgcatgggtgggcagcccgcctttaccgatctcgaggtgattactaatcgcccaaagggattcactcgcttcagatcggccgttcgtgtgtctatcgcaattagccgcatgaaatttttagtgaggaggtggcaccgggtgaccggcagcgtgtcgatcaacattaatcgggacggattcggcctaaaccagggagccgagaagactgactctttttatcactcatcaggtggtctggaactgtatggggagccccgccataccacttacaggtctcgaagcgatctcgactacatccggtcgccactccctttccagaaccggtatcctgggacgccagctgacttcaatccaggaagtttggcctgctcccagctgcagaattacgatcccgacagggccctgacagactacataacaagactggaggctctccagagacgtctggggaccattcaaagcggtagcaccacacagtttcatgccggtatgagacgctag

SEQ ID NO: 306435 - DNA, 11736 bp, Artificial Sequence
  derived and/or modified sequence
atggaggacgaggagcggcagaagaagctggaggccggcaaggccaagatagaggagctctccctggcctttttggttcgccagctagcccagtttcgccagaggaaggctcagtctgatggacaaagtccctctaagaaacagaaaaaaaagcgcaaaacatcctcaagcaagcatgacgtgtccgcacatcacgatctcaatattgaccagtcgcagtgtaatgagatgtacataaatagctcgcagagggtggagtccacagtgattccggaaagtaccatcatgcgcactctgcattctggcgaaattacttcgcatgaacaaggtttcagcgtggagctagaaagcgaaatctctacaaccgccgatgattgttcttcggaagttaatggctgttctttcgttatgcggaccgggaagcccacaaatctactgagggaagaagagttcggcgtagatgactcgtattcggagcagggagcccaggacagcccaacgcatcttgagatgatggaaagcgaactagctgggaaacaacatgaaatcgaagagctcaatcgcgagttggaggaaatgagagtcacttatggcaccgaagggctgcagcaactacaggaatttgaagctgcaattaaacagcgagatgggatcattactcagctgacggccaaccttcagcaagcgcggagggaaaaggatgagactatgcgcgagtttctggagctgaccgaacagagtcagaagctgcagattcaattccagcaactgcaagcctctgagaccctgcgcaattctacgcactccagcaccgcggccgacctcttgcaggcgaagcagcagatcttgacccaccagcaacaacttgaagaacaagaccacctgctagaggattaccagaagaagaaggaggatttcaccatgcagataagtttccttcaggaaaaaattaaagtttacgaaatggaacaggataaaaaagtagagaactcaaataaagaggagatccaagagaaggagactatcattgaagaactgaacactaaaataatcgaggaggagaagaagaccctggaactcaaagataaactaacaacagccgacaaactgttgggcgagttacaagagcagatcgtgcaaaagaaccaagaaatcaagaatatgaaactcgagctgaccaatagcaaacagaaagagcgccagtcaagtgaagaaattaagcagctcatgggcaccgtcgaagaactgcaaaagaggaaccataaagattcccagtttgaaactgatatcgtgcagagaatggaacaggagactcagaggaagctggaacagctgagggcagagctcgacgagatgtacgggcagcagatcgtgcagatgaaacaagagctgatcaggcagcatatggcccagatggaagagatgaagacccgccacaagggagagatggagaacgctctgcgcagctattctaatataaccgtgaatgaggatcagatcaagctcatgaatgtggccatcaacgaattgaacattaaacttcaagacacaaattcgcaaaaggaaaagctgaaagaagagttgggtctgatcctggaagagaaatgtgcacttcagaggcagctcgaagatttagttgaggaactgtctttctctcgtgaacagatccagcgcgcccgacagacaatcgcagaacaggaaagcaagcttaatgaggcccataagagcctgagcactgtcgaagatctgaaagcagaaatcgtcagcgcatcggaaagcaggaaggagttagaactgaagcatgaggcagaggttactaattataagatcaagctggagatgcttgagaaggagaaaaacgccgtactggatcggatggcagaatcacaggaggccgaacttgaacggttacggactcagctcttattttcccacgaggaggaactgtccaagctgaaggaggacttggagatcgaacaccggattaatatcgagaagctgaaagacaatctgggaattcactataagcagcagatcgacggcctgcaaaatgaaatgagccagaagatcgaaacaatgcaattcgagaaggataacctcatcaccaagcagaaccagctgattctcgaaatcagcaaattgaaggatttgcagcaatccctcgtgaactctaagtcagaggaaatgaccctgcagataaatgaattgcagaaggagattgagatacttcgtcaggaggaaaaagagaagggcacactcgaacaggaagtgcaggagctgcagctcaaaaccgagctattagaaaagcaaatgaaagaaaaggagaatgacctccaggaaaagttcgcccagctcgaggcggagaacagcattctgaaagacgagaagaaaaccctggaggatatgctgaagatccacacaccagtgtcccaggaggagcgcctgatcttcctggatagtattaagtctaagtccaaggactcagtttgggagaaggagatcgagatcctgatagaggaaaacgaggatctgaaacaacagtgtattcaattgaatgaggaaattgagaagcagcgaaatacattttcttttgccgagaagaactttgaggtgaattaccaggaactgcaggaggaatatgcatgtcttctaaaagtcaaagacgacctggaggacagcaagaataaacaggaactcgagtacaaatctaagctgaaggcactgaatgaggagcttcatctgcagcgaatcaatcccacaaccgtgaagatgaaaagcagtgtgtttgacgaagacaagacattcgttgccgaaacgctagagatgggcgaggtagtggaaaaagataccaccgagctaatggagaagctggaggtgaccaaacgagaaaaactcgagttaagtcagcggctgagcgatctgagcgaacagctgaagcagaagcacggcgagatttccttcctgaatgaagaggtgaaaagtctgaaacaggaaaaagagcaggtgtcactgcggtgccgggaattggagatcatcattaaccacaacagagctgaaaacgtccaatcgtgcgacacccaagtatctagcctgctagacggggtggtcaccatgacctccaggggcgcggaggggtcagtgagtaaggtgaacaaatccttcggggaagagagcaaaattatggtagaggataaagtgtcttttgagaatatgacagtcggtgaagagtctaaacaggagcagctgatactcgatcatttgcccagcgtcaccaaggagtctagtttgcgggccacacaacctagtgagaacgataagctgcagaaggagctgaacgtactgaagtcagaacaaaatgacctccgtctccagatggaagcacagcgcatatgtctgagtctcgtgtatagcacacatgtggatcaggtacgcgagtacatggaaaatgagaaagataaggcactttgctcactcaaagaggagctcatctttgctcaggaggagaaaatcaaagagcttcaaaagatccatcaattggagttgcaaactatgaaaacacaggaaacgggagatgagggcaaacctctgcacctgcttattgggaaactacaaaaggctgtcagcgaggagtgctcatattttcttcagacactgtgctcggtgttgggggaatactacacaccagcgctgaagtgcgaagtgaatgcagaggataaagagaactcgggtgactatattagcgagaacgaggacccggagctccaggattaccgctatgaggtgcaagattttcaggagaacatgcatacattgctcaataaagtgactgaagagtacaacaaactcctggtgctgcagacacgtctgtctaaaatttgggggcaacagaccgacggaatgaaactggagttcggagaggaaaacctcccaaaggaggagaccgagttcctgtctattcattctcagatgacaaatctggaagacatcgatgtaaatcacaagagcaaactttcctctctgcaggacctggagaaaaccaaattggaggaacaagtccaagagttggaaagcctaataagttccctccagcagcagctcaaagagacagagcagaactatgaagctgagatacattgtttacagaagcgtcttcaggccgtatctgagtcgacagtacccccatctctgccagtggactctgtggtgattaccgaatcagatgcacagcgtactatgtaccccggctcatgcgttaaaaagaatatcgatggcacaatcgagttttccggggagttcggagtgaaagaggagacgaacattgtaaagcttttagaaaaacaataccaggaacagctggaggaagaagtagccaaggttattgtgtcaatgagtattgcattcgctcagcagactgaactctctaggatatcaggtggaaaggaaaacaccgctagctccaagcaggcccatgctgtgtgtcagcaagaacagcattacttcaacgaaatgaaacttagccaggaccaaatcgggttccagacatttgaaaccgtcgacgtgaaatttaaggaagagttcaagccgttatccaaagaactgggggaacacgggaaggagatacttctcagcaacagcgaccctcacgatatccccgagagcaaagactgcgtcctgactatctccgaagagatgttctcaaaggacaaaaccttcatagtgcgccagtctatacatgatgaaatctcagtctccagcatggacgctagtcgccaacttatgttaaacgaggagcaactggaggacatgagacaagagttagtgcgtcaatatcaagaacatcagcaggcgaccgagctgctaagacaggcccacatgcgccagatggaacggcagcgcgaagaccaggagcagctccaggaggagatcaagcggctgaaccgccagttggcccagcggtcgtcaatcgataacgaaaacttagtgtccgagagagaacgggtcctcctggaggagttggaggcactgaagcagctgtctctggccggacgggaaaaactgtgttgcgagttgaggaactcctcaactcaaactcaaaacgggaatgaaaaccagggggaagttgaggaacagacatttaaagagaaagaacttgataggaagcccgaggatgtccccccagagattctctcaaacgagagatacgcgctccaaaaggcaaacaacagactgctgaagatcttactggaagtggtcaaaaccaccgccgctgttgaggaaacaattggtcggcacgtgctcggaattctcgatcgctcaagtaaaagccaatcctccgctagcctcatttggcgctctgaagccgaagcgagcgttaagagctgcgtgcatgaggaacacaccagggtcaccgatgagagtatcccaagctactcaggcagcgacatgccaagaaatgatataaatatgtggtccaaagtgactgaggagggaaccgaactttcgcagcgactggtgcggagcggattcgcaggaaccgagatcgatccagagaatgaagagctgatgctgaacatctcctcccgcttacaagccgccgtcgaaaagttacttgaagcaatttctgaaacttccagtcaattagagcacgccaaagtgacacagactgagctgatgcgggaaagctttcgccagaagcaggaagctacggagtcgcttaagtgccaggaagagttgcgggaacggcttcatgaagagtctagggcgcgtgagcagttggcagtagaactatctaaggccgaaggagtgatcgatggctacgcagatgagaaaacactgttcgaaaggcagattcaggaaaagactgacattatcgaccgcctggagcaggagttgctgtgcgcctcaaacagactgcaggaactggaagccgaacagcagcagatccaggaagaacgcgaacttcttagccgacaaaaagaagccatgaaggccgaggctggaccggtggagcagcagctgctgcaggaaactgaaaagctaatgaaagaaaagctcgaggtgcaatgccaggccgagaaagttcgggatgacctgcagaagcaggtgaaggccctcgaaattgatgtagaagagcaggtgtctaggtttatcgagctggaacaagagaagaatacagagctcatggatttgagacagcagaatcaagcattggagaagcagctggaaaagatgcgaaagttcctggatgagcaggctatcgatagggagcacgagagagatgtgttccagcaggagattcagaagctggaacagcagctcaaagtggtgccccggtttcagccgatttccgagcaccagaccagggaggttgaacagctcgctaaccacctgaaagaaaagactgataaatgctctgaattgttgctctccaaagagcagctgcagcgagatattcaagagcgcaatgaggagatcgagaagctggaatttcgagtccgtgagttggaacaggcccttttggtatccgccgataccttccagaaggtggaagacaggaagcacttcggcgctgtagaagctaaacctgagttgtccctcgaggtccagctacaggccgagagagatgctattgatcgcaaagagaaggagatcactaacctggaagagcaactagagcagtttagggaggaactggagaataagaatgaggaggtgcagcagcttcatatgcagcttgagatccagaaaaaagaatccactacacgacttcaggagctggagcaggaaaataagctgttcaaagatgacatggagaagctgggactggccataaaagagagcgacgccatgtccacacaggatcagcacgttctattcggcaagttcgcacaaatcatccaggaaaaggaagtggagattgaccagctaaatgagcaggtcacaaagctccaacagcagctgaagatcaccactgacaataaagtcatcgaagaaaagaatgaattgattagagatttggagacccaaattgagtgtctgatgagcgaccaggagtgtgtaaaacgaaatcgagaggaggagattgaacagctgaatgaggtgattgaaaagctacagcaggaattagctaacattggccagaagacctcaatgaacgctcatagcctctccgaggaagctgatagcctaaaacaccaactcgatgtcgttatagccgaaaagctggccctcgaacaacaggtggaaacagcgaatgaggagatgacgttcatgaaaaacgtgctcaaagagaccaatttcaaaatgaaccaactcacccaggaactgttctcgctcaaaagggagcgggaatccgttgagaaaatccagagtattccagaaaactcggttaacgtggcaattgatcatttgtctaaggacaaacccgagctggaggttgtgctaaccgaagacgccctgaaatccttggagaaccaaacctacttcaagtcatttgaagagaatggtaaaggcagcatcatcaacctggaaactaggctactgcagctggagagcaccgtctccgctaaagatctggagttaacccagtgttataaacagattaaggacatgcaggagcagggccagttcgaaacggagatgttgcagaagaagattgtgaatcttcagaagatcgtggaagagaaagttgccgccgccctggtctcccagatccaacttgaggcggtgcaggaatatgccaaattttgccaagataaccaaactatcagtagcgaacctgagcggactaacattcaaaacctaaaccagttacgggaagatgaactgggtagtgacatttccgctcttactctcaggataagtgagctcgagagccaagttgtggagatgcacacttcactgattctggagaaagagcaggtagaaatcgccgagaagaatgttctggagaaggagaaaaagctgctggagctccaaaagctccttgaaggtaatgagaagaagcaaagggaaaaggagaaaaagcgcagcccccaagatgttgaggttctcaaaaccacaacggagctattccactcaaatgaagagagtgggttctttaatgagctggaggcactgagggccgaatcagtcgccaccaaagccgagctggcttcgtataaggaaaaggctgagaagctgcaggaggaacttctggtaaaagagaccaatatgacttctctccaaaaggacttgagtcaagtgcgggaccacctggcggaggctaaagagaaactctcaattttggagaaagaggacgaaactgaggtccaggagagtaaaaaagcctgcatgttcgaacctctgcccatcaaattgagcaaatctatagcctcccaaacagacgggacactgaaaatctcaagcagcaaccagactccccagattctggtcaagaacgcaggcattcagattaatctccagtctgaatgtagcagcgaggaggttaccgagataatctcgcagttcaccgagaagatcgagaaaatgcaggagctgcacgccgccgagatcctggatatggagtctaggcacatttcagaaacagagacgctgaagcgcgaacactacgtagccgtacagctgctcaaggaggaatgcggcaccctcaaagccgtgattcagtgcttgaggagcaaggaggtgttcgggttttataatatgtgctttagcacactctgtgactccgggtctgattggggccaaggaatctatctcacccattctcagggctttgacatcgctagtgaaggccgcggggaggaaagcgagtccgctacggatagctttccaaaaaagatcaaagggttgctgcgcgccgtgcacaacgagggaatgcaggtcctgagcctgaccgagtccccttattcagacggggaagaccattctattcagcaggttagcgaaccatggctggaagagcgaaaggcatacattaatactatctcttcgttgaaggaccttatcacaaagatgcagctccagagggaggctgaggtgtacgattcatcccagtctcatgaaagcttttctgactggcgcggagaactgctgttagctctgcagcaggtgtttttggaggagcggtccgtgctcctcgcagcatttcggacagagcttactgctctcggcacaacagacgcagtcggcctcctcaattgtttggaacagcgcattcaggagcaaggcgtcgagtaccaggctgccatggaatgcttgcagaaggcggaccgtcggagcctgctctcagaaatacaagctctccacgcccagatgaatgggagaaagatcacgttaaagagagagcaggagagcgagaaacccagccaggagctgctggagtacaacattcaacagaagcagtcacagatgctggaaatgcaggtggaattaagctcaatgaaggatcgcgcaacagaattgcaggaacagctgagttctgaaaaaatggtggtagcagagctgaagtctgaactggcccaaaccaagctagaactcgagaccaccctcaaggcacagcacaagcacctgaaagagctggaagccttccggctggaagtgaaggataagaccgatgaggtgcaccttctaaatgacaccttggcatccgagcaaaaaaagagccgcgagctgcaatgggccttagagaaagagaaagccaagctcggccggagcgaagaaagggataaagaggagctcgaagatctgaaattttctctcgagtctcagaaacaacgcaacctccagctgaaccttctcctggagcagcagaaacaattgttaaatgagagccagcagaagatagaatctcagaggatgctttacgatgcccagctgtcagaggagcagggacggaatttagaactgcaggtcctgctagagagcgaaaaagtgcgcatccgggagatgagcagcacactggatagggaacgagagcttcacgctcagttacagtcttccgacgggactgggcagtcgagaccaccattgcccagtgaagacttgctcaaagaactgcaaaaacagcttgaggaaaagcactcaaggatcgttgagctcctgaatgagacagagaagtacaaactggactctcttcaaaccagacagcaaatggagaaggaccggcaggtgcacagaaagacactgcagacagagcaggaagccaatactgaaggacagaagaagatgcatgaactgcagtccaaggtcgaggacttgcagaggcagctggaagagaaacgccagcaggtgtacaagcttgatctggagggccagcggctgcagggcatcatgcaagaattccagaaacaagagttggaaagagaggagaagagagagtcacgccgtatcctatatcagaatcttaatgaacccacaacttggtccctcacgtcagacagaacccgcaactgggtcttacaacagaagatcgagggcgaaacaaaggaaagcaattacgctaaactcattgaaatgaatgggggaggcacgggatgcaatcacgagttggagatgatacggcagaagctacagtgtgtagcctccaaactgcaggtccttccccagaaggcaagtgaacggctccagttcgagacggccgacgacgaggactttatttgggttcaggagaacattgacgagatcattttacaactgcaaaagttaacaggacagcagggtgaagagccatccctcgttagcccgagtaccagctgcggaagcctcactgagagattgctaaggcagaatgccgaactaacagggcacatctcccagttaacagaggagaagaacgacctgcggaatatggtaatgaaacttgaggagcaaatcagatggtatagacagacgggcgccggacgtgataactccagtagattcagcctgaacgggggggcgaatatcgaagccattatagcctcagaaaaagaggtctggaaccgggaaaagctgacactccagaaaagcctcaagcgggctgaagcagaagtgtacaagctgaaagcagagttgagaaacgattcattgcttcaaaccctcagccccgactccgaacacgtgaccctgaagaggatctacggtaagtacctaagagccgaaagctttagaaaagccctgatctatcagaagaagtatctcttgctgctgcttgggggattccaagaatgcgaagacgcaacactcgcacttctcgctcgcatgggtgggcagccggccttcactgacctcgaggtgattacaaatcggcctaaaggctttactcggtttcgcagcgcagtaagggtcagcatcgccattagccgaatgaagttcctagtcagaaggtggcatagagtgactggctcagtttcaatcaatatcaaccgcgacggtttcggactgaaccagggggcagagaagaccgatagcttctatcactcttccggggggcttgagctgtatggcgagccgcgtcacactacttacagaagccgatccgaccttgactatatcagatctcccctccctttccagaatagatacccagggacacccgcggactttaatcccggcagcctggcctgcagccaacttcagaactatgaccctgaccgtgcactgactgactatatcacacggctcgaggcgctgcagagacggttgggcactatacagagcggctctacgacccagtttcacgctggaatgcgacgttag

SEQ ID NO: 306436 - DNA, 11574 bp, Artificial Sequence
  derived and/or modified sequence
atggaagatgaggagcggcaaaagaaactagaggccggtaaagcaaagattgaggaactgtcactcgccttcctggtcaggcagttggctcagttcaggcagaggaaagcgcagtctgatggacagtcaccttctaagaaacaaaagaaaaaacgtaagacatcttccagcaagcacgacgtttctgctcaccatgatttgaacatcgaccagtcccagtgcaacgagatgtacattaacagctcccagcgggtagaaagtactgttattcccgaatctactatcatgagaaccctgcactctggggaaattactagccacgagcagggcttctctgtggaattggaaagtgaaatttcgacaacggctgacgattgtagctctgaggtcaatgggtgcagctttgtgatgagaaccggcaagcccactaacttgctgcgggaagaagagttcggtgtggatgactcctactctgaacaaggcgcacaggactccccaacccacctggaaatgatggagtccgagctcgcgggaaagcagcatgagattgaggagcttaaccgggagttagaggagatgagggtgacctatggaactgaaggattacagcagctgcaggaattcgaggcggcaataaagcaacgcgatggcatcattactcaactcacagccaatctccagcaggctagaagagaaaaagacgaaaccatgcgcgagttcttggaactcaccgaacagtctcagaaactccaaatacagttccagcagctgcaggcgagcgaaaccctgagaaactcaactcacagtagtactgcggctgacttactgcaagccaagcagcagatattaacacaccagcagcagctggaggagcaggaccacctgttggaagactaccagaagaaaaaagaggactttaccatgcaaatttcgtttctgcaggaaaagatcaaggtctacgagatggagcaggataagaaagtggagaacagcaacaaagaagagatccaagagaaggagaccatcattgaagagctgaacactaagattatagaagaggagaaaaagaccctggagcttaaagacaagctgacaaccgccgataaactgctgggcgagctccaagagcagatcgtgcagaagaaccaggagattaagaatatgaagttggaattgactaactctaagcaaaaggagagacaatcctcggaggagatcaagcagctcatgggtacagtagaggaacttcaaaagaggaaccacaaagattcccaatttgagactgacatcgtgcagcgcatggaacaggaaacgcagaggaagctagagcagctgagagccgaattggacgaaatgtatgggcagcagatagtgcagatgaagcaggaactcatccggcagcacatggcacagatggaggagatgaagactagacataagggagagatggaaaacgccttgaggtcctacagcaatataaccgttaatgaggaccagattaagcttatgaatgtggcgatcaatgagttaaacatcaaactgcaggatacaaattctcagaaggaaaagctgaaggaagagctggggctgatcctcgaggagaaatgcgccctacagcgtcagctggaggaccttgttgaggagctgagtttcagcagggagcaaatacaacgggctaggcagaccattgcggagcaggagagcaagctcaacgaggctcacaagtcactaagtactgtagaggatctcaaagctgaaattgtatctgcatccgaatcacgaaaggagctagaattgaagcacgaagccgaagtgaccaattataagataaaattagaaatgcttgagaaggaaaagaacgccgtcttggatcgtatggccgagagtcaggaagccgaactcgagcgccttagaacccagcttctgttttcccatgaggaggagttgtctaaactgaaagaggacctagagattgagcataggattaacatcgaaaagctcaaggataatctggggattcattataaacagcagatcgatggcctgcagaacgaaatgagtcaaaagatcgagacaatgcagttcgagaaagacaacctgataaccaaacaaaaccagctgatcctcgaaatctcaaagctgaaggacctccagcagtcactagtgaactctaagagcgaagagatgaccctacaaattaatgagttacagaaggaaatagagatcttgcgccaggaggaaaaagagaaaggcacactcgagcaggaagttcaggagttacagctgaagactgagctcctcgagaaacaaatgaaggaaaaggagaatgatctgcaggagaaatttgcgcagctggaagctgagaattctatattaaaagacgagaagaaaaccttagaagatatgttaaagattcacaccccagtaagccaggaggagcggttgatctttctggacagcataaagtcgaagtctaaggacagtgtatgggagaaggaaatagagattcttattgaggaaaacgaagatctgaagcaacaatgcatccagctaaacgaagaaatagaaaaacaaaggaacaccttttcatttgctgaaaaaaatttcgaggttaactatcaagagctgcaggaagaatacgcatgtcttctaaaggtgaaagacgatctcgaggacagcaagaacaagcaggaactggagtacaaatcaaaactgaaggcactgaacgaggaactccacctgcaacgaattaatcctacgaccgtcaagatgaagagcagcgtgttcgacgaggacaagacgtttgtggccgaaactcttgagatgggcgaggtggtcgagaaggacacaaccgagttaatggagaagctggaggtcactaagcgagaaaaactggagctgtcgcagagactcagcgatttgtccgagcagttgaaacagaagcatggggaaatttcgttcctgaacgaagaggtgaagtccttaaagcaggaaaaggaacaggtgtctcttaggtgcagagagctcgagatcatcattaaccataatcgtgctgaaaatgtgcagtcctgtgacacccaagtgtccagcctcttggacggcgtggtgacaatgacaagccggggagcagagggttcagtgagcaaggtcaataaatcattcggcgaggagagtaaaataatggtagaagacaaggtgagctttgagaacatgacagtcggagaagaatccaaacaggaacagcttatcttagatcatctgcccagcgttaccaaagaatcatctcttcgggctacgcagccatccgaaaacgacaagctgcagaaggagttgaacgtcttgaagtcagaacagaatgacctgcgtttgcagatggaggcacaacgcatttgcctttccctggtttactcgactcacgtggatcaggtgcgtgagtacatggaaaatgagaaggataaagcgttatgtagtctgaaagaagagctgatcttcgcccaggaggaaaagatcaaggaactgcaaaagattcaccagttagaactacaaacgatgaaaactcaggagaccggtgacgaaggcaaacctctgcatttgctgatcggaaaacttcagaaggccgtctctgaggagtgctcctattttcttcagacattgtgcagtgttctgggtgaatactacacccccgcattaaaatgcgaggtgaatgcggaagataaggaaaactcaggagattacatcagcgagaacgaggaccccgaactgcaagattacaggtacgaggtacaggattttcaagaaaatatgcataccttgcttaataaagtcaccgaagaatataataagttactggtactgcaaaccaggctctccaaaatctgggggcagcagacagatgggatgaagctcgagttcggagaggagaatctgcccaaagaagaaactgaattcctctctatccattcccagatgacaaatctagaggacatcgacgtgaaccacaagtcgaagctgagtagcctgcaagatctggagaagacaaaactggaggagcaggtgcaagagttagaatccttaatctcctcactgcagcagcaattgaaggagacagaacaaaattatgaagcagaaatacactgcctgcaaaagcgactccaggctgtttctgaatccacggtaccaccgtcactacccgtggacagcgtagtcattacggagtctgatgcgcagcggacgatgtatcccggaagttgcgtgaagaagaacattgacgggaccatagagttttctggtgagttcggggttaaggaagagacaaatatcgtaaagctgctggagaaacagtatcaggaacaactggaggaggaggtggcaaaggttatcgtgtcaatgagcatagcttttgcacagcagacagagctttccaggatctctggtgggaaggagaataccgcgagtagcaaacaggcccatgccgtctgccagcaagaacagcattactttaatgaaatgaagcttagtcaggaccaaatcgggttccagaccttcgagactgtggatgttaagtttaaggaggagtttaaaccgctgtccaaggagctgggggagcacggtaaggagattctgctgagcaatagcgacccccatgacatacctgaatcaaaagattgcgtcctcacgatatctgaagagatgttttcgaaggacaaaacttttatagtgcggcagtcaattcacgatgagatcagcgtatcctcgatggatgctagccggcagttgatgttaaacgaagagcagctggaggacatgagacaggaattggtgagacagtaccaagagcatcagcaggccactgaactccttagacaagcccacatgcgacagatggaacgacaacgggaagatcaagagcagctgcaggaagagattaagcgacttaaccgccaactggcccagcgctcaagcatagataacgaaaatctggtctcagagagagaaagggtgctgctggaagaactggaagcattgaagcagctgtcgctcgccggtagagaaaagctgtgctgtgagctgcggaatagttccacacagacgcagaacggtaatgaaaaccagggggaggtggaggagcaaactttcaaggaaaaagaactcgaccgcaagccagaggacgttccgccagagattctgtcaaatgagagatacgcactgcagaaagcaaataaccgcctgctaaagatccttctggaggttgtgaagaccacggccgctgtggaagagacaattggccgtcacgtgctggggatactggacagatcttcaaaatcacagagctccgcctcgctcatctggcgttctgaggctgaagcttccgtaaagtcttgcgtccatgaggaacacaccagagtcacagacgaatccatcccctcctacagcggttccgatatgccaaggaatgatatcaacatgtggagcaaagtaactgaggagggaaccgagcttagtcagcgactcgttagatccggtttcgccggtaccgagattgatccggagaacgaagagctaatgctgaacatctccagccggctgcaggcggctgtcgagaagttgctggaagcaatctctgaaactagctctcagttagaacatgccaaagtaacccagaccgagctcatgagggagagtttccgccagaagcaggaagcaacagagtccctgaagtgccaggaggagctgagggagcgcttacatgaggaaagcagggccagggagcagttggcagtcgagctctccaaggccgagggcgtgatcgacggatacgctgatgagaagactctctttgaaaggcagattcaggagaaaaccgatatcatcgatagactcgagcaggagctcctatgtgcttccaatcggctgcaggagttggaggctgaacagcagcagatccaggaagagagggagctcctctcacgccagaaagaagcaatgaaggcggaggcgggtcctgtcgaacagcagttactgcaagaaaccgagaaactaatgaaagagaagttagaggttcaatgtcaggcagaaaaagtgcgggacgatttgcagaaacaggtgaaggccctggagattgacgtcgaagaacaggtgtcgaggtttattgagctagagcaggaaaagaataccgaattgatggacctccgtcagcagaatcaggcactcgaaaagcagttagagaagatgcggaagttcctggatgagcaagccatcgaccgggaacacgaaagagacgtttttcagcaggagatccagaaactcgaacagcagctgaaagtggtccccaggttccagccaatcagcgagcatcaaacccgggaagtggaacaactggccaaccatctgaaagagaagacagataaatgcagtgagttgctgttgagtaaagagcaactccagcgtgacatacaggaacggaacgaggagatcgagaaactggagttcagagtacgcgagttggagcaagccctcctcgtttctgcagatacgtttcagaaggtagaagatagaaagcatttcggagccgtggaggcaaagcccgaactctcactagaggtgcaactgcaggccgagcgtgatgccattgacagaaaagagaaagaaatcactaatttagaagagcagctagagcagttcagggaagagctggaaaacaaaaacgaggaagtgcagcagctgcatatgcagctcgaaattcagaaaaaggagtctaccacccggcttcaggagctagagcaggagaacaagctgttcaaggacgatatggaaaagctaggcctggccattaaagagtcagacgccatgtcaacccaggatcagcatgttctgttcggaaaattcgctcagattatccaggagaaagaggtggagatcgaccagttgaacgaacaagtcactaagttgcagcagcagctgaaaatcaccacggataacaaagtgatcgaagagaagaacgagttaattagagaccttgagactcagatcgagtgtctgatgtctgatcaggagtgcgtcaagcgcaaccgcgaggaggaaatcgagcagctcaacgaagtcattgaaaaattgcagcaggaactcgcaaatatcggccagaagacctctatgaacgcccatagtctgagtgaggaggctgatagtctgaagcatcaactagatgtggtgatagctgagaaactggccctagaacaacaggttgaaacagcgaatgaggaaatgacctttatgaagaacgtcctcaaggagacgaatttcaaaatgaatcagctcactcaagagctcttcagtcttaaaagggagagagagagcgtcgagaaaatccagtctatccccgaaaattcagtaaatgtcgcaatcgaccatttgagcaaggacaagccagagcttgaagtagtcctgacagaggacgctctcaagagtcttgaaaatcagacatactttaagtcattcgaggaaaacgggaaagggagcatcattaatctggaaactcgcctgctgcaactggaaagcactgtctccgccaaggacctcgaactcactcaatgttacaaacaaatcaaggacatgcaggagcagggccagtttgagaccgagatgctgcagaaaaagatagtgaatcttcaaaagatcgtggaagagaaggtggcggcagcgcttgtgtctcagattcagctagaagccgtacaagaatatgccaaattttgccaggataatcagaccatctcttctgaacctgaaagaaccaatatccagaatctcaaccaactaagggaggatgagctaggctctgatattagcgcgctaacgctccggattagtgagctcgagtctcaggtcgtcgagatgcacactagtttaatccttgaaaaagagcaggtggagatcgctgaaaaaaacgtgctggagaaggaaaaaaaactgctggaactacagaagctgctggagggcaacgagaaaaaacagcgagagaaagaaaaaaagcgaagtccacaggacgtggaggtcctaaagacaaccactgaactgttccatagcaatgaggaaagcggattctttaatgagctcgaagcccttcgagctgagagcgtggcaacgaaagctgagctagcgtcatataaggaaaaggctgagaagctccaggaagaacttcttgtgaaggaaactaatatgaccagtttgcagaaggatcttagccaggtgagggatcacttggccgaagccaaggagaagctgagtattctagaaaaggaggacgagacagaagtccaggagagtaagaaggcctgtatgtttgagccactgccaatcaaattgagtaagtctattgcgagtcagacagacggtaccctgaaaatctcgtcttctaatcagacacctcagattttagtgaaaaacgccggaatacagattaatttacaatccgaatgttctagtgaagaagttactgaaatcatttcccagtttacagaaaaaattgaaaaaatgcaggagctccacgccgcagagatccttgatatggaatcgagacatatatcagagactgaaacgttaaaacgcgaacactatgtggcagtgcagctgcttaaagaagaatgcgggacattaaaagcagtaatacagtgcctccgttccaaggagggtctgcttcgagctgtccataacgaagggatgcaggtgctcagccttactgaatcaccttattcggacggcgaggaccactccattcagcaagtatctgaaccttggcttgaagaacgcaaggcttacataaacaccatctccagtctgaaggacttgataactaaaatgcagctgcagagggaagccgaagtgtacgattcaagccagagtcacgaaagtttttctgactggagaggagaactgctcctcgcactgcagcaggtgtttttggaagagagatcagttctgctcgctgcctttagaaccgaactgactgctctcggaacaacagacgccgttggactgttgaattgtctcgagcagcgaattcaggaacaaggcgtggagtaccaggctgccatggaatgcttacagaaggccgacaggagatccctgctatcagagattcaggccctacacgctcagatgaacgggaggaagatcaccttgaagcgagagcaggaatcagaaaagccctcacaggaactcctggagtacaatattcagcagaagcaaagtcagatgttagaaatgcaagtggaactcagcagtatgaaagatcgcgcaacggagctccaggagcaactgtcaagcgagaaaatggtcgtagccgagctcaagagcgagctggcgcagactaagctggagctcgagacaacgctgaaagcacaacacaagcatctcaaggaattggaagcattcaggctggaggtaaaggacaaaacagatgaagtgcacctcctcaacgacactctcgcctccgaacagaagaagtcacgcgagctccagtgggctcttgaaaaggaaaaggcaaaacttggcagatccgaggagcgcgacaaggaggaactggaagacttgaagttttccctagagagccaaaagcagaggaacctacaattaaaccttctcttagagcagcagaagcagctgttgaatgagtctcaacagaagatcgagtctcagagaatgctttacgatgctcagctgagcgaagaacagggtcggaatctggagttacaggtgctgctcgagagtgagaaggtgaggataagagagatgtctagtaccctcgatcgagaacgcgagctccacgcccaactgcagtcctccgacgggactggtcagtcacgacctcctctgccgtcagaggacttgctgaaagagttgcaaaagcagctggaagaaaaacattctcgaatcgttgaacttcttaacgagactgaaaagtataaactggacagcctccagacccggcagcagatggaaaaagacaggcaggtccataggaaaaccctgcagacagaacaggaggccaacaccgaaggtcagaagaagatgcacgaactgcagtccaaggtggaagacttgcagcggcagcttgaagagaagcgccaacaggtgtataagttggacctggaaggacagcgactgcagggaattatgcaagaatttcaaaaacaggagctggaaagagaggagaaacgagagagtcggagaatcttgtaccaaaaccttaacgagcccaccacgtggtctctgacctccgacagaacaaggaattgggtactgcagcagaaaatagagggggaaacaaaagagtctaattatgcaaaacttattgagatgaacgggggaggcaccggctgtaaccacgagctcgaaatgatccgacagaagctgcagtgtgtggcttccaaactgcaggtgctgcctcagaaagcaagtgagcgcttgcaatttgagacagctgatgacgaggattttatctgggtgcaagagaacattgacgaaatcattttgcaactgcagaagctgacaggccagcagggcgaagagccaagcctagtgtcacctagcacatcctgtggcagccttacagagaggcttttgcggcagaacgccgaactaaccggacacatttcccagctgacagaagaaaagaacgatctgcgtaatatggtaatgaagctcgaagagcagattaggtggtatcggcagactggggcaggaagggataatagttcgagattttcactgaacggaggagcaaatatagaggctatcatagcctccgagaaggaggtgtggaaccgggaaaaactgacccttcagaagtcgcttaaacgagcggaagctgaggtgtacaaacttaaagccgagctgcgaaatgactccttgctgcagacattaagtcctgattcggaacacgtaactttaaagcgtatttatggaaagtatctgcgcgctgaaagctttagaaaggccctcatttaccagaagaaatacctgctcctgttactcggcggttttcaggaatgcgaagatgcaacactggccctactcgccaggatgggcggacaacccgcttttacagacctggaagtcatcactaatcgtccgaaagggttcaccagatttcggagcgccgttcgagtttccattgccattagcagaatgaagtttctggtccggagatggcatagggtgacaggtagcgtgagcatcaacattaatagggatggttttgggctcaatcagggagccgagaaaactgactcgttttaccactcctccgggggtctggagctctacggggagccccgacacactacgtatcggagccggagtgacctcgactacatccgatctcctctgcctttccagaaccggtacccgggaacccccgctgattttaacccagggtctctggcatgctctcagctgcagaattatgatccagatagagccctcactgattacattacccgattggaagccctccagcgccgtctgggtaccatacaatcaggaagcaccacacaattccacgcaggtatgaggagatac

SEQ ID NO: 306437 - DNA, 11736 bp, Artificial Sequence
  derived and/or modified sequence
atggaggatgaggagcgccagaaaaaactcgaagctggaaaagcaaagatcgaagagctaagcctcgcgtttctggtccggcagttggcccaatttcgacagaggaaagcacagtcagacggccagagcccctccaaaaagcagaagaaaaagcgcaaaacctcatcttctaaacacgatgtatccgcgcatcacgacctgaacatagaccaatcacagtgcaatgaaatgtacatcaatagctcacagcgcgtggagtctaccgtgatccctgagtctacgataatgcgcacactccactcaggcgaaatcacttcccatgaacaaggtttttccgtcgagctcgaaagcgagatatctactactgccgacgattgctcgtccgaggtcaacgggtgttcattcgtaatgcggaccgggaagccaaccaatttgcttagagaggaagaatttggagtggacgacagttactccgaacagggcgctcaggacagccccacccatctagaaatgatggaaagcgaactcgccggtaagcagcatgaaatcgaagaacttaatcgagaattggaggaaatgagagtgacttacggcactgaggggttgcaacagctccaggaattcgaggcagctatcaaacagcgagatggtatcattacccaattaactgctaacctgcagcaggcccgacgggagaaggacgagactatgcgcgagtttcttgagctcacggaacaatcccagaagctacagatacagtttcaacagttgcaagctagcgagactctgcggaacagtactcatagttcaaccgccgctgatctgttgcaggcaaaacagcagattctgacacaccaacaacagctcgaggaacaggatcacctactcgaagattaccagaaaaagaaggaggattttacaatgcagatcagcttcctgcaagaaaagatcaaggtgtatgagatggaacaggataaaaaggtggagaatagcaacaaggaggagatccaggaaaaggagaccattatagaagaactgaacaccaaaatcattgaggaagaaaaaaaaacgctggagctcaaagacaagctgactacagctgataagctcctaggggagcttcaggagcagatcgttcagaagaaccaagagatcaagaacatgaagttggaactaacgaactctaagcaaaaggaaaggcagagttcagaggagatcaaacagctaatgggaaccgtggaggagttacagaagagaaatcacaaagacagccagtttgaaaccgatatcgtccagagaatggagcaggagacccagcgcaaactcgagcagttgcgggcagagctagacgaaatgtacggacagcagatagtgcagatgaagcaggagctgattcgccaacacatggcgcagatggaggagatgaagacgcggcacaaaggcgagatggagaacgccctgagaagctatagtaacattaccgtcaacgaagaccagatcaagcttatgaacgtcgcaattaatgaattgaacatcaaactgcaggatacaaactctcagaaagagaagctgaaagaagaactgggcctcatcctggaagaaaaatgcgccctgcaacgacagctggaggatttagtcgaggaattgagcttttcgcgcgagcagatacagcgcgcacggcagacaatcgctgagcaggagagtaagcttaatgaagcacataagtcactgtccaccgtcgaagatctgaaggcggaaatcgtctcagcgtctgaatcccgaaaggaattagaattgaaacatgaagctgaggtaacaaattacaaaattaagctggagatgctcgaaaaagagaaaaacgcagtgctagatagaatggcagaatcccaggaggccgagttggaaagattgaggactcagttgctatttagccacgaagaggagctctctaagctgaaagaagacctggagatcgagcaccgcataaatattgagaagctgaaggacaacctcggtatacactacaaacagcaaatagacggtctccagaatgagatgtcacagaagattgagaccatgcaattcgaaaaagataaccttatcactaagcaaaatcaattaatcttggaaatttccaagctgaaggacctgcagcagagcctcgtgaattctaagtctgaagagatgacactgcagatcaacgagctgcagaaggagatagagatactcaggcaggaggagaaggagaaggggaccctggagcaggaggttcaagagctgcaacttaagactgagctgctcgagaagcagatgaaggagaaggagaacgacctgcaggagaagttcgctcaacttgaagccgagaactctattctgaaagacgaaaaaaagaccctagaggatatgttgaagatccacaccccagtcagccaggaagaaaggctcatctttcttgactcaatcaaatctaagagcaaagattccgtgtgggagaaggaaatcgaaatactgatagaggagaacgaagatttgaagcagcagtgcattcagttaaacgaagaaattgagaagcagagaaatacgttttccttcgccgagaagaactttgaagtgaactaccaggaattacaggaggaatacgcctgtctgttgaaagtgaaagacgatttggaggattcaaaaaacaagcaggaattggaatacaaatccaagttgaaagccctgaacgaggaactccacctgcagagaattaatccgactacagtgaagatgaaaagctcagtctttgacgaggacaagacattcgtggccgagacccttgagatgggcgaagttgtggaaaaagataccaccgagttgatggaaaaactcgaggtgaccaagagggaaaaacttgagctgtcgcagcgactgagcgatctgagcgaacagctgaaacagaagcatggcgaaatatctttccttaatgaggaagtgaagtctcttaaacaggagaaagagcaagtgtctctgaggtgccgtgaactggagattatcatcaatcacaacagggcggaaaacgtacaatcttgtgacacgcaggtttcttctttgctggatggtgttgtaacgatgacatcgcggggagcagagggaagtgtgagcaaggttaacaagagtttcggcgaggagagtaagatcatggtggaagacaaagtctctttcgagaacatgaccgtgggagaagagtcgaagcaggagcagttgatccttgatcatctgcccagcgtgactaaagaatcttcgttacgcgcaacccagccctcagagaacgataaactgcagaaagaattaaacgtgctgaagagcgaacagaacgacctcaggctgcagatggaagctcaaagaatctgtttatcactcgtgtacagtacccacgtagaccaagttcgggaatatatggagaatgagaaagacaaagctttatgctccctgaaggaagaactgatcttcgcccaagaggagaaaatcaaagagctgcagaaaatccaccagctggagcttcagactatgaagacccaggaaaccggcgacgagggaaaacctttacatctacttataggcaagctgcagaaggccgtgagcgaggaatgttcttatttcctgcagacactgtgtagtgtgctgggcgagtattacacaccggctttaaaatgcgaggtgaatgccgaggacaaggagaacagcggggattacatctccgagaatgaggatcccgaactgcaggactatagatacgaagttcaggactttcaagaaaatatgcacactttgctgaacaaagtcactgaagagtataataagttgctggtgttacagactaggctgtccaaaatttggggtcagcagacggatggtatgaaacttgaatttggcgaagagaatttgcctaaagaggagaccgagtttttgtcgatccacagccaaatgactaatctggaggatatagatgtgaaccacaaatcaaaattgtcgagtctgcaagacctggagaagaccaaactagaggaacaggtgcaggagttagagagtctgatctcatcactgcagcagcagctgaaagaaacagaacagaactacgaggcggaaatacattgtctgcagaagcgactgcaagccgtctcagaatcgaccgtgcctccgtccctccctgtcgacagtgttgtgatcacagagtctgacgcccagcgcaccatgtaccctggttcttgcgtgaagaagaatattgatggaaccattgagttcagcggtgaattcggtgtgaaagaggagacaaacatcgtcaaactcctcgaaaaacaatatcaagaacagttggaggaggaggtagccaaagtgatcgtgagcatgagtattgcctttgctcagcagaccgagctttccaggataagcggcggtaaagagaacaccgcctcctcgaagcaggcccatgcagtgtgccagcaagagcagcattatttcaacgaaatgaagctatctcaggatcagattggattccagaccttcgagaccgtcgacgttaagtttaaagaagaatttaagcctctcagcaaggagctgggagaacatggaaaggagatcttactgtccaactcagatcctcacgacatccctgaatctaaggattgtgtgcttacgatcagcgaagagatgttttccaaggacaagacgtttatcgttaggcaatccatccacgacgagatctcggtgtcctcaatggatgctagccgtcagctcatgctgaatgaggagcagctcgaagacatgcggcaagagctagtgaggcaataccaggagcaccaacaggccactgaactgctgcggcaggcacacatgaggcagatggagcgtcaacgcgaagatcaggagcagctgcaggaagaaattaaaagactgaatcgacagctcgcccagagatcttcaatagataatgaaaatctggtcagcgaacgggagcgtgtgctgctcgaggaactggaggcgctcaagcaattgagcctggctggaagagagaaactctgctgcgagcttcggaactctagcactcaaacccaaaacggcaacgaaaaccagggcgaagtcgaggagcagacctttaaggaaaaggaactggaccgtaagcctgaggacgtcccgccagaaattctgtccaacgaacggtatgcattgcagaaagccaacaatagacttctgaaaatcctgctggaagtggtcaagactactgctgcagtggaggagacaataggccgacatgtgttagggatccttgaccggagtagtaagtcccagtcttccgcgagcttaatctggcgcagtgaggcggaggcatcagttaagtcatgtgtacatgaggaacacacccgcgtgacagatgaatccattccctcctactccggctccgacatgccacggaatgatattaacatgtggagcaaggtcaccgaggaggggaccgagctatcgcagcgccttgttagaagcggattcgccggaaccgagatcgacccagaaaacgaggagctcatgcttaacattagcagcaggctgcaggccgcagtggagaaattgctcgaagctatttccgaaaccagctcccagttggagcatgctaaggtgacccaaaccgagttgatgcgagagtctttcagacaaaagcaggaagccaccgagtccctgaaatgtcaggaagaattgagagagaggctgcacgaggaaagtcgggcaagggagcagctcgcagtggaactctccaaggctgagggcgtcattgacggctacgctgacgagaagaccctcttcgaaagacaaatccaggagaaaaccgatatcatcgaccgcctagagcaggagctgctgtgcgctagcaacagattgcaagaactggaagccgaacagcagcagatacaagaggagagagagctgcttagccgacagaaggaggccatgaaggctgaagcgggtcccgtcgagcagcagttactgcaggaaaccgagaaattgatgaaggaaaaacttgaagtccagtgccaggccgaaaaagtgcgggatgatctgcagaagcaggtcaaagccttggaaatagatgtagaagaacaggtttccaggtttatcgagctggagcaggaaaagaatacagagctgatggacctgaggcagcagaatcaagctctggagaaacaacttgagaagatgcggaagtttctggacgaacaagctattgaccgcgagcacgagcgggacgtatttcagcaggaaattcagaagcttgagcagcagttgaaggttgttccccgatttcagccaatcagcgagcatcagacgagggaggtagagcagctggcaaaccatctcaaggagaagaccgacaaatgctcagagttactgctgtccaaggaacagttgcagagagacatccaggaacgaaacgaggaaattgaaaagcttgagttccgggtgcgagagctggaacaggcgctgctggtatccgcagataccttccagaaagtggaagataggaaacattttggtgccgtagaggccaagcctgagctcagtcttgaagtgcagttacaggctgaacgagatgccattgaccgtaaagagaaggaaatcacaaacctcgaagaacagctggagcagttcagggaggaacttgagaataagaacgaagaagtccagcaactccacatgcagcttgagattcagaagaaggaatctaccacccgtttgcaggagctggaacaggaaaacaagctgttcaaggacgatatggagaagctaggcctggccattaaggaaagcgacgccatgtccactcaggaccagcacgttttattcggaaaattcgctcagatcatccaggagaaggaggtggagatagatcaactcaacgaacaggtcaccaagctgcagcagcagctgaagattacaaccgataacaaagtgatcgaagaaaaaaatgaactcattagggatttagagacgcagatcgaatgcttaatgagtgaccaagaatgcgtgaaaaggaacagggaagaggaaatagaacagctgaatgaggtcattgaaaaactgcagcaggagcttgcaaatatcggccagaagacaagcatgaatgcccacagcctcagcgaggaagcggacagcctgaaacaccagcttgacgtcgttatcgccgagaagctggcacttgaacaacaagtggagaccgctaacgaggaaatgacgttcatgaagaacgtactgaaggagactaatttcaaaatgaatcagttaactcaggaattgttctcgcttaaaagagaaagggagtctgttgagaagattcaaagcataccggagaattcagtgaacgtcgcaatagatcacctgagcaaggataagcccgagctcgaggtcgttctgacagaagatgcattgaagtccctggaaaatcagacctatttcaagtcatttgaagagaacgggaaaggcagcatcattaatctggagaccagactgctgcagttggagtccaccgtctcagccaaggacttagagcttacacaatgttacaagcagattaaggatatgcaggagcagggacagttcgagaccgaaatgctgcagaaaaagatagtgaacctgcagaagattgtggaagaaaaggtggccgcagcacttgtgtctcagattcagttagaggccgtgcaggagtacgccaagttttgtcaagacaaccagactatcagctcagaaccggagagaacaaacattcaaaatctcaaccagcttagggaggacgagcttggctcagatattagtgctctcacgctgcggatcagtgagctggaatcccaggtcgttgagatgcatactagtctcatcctagagaaggagcaggtggaaattgctgagaaaaatgtgctggagaaggaaaaaaaactgctcgaactgcagaaacttctggagggcaatgagaaaaagcaaagggaaaaagagaagaaaaggtctcctcaagacgtggaggtcctgaaaaccaccacggaactcttccactccaacgaggaatccggatttttcaatgaattagaggcgctgagggccgaatctgttgccacaaaggcggaacttgcatcgtataaggagaaggccgagaagctccaggaagaacttttagtgaaggaaacaaacatgacctcattgcagaaggacctgtctcaggtccgggaccacttagctgaggctaaagaaaaactatcaatccttgagaaggaggacgagactgaggtccaagagtcgaagaaggcatgtatgtttgagccactgcccataaaattgtccaaatcaatcgcgagccagacggacggaactctgaaaattagcagcagcaaccagactccacagatcctggtcaagaatgccggaatacagattaatctacagtctgagtgttcaagcgaagaagttaccgagatcatcagccaatttaccgagaaaattgagaagatgcaggagcttcacgcagctgaaattctcgatatggagagtcgccatatctccgaaactgagaccttgaagagagaacactatgtcgcagtgcagcttctaaaggaagagtgtggcaccctgaaggctgtgatccagtgtctgcgatccaaggaagtatttgggttctacaatatgtgcttctctaccctctgtgatagtggtagtgactggggacagggaatctatctgactcactcacagggatttgacattgcttctgaaggacgcggagaggagtccgaatctgctaccgactccttccctaagaagatcaagggcctgttgcgtgcggtacataatgaggggatgcaagtcctctccttaactgaatcaccctattccgacggtgaagatcatagtattcagcaggtgtccgagccttggctggaagagaggaaggcttatattaatacaatcagcagcctcaaggatctgatcacaaagatgcagctgcaaagagaggcggaagtctacgactcctcccagagtcacgagtcttttagtgattggcgaggggaactgctcctggctctccaacaagtctttctggaggagaggtcagtgcttttagctgcttttcggaccgagctgactgcactcgggactaccgacgccgtcggcctcctgaattgcttggagcagcgaatccaggaacagggtgtggagtatcaggccgctatggaatgtctgcaaaaagccgatcgtaggtctttgctgtctgaaatccaggctttacatgcccaaatgaatgggagaaagatcacactgaaacgggaacaagaatccgaaaagccctcacaggaactgcttgaatacaatatccagcaaaaacagtcccagatgctggagatgcaggtggagttatccagcatgaaggaccgggcaacagaactccaagagcaactgtcctcagagaagatggtggtagctgaactcaaatcagaactggctcagacgaagctagaactggaaaccacattgaaggcccaacacaaacacttgaaagagcttgaagcatttaggctggaagtcaaagacaagactgatgaggtgcatctcctgaacgacacactggctagtgagcagaagaagagtcgtgagcttcagtgggcactggaaaaagaaaaggcaaagcttggtcggagtgaagaacgcgacaaggaagagctggaggacctgaaattctccctggagtcacagaaacagcgaaatttgcagttgaacctcctccttgagcagcaaaagcagttgcttaatgagtcccagcagaaaatcgagtcccagagaatgctgtatgacgcgcagctcagcgaggaacaaggcaggaaccttgaactgcaagtgctactcgagagcgagaaggtgaggattcgtgagatgtcatcgaccttagacagagagcgggaactgcacgcgcagctgcagtcttcagacggcaccggtcagtcccgacctcctttgccatctgaggacctgctgaaggagctgcagaagcagctggaggagaagcactctcgcatcgtagaactgctgaatgagacagaaaagtataagttggactctctacagacccgccaacagatggaaaaggaccgccaagtgcacagaaaaacactgcagactgagcaggaagctaacacagaaggccagaaaaagatgcatgagctgcagtcaaaggtcgaagatcttcagcggcaactagaggaaaagcgtcagcaagtgtataaattagacttggagggccagagactccagggaatcatgcaagaattccagaaacaagaactggaaagagaggaaaaacgcgagagccggcgtattctgtaccagaatcttaatgaaccaactacatggagccttacttctgaccgaactaggaactgggtactccagcagaagatcgaaggagagaccaaagagtcaaattacgccaagttaatcgaaatgaatgggggaggcacagggtgcaatcacgagctcgagatgattagacagaaactgcagtgcgtagctagcaagctccaggtacttccccagaaagccagcgaacggctgcaatttgagactgctgatgatgaggactttatctgggtccaggaaaacattgacgaaataatccttcagcttcagaaactaaccggccagcagggcgaagaacccagtctggtgtccccatcaacctcttgcggatctcttaccgaaaggctcctgagacagaacgctgagctgaccggccacatttcccagctcaccgaggagaaaaacgatttgcggaatatggtcatgaaactggaggaacagattaggtggtatagacagactggggcaggcagagacaactcaagtagatttagcctgaatgggggagccaatattgaggccatcatcgccagcgaaaaggaagtatggaaccgcgagaagctcaccttgcagaagagcttgaaacgtgccgaagctgaggtatacaagctgaaagctgagctcaggaacgactcactgcttcagacgctgagtccggactcggagcacgtcacactcaaaaggatttatggtaaataccttcgagctgaaagtttccggaaggcgttgatttaccagaaaaagtacctgctgctgctgctgggcggattccaggagtgtgaggatgcaaccctggccctgctggccaggatgggaggccagcccgcatttaccgatctagaggtaataacgaatcggcctaaggggtttacccgatttcgttccgctgttcgggtttccattgccatctcaagaatgaaatttctcgtgcgacgctggcatcgcgtgactggcagtgtctccatcaatatcaatcgagacggctttggcttgaatcagggggcagagaaaacggactcattttaccactctagcggcggactcgagctctatggagaaccacgccacaccacctaccggagtaggtctgacctcgattatatccggagtccactgccgtttcaaaatcggtaccccggaaccccagccgactttaatcccggaagcctcgcctgctctcagctacaaaactatgatccagacagggctctgacagactacattacgaggctggaagccctccagagacgattgggcactatccagtcaggctcaaccacgcagtttcacgctggcatgcggcgttat

SEQ ID NO: 306438 - DNA, 12313 bp, Artificial Sequence
  derived and/or modified sequence
gacgaagatggcggcggcggcggcggtgacggcgcttcccgtgcggctgaggacgatccgccagtgagcgcggagactgcttccacttcgggcgggggagcgccggaccgaatcggctctctaggccgtggagcttgccgtcccacctccgtccaaatcgacctttcctttctatccccaaccacccctcaacccctgttttcccctgccttccttgcagaggccatggaggacgaggagagacagaagaagctggaggccggcaaagccaagattgaagaactctctttagcttttcttgtcagacagcttgcccagtttcgacaaagaaaagctcagtcggatgggcagagtccttccaagaagcagaaaaaaaagagaaaaacgtcaagcagtaaacatgatgtgtcagcacaccatgatttgaatattgatcaatcacagtgtaatgaaatgtacataaatagttctcagagagtagaatcaactgtgattcctgaatctacaataatgagaactctacatagtggagaaataaccagtcatgagcagggcttctctgtggaactggaaagtgaaatttcaaccacagcagatgactgcagttcagaggtaaatggttgcagttttgtgatgagaacaggaaagcctacaaatttattaagggaagaagaatttggtgttgatgattcttattctgaacaaggagcacaagacagtccgactcatctagagatgatggaaagtgagttggctgggaagcagcatgagattgaagagctaaacagagagctggaagaaatgagggttacctatgggactgaaggactgcagcagttacaagaatttgaagctgccattaaacaaagagatggcattataacccagctcactgctaatttacaacaagcaagaagagaaaaggatgagacaatgagagaatttttagagttgacagaacagagtcaaaaattacagattcaatttcagcaattacaggctagtgaaactctgagaaacagcactcatagtagcacagctgcagacttactacaagccaaacaacagatcctcactcatcaacagcagcttgaagaacaagaccacttattagaagattatcagaaaaagaaagaagacttcacaatgcaaattagtttcttgcaagagaaaattaaagtatatgaaatggaacaagataaaaaagtagaaaactcaaataaagaagaaatacaggaaaaggagacaatcattgaagaattaaacacaaaaataatagaagaagaaaagaaaactcttgagctaaaggataaattaacaactgctgataaattactaggagaattacaagaacagattgtgcaaaagaaccaagaaataaaaaacatgaaattagagctgactaattctaagcaaaaagaaagacagtcttctgaagaaataaaacagttaatggggacagtcgaagaacttcagaagagaaatcataaagacagccagttcgaaactgatatagtacaacgaatggaacaagaaacacaaagaaagttagaacaactccgggcagagctggatgagatgtatgggcagcagatagtgcaaatgaaacaagaattaataagacaacacatggcacagatggaggaaatgaaaacacggcataagggagaaatggagaatgctttaaggtcatattcaaatattacagttaatgaagatcagataaagttaatgaatgtggcaataaatgaactgaatataaaattgcaagatactaactctcaaaaggaaaaactcaaggaagaactaggactaattttagaagaaaagtgtgctctacagagacagcttgaagaccttgttgaagaattgagcttttcaagggaacagattcagagagctagacagacaatagctgaacaagaaagtaaacttaatgaagcacataagtcccttagtacagtggaagatttgaaagctgagattgtttctgcatctgaatccagaaaggaactagaattaaaacatgaagcagaagttacaaattacaagataaaacttgaaatgttagaaaaagaaaagaatgctgtgttagacagaatggctgaatcacaagaagctgaattagagaggctgagaacacagcttctatttagtcacgaagaagagctttccaaactgaaggaagatttagaaattgaacatcgaataaatattgaaaaacttaaagataatttaggcattcactataaacagcagatagatggtttacagaatgaaatgagtcaaaagatagaaaccatgcagtttgaaaaggacaatttgataactaagcagaatcaattaattttggaaatttcaaagctaaaagatttacagcagtctcttgtaaattcaaagtcagaagaaatgactcttcaaatcaatgaacttcaaaaagaaattgaaatactcagacaagaagaaaaagaaaagggtacacttgaacaagaagttcaagaattacaacttaaaacagaattgttagaaaaacagatgaaggaaaaagagaatgatcttcaagaaaaatttgcacaacttgaagcagagaatagcattcttaaagatgaaaagaaaacccttgaagacatgttgaaaatacatactcctgttagccaagaagaaagattgattttcttagactccattaagtccaaatccaaagactctgtgtgggaaaaagaaatagaaatacttatagaggaaaatgaggacctcaaacaacaatgtattcagctaaatgaagagattgaaaagcaaaggaacactttttcatttgctgaaaaaaactttgaagttaactatcaagagttacaagaggagtatgcttgccttctcaaagtaaaagatgatttagaagacagtaaaaataaacaggaattagagtataaaagtaaacttaaagcacttaatgaagagcttcatttgcaaagaataaatccaactacagtgaaaatgaaaagttctgtctttgatgaagacaaaacttttgtagcagaaacattggaaatgggtgaggttgttgaaaaggatacaacagaactcatggaaaaacttgaggtaaccaagcgagagaaattagagctgtcacagagactgtctgatctttctgaacaattgaaacagaaacatggtgagattagttttctaaatgaagaagttaaatctttaaagcaagagaaagaacaagtttcattgagatgtagagagctagaaatcattattaaccacaacagggcagaaaatgtacagtcatgtgatactcaagtaagctctttattagatggagttgtgaccatgacaagcaggggtgctgaaggatcagtttctaaagtaaataaaagttttggtgaagaatcaaaaataatggtggaagataaagtttcttttgaaaatatgactgttggagaagaaagtaagcaagaacagttgattttggatcacttaccatctgtaacaaaggaatcatcacttagagcaactcaaccaagtgaaaatgataaacttcagaaagaactcaatgtacttaaatcagaacagaatgatttaaggctacagatggaagcccaacgcatttgcctctctctggtttattcaactcatgtggatcaggttcgtgaatatatggaaaatgaaaaagataaagctctttgcagtcttaaagaagagcttatttttgctcaagaggaaaagatcaaggaacttcagaaaatacaccagttagaactacagactatgaaaacacaagaaacaggtgatgaaggaaagcctttacatctgctcattggaaaacttcaaaaggcagtgtctgaagaatgttcttattttttacagactttatgcagtgtccttggtgaatattatactcctgctttaaaatgtgaagtaaatgcagaagacaaagagaattctggtgattacatttctgaaaatgaagatccagaattacaagattatagatatgaagttcaagactttcaagaaaatatgcacactcttctcaacaaagtaacagaagaatacaacaaactcttggtacttcaaacacgactaagcaagatctggggacagcagacagatggtatgaaacttgaatttggagaagaaaaccttccaaaagaggaaacagagtttttatcaatccattctcagatgaccaatttggaagacattgatgtcaatcataaaagcaagttatcttctctgcaagatcttgaaaaaactaaacttgaagaacaagttcaagaattagaaagcctcatatcctctttgcagcaacagttgaaagaaactgaacaaaactatgaggcagagatccactgtttacagaagaggcttcaagctgttagtgagtccacggttccgccaagcttacctgttgattcggtggtaattacagaatctgatgcacagagaacaatgtaccctggaagttgtgtgaaaaagaatattgatggtacaatagagttttctggtgaatttggagtgaaagaggaaacaaatatcgttaagttgcttgaaaaacaataccaagaacaattagaagaagaagtagctaaggttattgtgtcaatgagtatagcatttgctcaacaaactgaactgtctagaatatctgggggaaaagaaaatactgcatcatcaaagcaagcacatgctgtgtgtcagcaagaacaacattattttaatgaaatgaaattatcacaggatcaaattggttttcagacttttgagacagtggatgtgaaatttaaagaagaatttaaaccacttagtaaagagttaggagaacatggaaaggaaattttattatcaaatagtgatccccatgatataccagaatcaaaggactgtgtgctgactatttcagaagaaatgttctccaaagataaaacatttatagttagacagtctattcatgatgagatttcagtgtcaagcatggatgcttctagacaactaatgttgaatgaagaacagttggaagatatgagacaggaacttgtacgacaataccaagaacatcaacaggcaacggaattgttaaggcaagcacatatgcggcaaatggagagacagcgagaagaccaggaacagctacaagaagagattaagagacttaatagacaattagcccagagatcctccatagataatgaaaacctggtttcagagagagagagggtgcttttagaggagctggaagcactaaagcagctgtctttagctggaagagagaagctgtgttgtgagctgcgcaacagcagtacgcaaacacagaatggaaatgaaaaccaaggagaagttgaagaacaaacatttaaagaaaaggaattagacagaaaacctgaagatgtgcctcctgagattttgtctaatgaaaggtatgcactccagaaagctaataatagacttttgaagatcctcttagaagttgtaaagacaacagcagctgttgaagaaacaattggtcgccatgtccttgggattctagatagatctagtaaaagccagtcatctgccagcctaatttggaggtcagaagcagaggcatctgtaaagtcatgtgtccatgaggaacatacaagagttacagatgaatccattccctcttattctggaagtgatatgccaagaaatgacattaacatgtggtcaaaagtaactgaggaaggaacagagctgtcacaacgacttgtgaggagtggttttgctggaactgaaatagaccctgaaaatgaagaacttatgctgaacattagctctcgactacaagcagcagttgaaaaactcctagaagccataagtgaaactagcagtcagcttgaacatgcgaaagtgacacagacagagttgatgcgtgagtcatttagacagaaacaagaagcaacagagtcccttaagtgccaagaggaacttcgagagcgccttcatgaggagtccagggccagagaacagctagctgtggagctcagtaaggctgagggcgtcattgatggctatgcagatgaaaaaactctttttgaaaggcaaattcaggaaaaaactgatataatagatcgtcttgagcaggagttgttatgtgcaagtaacaggttgcaagaattggaggcagagcaacagcagatccaagaagaaagagaattactgtccagacaaaaggaagctatgaaagcagaggcaggcccagttgaacaacaattactacaggagacagaaaaattaatgaaggaaaaactagaagtacaatgtcaagctgaaaaagtacgtgatgaccttcaaaaacaagtgaaagctctagaaatagatgtggaagaacaagtcagtaggtttatagagctggaacaagaaaaaaatactgaactaatggatttaagacagcaaaaccaagcattggaaaagcagttagaaaaaatgagaaaatttttagatgagcaagccattgacagagaacatgagagagatgtattccaacaggaaatacagaaactagaacagcaacttaaggttgttcctcgattccagcctatcagtgaacatcaaactagagaggttgaacagttagcaaatcatctgaaagaaaaaacagacaaatgcagtgagcttttgctctctaaagagcagcttcaaagggatatacaagaaaggaatgaagaaatagagaaactggagttcagagtaagagaactggagcaggcgcttcttgtgagtgcagatacttttcaaaaggtagaggaccgaaaacactttggagctgtagaagctaaaccagaattgtccctagaagtacaattgcaggctgaacgagatgccatagacagaaaggaaaaagagattacaaacttagaagagcaattagaacagtttagagaagaactggaaaataagaatgaagaagttcaacaattacatatgcaattagaaatacagaaaaaggaatctactacccgcctacaagaacttgaacaggaaaacaaattatttaaggatgacatggagaaactgggacttgccataaaggaatctgatgccatgtctactcaagaccaacatgtgctatttgggaaatttgctcaaataatacaggaaaaagaggtagaaattgaccaattaaatgaacaagttacgaaactccagcagcaacttaaaattacaacagataacaaggttattgaagaaaaaaatgaactgataagggatcttgaaacccaaatagaatgtttgatgagtgatcaagaatgtgtgaagagaaatagagaagaagaaatagagcagctcaatgaagtgattgaaaaacttcaacaggaattggcaaatattggacagaagacatcaatgaatgctcattccctctcagaagaagcagacagtttaaaacatcaattggatgtggttatagctgaaaagctggccttggaacagcaagtagaaaccgctaatgaagaaatgaccttcatgaaaaatgtacttaaagaaaccaattttaaaatgaatcagctaacacaggaattattcagcttaaagagagaacgtgaaagtgtggaaaagattcaaagcataccagagaatagtgttaacgtggctatagatcatctgagcaaagacaaacctgaactagaagtagtccttacagaggatgctcttaaatccctagaaaatcagacatacttcaaatcttttgaagaaaatggcaaaggttccataattaatttggaaacaaggttgctacaacttgagagcactgttagtgcaaaggacttagaacttacccagtgttataaacaaataaaagacatgcaagaacaaggccagtttgaaacagaaatgcttcaaaagaagattgtaaacctacagaaaatagttgaagaaaaagtggctgctgctcttgtcagtcaaatccaacttgaggcagttcaggaatatgcaaaattctgtcaagataatcaaacaatttcatcagaacctgaaagaacaaatattcagaatttaaatcaactaagagaagatgagttggggtcagatatatcagcattaaccttgagaatatcagaattagaaagccaggttgttgaaatgcatactagtttgattttagaaaaagaacaagtagaaattgcagaaaaaaatgttttagaaaaagaaaagaagctgctagaactacagaagctattggagggcaatgagaaaaaacagagagagaaagaaaagaaaagaagccctcaagatgttgaagttctcaagacaactactgagctatttcatagcaatgaagaaagtggattttttaatgaactcgaggctcttagagctgaatcagtggctaccaaagcagaacttgccagttataaagaaaaggctgaaaaacttcaagaagagcttttggtaaaagaaacaaatatgacatctcttcagaaagacttaagccaagttagggatcacctcgcagaggcaaaagagaaattgtccattttagaaaaagaagatgagactgaggtacaagaaagcaaaaaggcctgcatgtttgagccacttcctataaaactgagtaagagcattgcatcccagacagatgggactctgaagatcagtagcagcaatcagactccacaaattcttgttaaaaatgcaggaatacaaattaatttacagagtgaatgttcctcagaagaagttactgaaataatcagtcagtttactgaaaaaattgagaagatgcaagaactacatgctgctgaaattttggacatggaatccagacatatttcagaaactgaaaccttaaagagggaacactatgttgccgttcagttactgaaagaggaatgtggtaccttgaaggcagtgatacagtgtctgagaagtaaagagggattactgagagctgtccataatgaaggcatgcaggtgctttctctcactgagtctccctatagtgatggagaggaccattctattcagcaggtttcagaaccttggctagaagagagaaaagcttacatcaatacaatctcatctctaaaggatttaattacaaagatgcaactgcaaagagaagccgaggtttatgatagttctcaatctcatgagagcttctcagactggcgaggtgaactactgcttgcccttcaacaagttttcttagaagagcgtagtgttttactagcagcatttcggacggagctgacagctctaggtactacagatgcagttggtttactaaactgtttggaacagagaatacaagaacagggtgttgaatatcaagcagctatggaatgcctccagaaagcagatagaaggagtttgttatctgaaattcaggcactgcatgcacaaatgaatggtaggaaaattactctgaaaagagaacaagagagtgagaaaccaagccaagaactcttggaatataatatacagcagaagcagtctcaaatgctggagatgcaagtggagctcagcagtatgaaagacagagcaacggaactgcaggagcagctgagttctgagaaaatggtggttgctgaactgaagagtgagcttgcacaaactaaattggaactagaaacaacactcaaggcacagcataaacacctaaaagaattggaggctttcaggttggaagttaaagataagacagatgaagtacatttgcttaatgacacattagcaagtgaacagaaaaaatcaagagagctccagtgggctttggagaaagagaaagccaagttgggacgcagtgaagaacgggataaagaagaacttgaggatctgaagttttcacttgagagtcagaaacaaaggaatcttcagctaaatctacttttggaacaacagaaacaactactgaacgaatcccagcaaaaaatagaatcacagagaatgctatatgatgcccagttgtcagaagaacaaggtcgaaacttagagcttcaggtacttcttgaatctgagaaagttcgaattcgggaaatgagtagtaccctagatagggagcgggaattgcacgcacagctgcagagcagtgatggtactggacagtctcggccacccttgccctcagaggacctactgaaagagctgcagaaacagctagaggaaaaacacagtcgcatagtagaattgttaaatgagactgaaaaatataaactggattctttgcaaacacgacagcaaatggaaaaagataggcaggttcacaggaaaacactgcagacagaacaggaggccaacactgagggacagaaaaaaatgcatgagctccagtccaaagtggaagatcttcagcgccagctggaagagaaaagacaacaagtttataagttagaccttgaaggacagcgactacaaggaatcatgcaggaattccagaagcaagaactagaacgagaagaaaaacgagaaagtagaagaattctgtatcagaaccttaatgagccaaccacgtggagcttaaccagtgatagaactagaaattgggttcttcaacagaaaatagaaggagaaacaaaagaatcaaactacgctaaattgattgaaatgaatggaggaggaaccggctgtaatcatgaattagaaatgatcagacaaaagcttcaatgtgtagcttcaaaactacaggttctaccccagaaagcctctgagagactacagtttgaaacagcagatgatgaagatttcatttgggttcaggaaaatattgatgaaattattttacaactacagaaattaactggccagcaaggtgaagagcccagcttggtgtccccaagtacttcttgtggctcattgactgaaagactactgagacaaaatgctgagctgacagggcatatcagtcaactgactgaagagaagaatgacttaaggaacatggttatgaagctggaagagcagatcaggtggtatcgacagacaggagctggtagagataattcttccaggttttcattgaatggtggtgccaacattgaagccatcattgcctctgaaaaagaagtatggaacagagaaaaattgactctccagaaatctttgaaaagggcagaggctgaagtatacaaactgaaagctgaactaagaaatgactctttacttcaaactctgagccctgattctgaacatgtcactttaaagagaatttatggtaaatacttgagggcagaaagttttcgaaaggctctcatttaccagaagaaatacctgctgctgttactgggtgggttccaggaatgtgaagatgccaccttggccctgcttgcccggatgggggggcagccagctttcacggatctagaggtgatcaccaatcgcccaaagggcttcaccaggtttcggtcggccgtcagagtatccattgcaatttccagaatgaaatttttggttcgacggtggcatcgagtcacaggttctgtttccatcaatattaacagagatggctttggactgaatcaaggtgcagaaaagactgactcattttatcattcttctggtgggctggagttatatggagaaccaagacatactacgtatcgctcaagatcagatctggactatattaggtcccctttaccatttcagaataggtacccaggcactccagctgatttcaatcctggttctttagcatgttctcagcttcagaattacgatcctgacagagccctaacagattatatcactcggctagaggcactgcaaagacgacttggaactatacagtcaggttcaactactcaatttcatgctggcatgagaagataatcctttgaaacatcattaattgaagtgattttaaatagatttccttttgtaaatcaatggttcttttgtgcttttgtattgtgaatattcaatgggaccaatatgaacacagcttatgattgtatacaaatcccttgccagcacatgaaaacaaactggaatttgtatatataagcattgtgtatgtattcatgcacaataattattgaattacctgtatatttgtggaatgctaatttaaaacattaaattataaaccttgtgtatttatcaaatgggtgaaaagattaaacttttacgcattacaatactgctgaatgtgtagctcgaggtgtcctgcacttttcttataaggctactgaagttacatgttttgcctaatatattctactggtgatgaagacagataatatcacttgtagagacctatttttgtataatggtagaagttttgaattttatggggtattttgtcaagtactgaaataaaaatgacttcaccattttcaccaca

SEQ ID NO: 306439 - DNA, 12475 bp, Artificial Sequence
  derived and/or modified sequence
gacgaagatggcggcggcggcggcggtgacggcgcttcccgtgcggctgaggacgatccgccagtgagcgcggagactgcttccacttcgggcgggggagcgccggaccgaatcggctctctaggccgtggagcttgccgtcccacctccgtccaaatcgacctttcctttctatccccaaccacccctcaacccctgttttcccctgccttccttgcagaggccatggaggacgaggagagacagaagaagctggaggccggcaaagccaagattgaagaactctctttagcttttcttgtcagacagcttgcccagtttcgacaaagaaaagctcagtcggatgggcagagtccttccaagaagcagaaaaaaaagagaaaaacgtcaagcagtaaacatgatgtgtcagcacaccatgatttgaatattgatcaatcacagtgtaatgaaatgtacataaatagttctcagagagtagaatcaactgtgattcctgaatctacaataatgagaactctacatagtggagaaataaccagtcatgagcagggcttctctgtggaactggaaagtgaaatttcaaccacagcagatgactgcagttcagaggtaaatggttgcagttttgtgatgagaacaggaaagcctacaaatttattaagggaagaagaatttggtgttgatgattcttattctgaacaaggagcacaagacagtccgactcatctagagatgatggaaagtgagttggctgggaagcagcatgagattgaagagctaaacagagagctggaagaaatgagggttacctatgggactgaaggactgcagcagttacaagaatttgaagctgccattaaacaaagagatggcattataacccagctcactgctaatttacaacaagcaagaagagaaaaggatgagacaatgagagaatttttagagttgacagaacagagtcaaaaattacagattcaatttcagcaattacaggctagtgaaactctgagaaacagcactcatagtagcacagctgcagacttactacaagccaaacaacagatcctcactcatcaacagcagcttgaagaacaagaccacttattagaagattatcagaaaaagaaagaagacttcacaatgcaaattagtttcttgcaagagaaaattaaagtatatgaaatggaacaagataaaaaagtagaaaactcaaataaagaagaaatacaggaaaaggagacaatcattgaagaattaaacacaaaaataatagaagaagaaaagaaaactcttgagctaaaggataaattaacaactgctgataaattactaggagaattacaagaacagattgtgcaaaagaaccaagaaataaaaaacatgaaattagagctgactaattctaagcaaaaagaaagacagtcttctgaagaaataaaacagttaatggggacagtcgaagaacttcagaagagaaatcataaagacagccagttcgaaactgatatagtacaacgaatggaacaagaaacacaaagaaagttagaacaactccgggcagagctggatgagatgtatgggcagcagatagtgcaaatgaaacaagaattaataagacaacacatggcacagatggaggaaatgaaaacacggcataagggagaaatggagaatgctttaaggtcatattcaaatattacagttaatgaagatcagataaagttaatgaatgtggcaataaatgaactgaatataaaattgcaagatactaactctcaaaaggaaaaactcaaggaagaactaggactaattttagaagaaaagtgtgctctacagagacagcttgaagaccttgttgaagaattgagcttttcaagggaacagattcagagagctagacagacaatagctgaacaagaaagtaaacttaatgaagcacataagtcccttagtacagtggaagatttgaaagctgagattgtttctgcatctgaatccagaaaggaactagaattaaaacatgaagcagaagttacaaattacaagataaaacttgaaatgttagaaaaagaaaagaatgctgtgttagacagaatggctgaatcacaagaagctgaattagagaggctgagaacacagcttctatttagtcacgaagaagagctttccaaactgaaggaagatttagaaattgaacatcgaataaatattgaaaaacttaaagataatttaggcattcactataaacagcagatagatggtttacagaatgaaatgagtcaaaagatagaaaccatgcagtttgaaaaggacaatttgataactaagcagaatcaattaattttggaaatttcaaagctaaaagatttacagcagtctcttgtaaattcaaagtcagaagaaatgactcttcaaatcaatgaacttcaaaaagaaattgaaatactcagacaagaagaaaaagaaaagggtacacttgaacaagaagttcaagaattacaacttaaaacagaattgttagaaaaacagatgaaggaaaaagagaatgatcttcaagaaaaatttgcacaacttgaagcagagaatagcattcttaaagatgaaaagaaaacccttgaagacatgttgaaaatacatactcctgttagccaagaagaaagattgattttcttagactccattaagtccaaatccaaagactctgtgtgggaaaaagaaatagaaatacttatagaggaaaatgaggacctcaaacaacaatgtattcagctaaatgaagagattgaaaagcaaaggaacactttttcatttgctgaaaaaaactttgaagttaactatcaagagttacaagaggagtatgcttgccttctcaaagtaaaagatgatttagaagacagtaaaaataaacaggaattagagtataaaagtaaacttaaagcacttaatgaagagcttcatttgcaaagaataaatccaactacagtgaaaatgaaaagttctgtctttgatgaagacaaaacttttgtagcagaaacattggaaatgggtgaggttgttgaaaaggatacaacagaactcatggaaaaacttgaggtaaccaagcgagagaaattagagctgtcacagagactgtctgatctttctgaacaattgaaacagaaacatggtgagattagttttctaaatgaagaagttaaatctttaaagcaagagaaagaacaagtttcattgagatgtagagagctagaaatcattattaaccacaacagggcagaaaatgtacagtcatgtgatactcaagtaagctctttattagatggagttgtgaccatgacaagcaggggtgctgaaggatcagtttctaaagtaaataaaagttttggtgaagaatcaaaaataatggtggaagataaagtttcttttgaaaatatgactgttggagaagaaagtaagcaagaacagttgattttggatcacttaccatctgtaacaaaggaatcatcacttagagcaactcaaccaagtgaaaatgataaacttcagaaagaactcaatgtacttaaatcagaacagaatgatttaaggctacagatggaagcccaacgcatttgcctctctctggtttattcaactcatgtggatcaggttcgtgaatatatggaaaatgaaaaagataaagctctttgcagtcttaaagaagagcttatttttgctcaagaggaaaagatcaaggaacttcagaaaatacaccagttagaactacagactatgaaaacacaagaaacaggtgatgaaggaaagcctttacatctgctcattggaaaacttcaaaaggcagtgtctgaagaatgttcttattttttacagactttatgcagtgtccttggtgaatattatactcctgctttaaaatgtgaagtaaatgcagaagacaaagagaattctggtgattacatttctgaaaatgaagatccagaattacaagattatagatatgaagttcaagactttcaagaaaatatgcacactcttctcaacaaagtaacagaagaatacaacaaactcttggtacttcaaacacgactaagcaagatctggggacagcagacagatggtatgaaacttgaatttggagaagaaaaccttccaaaagaggaaacagagtttttatcaatccattctcagatgaccaatttggaagacattgatgtcaatcataaaagcaagttatcttctctgcaagatcttgaaaaaactaaacttgaagaacaagttcaagaattagaaagcctcatatcctctttgcagcaacagttgaaagaaactgaacaaaactatgaggcagagatccactgtttacagaagaggcttcaagctgttagtgagtccacggttccgccaagcttacctgttgattcggtggtaattacagaatctgatgcacagagaacaatgtaccctggaagttgtgtgaaaaagaatattgatggtacaatagagttttctggtgaatttggagtgaaagaggaaacaaatatcgttaagttgcttgaaaaacaataccaagaacaattagaagaagaagtagctaaggttattgtgtcaatgagtatagcatttgctcaacaaactgaactgtctagaatatctgggggaaaagaaaatactgcatcatcaaagcaagcacatgctgtgtgtcagcaagaacaacattattttaatgaaatgaaattatcacaggatcaaattggttttcagacttttgagacagtggatgtgaaatttaaagaagaatttaaaccacttagtaaagagttaggagaacatggaaaggaaattttattatcaaatagtgatccccatgatataccagaatcaaaggactgtgtgctgactatttcagaagaaatgttctccaaagataaaacatttatagttagacagtctattcatgatgagatttcagtgtcaagcatggatgcttctagacaactaatgttgaatgaagaacagttggaagatatgagacaggaacttgtacgacaataccaagaacatcaacaggcaacggaattgttaaggcaagcacatatgcggcaaatggagagacagcgagaagaccaggaacagctacaagaagagattaagagacttaatagacaattagcccagagatcctccatagataatgaaaacctggtttcagagagagagagggtgcttttagaggagctggaagcactaaagcagctgtctttagctggaagagagaagctgtgttgtgagctgcgcaacagcagtacgcaaacacagaatggaaatgaaaaccaaggagaagttgaagaacaaacatttaaagaaaaggaattagacagaaaacctgaagatgtgcctcctgagattttgtctaatgaaaggtatgcactccagaaagctaataatagacttttgaagatcctcttagaagttgtaaagacaacagcagctgttgaagaaacaattggtcgccatgtccttgggattctagatagatctagtaaaagccagtcatctgccagcctaatttggaggtcagaagcagaggcatctgtaaagtcatgtgtccatgaggaacatacaagagttacagatgaatccattccctcttattctggaagtgatatgccaagaaatgacattaacatgtggtcaaaagtaactgaggaaggaacagagctgtcacaacgacttgtgaggagtggttttgctggaactgaaatagaccctgaaaatgaagaacttatgctgaacattagctctcgactacaagcagcagttgaaaaactcctagaagccataagtgaaactagcagtcagcttgaacatgcgaaagtgacacagacagagttgatgcgtgagtcatttagacagaaacaagaagcaacagagtcccttaagtgccaagaggaacttcgagagcgccttcatgaggagtccagggccagagaacagctagctgtggagctcagtaaggctgagggcgtcattgatggctatgcagatgaaaaaactctttttgaaaggcaaattcaggaaaaaactgatataatagatcgtcttgagcaggagttgttatgtgcaagtaacaggttgcaagaattggaggcagagcaacagcagatccaagaagaaagagaattactgtccagacaaaaggaagctatgaaagcagaggcaggcccagttgaacaacaattactacaggagacagaaaaattaatgaaggaaaaactagaagtacaatgtcaagctgaaaaagtacgtgatgaccttcaaaaacaagtgaaagctctagaaatagatgtggaagaacaagtcagtaggtttatagagctggaacaagaaaaaaatactgaactaatggatttaagacagcaaaaccaagcattggaaaagcagttagaaaaaatgagaaaatttttagatgagcaagccattgacagagaacatgagagagatgtattccaacaggaaatacagaaactagaacagcaacttaaggttgttcctcgattccagcctatcagtgaacatcaaactagagaggttgaacagttagcaaatcatctgaaagaaaaaacagacaaatgcagtgagcttttgctctctaaagagcagcttcaaagggatatacaagaaaggaatgaagaaatagagaaactggagttcagagtaagagaactggagcaggcgcttcttgtgagtgcagatacttttcaaaaggtagaggaccgaaaacactttggagctgtagaagctaaaccagaattgtccctagaagtacaattgcaggctgaacgagatgccatagacagaaaggaaaaagagattacaaacttagaagagcaattagaacagtttagagaagaactggaaaataagaatgaagaagttcaacaattacatatgcaattagaaatacagaaaaaggaatctactacccgcctacaagaacttgaacaggaaaacaaattatttaaggatgacatggagaaactgggacttgccataaaggaatctgatgccatgtctactcaagaccaacatgtgctatttgggaaatttgctcaaataatacaggaaaaagaggtagaaattgaccaattaaatgaacaagttacgaaactccagcagcaacttaaaattacaacagataacaaggttattgaagaaaaaaatgaactgataagggatcttgaaacccaaatagaatgtttgatgagtgatcaagaatgtgtgaagagaaatagagaagaagaaatagagcagctcaatgaagtgattgaaaaacttcaacaggaattggcaaatattggacagaagacatcaatgaatgctcattccctctcagaagaagcagacagtttaaaacatcaattggatgtggttatagctgaaaagctggccttggaacagcaagtagaaaccgctaatgaagaaatgaccttcatgaaaaatgtacttaaagaaaccaattttaaaatgaatcagctaacacaggaattattcagcttaaagagagaacgtgaaagtgtggaaaagattcaaagcataccagagaatagtgttaacgtggctatagatcatctgagcaaagacaaacctgaactagaagtagtccttacagaggatgctcttaaatccctagaaaatcagacatacttcaaatcttttgaagaaaatggcaaaggttccataattaatttggaaacaaggttgctacaacttgagagcactgttagtgcaaaggacttagaacttacccagtgttataaacaaataaaagacatgcaagaacaaggccagtttgaaacagaaatgcttcaaaagaagattgtaaacctacagaaaatagttgaagaaaaagtggctgctgctcttgtcagtcaaatccaacttgaggcagttcaggaatatgcaaaattctgtcaagataatcaaacaatttcatcagaacctgaaagaacaaatattcagaatttaaatcaactaagagaagatgagttggggtcagatatatcagcattaaccttgagaatatcagaattagaaagccaggttgttgaaatgcatactagtttgattttagaaaaagaacaagtagaaattgcagaaaaaaatgttttagaaaaagaaaagaagctgctagaactacagaagctattggagggcaatgagaaaaaacagagagagaaagaaaagaaaagaagccctcaagatgttgaagttctcaagacaactactgagctatttcatagcaatgaagaaagtggattttttaatgaactcgaggctcttagagctgaatcagtggctaccaaagcagaacttgccagttataaagaaaaggctgaaaaacttcaagaagagcttttggtaaaagaaacaaatatgacatctcttcagaaagacttaagccaagttagggatcacctcgcagaggcaaaagagaaattgtccattttagaaaaagaagatgagactgaggtacaagaaagcaaaaaggcctgcatgtttgagccacttcctataaaactgagtaagagcattgcatcccagacagatgggactctgaagatcagtagcagcaatcagactccacaaattcttgttaaaaatgcaggaatacaaattaatttacagagtgaatgttcctcagaagaagttactgaaataatcagtcagtttactgaaaaaattgagaagatgcaagaactacatgctgctgaaattttggacatggaatccagacatatttcagaaactgaaaccttaaagagggaacactatgttgccgttcagttactgaaagaggaatgtggtaccttgaaggcagtgatacagtgtctgagaagtaaagaggtatttggtttttataatatgtgtttttcaacattgtgtgattctggatcagactggggtcagggaatttatcttacacacagtcagggatttgacatagcatcagaaggccgaggagaagaaagtgaaagtgcaacagattcctttccaaagaaaataaagggattactgagagctgtccataatgaaggcatgcaggtgctttctctcactgagtctccctatagtgatggagaggaccattctattcagcaggtttcagaaccttggctagaagagagaaaagcttacatcaatacaatctcatctctaaaggatttaattacaaagatgcaactgcaaagagaagccgaggtttatgatagttctcaatctcatgagagcttctcagactggcgaggtgaactactgcttgcccttcaacaagttttcttagaagagcgtagtgttttactagcagcatttcggacggagctgacagctctaggtactacagatgcagttggtttactaaactgtttggaacagagaatacaagaacagggtgttgaatatcaagcagctatggaatgcctccagaaagcagatagaaggagtttgttatctgaaattcaggcactgcatgcacaaatgaatggtaggaaaattactctgaaaagagaacaagagagtgagaaaccaagccaagaactcttggaatataatatacagcagaagcagtctcaaatgctggagatgcaagtggagctcagcagtatgaaagacagagcaacggaactgcaggagcagctgagttctgagaaaatggtggttgctgaactgaagagtgagcttgcacaaactaaattggaactagaaacaacactcaaggcacagcataaacacctaaaagaattggaggctttcaggttggaagttaaagataagacagatgaagtacatttgcttaatgacacattagcaagtgaacagaaaaaatcaagagagctccagtgggctttggagaaagagaaagccaagttgggacgcagtgaagaacgggataaagaagaacttgaggatctgaagttttcacttgagagtcagaaacaaaggaatcttcagctaaatctacttttggaacaacagaaacaactactgaacgaatcccagcaaaaaatagaatcacagagaatgctatatgatgcccagttgtcagaagaacaaggtcgaaacttagagcttcaggtacttcttgaatctgagaaagttcgaattcgggaaatgagtagtaccctagatagggagcgggaattgcacgcacagctgcagagcagtgatggtactggacagtctcggccacccttgccctcagaggacctactgaaagagctgcagaaacagctagaggaaaaacacagtcgcatagtagaattgttaaatgagactgaaaaatataaactggattctttgcaaacacgacagcaaatggaaaaagataggcaggttcacaggaaaacactgcagacagaacaggaggccaacactgagggacagaaaaaaatgcatgagctccagtccaaagtggaagatcttcagcgccagctggaagagaaaagacaacaagtttataagttagaccttgaaggacagcgactacaaggaatcatgcaggaattccagaagcaagaactagaacgagaagaaaaacgagaaagtagaagaattctgtatcagaaccttaatgagccaaccacgtggagcttaaccagtgatagaactagaaattgggttcttcaacagaaaatagaaggagaaacaaaagaatcaaactacgctaaattgattgaaatgaatggaggaggaaccggctgtaatcatgaattagaaatgatcagacaaaagcttcaatgtgtagcttcaaaactacaggttctaccccagaaagcctctgagagactacagtttgaaacagcagatgatgaagatttcatttgggttcaggaaaatattgatgaaattattttacaactacagaaattaactggccagcaaggtgaagagcccagcttggtgtccccaagtacttcttgtggctcattgactgaaagactactgagacaaaatgctgagctgacagggcatatcagtcaactgactgaagagaagaatgacttaaggaacatggttatgaagctggaagagcagatcaggtggtatcgacagacaggagctggtagagataattcttccaggttttcattgaatggtggtgccaacattgaagccatcattgcctctgaaaaagaagtatggaacagagaaaaattgactctccagaaatctttgaaaagggcagaggctgaagtatacaaactgaaagctgaactaagaaatgactctttacttcaaactctgagccctgattctgaacatgtcactttaaagagaatttatggtaaatacttgagggcagaaagttttcgaaaggctctcatttaccagaagaaatacctgctgctgttactgggtgggttccaggaatgtgaagatgccaccttggccctgcttgcccggatgggggggcagccagctttcacggatctagaggtgatcaccaatcgcccaaagggcttcaccaggtttcggtcggccgtcagagtatccattgcaatttccagaatgaaatttttggttcgacggtggcatcgagtcacaggttctgtttccatcaatattaacagagatggctttggactgaatcaaggtgcagaaaagactgactcattttatcattcttctggtgggctggagttatatggagaaccaagacatactacgtatcgctcaagatcagatctggactatattaggtcccctttaccatttcagaataggtacccaggcactccagctgatttcaatcctggttctttagcatgttctcagcttcagaattacgatcctgacagagccctaacagattatatcactcggctagaggcactgcaaagacgacttggaactatacagtcaggttcaactactcaatttcatgctggcatgagaagataatcctttgaaacatcattaattgaagtgattttaaatagatttccttttgtaaatcaatggttcttttgtgcttttgtattgtgaatattcaatgggaccaatatgaacacagcttatgattgtatacaaatcccttgccagcacatgaaaacaaactggaatttgtatatataagcattgtgtatgtattcatgcacaataattattgaattacctgtatatttgtggaatgctaatttaaaacattaaattataaaccttgtgtatttatcaaatgggtgaaaagattaaacttttacgcattacaatactgctgaatgtgtagctcgaggtgtcctgcacttttcttataaggctactgaagttacatgttttgcctaatatattctactggtgatgaagacagataatatcacttgtagagacctatttttgtataatggtagaagttttgaattttatggggtattttgtcaagtactgaaataaaaatgacttcaccattttcaccaca

SEQ ID NO: 306440 - DNA, 11574 bp, Artificial Sequence
  derived and/or modified sequence
atggaggacgaggagagacagaagaagctggaggccggcaaggccaagatcgaggagctgagcctggccttcctggtgagacagctggcccagttcagacagagaaaggcccagagcgacggccagagccccagcaagaagcagaagaagaagagaaagaccagcagcagcaagcacgacgtgagcgcccaccacgacctgaacatcgaccagagccagtgcaacgagatgtacatcaacagcagccagagagtggagagcaccgtgatccccgagagcaccatcatgagaaccctgcacagcggcgagatcaccagccacgagcagggcttcagcgtggagctggagagcgagatcagcaccaccgccgacgactgcagcagcgaggtgaacggctgcagcttcgtgatgagaaccggcaagcccaccaacctgctgagagaggaggagttcggcgtggacgacagctacagcgagcagggcgcccaggacagccccacccacctggagatgatggagagcgagctggccggcaagcagcacgagatcgaggagctgaacagagagctggaggagatgagagtgacctacggcaccgagggcctgcagcagctgcaggagttcgaggccgccatcaagcagagagacggcatcatcacccagctgaccgccaacctgcagcaggccagaagagagaaggacgagaccatgagagagttcctggagctgaccgagcagagccagaagctgcagatccagttccagcagctgcaggccagcgagaccctgagaaacagcacccacagcagcaccgccgccgacctgctgcaggccaagcagcagatcctgacccaccagcagcagctggaggagcaggaccacctgctggaggactaccagaagaagaaggaggacttcaccatgcagatcagcttcctgcaggagaagatcaaggtgtacgagatggagcaggacaagaaggtggagaacagcaacaaggaggagatccaggagaaggagaccatcatcgaggagctgaacaccaagatcatcgaggaggagaagaagaccctggagctgaaggacaagctgaccaccgccgacaagctgctgggcgagctgcaggagcagatcgtgcagaagaaccaggagatcaagaacatgaagctggagctgaccaacagcaagcagaaggagagacagagcagcgaggagatcaagcagctgatgggcaccgtggaggagctgcagaagagaaaccacaaggacagccagttcgagaccgacatcgtgcagagaatggagcaggagacccagagaaagctggagcagctgagagccgagctggacgagatgtacggccagcagatcgtgcagatgaagcaggagctgatcagacagcacatggcccagatggaggagatgaagaccagacacaagggcgagatggagaacgccctgagaagctacagcaacatcaccgtgaacgaggaccagatcaagctgatgaacgtggccatcaacgagctgaacatcaagctgcaggacaccaacagccagaaggagaagctgaaggaggagctgggcctgatcctggaggagaagtgcgccctgcagagacagctggaggacctggtggaggagctgagcttcagcagagagcagatccagagagccagacagaccatcgccgagcaggagagcaagctgaacgaggcccacaagagcctgagcaccgtggaggacctgaaggccgagatcgtgagcgccagcgagagcagaaaggagctggagctgaagcacgaggccgaggtgaccaactacaagatcaagctggagatgctggagaaggagaagaacgccgtgctggacagaatggccgagagccaggaggccgagctggagagactgagaacccagctgctgttcagccacgaggaggagctgagcaagctgaaggaggacctggagatcgagcacagaatcaacatcgagaagctgaaggacaacctgggcatccactacaagcagcagatcgacggcctgcagaacgagatgagccagaagatcgagaccatgcagttcgagaaggacaacctgatcaccaagcagaaccagctgatcctggagatcagcaagctgaaggacctgcagcagagcctggtgaacagcaagagcgaggagatgaccctgcagatcaacgagctgcagaaggagatcgagatcctgagacaggaggagaaggagaagggcaccctggagcaggaggtgcaggagctgcagctgaagaccgagctgctggagaagcagatgaaggagaaggagaacgacctgcaggagaagttcgcccagctggaggccgagaacagcatcctgaaggacgagaagaagaccctggaggacatgctgaagatccacacccccgtgagccaggaggagagactgatcttcctggacagcatcaagagcaagagcaaggacagcgtgtgggagaaggagatcgagatcctgatcgaggagaacgaggacctgaagcagcagtgcatccagctgaacgaggagatcgagaagcagagaaacaccttcagcttcgccgagaagaacttcgaggtgaactaccaggagctgcaggaggagtacgcctgcctgctgaaggtgaaggacgacctggaggacagcaagaacaagcaggagctggagtacaagagcaagctgaaggccctgaacgaggagctgcacctgcagagaatcaaccccaccaccgtgaagatgaagagcagcgtgttcgacgaggacaagaccttcgtggccgagaccctggagatgggcgaggtggtggagaaggacaccaccgagctgatggagaagctggaggtgaccaagagagagaagctggagctgagccagagactgagcgacctgagcgagcagctgaagcagaagcacggcgagatcagcttcctgaacgaggaggtgaagagcctgaagcaggagaaggagcaggtgagcctgagatgcagagagctggagatcatcatcaaccacaacagagccgagaacgtgcagagctgcgacacccaggtgagcagcctgctggacggcgtggtgaccatgaccagcagaggcgccgagggcagcgtgagcaaggtgaacaagagcttcggcgaggagagcaagatcatggtggaggacaaggtgagcttcgagaacatgaccgtgggcgaggagagcaagcaggagcagctgatcctggaccacctgcccagcgtgaccaaggagagcagcctgagagccacccagcccagcgagaacgacaagctgcagaaggagctgaacgtgctgaagagcgagcagaacgacctgagactgcagatggaggcccagagaatctgcctgagcctggtgtacagcacccacgtggaccaggtgagagagtacatggagaacgagaaggacaaggccctgtgcagcctgaaggaggagctgatcttcgcccaggaggagaagatcaaggagctgcagaagatccaccagctggagctgcagaccatgaagacccaggagaccggcgacgagggcaagcccctgcacctgctgatcggcaagctgcagaaggccgtgagcgaggagtgcagctacttcctgcagaccctgtgcagcgtgctgggcgagtactacacccccgccctgaagtgcgaggtgaacgccgaggacaaggagaacagcggcgactacatcagcgagaacgaggaccccgagctgcaggactacagatacgaggtgcaggacttccaggagaacatgcacaccctgctgaacaaggtgaccgaggagtacaacaagctgctggtgctgcagaccagactgagcaagatctggggccagcagaccgacggcatgaagctggagttcggcgaggagaacctgcccaaggaggagaccgagttcctgagcatccacagccagatgaccaacctggaggacatcgacgtgaaccacaagagcaagctgagcagcctgcaggacctggagaagaccaagctggaggagcaggtgcaggagctggagagcctgatcagcagcctgcagcagcagctgaaggagaccgagcagaactacgaggccgagatccactgcctgcagaagagactgcaggccgtgagcgagagcaccgtgccccccagcctgcccgtggacagcgtggtgatcaccgagagcgacgcccagagaaccatgtaccccggcagctgcgtgaagaagaacatcgacggcaccatcgagttcagcggcgagttcggcgtgaaggaggagaccaacatcgtgaagctgctggagaagcagtaccaggagcagctggaggaggaggtggccaaggtgatcgtgagcatgagcatcgccttcgcccagcagaccgagctgagcagaatcagcggcggcaaggagaacaccgccagcagcaagcaggcccacgccgtgtgccagcaggagcagcactacttcaacgagatgaagctgagccaggaccagatcggcttccagaccttcgagaccgtggacgtgaagttcaaggaggagttcaagcccctgagcaaggagctgggcgagcacggcaaggagatcctgctgagcaacagcgacccccacgacatccccgagagcaaggactgcgtgctgaccatcagcgaggagatgttcagcaaggacaagaccttcatcgtgagacagagcatccacgacgagatcagcgtgagcagcatggacgccagcagacagctgatgctgaacgaggagcagctggaggacatgagacaggagctggtgagacagtaccaggagcaccagcaggccaccgagctgctgagacaggcccacatgagacagatggagagacagagagaggaccaggagcagctgcaggaggagatcaagagactgaacagacagctggcccagagaagcagcatcgacaacgagaacctggtgagcgagagagagagagtgctgctggaggagctggaggccctgaagcagctgagcctggccggcagagagaagctgtgctgcgagctgagaaacagcagcacccagacccagaacggcaacgagaaccagggcgaggtggaggagcagaccttcaaggagaaggagctggacagaaagcccgaggacgtgccccccgagatcctgagcaacgagagatacgccctgcagaaggccaacaacagactgctgaagatcctgctggaggtggtgaagaccaccgccgccgtggaggagaccatcggcagacacgtgctgggcatcctggacagaagcagcaagagccagagcagcgccagcctgatctggagaagcgaggccgaggccagcgtgaagagctgcgtgcacgaggagcacaccagagtgaccgacgagagcatccccagctacagcggcagcgacatgcccagaaacgacatcaacatgtggagcaaggtgaccgaggagggcaccgagctgagccagagactggtgagaagcggcttcgccggcaccgagatcgaccccgagaacgaggagctgatgctgaacatcagcagcagactgcaggccgccgtggagaagctgctggaggccatcagcgagaccagcagccagctggagcacgccaaggtgacccagaccgagctgatgagagagagcttcagacagaagcaggaggccaccgagagcctgaagtgccaggaggagctgagagagagactgcacgaggagagcagagccagagagcagctggccgtggagctgagcaaggccgagggcgtgatcgacggctacgccgacgagaagaccctgttcgagagacagatccaggagaagaccgacatcatcgacagactggagcaggagctgctgtgcgccagcaacagactgcaggagctggaggccgagcagcagcagatccaggaggagagagagctgctgagcagacagaaggaggccatgaaggccgaggccggccccgtggagcagcagctgctgcaggagaccgagaagctgatgaaggagaagctggaggtgcagtgccaggccgagaaggtgagagacgacctgcagaagcaggtgaaggccctggagatcgacgtggaggagcaggtgagcagattcatcgagctggagcaggagaagaacaccgagctgatggacctgagacagcagaaccaggccctggagaagcagctggagaagatgagaaagttcctggacgagcaggccatcgacagagagcacgagagagacgtgttccagcaggagatccagaagctggagcagcagctgaaggtggtgcccagattccagcccatcagcgagcaccagaccagagaggtggagcagctggccaaccacctgaaggagaagaccgacaagtgcagcgagctgctgctgagcaaggagcagctgcagagagacatccaggagagaaacgaggagatcgagaagctggagttcagagtgagagagctggagcaggccctgctggtgagcgccgacaccttccagaaggtggaggacagaaagcacttcggcgccgtggaggccaagcccgagctgagcctggaggtgcagctgcaggccgagagagacgccatcgacagaaaggagaaggagatcaccaacctggaggagcagctggagcagttcagagaggagctggagaacaagaacgaggaggtgcagcagctgcacatgcagctggagatccagaagaaggagagcaccaccagactgcaggagctggagcaggagaacaagctgttcaaggacgacatggagaagctgggcctggccatcaaggagagcgacgccatgagcacccaggaccagcacgtgctgttcggcaagttcgcccagatcatccaggagaaggaggtggagatcgaccagctgaacgagcaggtgaccaagctgcagcagcagctgaagatcaccaccgacaacaaggtgatcgaggagaagaacgagctgatcagagacctggagacccagatcgagtgcctgatgagcgaccaggagtgcgtgaagagaaacagagaggaggagatcgagcagctgaacgaggtgatcgagaagctgcagcaggagctggccaacatcggccagaagaccagcatgaacgcccacagcctgagcgaggaggccgacagcctgaagcaccagctggacgtggtgatcgccgagaagctggccctggagcagcaggtggagaccgccaacgaggagatgaccttcatgaagaacgtgctgaaggagaccaacttcaagatgaaccagctgacccaggagctgttcagcctgaagagagagagagagagcgtggagaagatccagagcatccccgagaacagcgtgaacgtggccatcgaccacctgagcaaggacaagcccgagctggaggtggtgctgaccgaggacgccctgaagagcctggagaaccagacctacttcaagagcttcgaggagaacggcaagggcagcatcatcaacctggagaccagactgctgcagctggagagcaccgtgagcgccaaggacctggagctgacccagtgctacaagcagatcaaggacatgcaggagcagggccagttcgagaccgagatgctgcagaagaagatcgtgaacctgcagaagatcgtggaggagaaggtggccgccgccctggtgagccagatccagctggaggccgtgcaggagtacgccaagttctgccaggacaaccagaccatcagcagcgagcccgagagaaccaacatccagaacctgaaccagctgagagaggacgagctgggcagcgacatcagcgccctgaccctgagaatcagcgagctggagagccaggtggtggagatgcacaccagcctgatcctggagaaggagcaggtggagatcgccgagaagaacgtgctggagaaggagaagaagctgctggagctgcagaagctgctggagggcaacgagaagaagcagagagagaaggagaagaagagaagcccccaggacgtggaggtgctgaagaccaccaccgagctgttccacagcaacgaggagagcggcttcttcaacgagctggaggccctgagagccgagagcgtggccaccaaggccgagctggccagctacaaggagaaggccgagaagctgcaggaggagctgctggtgaaggagaccaacatgaccagcctgcagaaggacctgagccaggtgagagaccacctggccgaggccaaggagaagctgagcatcctggagaaggaggacgagaccgaggtgcaggagagcaagaaggcctgcatgttcgagcccctgcccatcaagctgagcaagagcatcgccagccagaccgacggcaccctgaagatcagcagcagcaaccagaccccccagatcctggtgaagaacgccggcatccagatcaacctgcagagcgagtgcagcagcgaggaggtgaccgagatcatcagccagttcaccgagaagatcgagaagatgcaggagctgcacgccgccgagatcctggacatggagagcagacacatcagcgagaccgagaccctgaagagagagcactacgtggccgtgcagctgctgaaggaggagtgcggcaccctgaaggccgtgatccagtgcctgagaagcaaggagggcctgctgagagccgtgcacaacgagggcatgcaggtgctgagcctgaccgagagcccctacagcgacggcgaggaccacagcatccagcaggtgagcgagccctggctggaggagagaaaggcctacatcaacaccatcagcagcctgaaggacctgatcaccaagatgcagctgcagagagaggccgaggtgtacgacagcagccagagccacgagagcttcagcgactggagaggcgagctgctgctggccctgcagcaggtgttcctggaggagagaagcgtgctgctggccgccttcagaaccgagctgaccgccctgggcaccaccgacgccgtgggcctgctgaactgcctggagcagagaatccaggagcagggcgtggagtaccaggccgccatggagtgcctgcagaaggccgacagaagaagcctgctgagcgagatccaggccctgcacgcccagatgaacggcagaaagatcaccctgaagagagagcaggagagcgagaagcccagccaggagctgctggagtacaacatccagcagaagcagagccagatgctggagatgcaggtggagctgagcagcatgaaggacagagccaccgagctgcaggagcagctgagcagcgagaagatggtggtggccgagctgaagagcgagctggcccagaccaagctggagctggagaccaccctgaaggcccagcacaagcacctgaaggagctggaggccttcagactggaggtgaaggacaagaccgacgaggtgcacctgctgaacgacaccctggccagcgagcagaagaagagcagagagctgcagtgggccctggagaaggagaaggccaagctgggcagaagcgaggagagagacaaggaggagctggaggacctgaagttcagcctggagagccagaagcagagaaacctgcagctgaacctgctgctggagcagcagaagcagctgctgaacgagagccagcagaagatcgagagccagagaatgctgtacgacgcccagctgagcgaggagcagggcagaaacctggagctgcaggtgctgctggagagcgagaaggtgagaatcagagagatgagcagcaccctggacagagagagagagctgcacgcccagctgcagagcagcgacggcaccggccagagcagaccccccctgcccagcgaggacctgctgaaggagctgcagaagcagctggaggagaagcacagcagaatcgtggagctgctgaacgagaccgagaagtacaagctggacagcctgcagaccagacagcagatggagaaggacagacaggtgcacagaaagaccctgcagaccgagcaggaggccaacaccgagggccagaagaagatgcacgagctgcagagcaaggtggaggacctgcagagacagctggaggagaagagacagcaggtgtacaagctggacctggagggccagagactgcagggcatcatgcaggagttccagaagcaggagctggagagagaggagaagagagagagcagaagaatcctgtaccagaacctgaacgagcccaccacctggagcctgaccagcgacagaaccagaaactgggtgctgcagcagaagatcgagggcgagaccaaggagagcaactacgccaagctgatcgagatgaacggcggcggcaccggctgcaaccacgagctggagatgatcagacagaagctgcagtgcgtggccagcaagctgcaggtgctgccccagaaggccagcgagagactgcagttcgagaccgccgacgacgaggacttcatctgggtgcaggagaacatcgacgagatcatcctgcagctgcagaagctgaccggccagcagggcgaggagcccagcctggtgagccccagcaccagctgcggcagcctgaccgagagactgctgagacagaacgccgagctgaccggccacatcagccagctgaccgaggagaagaacgacctgagaaacatggtgatgaagctggaggagcagatcagatggtacagacagaccggcgccggcagagacaacagcagcagattcagcctgaacggcggcgccaacatcgaggccatcatcgccagcgagaaggaggtgtggaacagagagaagctgaccctgcagaagagcctgaagagagccgaggccgaggtgtacaagctgaaggccgagctgagaaacgacagcctgctgcagaccctgagccccgacagcgagcacgtgaccctgaagagaatctacggcaagtacctgagagccgagagcttcagaaaggccctgatctaccagaagaagtacctgctgctgctgctgggcggcttccaggagtgcgaggacgccaccctggccctgctggccagaatgggcggccagcccgccttcaccgacctggaggtgatcaccaacagacccaagggcttcaccagattcagaagcgccgtgagagtgagcatcgccatcagcagaatgaagttcctggtgagaagatggcacagagtgaccggcagcgtgagcatcaacatcaacagagacggcttcggcctgaaccagggcgccgagaagaccgacagcttctaccacagcagcggcggcctggagctgtacggcgagcccagacacaccacctacagaagcagaagcgacctggactacatcagaagccccctgcccttccagaacagataccccggcacccccgccgacttcaaccccggcagcctggcctgcagccagctgcagaactacgaccccgacagagccctgaccgactacatcaccagactggaggccctgcagagaagactgggcaccatccagagcggcagcaccacccagttccacgccggcatgagaagatag

SEQ ID NO: 306441 - DNA, 11736 bp, Artificial Sequence
  derived and/or modified sequence
atggaggacgaggagagacagaagaagctggaggccggcaaggccaagatcgaggagctgagcctggccttcctggtgagacagctggcccagttcagacagagaaaggcccagagcgacggccagagccccagcaagaagcagaagaagaagagaaagaccagcagcagcaagcacgacgtgagcgcccaccacgacctgaacatcgaccagagccagtgcaacgagatgtacatcaacagcagccagagagtggagagcaccgtgatccccgagagcaccatcatgagaaccctgcacagcggcgagatcaccagccacgagcagggcttcagcgtggagctggagagcgagatcagcaccaccgccgacgactgcagcagcgaggtgaacggctgcagcttcgtgatgagaaccggcaagcccaccaacctgctgagagaggaggagttcggcgtggacgacagctacagcgagcagggcgcccaggacagccccacccacctggagatgatggagagcgagctggccggcaagcagcacgagatcgaggagctgaacagagagctggaggagatgagagtgacctacggcaccgagggcctgcagcagctgcaggagttcgaggccgccatcaagcagagagacggcatcatcacccagctgaccgccaacctgcagcaggccagaagagagaaggacgagaccatgagagagttcctggagctgaccgagcagagccagaagctgcagatccagttccagcagctgcaggccagcgagaccctgagaaacagcacccacagcagcaccgccgccgacctgctgcaggccaagcagcagatcctgacccaccagcagcagctggaggagcaggaccacctgctggaggactaccagaagaagaaggaggacttcaccatgcagatcagcttcctgcaggagaagatcaaggtgtacgagatggagcaggacaagaaggtggagaacagcaacaaggaggagatccaggagaaggagaccatcatcgaggagctgaacaccaagatcatcgaggaggagaagaagaccctggagctgaaggacaagctgaccaccgccgacaagctgctgggcgagctgcaggagcagatcgtgcagaagaaccaggagatcaagaacatgaagctggagctgaccaacagcaagcagaaggagagacagagcagcgaggagatcaagcagctgatgggcaccgtggaggagctgcagaagagaaaccacaaggacagccagttcgagaccgacatcgtgcagagaatggagcaggagacccagagaaagctggagcagctgagagccgagctggacgagatgtacggccagcagatcgtgcagatgaagcaggagctgatcagacagcacatggcccagatggaggagatgaagaccagacacaagggcgagatggagaacgccctgagaagctacagcaacatcaccgtgaacgaggaccagatcaagctgatgaacgtggccatcaacgagctgaacatcaagctgcaggacaccaacagccagaaggagaagctgaaggaggagctgggcctgatcctggaggagaagtgcgccctgcagagacagctggaggacctggtggaggagctgagcttcagcagagagcagatccagagagccagacagaccatcgccgagcaggagagcaagctgaacgaggcccacaagagcctgagcaccgtggaggacctgaaggccgagatcgtgagcgccagcgagagcagaaaggagctggagctgaagcacgaggccgaggtgaccaactacaagatcaagctggagatgctggagaaggagaagaacgccgtgctggacagaatggccgagagccaggaggccgagctggagagactgagaacccagctgctgttcagccacgaggaggagctgagcaagctgaaggaggacctggagatcgagcacagaatcaacatcgagaagctgaaggacaacctgggcatccactacaagcagcagatcgacggcctgcagaacgagatgagccagaagatcgagaccatgcagttcgagaaggacaacctgatcaccaagcagaaccagctgatcctggagatcagcaagctgaaggacctgcagcagagcctggtgaacagcaagagcgaggagatgaccctgcagatcaacgagctgcagaaggagatcgagatcctgagacaggaggagaaggagaagggcaccctggagcaggaggtgcaggagctgcagctgaagaccgagctgctggagaagcagatgaaggagaaggagaacgacctgcaggagaagttcgcccagctggaggccgagaacagcatcctgaaggacgagaagaagaccctggaggacatgctgaagatccacacccccgtgagccaggaggagagactgatcttcctggacagcatcaagagcaagagcaaggacagcgtgtgggagaaggagatcgagatcctgatcgaggagaacgaggacctgaagcagcagtgcatccagctgaacgaggagatcgagaagcagagaaacaccttcagcttcgccgagaagaacttcgaggtgaactaccaggagctgcaggaggagtacgcctgcctgctgaaggtgaaggacgacctggaggacagcaagaacaagcaggagctggagtacaagagcaagctgaaggccctgaacgaggagctgcacctgcagagaatcaaccccaccaccgtgaagatgaagagcagcgtgttcgacgaggacaagaccttcgtggccgagaccctggagatgggcgaggtggtggagaaggacaccaccgagctgatggagaagctggaggtgaccaagagagagaagctggagctgagccagagactgagcgacctgagcgagcagctgaagcagaagcacggcgagatcagcttcctgaacgaggaggtgaagagcctgaagcaggagaaggagcaggtgagcctgagatgcagagagctggagatcatcatcaaccacaacagagccgagaacgtgcagagctgcgacacccaggtgagcagcctgctggacggcgtggtgaccatgaccagcagaggcgccgagggcagcgtgagcaaggtgaacaagagcttcggcgaggagagcaagatcatggtggaggacaaggtgagcttcgagaacatgaccgtgggcgaggagagcaagcaggagcagctgatcctggaccacctgcccagcgtgaccaaggagagcagcctgagagccacccagcccagcgagaacgacaagctgcagaaggagctgaacgtgctgaagagcgagcagaacgacctgagactgcagatggaggcccagagaatctgcctgagcctggtgtacagcacccacgtggaccaggtgagagagtacatggagaacgagaaggacaaggccctgtgcagcctgaaggaggagctgatcttcgcccaggaggagaagatcaaggagctgcagaagatccaccagctggagctgcagaccatgaagacccaggagaccggcgacgagggcaagcccctgcacctgctgatcggcaagctgcagaaggccgtgagcgaggagtgcagctacttcctgcagaccctgtgcagcgtgctgggcgagtactacacccccgccctgaagtgcgaggtgaacgccgaggacaaggagaacagcggcgactacatcagcgagaacgaggaccccgagctgcaggactacagatacgaggtgcaggacttccaggagaacatgcacaccctgctgaacaaggtgaccgaggagtacaacaagctgctggtgctgcagaccagactgagcaagatctggggccagcagaccgacggcatgaagctggagttcggcgaggagaacctgcccaaggaggagaccgagttcctgagcatccacagccagatgaccaacctggaggacatcgacgtgaaccacaagagcaagctgagcagcctgcaggacctggagaagaccaagctggaggagcaggtgcaggagctggagagcctgatcagcagcctgcagcagcagctgaaggagaccgagcagaactacgaggccgagatccactgcctgcagaagagactgcaggccgtgagcgagagcaccgtgccccccagcctgcccgtggacagcgtggtgatcaccgagagcgacgcccagagaaccatgtaccccggcagctgcgtgaagaagaacatcgacggcaccatcgagttcagcggcgagttcggcgtgaaggaggagaccaacatcgtgaagctgctggagaagcagtaccaggagcagctggaggaggaggtggccaaggtgatcgtgagcatgagcatcgccttcgcccagcagaccgagctgagcagaatcagcggcggcaaggagaacaccgccagcagcaagcaggcccacgccgtgtgccagcaggagcagcactacttcaacgagatgaagctgagccaggaccagatcggcttccagaccttcgagaccgtggacgtgaagttcaaggaggagttcaagcccctgagcaaggagctgggcgagcacggcaaggagatcctgctgagcaacagcgacccccacgacatccccgagagcaaggactgcgtgctgaccatcagcgaggagatgttcagcaaggacaagaccttcatcgtgagacagagcatccacgacgagatcagcgtgagcagcatggacgccagcagacagctgatgctgaacgaggagcagctggaggacatgagacaggagctggtgagacagtaccaggagcaccagcaggccaccgagctgctgagacaggcccacatgagacagatggagagacagagagaggaccaggagcagctgcaggaggagatcaagagactgaacagacagctggcccagagaagcagcatcgacaacgagaacctggtgagcgagagagagagagtgctgctggaggagctggaggccctgaagcagctgagcctggccggcagagagaagctgtgctgcgagctgagaaacagcagcacccagacccagaacggcaacgagaaccagggcgaggtggaggagcagaccttcaaggagaaggagctggacagaaagcccgaggacgtgccccccgagatcctgagcaacgagagatacgccctgcagaaggccaacaacagactgctgaagatcctgctggaggtggtgaagaccaccgccgccgtggaggagaccatcggcagacacgtgctgggcatcctggacagaagcagcaagagccagagcagcgccagcctgatctggagaagcgaggccgaggccagcgtgaagagctgcgtgcacgaggagcacaccagagtgaccgacgagagcatccccagctacagcggcagcgacatgcccagaaacgacatcaacatgtggagcaaggtgaccgaggagggcaccgagctgagccagagactggtgagaagcggcttcgccggcaccgagatcgaccccgagaacgaggagctgatgctgaacatcagcagcagactgcaggccgccgtggagaagctgctggaggccatcagcgagaccagcagccagctggagcacgccaaggtgacccagaccgagctgatgagagagagcttcagacagaagcaggaggccaccgagagcctgaagtgccaggaggagctgagagagagactgcacgaggagagcagagccagagagcagctggccgtggagctgagcaaggccgagggcgtgatcgacggctacgccgacgagaagaccctgttcgagagacagatccaggagaagaccgacatcatcgacagactggagcaggagctgctgtgcgccagcaacagactgcaggagctggaggccgagcagcagcagatccaggaggagagagagctgctgagcagacagaaggaggccatgaaggccgaggccggccccgtggagcagcagctgctgcaggagaccgagaagctgatgaaggagaagctggaggtgcagtgccaggccgagaaggtgagagacgacctgcagaagcaggtgaaggccctggagatcgacgtggaggagcaggtgagcagattcatcgagctggagcaggagaagaacaccgagctgatggacctgagacagcagaaccaggccctggagaagcagctggagaagatgagaaagttcctggacgagcaggccatcgacagagagcacgagagagacgtgttccagcaggagatccagaagctggagcagcagctgaaggtggtgcccagattccagcccatcagcgagcaccagaccagagaggtggagcagctggccaaccacctgaaggagaagaccgacaagtgcagcgagctgctgctgagcaaggagcagctgcagagagacatccaggagagaaacgaggagatcgagaagctggagttcagagtgagagagctggagcaggccctgctggtgagcgccgacaccttccagaaggtggaggacagaaagcacttcggcgccgtggaggccaagcccgagctgagcctggaggtgcagctgcaggccgagagagacgccatcgacagaaaggagaaggagatcaccaacctggaggagcagctggagcagttcagagaggagctggagaacaagaacgaggaggtgcagcagctgcacatgcagctggagatccagaagaaggagagcaccaccagactgcaggagctggagcaggagaacaagctgttcaaggacgacatggagaagctgggcctggccatcaaggagagcgacgccatgagcacccaggaccagcacgtgctgttcggcaagttcgcccagatcatccaggagaaggaggtggagatcgaccagctgaacgagcaggtgaccaagctgcagcagcagctgaagatcaccaccgacaacaaggtgatcgaggagaagaacgagctgatcagagacctggagacccagatcgagtgcctgatgagcgaccaggagtgcgtgaagagaaacagagaggaggagatcgagcagctgaacgaggtgatcgagaagctgcagcaggagctggccaacatcggccagaagaccagcatgaacgcccacagcctgagcgaggaggccgacagcctgaagcaccagctggacgtggtgatcgccgagaagctggccctggagcagcaggtggagaccgccaacgaggagatgaccttcatgaagaacgtgctgaaggagaccaacttcaagatgaaccagctgacccaggagctgttcagcctgaagagagagagagagagcgtggagaagatccagagcatccccgagaacagcgtgaacgtggccatcgaccacctgagcaaggacaagcccgagctggaggtggtgctgaccgaggacgccctgaagagcctggagaaccagacctacttcaagagcttcgaggagaacggcaagggcagcatcatcaacctggagaccagactgctgcagctggagagcaccgtgagcgccaaggacctggagctgacccagtgctacaagcagatcaaggacatgcaggagcagggccagttcgagaccgagatgctgcagaagaagatcgtgaacctgcagaagatcgtggaggagaaggtggccgccgccctggtgagccagatccagctggaggccgtgcaggagtacgccaagttctgccaggacaaccagaccatcagcagcgagcccgagagaaccaacatccagaacctgaaccagctgagagaggacgagctgggcagcgacatcagcgccctgaccctgagaatcagcgagctggagagccaggtggtggagatgcacaccagcctgatcctggagaaggagcaggtggagatcgccgagaagaacgtgctggagaaggagaagaagctgctggagctgcagaagctgctggagggcaacgagaagaagcagagagagaaggagaagaagagaagcccccaggacgtggaggtgctgaagaccaccaccgagctgttccacagcaacgaggagagcggcttcttcaacgagctggaggccctgagagccgagagcgtggccaccaaggccgagctggccagctacaaggagaaggccgagaagctgcaggaggagctgctggtgaaggagaccaacatgaccagcctgcagaaggacctgagccaggtgagagaccacctggccgaggccaaggagaagctgagcatcctggagaaggaggacgagaccgaggtgcaggagagcaagaaggcctgcatgttcgagcccctgcccatcaagctgagcaagagcatcgccagccagaccgacggcaccctgaagatcagcagcagcaaccagaccccccagatcctggtgaagaacgccggcatccagatcaacctgcagagcgagtgcagcagcgaggaggtgaccgagatcatcagccagttcaccgagaagatcgagaagatgcaggagctgcacgccgccgagatcctggacatggagagcagacacatcagcgagaccgagaccctgaagagagagcactacgtggccgtgcagctgctgaaggaggagtgcggcaccctgaaggccgtgatccagtgcctgagaagcaaggaggtgttcggcttctacaacatgtgcttcagcaccctgtgcgacagcggcagcgactggggccagggcatctacctgacccacagccagggcttcgacatcgccagcgagggcagaggcgaggagagcgagagcgccaccgacagcttccccaagaagatcaagggcctgctgagagccgtgcacaacgagggcatgcaggtgctgagcctgaccgagagcccctacagcgacggcgaggaccacagcatccagcaggtgagcgagccctggctggaggagagaaaggcctacatcaacaccatcagcagcctgaaggacctgatcaccaagatgcagctgcagagagaggccgaggtgtacgacagcagccagagccacgagagcttcagcgactggagaggcgagctgctgctggccctgcagcaggtgttcctggaggagagaagcgtgctgctggccgccttcagaaccgagctgaccgccctgggcaccaccgacgccgtgggcctgctgaactgcctggagcagagaatccaggagcagggcgtggagtaccaggccgccatggagtgcctgcagaaggccgacagaagaagcctgctgagcgagatccaggccctgcacgcccagatgaacggcagaaagatcaccctgaagagagagcaggagagcgagaagcccagccaggagctgctggagtacaacatccagcagaagcagagccagatgctggagatgcaggtggagctgagcagcatgaaggacagagccaccgagctgcaggagcagctgagcagcgagaagatggtggtggccgagctgaagagcgagctggcccagaccaagctggagctggagaccaccctgaaggcccagcacaagcacctgaaggagctggaggccttcagactggaggtgaaggacaagaccgacgaggtgcacctgctgaacgacaccctggccagcgagcagaagaagagcagagagctgcagtgggccctggagaaggagaaggccaagctgggcagaagcgaggagagagacaaggaggagctggaggacctgaagttcagcctggagagccagaagcagagaaacctgcagctgaacctgctgctggagcagcagaagcagctgctgaacgagagccagcagaagatcgagagccagagaatgctgtacgacgcccagctgagcgaggagcagggcagaaacctggagctgcaggtgctgctggagagcgagaaggtgagaatcagagagatgagcagcaccctggacagagagagagagctgcacgcccagctgcagagcagcgacggcaccggccagagcagaccccccctgcccagcgaggacctgctgaaggagctgcagaagcagctggaggagaagcacagcagaatcgtggagctgctgaacgagaccgagaagtacaagctggacagcctgcagaccagacagcagatggagaaggacagacaggtgcacagaaagaccctgcagaccgagcaggaggccaacaccgagggccagaagaagatgcacgagctgcagagcaaggtggaggacctgcagagacagctggaggagaagagacagcaggtgtacaagctggacctggagggccagagactgcagggcatcatgcaggagttccagaagcaggagctggagagagaggagaagagagagagcagaagaatcctgtaccagaacctgaacgagcccaccacctggagcctgaccagcgacagaaccagaaactgggtgctgcagcagaagatcgagggcgagaccaaggagagcaactacgccaagctgatcgagatgaacggcggcggcaccggctgcaaccacgagctggagatgatcagacagaagctgcagtgcgtggccagcaagctgcaggtgctgccccagaaggccagcgagagactgcagttcgagaccgccgacgacgaggacttcatctgggtgcaggagaacatcgacgagatcatcctgcagctgcagaagctgaccggccagcagggcgaggagcccagcctggtgagccccagcaccagctgcggcagcctgaccgagagactgctgagacagaacgccgagctgaccggccacatcagccagctgaccgaggagaagaacgacctgagaaacatggtgatgaagctggaggagcagatcagatggtacagacagaccggcgccggcagagacaacagcagcagattcagcctgaacggcggcgccaacatcgaggccatcatcgccagcgagaaggaggtgtggaacagagagaagctgaccctgcagaagagcctgaagagagccgaggccgaggtgtacaagctgaaggccgagctgagaaacgacagcctgctgcagaccctgagccccgacagcgagcacgtgaccctgaagagaatctacggcaagtacctgagagccgagagcttcagaaaggccctgatctaccagaagaagtacctgctgctgctgctgggcggcttccaggagtgcgaggacgccaccctggccctgctggccagaatgggcggccagcccgccttcaccgacctggaggtgatcaccaacagacccaagggcttcaccagattcagaagcgccgtgagagtgagcatcgccatcagcagaatgaagttcctggtgagaagatggcacagagtgaccggcagcgtgagcatcaacatcaacagagacggcttcggcctgaaccagggcgccgagaagaccgacagcttctaccacagcagcggcggcctggagctgtacggcgagcccagacacaccacctacagaagcagaagcgacctggactacatcagaagccccctgcccttccagaacagataccccggcacccccgccgacttcaaccccggcagcctggcctgcagccagctgcagaactacgaccccgacagagccctgaccgactacatcaccagactggaggccctgcagagaagactgggcaccatccagagcggcagcaccacccagttccacgccggcatgagaagatag

SEQ ID NO: 306442 - protein, 3876 aa, Artificial Sequence
  derived and/or modified sequence
MEDEERQKKLEAGKAKIEELSLAFLVRQLAQFRQRKAQSDGQSPSKKQKKKRKTSSSKHDVSAHHDLNIDQSQCNEMYINSSQRVESTVIPESTIMRTLHSGEITSHEQGFSVELESEISTTADDCSSEVNGCSFVMRTGKPTNLLREEEFGVDDSYSEQGAQDSPTHLEMMESELAGKQHEIEELNRELEEMRVTYGTEGLQQLQEFEAAIKQRDGIITQLTANLQQARREKDETMREFLELTEQSQKLQIQFQQLQASETLRNSTHSSTAADLLQAKQQILTHQQQLEEQDHLLEDYQKKKEDFTMQISFLQEKIKVYEMEQDKKVENSNKEEIQEKETIIEELNTKIIEEEKKTLELKDKLTTADKLLGELQEQIVQKNQEIKNMKLELTNSKQKERQSSEEIKQLMGTVEELQKRNHKDSQFETDIVQRMEQETQRKLEQLRAELDEMYGQQIVQMKQELIRQHMAQMEEMKTRHKGEMENALRSYSNITVNEDQIKLMNVAINELNIKLQDTNSQKEKLKEELGLILEEKCALQRQLEDLVEELSFSREQIQRARQTIAEQESKLNEAHKSLSTVEDLKAEIVSASESRKELELKHEAEVTNYKIKLEMLEKEKNAVLDRMAESQEAELERLRTQLLFSHEEELSKLKEDLEIEHRINIEKLKDNLGIHYKQQIDGLQNEMSQKIETMQFEKDNLITKQNQLILEISKLKDLQQSLVNSKSEEMTLQINELQKEIEILRQEEKEKGTLEQEVQELQLKTELLEKQMKEKENDLQEKFAQLEAENSILKDEKKTLEDMLKIHTPVSQEERLIFLDSIKSKSKDSVWEKEIEILIEENEDLKQQCIQLNEEIEKQRNTFSFAEKNFEVNYQELQEEYACLLKVKDDLEDSKNKQELEYKSKLKALNEELHLQRINPTTVKMKSSVFDEDKTFVAETLEMGEVVEKDTTELMEKLEVTKREKLELSQRLSDLSEQLKQKHGEISFLNEEVKSLKQEKEQVSLRCRELEIIINHNRAENVQSCDTQVSSLLDGVVTMTSRGAEGSVSKVNKSFGEESKIMVEDKVSFENMTVGEESKQEQLILDHLPSVTKESSLRATQPSENDKLQKELNVLKSEQNDLRLQMEAQRICLSLVYSTHVDQVREYMENEKDKALCSLKEELIFAQEEKIKELQKIHQLELQTMKTQETGDEGKPLHLLIGKLQKAVSEECSYFLQTLCSVLGEYYTPALKCEVNAEDKENSGDYISENEDPELQDYRYEVQDFQENMHTLLNKVTEEYNKLLVLQTRLSKIWGQQTDGMKLEFGEENLPKEETEFLSIHSQMTNLEDIDVNHKSKLSSLQDLEKTKLEEQVQELESLISSLQQQLKETEQNYEAEIHCLQKRLQAVSESTVPPSLPVDSVVITESDAQRTMYPGSCVKKNIDGTIEFSGEFGVKEETNIVKLLEKQYQEQLEEEVAKVIVSMSIAFAQQTELSRISGGKENTASSKQAHAVCQQEQHYFNEMKLSQDQIGFQTFETVDVKFKEEFKPLSKELGEHGKEILLSNSDPHDIPESKDCVLTISEEMFSKDKTFIVRQSIHDEISVSSMDASRQLMLNEEQLEDMRQELVRQYQEHQQATELLRQAHMRQMERQREDQEQLQEEIKRLNRQLAQRSSIDNENLVSERERVLLEELEALKQLSLAGREKLCCELRNSSTQTQNGNENQGEVEEQTFKEKELDRKPEDVPPEILSNERYALQKANNRLLKILLEVVKTTAAVEETIGRHVLGILDRSSKSQSSASLIWRSEAEASVKSCVHEEHTRVTDESIPSYSGSDMPRNDINMWSKVTEEGTELSQRLVRSGFAGTEIDPENEELMLNISSRLQAAVEKLLEAISETSSQLEHAKVTQTELMRESFRQKQEATESLKCQEELRERLHEESRAREQLAVELSKAEGVIDGYADEKTLFERQIQEKTDIIDRLEQELLCASNRLQELEAEQQQIQEERELLSRQKEAMKAEAGPVEQQLLQETEKLMKEKLEVQCQAEKVRDDLQKQVKALEIDVEEQVSRFIELEQEKNTELMDLRQQNQALEKQLEKMRKFLDEQAIDREHERDVFQQEIQKLEQQLKVVPRFQPISEHQTREVEQLANHLKEKTDKCSELLLSKEQLQRDIQERNEEIEKLEFRVRELEQALLVEDRKHFGAVEAKPELSLEVQLQAERDAIDRKEKEITNLEEQLEQFREELENKNEEVQQLHMQLEIQKKESTTRLQELEQENKLFKDDMEKLGLAIKESDAMSTQDQHVLFGKFAQIIQEKEVEIDQLNEQVTKLQQQLKITTDNKVIEEKNELIRDLETQIECLMSDQECVKRNREEEIEQLNEVIEKLQQELANIGQKTSMNAHSLSEEADSLKHQLDVVIAEKLALEQQVETANEEMTFMKNVLKETNFKMNQLTQELFSLKRERESVEKIQSIPENSVNVAIDHLSKDKPELEVVLTEDALKSLENQTYFKSFEENGKGSIINLETRLLQLESTVSAKDLELTQCYKQIKDMQEQGQFETEMLQKKIVNLQKIVEEKVAAALVSQIQLEAVQEYAKFCQDNQTISSEPERTNIQNLNQLREDELGSDISALTLRISELESQVVEMHTSLILEKEQVEIAEKNVLEKEKKLLELQKLLEGNEKKQREKEKKRSPQDVEVLKTTTELFHSNEESGFFNELEALRAESVATKAELASYKEKAEKLQEELLVKETNMTSLQKDLSQVRDHLAEAKEKLSILEKEDETEVQESKKACMFEPLPIKLSKSIASQTDGTLKISSSNQTPQILVKNAGIQINLQSECSSEEVTEIISQFTEKIEKMQELHAAEILDMESRHISETETLKREHYVAVQLLKEECGTLKAVIQCLRSKEGSSIPELAHSDAYQTREICSSDSGSDWGQGIYLTHSQGFDIASEGRGEESESATDSFPKKIKGLLRAVHNEGMQVLSLTESPYSDGEDHSIQQVSEPWLEERKAYINTISSLKDLITKMQLQREAEVYDSSQSHESFSDWRGELLLALQQVFLEERSVLLAAFRTELTALGTTDAVGLLNCLEQRIQEQGVEYQAAMECLQKADRRSLLSEIQALHAQMNGRKITLKREQESEKPSQELLEYNIQQKQSQMLEMQVELSSMKDRATELQEQLSSEKMVVAELKSELAQTKLELETTLKAQHKHLKELEAFRLEVKDKTDEVHLLNDTLASEQKKSRELQWALEKEKAKLGRSEERDKEELEDLKFSLESQKQRNLQLNLLLEQQKQLLNESQQKIESQRMLYDAQLSEEQGRNLELQVLLESEKVRIREMSSTLDRERELHAQLQSSDGTGQSRPPLPSEDLLKELQKQLEEKHSRIVELLNETEKYKLDSLQTRQQMEKDRQVHRKTLQTEQEANTEGQKKMHELQSKVEDLQRQLEEKRQQVYKLDLEGQRLQGIMQEFQKQELEREEKRESRRILYQNLNEPTTWSLTSDRTRNWVLQQKIEGETKESNYAKLIEMNGGGTGCNHELEMIRQKLQCVASKLQVLPQKASERLQFETADDEDFIWVQENIDEIILQLQKLTGQQGEEPSLVSPSTSCGSLTERLLRQNAELTGHISQLTEEKNDLRNMVMKLEEQIRWYRQTGAGRDNSSRFSLNGGANIEAIIASEKEVWNREKLTLQKSLKRAEAEVYKLKAELRNDSLLQTLSPDSEHVTLKRIYGKYLRAESFRKALIYQKKYLLLLLGGFQECEDATLALLARMGGQPAFTDLEVITNRPKGFTRFRSAVRVSIAISRMKFLVRRWHRVTGSVSININRDGFGLNQGAEKTDSFYHSSGGLELYGEPRHTTYRSRSDLDYIRSPLPFQNRYPGTPADFNPGSLACSQLQNYDP

SEQ ID NO: 306443 - DNA, 11631 bp, Artificial Sequence
  derived and/or modified sequence
atggaggatgaagagcgccaaaaaaaactcgaagcaggcaaggctaaaattgaagaactgtccctagcctttctcgtgcggcagttagcccagttcagacagaggaaggctcagtctgacggccagtcacccagcaagaaacagaagaagaaaaggaagactagttcttcaaaacatgacgtgagtgcgcaccatgatttgaatattgatcagtcccaatgtaacgaaatgtacattaattcgtcacaacgcgtggagagtacggtgatcccggaatccactattatgcgtactcttcattcaggcgagataacgtcccatgagcagggatttagtgtggaactcgaatcggagatctcaactaccgcggatgattgtagctctgaggtgaacgggtgctcgtttgtgatgagaacgggcaaacccacaaacttacttcgagaggaagaatttggcgtggacgactcatatagtgaacagggagcacaggattccccaacgcatctggaaatgatggagagtgagctggccgggaaacagcacgaaatcgaggagctgaaccgggaactcgaggagatgcgggtcacttacggcaccgaaggccttcagcagctgcaggaatttgaagctgccatcaagcagagagacgggattatcacccagctgaccgcaaatctgcagcaggcgcggagagaaaaagacgagaccatgcgagagtttctggaattaactgaacagagccaaaagctgcagatccagttccaacaactgcaggcctctgagactctgcgtaacagcacccatagcagtaccgcagccgacctgttgcaggctaaacagcaaattctcacgcaccaacagcaactggaagagcaggaccatctgctggaggactaccagaaaaaaaaggaggattttaccatgcaaatctctttccttcaagaaaaaatcaaagtgtacgagatggaacaggataaaaaagtggaaaatagcaacaaggaggagatccaggagaaagaaacaatcattgaggagctgaatactaaaattatagaagaagagaagaagaccctggagctcaaagataaactaactaccgctgacaaactactgggggaattgcaggagcagatcgtgcagaagaatcaggaaatcaagaacatgaaattggagctgacaaactccaaacaaaaggagcgtcaatccagtgaagagatcaagcagcttatgggcactgtcgaggagctgcagaagagaaatcataaggactcccagttcgagacagacattgtgcagagaatggagcaggaaacccaacgtaaactggaacagcttcgagccgagcttgacgagatgtacgggcagcagatcgtacagatgaaacaggagctgatcaggcagcatatggcccagatggaagaaatgaagactagacataagggcgagatggagaatgccctgcgcagctacagcaacataacggtgaatgaagatcagatcaagctgatgaatgtggccataaacgagctcaatatcaagcttcaggatacaaattcgcagaaggaaaagctcaaggaggagctggggttaatcctagaagagaagtgcgccctgcagagacagctcgaagatctggtggaagaactttccttctcacgcgagcagatccaacgggcccgtcaaacaatagccgagcaggaatccaagttaaacgaggcccataagtccctatctaccgtcgaggacctaaaagccgaaattgtttccgcaagcgaatctcgcaaggaactggaattgaaacacgaagctgaagtgacaaattataaaataaagcttgagatgctggaaaaggagaaaaatgccgtgctggacaggatggccgagtctcaggaagccgaactcgagcgcttgcgcacccagctgctcttctcacacgaagaggaactgtctaagctaaaggaggatctggaaatcgaacaccgcataaacatcgagaagctgaaagacaatctgggcatccattacaaacagcagattgatggcttgcagaatgaaatgagccagaagattgagacaatgcagttcgagaaggacaacctgatcaccaaacagaaccaattgatcctggagatcagcaaacttaaggacttgcagcagtccctggtcaactcgaagtcagaggagatgacgctccagattaacgagttgcaaaaggaaatagagatacttcggcaggaggagaaggaaaaagggaccctggaacaggaggtgcaggaactgcagcttaagaccgaactccttgagaaacagatgaaggagaaggaaaacgatcttcaggagaaattcgctcagctggaagccgagaactcaattctgaaggatgagaagaaaactctggaggacatgctgaagatccacactcctgtttcccaggaggaaaggctgattttccttgattccattaagagcaaatcgaaggacagcgtttgggagaaagagattgaaattctgattgaagaaaacgaagacttaaaacaacagtgtattcagcttaatgaagaaattgaaaaacagcgaaacacattctcttttgccgagaagaactttgaggtcaactatcaggagctacaggaagagtatgcgtgtctgctgaaggttaaggacgatctggaagatagtaagaacaagcaagagctggagtataagtccaaactgaaagccctaaatgaagagctgcacctgcagcggattaacccaacaacagtcaaaatgaagagcagcgtctttgatgaagacaaaactttcgtcgctgagaccctcgaaatgggcgaagtggtggaaaaagacaccaccgagctgatggagaagctagaggtgacaaaacgggaaaagcttgagctgtcacagcggctgtctgacctgtcagagcagctcaaacaaaaacacggagaaatcagctttctgaatgaagaggtgaagtctctgaagcaggaaaaggaacaggtgagtctgcgttgccgcgagctggaaattatcataaaccataacagggcggagaacgttcaatcctgcgacacccaggtgtcttctcttcttgatggcgtagtgacgatgactagtcggggggctgaagggtccgtgtccaaggtcaacaagagcttcggcgaagaaagcaagatcatggtagaagataaggtttccttcgagaatatgactgtgggagaggagtctaagcaggaacaattgatcttggaccacttacctagcgtgacgaaggagagctccctcagggccacgcagccaagcgagaacgacaaactgcagaaggaattgaacgtcctgaaatcggaacagaacgacctgagactgcagatggaggctcaaagaatttgcctttccctcgtttactccacccatgttgaccaagtgcgcgagtacatggagaatgaaaaagataaggctctatgttcactgaaggaagagttaatcttcgcccaggaggagaaaattaaggaactacagaagatccatcagctggagttgcaaactatgaaaacacaggagacaggagacgaaggcaagcctctccaccttctcatagggaagctccagaaggcggtgagcgaggagtgcagctatttcctccagaccttgtgctctgtcctcggagagtattatacaccagccctcaagtgcgaagtaaatgcagaagataaagaaaactccggagactacatttccgagaacgaagaccccgaattgcaggactacagatatgaggttcaggactttcaggagaacatgcacacacttctgaacaaagtcaccgaagagtacaacaagctactcgtactgcagactagacttagtaagatctggggacagcagactgacggcatgaagctcgaatttggggaggagaacctgcctaaggaagaaaccgaattcctcagtatccatagccagatgaccaatcttgaagacatcgatgtgaaccataaatccaagctatcgagtttgcaggatctggagaagacgaagttggaagaacaggtacaggaattggagagcttgatcagctccctgcagcagcaattaaaagaaactgagcagaattacgaagctgagatccactgcctccagaaaagattacaagccgtgtcggaaagtaccgtacccccatcccttcctgtagactcagttgtgatcaccgagtctgacgcccaaaggacgatgtaccccggctcttgcgttaaaaaaaatatagacggcactattgagtttagcggcgaatttggggtaaaagaggagacaaatatcgttaagctcttggaaaaacaatatcaggagcagctggaagaggaagtagctaaagtgattgtcagcatgtctattgctttcgcgcagcagaccgagctgagtaggatttctggagggaaggagaatactgctagctccaagcaggcccatgctgtgtgccagcaagaacagcactacttcaacgagatgaaactgagtcaggaccaaatcggcttccaaacgtttgaaactgtagatgtcaaattcaaagaggaattcaagccgctgtctaaagagcttggagaacacggaaaggagatacttctcagcaactctgaccctcatgacatccctgagtcaaaggactgcgtattgactatctccgaggagatgttctctaaggacaagactttcatagtgcgacagagcatccacgacgagatttccgtgagctccatggacgctagtcggcagttaatgctcaacgaagagcaactcgaggatatgcggcaagagctggttaggcagtaccaggaacatcagcaagctaccgaacttttgcgccaggcccacatgcgacagatggaacgccagcgggaggaccaagagcagctgcaagaagagataaaaagactgaaccggcagctggcccagcgctcaagcattgacaatgagaatctggttagcgaacgtgaacgggtccttcttgaagagctagaggctctcaaacagctttccctggctggcagagaaaaactttgttgtgagcttagaaactcttcaacgcagactcagaatggcaacgaaaaccagggcgaagtggaggaacagacctttaaagaaaaggaactcgatcgaaagcctgaagacgtgccaccggaaatcttgagcaacgaaaggtacgcccttcaaaaggccaacaatcggttgctgaagatcttgcttgaggtcgtgaagaccacagccgccgttgaggaaactatcgggaggcatgttctcgggatattagatcgcagtagcaagagccaatcctctgcctcgcttatctggaggagcgaagctgaggcttccgtgaagagctgcgtgcatgaggagcacacgcgcgtgaccgacgaatcgattccttcctactccggctccgacatgcctcggaacgatattaatatgtggtcaaaagttactgaagaagggacagaattgagccagaggctcgtgcgctccgggttcgcaggcactgagattgaccctgaaaatgaggagctgatgctcaacatctctagccggctgcaggcagcagtagaaaaactcctggaggccatctccgaaacatcttctcaactggagcacgcgaaggtgactcagacagagctgatgcgagagagcttcaggcagaagcaggaggccacagaatcccttaagtgccaggaggaactgagggagaggctccacgaggagtccagggcacgggaacagctcgccgtagaactgagcaaggcagaaggcgtgatagatgggtacgctgatgagaagacactgtttgagcggcagatccaagagaaaaccgatattattgaccgactcgaacaagagctgctctgcgcttcgaacagacttcaggagttggaagctgaacaacaacagatccaggaggagcgcgagcttctgtctcgccagaaagaggcaatgaaagccgaagcaggtcctgtcgaacagcagctgttacaggaaactgaaaagctgatgaaggaaaagctggaggttcagtgtcaagcagaaaaagtgcgagacgatcttcagaagcaggttaaggctcttgaaattgatgttgaggaacaggtctcaaggttcatcgaattggagcaggagaagaacaccgaacttatggacctgagacagcaaaatcaggcactggaaaaacaactcgagaagatgcggaagttcctggatgagcaagccatcgatagggagcacgagcgcgatgtctttcagcaggaaatccagaagctcgaacagcagctgaaggtggtcccaagatttcagcctatcagtgaacatcagacaagggaggtcgagcagctcgcgaatcatctgaaggagaaaactgataaatgttccgagctgctgctgtccaaggagcagctacagcgcgacatccaggagcgcaacgaagagattgaaaaactggaatttcgggtccgcgaactcgagcaagcgctgctagtggaagatcgcaagcatttcggagctgttgaagcaaaaccagagcttagcctggaggttcagctacaggcggaacgtgatgctattgaccgtaaggagaaagagatcacaaacttagaggaacagctggaacagttcagggaggaattagagaataaaaacgaagaagtccagcagctccacatgcagctcgaaatacagaagaaagaatcaactactcgcctgcaagaactcgagcaggaaaataaacttttcaaggacgacatggaaaaattaggactggcaattaaagagagtgatgctatgagcactcaggatcagcacgtgttgtttggtaagtttgctcagattatccaagaaaaggaggtagagatagaccagctgaacgagcaagtgaccaaattacagcagcagctgaagataacaactgacaacaaggtgattgaagaaaagaacgaactgatccgggacctcgagactcagattgagtgccttatgtctgaccaagaatgtgttaaaagaaaccgagaagaggaaatcgaacagcttaatgaggtaatcgagaaactgcagcaggagttggctaacatcgggcaaaagacctccatgaacgcgcattctttgtccgaggaggcggatagccttaaacatcagctggatgttgtgatcgcagaaaagttagccctcgaacagcaggtagaaaccgctaacgaagaaatgacattcatgaaaaatgttttaaaagagacaaattttaaaatgaaccaacttacccaggaactgttctctctgaagagagaacgggaatctgtcgagaaaatccagtctattccagagaattccgtgaatgtggccatcgaccatctatccaaggataagcctgaattggaggtggtgctcacagaggacgcactgaagtcactggaaaatcagacatatttcaagtcttttgaggagaacggcaagggatctattataaacttagaaacacgtcttttgcaactggagtccacggtgtccgccaaggatctcgaattgacccagtgctataagcagattaaggacatgcaggaacagggccagttcgagacggagatgttgcaaaaaaagatagtgaatctgcaaaaaatagtggaggagaaggtggccgctgcgctcgtgtcacagatccagctggaggccgtccaggagtacgcaaaattttgtcaggacaatcaaacaatcagttcagagccagaaagaaccaacatccagaatttaaaccagctccgcgaggatgagctagggtctgatatttcagctcttacattacgcatctcggagctagagtcccaggtggtggagatgcatactagtctgatcttagagaaggagcaggtggaaatcgcagaaaaaaatgtgctcgaaaaagaaaaaaagctgcttgaactccaaaagcttctggaaggcaacgagaaaaaacagagagagaaagagaaaaagaggtctccgcaggacgtcgaggttctgaagacaacaacggagttgtttcactcaaatgaggaaagcggatttttcaatgagttggaggccctgcgggctgagtccgtggctactaaggccgagctcgcttcatataaagagaaggctgaaaagctccaggaggaactcctggttaaggagacaaacatgacaagcctccagaaagatctatctcaagtgagagatcacctcgcagaggcaaaagaaaaactgtcaattcttgagaaagaggatgaaacggaagtgcaagagtctaaaaaggcttgcatgtttgagccgctcccaattaaactaagtaaatccattgcttcccaaaccgatggcacactgaaaatctcatcatctaaccagacaccacagatcttggtaaaaaatgctggcattcaaatcaacttacaaagcgagtgtagcagcgaggaggtgaccgaaataatcagccaattcacagagaagatcgagaagatgcaggagctccacgcagccgagattctagacatggagtctcgccatatctcagaaacagagaccctaaagcgggagcattacgtcgctgttcagttgcttaaagaggagtgtggtaccttaaaagcagtaatccagtgtttacggagcaaggagggaagttctatcccagagctggcccatagtgatgcctatcagaccagggagatctgttcttccgactctggctcagactggggccagggcatctacctcacccactcacagggtttcgatattgctagcgaaggtcgtggtgaggagagcgaaagtgctaccgatagctttcccaaaaagattaaggggctgttaagagccgttcataatgaaggtatgcaggttttgtcgctgacggagagcccttattctgacggagaagaccatagtatacagcaggtgtctgagccgtggctggaggaacgcaaggcctatattaatactatctcttccttgaaagacctgataaccaaaatgcaactgcagagggaagctgaggtctacgattccagccagtcccatgaaagtttttccgactggcgtggtgagctcctgctggcattacagcaggtcttcctggaggagaggagtgttctcctggctgcattcagaaccgagttgaccgccctgggcactacagatgctgtcggccttcttaattgtctcgagcagcgtatccaggagcagggtgtggaataccaggccgcaatggagtgcctgcagaaggccgacagaagaagcttgctctctgagatccaagccttacacgctcagatgaacggacgaaagattaccctgaaaagagaacaagaatcagagaagccttcccaggagctgctcgaatataacatccagcagaagcagtcccaaatgctcgaaatgcaggttgaactcagctccatgaaagaccgggcaacggaacttcaggaacagttgagctcagaaaaaatggtggtggccgaattgaagtccgaattagcccagactaaactcgagttagaaactacccttaaggcacaacataagcacctaaaagaactagaggccttccgccttgaggtgaaagataagactgatgaagttcatctcctgaatgatacactggccagcgaacaaaaaaaaagtagagagctgcaatgggctctggaaaaagagaaggcgaaattgggcagaagtgaggaacgggacaaagaagagctggaggacctgaaatttagcctcgaaagtcagaagcagaggaacttacagcttaatctgttactggaacagcaaaagcaactgctgaacgaaagccagcagaaaattgagagccaacggatgctttacgacgcccagctgagcgaggagcaaggccgcaatctggaactccaagtgctgttggagtcagagaaagtacgcattagagagatgagttccacattggaccgcgaacgggagctgcatgctcagctccagagtagtgacggcacaggccaaagcaggcccccactgcccagtgaagatttgctaaaagaactacagaagcaactggaagagaagcattcacggatcgtggaactcctaaacgagaccgagaagtacaagctggactcacttcagactcgccagcagatggaaaaagatagacaggtgcatcggaagacattgcaaacagaacaggaggcaaataccgaaggccagaaaaagatgcatgaactacagagcaaagtagaagacttgcagaggcaattggaggaaaagcggcaacaagtctataaactggatctggaggggcaaagactgcagggaataatgcaggagtttcagaagcaagaactagaaagggaggaaaagcgggaatctcggaggattctgtaccaaaacctgaacgaaccaaccacgtggagtctcacatctgaccgcaccaggaattgggtacttcagcagaaaatagaaggggaaacgaaagagtcaaactatgccaagctcatcgagatgaatggaggaggcacaggatgtaaccatgagttagagatgattcggcagaagcttcagtgtgtagcctcaaagctgcaggtcctgccacagaaggcaagtgagcggctacaatttgaaactgcggacgacgaggatttcatttgggtccaggaaaatatagacgaaatcattctgcagctgcagaaactcaccgggcaacagggggaagagccatctctggtgtctccctctaccagctgtgggtctctgactgagaggctgttgcggcagaatgccgaattgacgggacatatttctcagctgacagaggagaagaacgacctgagaaacatggttatgaaactggaggaacagatcaggtggtaccggcagacaggggccgggcgggataacagcagccggtttagcctcaacggaggagcaaatatcgaagctatcatcgcaagcgagaaggaggtgtggaacagggagaaactgacactgcaaaagtctctgaagcgagccgaggccgaggtctataagttgaaggccgaactgcggaacgattctctgctccagacacttagccccgatagcgagcacgttaccctgaaacgcatttacggcaaatatctgcgcgctgagtcatttaggaaagctctgatataccaaaagaagtaccttcttctgttgctggggggcttccaggagtgtgaggatgctaccttggccctgttggcacggatgggaggacagcccgctttcaccgatctggaggttataacaaacagaccaaaagggtttactcggtttaggtctgccgttagagtgagcatagctataagtcggatgaagtttttagtccgacgttggcatagagtgacaggttcggtctcaattaacataaatagagatgggttcggtctgaatcaaggtgctgagaaaacagactcgttctaccactctagtggcgggctcgagctttatggcgaacctcgacacactacctatcgctcaaggagtgacttagactatataaggtcccctcttccattccagaatcggtatccaggcactcctgcagacttcaaccccggaagcctcgcgtgctcccagctgcaaaactatgatccctag

SEQ ID NO: 306444 - DNA, 11631 bp, Artificial Sequence
  derived and/or modified sequence
atggaggatgaggagcggcagaagaagctggaggccggcaaggccaagattgaggagctgagcctggccttcctggtgcggcagctggcccagttccggcagaggaaggcccagagtgatggccagagccccagcaagaagcagaagaagaagaggaagaccagcagcagcaagcatgatgtgtctgcccaccacgacctgaacatcgaccagagccagtgcaatgagatgtacatcaacagcagccagagggtggagagcaccgtcatccctgagagcaccatcatgaggaccctgcacagcggggagatcaccagccatgagcagggcttctctgtggagctggagagcgagatcagcaccacagcagatgactgcagcagcgaggtgaatggctgcagctttgtgatgaggacaggcaagcccaccaacctgctgcgggaggaggagtttggagtggatgacagctacagcgagcagggcgcccaggacagccccacccacctggagatgatggagagcgagctggccggcaagcagcatgaaattgaggagctgaaccgggagctggaggagatgagggtgacctatggaacagagggcctgcagcagctgcaggagtttgaggccgccatcaagcagagagatggcatcatcacccagctgacagccaacctgcagcaggcccggcgggagaaggatgagaccatgagggagttcctggagctgacagagcagagccagaagctgcagatccagttccagcagctgcaggccagcgagaccctgaggaacagcacccacagcagcacagctgctgacctgctgcaggccaagcagcagatcctgacccaccagcagcagctggaggagcaggaccacctgctggaggactaccagaagaagaaggaggacttcaccatgcagatctccttcctgcaggagaagatcaaggtgtatgagatggagcaggacaagaaggtggagaacagcaacaaggaggagatccaggagaaggagaccatcatcgaggagctgaacaccaagatcatcgaggaggagaagaagaccctggagctgaaggacaagctgaccacagctgacaagctgctgggggagctgcaggagcagatcgtgcagaagaaccaggagatcaagaacatgaagctggagctgaccaacagcaagcagaaggagcggcagagcagcgaggagatcaagcagctgatgggcaccgtggaggagctgcagaagaggaaccacaaggacagccagtttgaaacagacatcgtgcagaggatggagcaggagacccagaggaagctggagcagctgcgggcagagctggatgagatgtatggccagcagatcgtgcagatgaagcaggagctgatccggcagcacatggcccagatggaggagatgaagaccaggcacaagggggagatggagaatgccctgcggagctacagcaacatcaccgtgaatgaagaccagatcaagctgatgaatgtggccatcaatgagctgaacatcaagctgcaggacaccaacagccagaaggagaagctgaaggaggagctgggcctcatcctggaggagaagtgtgccctgcagaggcagctggaggacctggtggaggagctgtccttcagccgggagcagatccagagggcccggcagaccatcgccgagcaggagagcaagctgaatgaggcccacaagagcctgagcacagtggaggacctgaaggccgagatcgtgtctgccagcgagagcaggaaggagctggagctgaagcatgaagctgaggtgaccaactacaagatcaagctggagatgctggagaaggagaagaatgctgtgctggacaggatggccgagagccaggaggccgagctggagcggctgcggacccagctgctcttcagccatgaggaggagctgagcaagctgaaggaggacctggagattgagcaccgcatcaacatcgagaagctgaaggacaacctgggcatccactacaagcagcagattgatggcctgcagaatgagatgagccagaagattgagaccatgcagtttgagaaggacaacctgatcaccaagcagaaccagctgatcctggagatcagcaagctgaaggacctgcagcagagcctggtgaacagcaagtctgaggagatgaccctgcagatcaatgagctgcagaaggagattgagatcctgcggcaggaggagaaggagaagggcaccctggagcaggaggtgcaggagctgcagctgaagacagagctgctggagaagcagatgaaggagaaggaaaatgacctgcaggagaagtttgcccagctggaggccgagaacagcatcctgaaggatgagaagaagaccctggaggacatgctgaagatccacacccctgtgtcccaggaggagcggctcatcttcctggacagcatcaagagcaagagcaaggacagcgtgtgggagaaggagattgagatcctgattgaggagaatgaagacctgaagcagcagtgcatccagctgaatgaggagattgagaagcagaggaacaccttctcctttgctgagaagaactttgaggtgaactaccaggagctgcaggaggagtatgcctgcctgctgaaggtgaaggatgacctggaggacagcaagaacaagcaggagctggagtacaagagcaagctgaaggccctgaatgaggagctgcacctgcagaggatcaaccccaccaccgtgaagatgaagagctctgtgtttgatgaggacaagacctttgtggccgagaccctggagatgggagaggtggtggagaaggacaccacagagctgatggagaagctggaggtgaccaagcgggagaagctggagctgagccagaggctgagtgacctgtctgagcagctgaagcagaagcacggggagatctccttcctgaatgaggaggtgaagagcctgaagcaggagaaggagcaggtgtccctgcgctgccgggagctggagatcatcatcaaccacaacagagcagaaaatgtgcagagctgtgacacccaggtgagcagcctgctggatggagtggtgaccatgaccagcagaggagctgagggctctgtgtccaaggtgaacaagagctttggagaggagagcaagatcatggtggaggacaaggtgtcctttgagaacatgacagtgggggaggagagcaagcaggagcagctgatcctggaccacctgcccagcgtgaccaaggagagcagcctgcgggccacccagcccagtgaaaatgacaagctgcagaaggagctgaatgtgctgaagtctgagcagaatgacctgcggctgcagatggaggcccagaggatctgcctgagcctggtgtacagcacccacgtggaccaggtgcgggagtacatggagaatgagaaggacaaggccctgtgcagcctgaaggaggagctgatctttgcccaggaggagaagatcaaggagctgcagaagatccaccagctggagctgcagaccatgaagacccaggagactggagatgagggcaagcccctgcacctgctgattggcaagctgcagaaggctgtgtctgaggagtgcagctacttcctgcagaccctgtgcagcgtgctgggggagtactacaccccagccctgaagtgtgaggtgaatgctgaggacaaggagaacagcggggactacatcagtgaaaatgaagatcctgagctgcaggactaccgctatgaggtgcaggacttccaggagaacatgcacaccctgctgaacaaggtgacagaggagtacaacaagctgctggtgctgcagacccggctgagcaagatctggggccagcagacagatggcatgaagctggagtttggagaggagaacctgcccaaggaggagacagagttcctgagcatccacagccagatgaccaacctggaggacattgatgtgaaccacaagagcaagctgagcagcctgcaggacctggagaagaccaagctggaggagcaggtgcaggagctggagagcctcatcagcagcctgcagcagcagctgaaggagacagagcagaactatgaagctgagatccactgcctgcagaagaggctgcaggccgtgtctgagagcacagtgccccccagcctgcctgtggacagcgtggtgatcacagaaagtgatgcccagaggaccatgtacccaggcagctgtgtgaagaagaacattgatggcaccatcgagttctctggagaatttggagtgaaggaggagaccaacatcgtgaagctgctggagaagcagtaccaggagcagctggaggaggaggtggccaaggtgattgtgtccatgagcatcgcctttgcccagcagacagagctgagccgcatcagcggcggcaaggaaaatacagccagcagcaagcaggcccatgctgtgtgccagcaggagcagcactacttcaatgagatgaagctgagccaggaccagatcggcttccagacctttgaaacagtggatgtgaagttcaaggaggagttcaagcccctgagcaaggagctgggggagcacggcaaggagatcctgctgagcaacagcgacccccatgacatccctgagagcaaggactgtgtgctgaccatcagcgaggagatgttcagcaaggacaagaccttcatcgtgcggcagagcatccatgatgagatctctgtgtcctccatggatgccagccggcagctgatgctgaatgaggagcagctggaggacatgaggcaggagctggtgcggcagtaccaggagcaccagcaggccacagagctgctgcggcaggcccacatgaggcagatggagcggcagcgggaggaccaggagcagctgcaggaggagatcaagaggctgaaccggcagctggcccagaggagcagcattgacaatgaaaacctggtgtctgagcgggagcgggtgctgctggaggagctggaggccctgaagcagctgagcctggccggccgggagaagctgtgctgtgagctgaggaacagcagcacccagacccagaatggaaatgaaaaccagggcgaggtggaggagcagaccttcaaggagaaggagctggacaggaagccagaagatgtgcccccagagatcctgagcaatgaaagatatgccctgcagaaggccaacaaccggctgctgaagatcctgctggaggtggtgaagaccacagctgctgtggaggagaccatcggccgccacgtgctgggcatcctggacaggagcagcaagagccagagcagcgccagcctcatctggaggtctgaggccgaggcctctgtgaagagctgtgtgcatgaggagcacaccagggtgacagatgagagcatccccagctacagcggcagtgacatgcccagaaatgacatcaacatgtggagcaaggtgacagaggagggcacagagctgagccagaggctggtgcgcagcggctttgctggaacagaaattgatcctgaaaatgaggagctgatgctgaacatcagcagccggctgcaggccgctgtggagaagctgctggaggccatcagcgagaccagcagccagctggagcacgccaaggtgacccagacagagctgatgagggagagcttccggcagaagcaggaggccacagagagcctgaagtgccaggaggagctgcgggagcggctgcacgaggagagccgggcccgggagcagctggccgtggagctgagcaaggccgagggcgtgattgatggctatgcagatgagaagaccctgtttgagcggcagatccaggagaagacagacatcatcgaccggctggagcaggagctgctgtgtgccagcaaccggctgcaggagctggaggccgagcagcagcagatccaggaggagcgggagctgctgagccggcagaaggaggccatgaaggccgaggccggccctgtggagcagcagctgctgcaggagacagagaagctgatgaaggagaagctggaggtgcagtgccaggccgagaaggtgagagatgacctgcagaagcaggtgaaggccctggagattgatgtggaggagcaggtgagccgcttcatcgagctggagcaggagaagaacacagagctgatggacctgcggcagcagaaccaggccctggagaagcagctggagaagatgaggaagttcctggatgagcaggccatcgaccgggagcacgagagagatgtgttccagcaggagatccagaagctggagcagcagctgaaggtggtgccccgcttccagcccatcagcgagcaccagacccgggaggtggagcagctggccaaccacctgaaggagaagacagacaagtgcagcgagctgctgctgagcaaggagcagctgcagagggacatccaggagagaaatgaggagattgagaagctggagttccgggtgcgggagctggagcaggccctgctggtggaggacaggaagcactttggagctgtggaggccaagccagagctgagcctggaggtgcagctgcaggccgagagagatgccatcgacaggaaggagaaggagatcaccaacctggaggagcagctggagcagttccgggaggagctggagaacaagaatgaggaggtgcagcagctgcacatgcagctggagatccagaagaaggagagcaccacccggctgcaggagctggagcaggagaacaagctgttcaaggatgacatggagaagctgggcctggccatcaaggagagtgatgccatgagcacccaggaccagcacgtgctgtttgggaagtttgcccagatcatccaggagaaggaggtggagattgaccagctgaatgagcaggtgaccaagctgcagcagcagctgaagatcaccacagacaacaaggtgattgaggagaagaatgaactcatccgggacctggagacccagatcgagtgcctgatgtctgaccaggagtgtgtgaagaggaaccgggaggaggagattgagcagctgaatgaagtcatcgagaagctgcagcaggagctggccaacatcggccagaagacctccatgaatgcccacagcctgtctgaggaggccgacagcctgaagcaccagctggatgtggtgattgctgagaagctggccctggagcagcaggtggagacagccaatgaggagatgaccttcatgaagaatgtgctgaaggagaccaacttcaagatgaaccagctgacccaggagctgttcagcctgaagcgggagcgggagagcgtggagaagatccagagcatccctgagaacagcgtgaatgtggccatcgaccacctgagcaaggacaagccagagctggaggtggtgctgacagaagatgccctgaagagcctggagaaccagacctacttcaagagctttgaggagaatggcaagggcagcatcatcaacctggagacccggctgctgcagctggagagcacagtgtctgccaaggacctggagctgacccagtgctacaagcagatcaaggacatgcaggagcagggccagtttgaaacagagatgctgcagaagaagatcgtgaacctgcagaagatcgtggaggagaaggtggccgccgccctggtgtcccagatccagctggaggccgtgcaggagtatgccaagttctgccaggacaaccagaccatcagcagcgagcctgagaggaccaacatccagaacctgaaccagctgcgggaggatgagctgggcagtgacatcagcgccctgaccctgcgcatcagcgagctggagagccaggtggtggagatgcacaccagcctcatcctggagaaggagcaggtggagattgctgagaagaatgtgctggagaaggagaagaagctgctggagctgcagaagctgctggagggcaatgagaagaagcagcgggagaaggagaagaagaggagcccccaggatgtggaggtgctgaagaccaccacagagctgttccacagcaatgaggagagcggcttcttcaatgagctggaggccctgcgggcagagagcgtggccaccaaggccgagctggccagctacaaggagaaggccgagaagctgcaggaggagctgctggtgaaggagaccaacatgaccagcctgcagaaggacctgagccaggtgcgggaccacctggccgaggccaaggagaagctgagcatcctggagaaggaggatgaaacagaggtgcaggagagcaagaaggcctgcatgtttgagcccctgcccatcaagctgagcaagagcatcgccagccagacagatggcaccctgaagatcagcagcagcaaccagaccccccagatcctggtgaagaatgccggcatccagatcaacctgcagagtgaatgtagcagcgaggaggtgacagagatcatcagccagttcacagagaagattgagaagatgcaggagctgcacgccgctgagatcctggacatggagagccgccacatcagcgagacagagaccctgaagcgggagcactacgtggccgtgcagctgctgaaggaggagtgtggcaccctgaaggctgtgatccagtgcctgcggagcaaggagggcagcagcatccctgagctggcccacagtgatgcctaccagacccgggagatctgcagcagtgacagcggcagtgactggggccagggcatctacctgacccacagccagggctttgatattgccagcgagggccgcggggaggagagcgagagcgccacagacagcttccccaagaagatcaagggcctgctgcgggctgtgcacaatgaaggcatgcaggtgctgagcctgacagagagcccctacagtgatggagaggaccacagcatccagcaggtgtctgagccctggctggaggagaggaaggcctacatcaacaccatcagcagcctgaaggacctgatcaccaagatgcagctgcagcgggaggccgaggtgtatgacagcagccagagccatgagagcttcagtgactggagaggagagctgctgctggccctgcagcaggtgttcctggaggagaggtctgtgctgctggccgccttcagaacagagctgacagccctgggcaccacagatgctgtgggcctgctgaactgcctggagcagaggatccaggagcagggcgtggagtaccaggccgccatggagtgcctgcagaaggctgacagaagaagcctgctgtctgagatccaggccctgcacgcccagatgaatggaaggaagatcaccctgaagcgggagcaggagagcgagaagcccagccaggagctgctggagtacaacatccagcagaagcagagccagatgctggagatgcaggtggagctgagctccatgaaggaccgggccacagagctgcaggagcagctgagcagcgagaagatggtggtggccgagctgaagtctgagctggcccagaccaagctggagctggagaccaccctgaaggcccagcacaagcacctgaaggagctggaggccttccggctggaggtgaaggacaagacagatgaggtgcacctgctgaatgacaccctggccagcgagcagaagaagagccgggagctgcagtgggccctggagaaggagaaggccaagctgggccgctctgaggagcgggacaaggaggagctggaggacctgaagttcagcctggagagccagaagcagaggaacctgcagctgaacctgctgctggagcagcagaagcagctgctgaatgaaagccagcagaagattgagagccagaggatgctgtatgatgcccagctgtctgaggagcagggcaggaacctggagctgcaggtgctgctggagagcgagaaggtgcgcatccgggagatgagcagcaccctggaccgggagcgggagctgcacgcccagctgcagagcagtgatggcaccggccagagcaggcctcccctgcccagcgaggacctgctgaaggagctgcagaagcagctggaggagaagcacagcagaattgtggagctgctgaatgaaacagagaagtacaagctggacagcctgcagacccggcagcagatggagaaggaccggcaggtgcacaggaagaccctgcagacagagcaggaggccaacacagagggccagaagaagatgcatgagctgcagagcaaggtggaggacctgcagaggcagctggaggagaagaggcagcaggtgtacaagctggacctggagggccagaggctgcagggcatcatgcaggagttccagaagcaggagctggagcgggaggagaagcgggagagccgccgcatcctgtaccagaacctgaatgagcccaccacctggagcctgaccagtgacaggaccaggaactgggtgctgcagcagaagattgaaggagagaccaaggagagcaactatgccaagctgattgagatgaatggaggcggcaccggctgcaaccacgagctggagatgatccggcagaagctgcagtgtgtggccagcaagctgcaggtgctgccccagaaggccagcgagcggctgcagtttgaaacagcagatgatgaggacttcatctgggtgcaggagaacattgatgagatcatcctgcagctgcagaagctgaccggccagcagggcgaggagcccagcctggtgagccccagcaccagctgtggcagcctgacagagcggctgctgcggcagaatgctgagctgaccggccacatcagccagctgacagaggagaagaatgacctgaggaacatggtgatgaagctggaggagcagatccgctggtaccggcagacaggagctggccgggacaacagcagccgcttcagcctgaatggaggagccaacatcgaggccatcatcgccagcgagaaggaggtgtggaaccgggagaagctgaccctgcagaagagcctgaagagagctgaggccgaggtgtacaagctgaaggccgagctgagaaatgacagcctgctgcagaccctgagcccagattctgaacatgtgaccctgaagaggatctacggcaagtacctgcgggcagagagcttcaggaaggccctgatctaccagaagaagtacctgctgctgctgctgggcggcttccaggagtgtgaagatgccaccctggccctgctggccaggatgggcggccagcctgccttcacagacctggaggtgatcaccaaccggcccaagggcttcacccgcttccgctctgctgtgcgggtgtccatcgccatcagcaggatgaagttcctggtgcggcgctggcaccgggtgactggatctgtgtccatcaacatcaacagagatggcttcggcctgaaccagggcgctgagaagacagacagcttctaccacagcagcggcggcctggagctgtatggagagcccaggcacaccacctaccgcagcagaagtgacctggactacatccgcagccccctgcccttccagaaccgctacccaggcaccccagctgacttcaaccctggcagcctggcctgcagccagctgcagaactatgacccctag

SEQ ID NO: 306445 - DNA, 11631 bp, Artificial Sequence
  derived and/or modified sequence
atggaggacgaggagcggcagaagaagctggaggccggcaaggccaagatcgaggagttaagcttggcattccttgtgagacaactggcccagttccggcagcgaaaggcacagagtgacggacagtccccaagcaaaaaacaaaaaaagaagaggaagacgtcttctagtaaacacgacgtctctgctcaccacgatctgaacatcgatcagtctcagtgtaacgagatgtacattaacagctcgcagcgcgtcgagtcgactgtgattcctgagagcacaattatgcgcactctgcattccggcgaaatcacctcgcatgagcaagggttttctgtggaattggaatccgagatttccactacggcggatgattgctccagcgaggtcaatggctgttcttttgtgatgcgcacaggaaaaccgaccaacttactccgggaagaagagttcggtgtggacgacagttattcagaacagggtgcacaggactcacccactcatctggaaatgatggagagcgagctcgctgggaagcagcatgaaatcgaagaactaaatcgagagctcgaggagatgagggtaacatacgggacggaagggctgcagcagctgcaggaattcgaggccgctatcaagcaacgtgatggcatcatcacccagctgaccgccaacctgcaacaggctcggcgcgaaaaggacgagacaatgcgggagttcttggagctaacggagcagagccaaaaactgcagatacagttccagcagcttcaggcctccgagacgcttcgaaactccactcattcgagcacagcagccgacctgctccaggctaagcagcagatcctgacccatcagcaacagcttgaggagcaggaccatcttctggaggattaccagaaaaaaaaggaggatttcacgatgcaaatttctttccttcaggagaagatcaaggtgtacgaaatggaacaggataagaaggttgaaaacagtaacaaggaagaaattcaagagaaagagaccataatagaagagcttaacaccaagatcatcgaagaggagaagaagactcttgaactcaaggataagctgaccactgccgacaagctgcttggggagctgcaagaacagatcgtgcagaaaaaccaggagattaagaatatgaaactcgagctgacaaattcaaaacaaaaggagaggcaatcctccgaggagattaaacagctgatgggcaccgtcgaggagctccagaagcgaaaccacaaagacagtcagttcgagactgatatcgttcagcggatggaacaagagacacaacggaagctcgagcaactgcgagctgagttggacgagatgtatggtcagcagatagttcagatgaagcaggaattaatccgtcaacatatggcgcagatggaagagatgaagacaagacacaaaggcgagatggagaatgcgctgaggtcttacagcaacataaccgttaatgaagatcagataaaattaatgaacgtcgccattaatgagctgaacataaagctccaggataccaacagtcaaaaagagaagctgaaggaggagctcgggctaatcctggaggagaaatgcgcgctccagagacaactcgaggatctggtagaggaattgtcattcagccgggaacagattcagagggcccgccagacaattgctgaacaggaatctaagttaaacgaggcacacaagtctctgagcacagttgaggatcttaaggcggagatagtctctgcctctgaatcccgaaaagagttggagttgaaacacgaggccgaggtgaccaattacaaaatcaaactcgagatgttggaaaaagagaagaacgccgtgttggaccgcatggctgaatcccaggaagcagagttagaaaggttaagaactcagctcctgttctctcatgaggaggagttgtccaagttaaaggaagacctggagatagaacaccggatcaacatcgagaagctgaaagataatctcggcattcactataaacaacagatcgatgggctgcagaacgaaatgagtcagaaaattgagactatgcagttcgaaaaagacaacttgattaccaagcagaatcagctcatccttgaaatatctaaattaaaagacctccagcaatctttggtaaacagcaagtcagaagaaatgaccctgcagatcaacgagctgcaaaaagaaattgaaatactgcgccaggaagagaaagagaagggcacactggagcaggaagttcaggagcttcagctgaaaactgagctgctcgaaaaacaaatgaaggaaaaggaaaacgacttgcaagagaaattcgcacagctagaggcagagaacagtattctgaaagacgagaagaaaacactggaggacatgcttaaaattcacacgcctgtctctcaggaggagaggctgattttcctagatagcatcaagtccaagagcaaggattccgtgtgggagaaggagattgaaatccttattgaagaaaacgaggacctgaaacaacagtgtatacagctgaacgaggagattgagaaacagcgaaacactttctctttcgccgagaaaaactttgaagtgaactaccaggagctccaggaggagtacgcctgcctcttaaaggtgaaggacgatcttgaagacagcaagaataagcaggaactcgaatacaagagtaaactaaaggccctgaatgaggagctgcacctccagagaatcaatcctacgacggtgaaaatgaaaagctccgtgttcgacgaagataagaccttcgtggccgagacgctggaaatgggtgaggtggtagaaaaggacaccacagaactgatggagaagctggaggtcacaaagagagagaaactggagctatcacagagattaagcgatctctctgaacagctgaagcaaaagcacggagagatttcctttctcaacgaggaagtaaagagcttgaaacaagaaaaggagcaagtctcactccggtgtagggagctggaaatcattatcaatcataatcgggctgagaacgtacagagttgcgacacacaggtaagctcactactcgatggagtcgtcaccatgacatctaggggggcggaggggtccgtttccaaggtgaataagagcttcggggaggagagtaagattatggtggaagataaggtctcgtttgaaaacatgactgtaggggaggaatctaaacaagaacagctgatcctggatcatctcccttctgtgacgaaagaaagcagtcttagagccactcagccctccgaaaatgacaaactgcagaaggagctcaacgtcctgaaaagcgagcaaaacgatctgaggctccaaatggaggctcaaaggatatgcctgtccttggtgtatagtactcacgtagaccaggtgagagaatacatggaaaatgagaaagacaaagctctatgtagtctgaaggaggagctgatcttcgcccaagaagaaaagattaaagagctgcagaagatccaccagttggagctgcagaccatgaagacacaggaaacgggagatgaaggcaagccacttcatctgctaattggcaaactgcagaaagctgtgtccgaggaatgcagctactttttgcagaccttgtgtagcgtactgggtgagtactatactccagctttaaagtgcgaagtgaacgccgaagataaagagaacagcggcgactacattagcgagaatgaggatcccgaactgcaggattatcggtatgaggtacaagattttcaggagaacatgcacacactcttgaacaaggtaacagaggagtataataagctcctggtgctgcaaaccagactctctaagatctggggccaacagacagatgggatgaaacttgaattcggcgaggagaatctgcccaaagaggaaacagaatttctgtcaattcacagccagatgacaaacctcgaagacattgacgtcaaccataaaagcaaactctcgtctctccaagaccttgaaaagacgaagctcgaggagcaggtgcaggagctggagtcactaatcagcagccttcagcagcaactgaaggaaactgaacagaattacgaggctgagattcattgccttcagaagcgtctgcaggccgtgtctgaatcaaccgtgcccccatccctgccagtagattcagtggtgatcactgaatctgatgctcagagaaccatgtatcccggctcatgtgtgaagaagaatattgacgggaccatcgagttttccggcgaattcggcgtaaaggaagagacaaatattgtgaaattgctcgagaaacaataccaggaacaactcgaggaagaggtcgccaaagtaatcgtgtctatgagcatcgccttcgcacagcagacagagctgagtcggatctccggcggcaaggaaaacactgcgtcgagtaagcaggcacatgccgtgtgccaacaagagcagcactactttaacgagatgaaactgtctcaggaccagataggatttcaaaccttcgaaactgtagacgtgaagttcaaggaggaatttaagcctctgtctaaagagctgggggaacacggcaaagaaatcttgctctctaacagtgacccacacgacatcccagaatccaaggattgcgtcttgaccattagcgaggagatgttttcaaaggacaagacattcatcgtcagacagtcgattcacgacgaaatcagcgttagttcaatggatgcctctcgccagcttatgttgaacgaagagcagttggaggacatgcggcaggagctggtgcggcagtaccaggaacaccagcaggctacagaattattgcggcaagcccacatgagacagatggaacgccaaagggaggatcaagagcagctgcaggaggagatcaaacggttgaaccggcagctggcacagcggtccagtatcgataatgaaaacctcgtctctgagagagagagggttttgctcgaggagttagaagccctcaagcagttgtccctagctggccgggagaaactctgctgcgagctgcgtaacagtagcactcagactcagaatggtaacgaaaatcagggagaggtcgaagagcagacatttaaagagaaagagctcgacagaaaaccagaggacgttcctccagagattctgagtaatgaacgatacgctctgcagaaagctaacaatagattgctgaaaatcctgttggaagtcgtaaagaccactgcagctgtggaggaaacgatcggccgtcacgtcttgggaatcctggatcgttctagcaagagtcagtctagcgcttctctgatttggcggagcgaggctgaggcctcagtgaagagctgtgttcacgaagagcacacaagagttactgatgagtctatccccagttattccggctcggacatgcctagaaacgatatcaacatgtggagcaaggtcacagaggaaggcactgaactgagccagcgcctggtgagaagcgggtttgccggaacagaaattgaccccgagaatgaggaactgatgttgaatatatcatcacggctgcaggctgcagtggaaaagcttctcgaagccatctcagagactagtagtcagttagagcatgccaaggtgacccagacagagctgatgcgagagtcttttagacagaagcaggaggccacagagtccctgaagtgtcaggaagagctgcgcgaacgcctgcacgaagagtcaagagccagggagcaactggccgttgaactgagtaaagccgaaggagtgattgatgggtacgcagacgaaaaaacattgtttgaacgacagatccaggagaagactgacattattgatagattggaacaggagttactgtgtgctagcaatcgtctccaggagttggaggcggaacagcaacagatacaagaggagagggagctgctgagccgccaaaaagaggcaatgaaagcagaggcaggacccgtggagcaacagctcctgcaggagacggagaaactcatgaaagaaaagctcgaggtccagtgccaggctgagaaggtaagagatgacctgcagaaacaagttaaggcccttgaaattgatgttgaagagcaggtaagcaggttcatcgagcttgagcaggagaaaaataccgaattgatggatctaagacagcagaatcaagccttggagaagcaactcgagaaaatgcgaaaattcctcgacgagcaggccattgacagggagcatgagagagatgtatttcaacaagagatacagaagctggaacagcagctgaaagtagtcccccggtttcagcccatatccgagcatcaaacccgggaagtcgaacagttggcaaatcacttaaaagagaagaccgacaaatgttctgaactcctgctgtcaaaagaacagctgcagcgggacatacaagaacgcaacgaagaaatcgagaaactcgagtttagagtacgtgagctggagcaggcgttgttagtcgaagaccgtaaacactttggcgccgtcgaagccaagcccgagttgagtctggaggtacaactgcaggctgagcgggacgctattgaccggaaagagaaagagattaccaacctggaggagcaattggagcaattccgagaggaactcgagaacaagaacgaggaggtgcagcagctgcacatgcaactcgaaatacagaaaaaggagtcaaccactcgcctgcaagaacttgagcaggagaataagctgtttaaggacgacatggagaagctgggacttgctataaaggagtccgacgcgatgtctacacaggatcagcacgtgctgtttggcaagtttgcgcagatcatccaggaaaaggaagtggaaattgaccaacttaacgaacaggtgactaaactgcagcagcagcttaagataaccactgataataaggttatcgaggagaagaatgaacttatacgggacctcgagacgcagatcgaatgtctcatgtctgatcaagagtgcgttaaacgcaatcgcgaggaagagatcgagcaactgaatgaggttatagagaagctgcagcaggagctcgcaaatatagggcagaagacgagcatgaacgcccattccctctccgaagaggctgattcgctcaaacaccagctggacgtcgtgattgccgagaagctcgctttagaacagcaggtggaaacagcaaatgaggaaatgaccttcatgaagaacgtgctgaaggagaccaatttcaaaatgaatcaacttacgcaggagttattttccctaaaacgcgagcgcgagtcagtcgaaaaaatccagtccatccctgaaaatagcgtgaacgtggctatagaccacctgtcaaaagacaagcctgagcttgaagtcgtgttaactgaggacgctttaaagtcgcttgaaaatcagacttatttcaaatctttcgaggagaacgggaaaggatccatcatcaatctggagactcgccttctgcagctggagtcgactgtctctgccaaggacctcgagctgacacaatgttataagcagatcaaagacatgcaagagcagggacaatttgagaccgagatgctacagaagaaaattgttaacctccagaagattgttgaggagaaggtcgctgctgctctcgtgtctcagattcagctggaagccgtacaggaatatgctaaattttgccaagacaatcagaccatctccagtgagccagaaaggacaaatatccaaaacttgaatcagcttagagaggacgaattgggcagtgacatcagtgcgctcactttgaggattagtgagctggagagccaggttgtggagatgcacacctccctcattctggagaaggaacaggtggagatagccgagaagaacgtgctagaaaaagagaagaagttgctcgaactccaaaaattattggagggcaatgagaagaagcagcgggaaaaggagaagaagagaagcccacaggacgtcgaagtgctcaaaacaacgaccgagctttttcattccaatgaggaaagcggatttttcaacgaactcgaggcactgcgtgccgagtctgtcgctacaaaggctgaactagcctcctacaaggaaaaggcagagaagttacaagaggagctgctcgttaaggagacaaatatgaccagcttgcagaaagatctctcacaggtgcgagaccacctggcagaagccaaggaaaagctctccatactcgaaaaagaagatgagaccgaggtgcaggagtctaagaaagcctgcatgtttgagcccctgccaattaaactgtcgaagagcattgcctcccagaccgatggaacactgaagatctcaagttctaatcagaccccccagatcctggttaaaaatgcaggaattcagatcaacctgcagtccgagtgttcgagcgaggaagtgactgaaatcatctcccagtttacagagaagatcgagaaaatgcaggagctgcacgccgcagaaatcctcgacatggagtcgcgacacatctccgaaacagagaccctcaaacgtgagcattacgtcgctgtacagttgcttaaggaggaatgtggaaccctaaaagctgtgattcagtgtttgagatccaaggaaggatcttcgataccagaactggcccactcggacgcttatcagaccagggaaatctgttcctccgacagtggttcagattggggtcaagggatctaccttacacactcacagggattcgatatcgcgtccgaaggcaggggggaggaatccgagtccgctacagacagttttccaaagaagattaaggggctcttacgggcagtacataacgagggaatgcaggtgttgagtctgaccgaatcaccatattccgacggggaggatcacagtatccagcaggtttcggaaccctggctggaagaaaggaaagcctatataaacacaatttccagcctgaaggatctaataacgaaaatgcagctgcagcgcgaagctgaggtgtatgactcctctcagtctcacgagagcttcagcgactggcggggtgagttgcttctcgcactccaacaggtcttccttgaagagcgcagcgttctgctggccgcatttcggactgaactgacagcattgggaaccaccgacgccgttggactgctcaactgtctggaacaacgaatccaggaacagggcgtcgaataccaggcagcaatggagtgcctccagaaagccgatcggcggtcgctcctgtcagaaatccaggctttgcacgcacaaatgaacggccgcaaaattaccctgaaaagggagcaagagtcagagaaaccgtcacaggagctcctagaatacaatattcaacagaagcagtctcagatgttagaaatgcaggtggagctgagctcgatgaaagaccgtgcaactgaactccaggagcagctcagcagcgagaagatggtcgttgcagaattaaaatcagagctggctcagaccaagctggagcttgagactacgcttaaagcacagcacaaacacctgaaggaacttgaagcctttaggctcgaagtgaaggacaaaaccgatgaggtccatctgctgaacgacactctggcctcagagcagaaaaaaagccgcgagttgcagtgggcactcgagaaggaaaaagccaagctgggccggtccgaagagagagataaagaggagctggaagacctcaaattcagtctcgagagccagaagcaaagaaatttgcagctgaacctgcttctagagcaacagaaacagctgctcaacgagagccagcagaaaattgagtcccaaagaatgttatacgacgctcagctgtcagaagaacaaggtcgcaacctggagctccaagttctgcttgagtcagaaaaggtgagaatccgcgagatgagcagtacactcgatcgcgagagagagctgcatgcccagctgcaaagcagcgacggaacgggccaatctagaccgccactccctagtgaggatcttctcaaagagctccagaaacagcttgaggaaaagcatagccggatcgttgaactgctgaacgagaccgaaaagtataaattggacagtctccagactaggcagcagatggaaaaagacaggcaggtccatcggaagacactccagaccgagcaggaggccaacaccgaaggccagaaaaaaatgcatgaactgcaatcaaaggtggaggatctgcagcgtcagctcgaagaaaagagacagcaggtgtataagctagatcttgaggggcagagactccagggaatcatgcaagagttccagaaacaggagctcgaaagagaagagaaacgagaatccagacgcattctgtaccaaaatcttaacgagcctacaacttggagtctgactagcgacagaaccagaaattgggttctgcagcagaagatcgaaggcgagaccaaagagagtaactatgccaaactcatcgagatgaatggaggaggaacaggctgcaatcacgagttagagatgattagacaaaagttacaatgtgtggcctccaagcttcaggtgctgcctcagaaagctagtgagcggttgcagtttgagacagctgacgacgaagactttatctgggttcaggagaacattgatgagatcatcctgcagctccagaagctgactgggcagcagggcgaggagcctagcttggtctcccctagcacttcatgtggctccttgaccgagagacttctcaggcagaatgcggagcttacgggccacatctcccagcttacggaggagaaaaacgatctgagaaacatggtaatgaagctagaggagcagatccgctggtataggcagactggcgccggaagggacaattccagccggttttccctgaatggaggggccaacattgaagctatcattgccagcgagaaggaagtgtggaaccgggagaaactgaccctacagaaatcactgaagcgagcggaggctgaggtttacaagctgaaagcagaactcagaaatgacagcctgctgcagacattgtctcctgattctgaacacgtcacactaaagaggatttacgggaaataccttcgggctgagagtttccgtaaggctctgatttaccagaagaaatatctcctgctgcttttagggggttttcaggagtgtgaagacgcaaccttagccctgttggccaggatgggagggcagcctgctttcactgacctcgaggtcatcacaaacaggccaaagggctttaccagattcagatcagccgtgcgggttagcatagctatcagccggatgaagttcctcgttagaaggtggcatagagtgaccggcagtgtgtctatcaatatcaaccgtgatggctttgggcttaaccagggagcagagaagacagacagtttttatcactcaagcggcgggctcgagttatacggcgagccccgccacaccacatataggagccggagcgacctcgattatatccgttccccgttaccttttcaaaacagataccccggcacccccgctgacttcaaccccggctccctcgcatgcagccaactacagaactatgatccttag

SEQ ID NO: 306446 - DNA, 11631 bp, Artificial Sequence
  derived and/or modified sequence
atggaagacgaagaacgccagaaaaagctggaagctggcaaagcaaaaatagaagaactttctttggcctttctggtacgtcagctggctcagttcagacagcggaaagcacaaagtgacggccagtcaccttcgaagaagcaaaagaagaaacgcaagacatcctcttctaagcacgatgtgtccgcccaccacgacctgaatattgatcaatctcagtgcaacgagatgtacatcaacagcagtcagcgggtagagagcaccgtaataccagaatctaccatcatgagaaccttgcactccggagaaattacatcacacgagcaggggttttctgttgagctcgagtcggaaatatctacaactgccgatgactgcagctccgaggtaaatggctgtagcttcgtaatgcgaacggggaaacccaccaacctacttcgcgaagaagagttcggcgtggatgattcttattcagaacagggcgcacaggactcccctacccatttggaaatgatggaaagcgagctcgctggcaagcaacatgagatagaggaattaaacagagaattggaagagatgcgcgtgacctacgggaccgagggcttgcagcaattacaggaattcgaggctgcgataaagcaaagggacggaattattacgcaattaactgccaatctgcagcaggcccgaagagagaaggatgagaccatgcgagaattcctggaactgaccgagcaatctcagaagctgcaaatccagttccaacaattacaggcctcagagacactgaggaattctacgcatagcagtaccgcggctgacttgctgcaggctaagcagcagatcctaacgcatcagcagcagctcgaggaacaggaccacttactagaagactatcagaaaaaaaaagaggatttcaccatgcagatttcatttctacaagaaaaaataaaggtttacgagatggaacaagataaaaaagtggagaactcaaataaggaagagatccaggagaaagaaaccattattgaagagttgaacacaaaaatcatcgaagaagaaaagaagacacttgaactcaaggacaagttgaccacagctgataagctgctgggagagctgcaggaacagattgtacagaagaatcaagagattaagaacatgaagctggaacttaccaacagcaaacagaaggagcggcagtccagcgaagaaattaagcagctcatgggcactgtcgaggaactccagaaacggaaccataaagactcccagttcgagacagatatcgtccagcgcatggagcaagaaactcaaaggaagttggaacagctaagggccgagctggacgagatgtacggccagcagattgtgcaaatgaaacaggagcttattcgacagcacatggcacagatggaagaaatgaaaacacgccacaagggcgagatggagaatgctttgcggtcttactcgaacattactgtgaacgaagatcagataaaactgatgaacgtggcaatcaacgagctgaatattaagctccaagacaccaactcccagaaagagaagctgaaagaggaactcggactgattctggaagaaaaatgcgccctccagcgccaactcgaagacttagtagaagagctctcattctcccgagagcagatacagcgcgctagacagacgattgccgaacaggagtctaaactcaacgaagcacacaagtccctgagcaccgtcgaagacttgaaggccgaaatcgtgagcgctagcgaatcacgaaaggagcttgagctaaagcatgaagctgaggtgacgaattacaaaataaaactggagatgctagagaaggagaaaaacgcggtgttggaccgcatggccgaaagccaggaagctgagctcgagaggctgagaacacagctcctttttagccacgaggaggagctgagtaaacttaaggaggatcttgaaatcgagcaccggattaatattgagaaacttaaagataacctcggcatacactacaaacagcaaatcgacggcctacagaacgaaatgagccagaaaattgaaactatgcaattcgaaaaggataacctgatcactaagcagaaccagctcattctcgagatttctaaattaaaagatttgcagcagtccctcgtgaattccaagtccgaggaaatgactctccagatcaatgaactgcaaaaagaaatcgagatcctgagacaggaggaaaaggaaaagggcacactcgagcaggaagtgcaggagctgcagctgaagaccgagctgctggagaagcagatgaaggaaaaggagaatgatctgcaggaaaagtttgcccagctagaggccgagaattccatcctcaaggacgaaaagaaaaccctggaagacatgctgaagatacacacccctgtgtcacaagaagaaaggcttatcttcttggactccataaaaagcaaatcaaaggactcagtctgggagaaggaaatcgagatcctcattgaagagaacgaagacctaaaacagcagtgtattcagctgaatgaagagattgaaaaacagcgtaacacattctcctttgccgaaaaaaattttgaggtaaactaccaggagcttcaagaggagtacgcatgtctcttaaaggtcaaggacgatctcgaagattcgaaaaacaagcaagagttggagtataagtcaaagctgaaagcgctgaacgaggaactgcatctgcagagaatcaatccgaccacagtgaaaatgaagtccagcgtgtttgacgaagataagacattcgtcgcggagactcttgagatgggcgaggtggttgagaaggatactacggaactcatggaaaagttggaagtaaccaagcgggaaaaattagaactctcgcagcgactcagcgatctgagtgagcagttgaagcagaaacatggggaaataagcttcctgaatgaggaggtgaaatctttaaagcaggaaaaggaacaggtttctctgaggtgtcgggaactggaaatcatcatcaatcataaccgggctgagaacgttcagtcatgcgacacacaggtgtccagcctactcgacggagtggtcaccatgacctcccgcggagcggagggttccgtaagcaaggtgaataaaagctttggcgaggagtctaaaatcatggtagaggataaagtgagttttgaaaacatgaccgtgggggaggaaagtaagcaagagcaactgattctggatcatctgccttcagtgacaaaagaatcctctcttagggccacgcagccctcagaaaacgataagttgcagaaagaactgaacgtgctgaagtctgagcagaatgatctgcggttacagatggaagcgcagcgcatctgtctcagcctggtgtatagcacacacgtagatcaagtgcgggagtacatggagaacgaaaaggataaggctctgtgtagtctgaaagaggagcttattttcgcccaggaggaaaaaatcaaggagttacagaagatacatcagctggaactccagactatgaaaacacaggagactggagatgaggggaaaccactgcacctgctgatcggcaagctccagaaagcagtctccgaggagtgtagctacttcctgcagaccctatgctcagtcttgggtgagtattatacacctgcactgaagtgtgaagttaacgctgaagacaaggaaaattcaggcgattacatctccgagaatgaggacccggagctgcaggactataggtatgaggtacaggattttcaggaaaacatgcacaccctactaaataaggtgactgaagaatacaataaattattagtgctccaaactaggctgagtaaaatctggggccagcagaccgatggtatgaaactcgagtttggtgaggagaatttgcctaaagaagaaactgagttcctttctatccattcacaaatgactaacctggaggacatagatgtgaatcataaaagcaagctgtcctccctgcaggatcttgagaagaccaaactcgaggaacaggtgcaggagctcgaaagtctgatttcttcactccagcagcagctgaaagagacggaacaaaactacgaagccgaaattcactgtttacagaagcgtctgcaggctgtgagcgaatccacagtgccgccatctcttccagtggacagtgtagtaataaccgaatctgatgcccaaagaactatgtaccctgggagctgtgttaagaagaatattgatggaaccatcgagttctctggggaattcggggtaaaagaagagacaaatattgtgaagctcctcgaaaaacagtatcaagaacagttagaggaggaggtggccaaggtgattgtgagcatgtccatcgcctttgctcaacagacagagctgtccaggattagcggagggaaagaaaacaccgcctcttccaagcaggcccatgccgtgtgtcagcaggaacagcattattttaatgaaatgaaactgtctcaggatcagattgggttccagacatttgaaaccgtggatgtcaaattcaaggaggaatttaagccattgagtaaagaattgggggagcatggaaaggagatattgttgtccaatagcgaccctcacgacattcctgaaagtaaagactgtgtcttgaccatatccgaagagatgtttagtaaagataagacattcatcgtcagacagagtatacacgacgagataagcgtgtctagcatggacgccagtcggcagctaatgctgaatgaggaacaattggaggatatgaggcaggagctcgtgaggcagtatcaagaacaccaacaggccaccgagctgttgaggcaggcacacatgagacagatggagcggcagcgggaagatcaggaacagctacaagaagagatcaaacgcctgaacagacaattagcacagcgaagctccatcgataatgaaaacctcgtgtccgaacgagagagggtgctcttggaagaattggaggctctcaaacagctttcattagcaggtagggagaagctatgctgtgagctcaggaacagctccacccaaactcaaaatgggaatgagaatcagggtgaggtggaagagcaaaccttcaaagagaaagaattagatcgtaagcctgaggacgtcccacccgaaatcctcagcaatgagcgctacgcacttcagaaagccaacaataggctgttgaaaattctcctcgaggttgtcaaaacaaccgcagctgttgaggagactattggcagacatgtgctgggaatcctggaccggtctagtaaatcccagagcagtgcctccctgatctggcgatccgaggctgaagcatccgtgaagtcgtgcgtgcatgaggagcatacccgagttacggacgagtcaattccaagttactccggctccgatatgccgcgtaatgatatcaacatgtggtctaaagtaactgaggagggaacagagctatcacagcggctcgtgaggagtggctttgccggaaccgaaatcgatcccgagaacgaggaactgatgctgaatatttcctctagattgcaggcagctgtggagaagcttctagaagccatatcggaaacttccagccagctcgagcacgctaaggtcacccaaaccgaactgatgagagagtccttccggcaaaaacaggaagccaccgaatcactgaagtgccaggaggagctgcgagagagacttcacgaggaaagtcgggcaagggagcaactggcagtcgaattgtccaaggccgagggggttatcgatggctatgctgatgagaagacgctctttgaaaggcaaattcaggagaaaactgatattatcgacaggttagagcaggaacttctttgcgcaagcaatcgcctgcaggagctggaggcagaacaacagcagattcaagaggagagagagctgctctccaggcagaaggaggctatgaaagcggaggccggtcctgttgaacagcagcttctgcaagaaacagagaagctcatgaaagagaagttggaggtacagtgccaagctgaaaaagtacgagacgacctgcagaaacaggttaaggcactggaaattgacgttgaggaacaagtaagcaggttcattgagctggaacaagaaaagaacaccgaactaatggaccttaggcagcaaaatcaagcactcgagaagcagctggaaaaaatgcggaaattcctggatgagcaagctattgaccgcgagcacgagcgggatgtttttcagcaggaaattcagaaattggaacagcagctgaaagtggtgccacggttccaaccgataagtgaacatcaaactagagaggtagagcagctcgcaaaccatctcaaagaaaagaccgacaagtgttccgaactgcttctctctaaggagcagctccagcgagatatccaggaaagaaatgaggaaatcgagaaactagagttcagagtccgtgagctggaacaagcccttctcgtggaagacaggaagcacttcggagcggtggaagctaagccggagctgtcgctggaggtgcagctgcaagccgagcgtgatgccattgatcggaaagaaaaggaaattactaatttggaggagcagctggagcagttccgagaagaattggaaaacaaaaatgaggaggtccagcagctgcacatgcaactggaaattcagaaaaaggagagcactacccgccttcaggaactagagcaggagaacaagttattcaaggacgatatggagaagctgggtctggcgatcaaggagagcgatgctatgtcaacccaagaccaacatgtgttgtttgggaagttcgctcaaattatacaagaaaaagaagtcgagatcgatcagctcaatgaacaggtaaccaagctgcagcagcagcttaagatcaccacagacaataaggtgattgaggaaaagaatgagctgattcgtgacctcgagacgcagatcgagtgtctgatgagcgaccaggagtgcgtgaaacgaaacagagaagaggaaatcgaacaattgaatgaagttattgaaaaactgcagcaggagctggcaaacatcggccaaaagacatccatgaatgctcacagtctgagcgaagaggccgacagtttgaagcaccagctcgatgtggtgatcgctgaaaaactggctcttgagcagcaggtggagactgcaaacgaagagatgacgtttatgaaaaacgtcctcaaagaaaccaacttcaaaatgaatcagctgacacaggaactcttttctctgaagagagaaagagagagcgtggaaaaaatacagagcatacccgaaaacagcgtgaacgtagcaattgaccacctcagtaaagataagccagagctagaagtggtcctgactgaagatgctttgaaatctctcgagaaccaaacctacttcaagagctttgaggagaacggcaagggatccatcattaatttagagactcgactgctccagctggaatctacagtgtcagccaaagaccttgaactcacacaatgctacaaacagataaaagatatgcaggagcaggggcaatttgagacggaaatgctgcagaaaaaaatagtgaacctccagaaaatcgtcgaggaaaaggtcgccgcagccttggtctcccagatacagctggaagccgtgcaagagtatgccaagttttgtcaggacaatcaaactatatcttccgaaccagaacgcaccaatatccagaacctaaaccagctcagggaagatgagctgggaagcgatatcagcgctttaactttgagaattagtgagctggagagccaggtggtggagatgcacaccagtctgattttggagaaggaacaggtggaaatcgcggaaaagaacgtgttagagaaagagaagaagttactggagttgcaaaaactgctggaaggcaatgaaaaaaagcagagggagaaggaaaagaagcgttccccacaagacgttgaagtcttgaagacaaccacagagctgttccacagtaatgaagaatccggcttttttaatgaacttgaagccctgagggcagaaagtgttgccactaaagcagagctggcttcatataaagaaaaggcagagaaactacaggaggagctgctggtaaaagaaacaaatatgacaagcctacagaaggacttgagccaggtccgggaccatctcgctgaggccaaagagaagctgtcaattctggagaaggaggatgagacagaggtgcaggagagtaagaaggcctgtatgttcgagccacttccgattaaactttctaagtcaatcgcttcccagactgacggcactctcaagatctctagtagcaatcagactccccaaatcctcgtcaagaacgccggaatccagatcaaccttcaaagcgagtgcagtagcgaagaagtgaccgaaataatctcccagttcaccgaaaagattgagaaaatgcaggagttgcacgcagcggagatcttagatatggagtcacgccatatctcagaaacagaaaccctgaaacgagagcactacgtggctgttcagctcctaaaggaggaatgcggcactttgaaggctgttatccagtgtctgagatccaaagaagggtcaagtattcctgaattagcacatagcgatgcctatcagacacgcgagatctgctcaagcgattccggctctgactggggtcaggggatctacctgacgcacagccaggggtttgacattgcttcagaggggaggggggaggagagtgaaagtgccactgactcattcccaaagaaaataaaggggctgctccgtgcagtgcacaacgagggtatgcaagttctctctctcaccgaatcaccgtatagtgacggggaggaccactccatacagcaggtcagcgagccctggctggaagagcggaaggcatacatcaacacaatcagttcactcaaagatcttattacaaagatgcagctgcagagggaggctgaagtttacgattcatcccagagccatgaatcgtttagcgactggaggggggaactgctgttggcactgcaacaagtgtttctggaagaacgaagtgttctattggccgctttcagaacagaattgaccgcccttggcactacagatgcggtgggtctcctgaactgcctggagcagcggatccaggaacagggggtcgagtatcaggcagccatggagtgcttgcagaaggccgaccggcgaagcctcctgtccgagatccaagcactgcacgcacaaatgaacggcagaaaaattaccttaaaacgcgagcaagagtccgagaaaccatcccaggagctgctggagtataacattcagcagaaacaaagtcagatgttggagatgcaagttgagctctcctccatgaaggatcgagctactgagttgcaggaacagctgagttctgaaaagatggtggtagccgaactgaagtccgagctggcccaaaccaagctcgagcttgagacaacactgaaggcacagcacaaacaccttaaagagttggaagctttcagactggaggtgaaagacaagactgacgaggtacatcttctaaatgacactctagcttccgagcagaaaaaatcccgagaattgcaatgggcgctggaaaaggagaaggccaagctgggtaggtccgaggaacgggacaaggaggagctcgaagatctaaaattcagcctagagagccagaagcagcgcaatctgcagcttaacctgctgctggagcagcaaaagcagttgcttaacgagagccagcagaagattgagtcccagcgcatgctgtacgatgcccaactttcagaagagcagggcaggaatctggaactacaggtgcttctggagtccgaaaaagtccggatccgtgagatgtcttccacattggacagagaacgggagttgcatgcgcagctccagagttccgacggcaccggccagagccggcctccgctgcccagcgaggatctccttaaagagcttcagaaacaattggaggagaaacactcccgtatagtagagttgctcaacgagactgagaaatataagctcgatagtcttcaaaccaggcagcagatggagaaggaccgtcaggtacacaggaagactctgcagacggaacaggaagccaacactgaagggcaaaaaaagatgcacgaacttcaaagcaaagtggaagatctacagcgacagctggaggaaaaacgccagcaggtgtataagctcgacctggaggggcaaagactgcagggtatcatgcaggagtttcaaaagcaggaattggaaagagaagaaaagcgcgagtctcggaggattttgtatcagaatctgaacgagcctacaacctggtctctcacatctgatcggactcggaactgggtcctgcagcagaagattgaaggagagactaaggagtctaactacgctaagctcatagaaatgaatggcggaggcaccgggtgcaatcatgagctcgaaatgattagacagaaactgcagtgcgtcgcctcgaagctgcaagtcttaccccaaaaggccagtgaacgtttgcagttcgaaaccgcggatgacgaagattttatttgggttcaggagaacattgacgaaataatcctgcagcttcagaagctgacagggcagcagggcgaggagccctccctcgtcagtccaagcacctcctgtggctcgctgacagaacgcctcctgcgccagaacgcagagctgacaggccatattagccaactgactgaggagaagaacgatctcagaaacatggttatgaagctagaagaacaaataaggtggtataggcagaccggtgccggacgcgataactcttcacggttctcattgaatggcggtgccaacattgaggccattatcgccagcgaaaaggaagtttggaacagagaaaaactcactctccagaagagccttaagagggccgaggcagaagtatacaagctgaaagccgagctaaggaatgattcactgctgcaaactctgtcccctgattccgagcacgtcacactgaaaaggatctatggcaagtatttgagggcggaatctttccggaaggccctcatctaccagaagaaataccttctgttgctactgggcggatttcaggaatgtgaagatgccaccctcgcattgcttgccaggatgggcggacagcccgcattcaccgatctcgaggtgatcaccaataggcccaaaggctttacaagattccgttccgccgtcagagtgtctatcgctattagtcgcatgaaattccttgtgcgcagatggcaccgggtgactggatcagtgtctataaatattaacagggacggattcggcctgaaccaaggcgcagagaagactgatagcttctaccatagctctggcggactggagctgtatggtgagccacggcatacgacttatagatctcgatctgatttggattacatacgatcaccactgccttttcagaaccgctatcccggaacccccgctgacttcaaccccggatctcttgcatgctcccaactacagaactatgacccatag

SEQ ID NO: 306447 - DNA, 11631 bp, Artificial Sequence
  derived and/or modified sequence
atggaggacgaggagagacagaagaagctggaggccggcaaggccaagatcgaggagctgagcctggccttcctggtgagacagctggcccagttcagacagagaaaggcccagagcgacggccagagccccagcaagaagcagaagaagaagagaaagaccagcagcagcaagcacgacgtgagcgcccaccacgacctgaacatcgaccagagccagtgcaacgagatgtacatcaacagcagccagagagtggagagcaccgtgatccccgagagcaccatcatgagaaccctgcacagcggcgagatcaccagccacgagcagggcttcagcgtggagctggagagcgagatcagcaccaccgccgacgactgcagcagcgaggtgaacggctgcagcttcgtgatgagaaccggcaagcccaccaacctgctgagagaggaggagttcggcgtggacgacagctacagcgagcagggcgcccaggacagccccacccacctggagatgatggagagcgagctggccggcaagcagcacgagatcgaggagctgaacagagagctggaggagatgagagtgacctacggcaccgagggcctgcagcagctgcaggagttcgaggccgccatcaagcagagagacggcatcatcacccagctgaccgccaacctgcagcaggccagaagagagaaggacgagaccatgagagagttcctggagctgaccgagcagagccagaagctgcagatccagttccagcagctgcaggccagcgagaccctgagaaacagcacccacagcagcaccgccgccgacctgctgcaggccaagcagcagatcctgacccaccagcagcagctggaggagcaggaccacctgctggaggactaccagaagaagaaggaggacttcaccatgcagatcagcttcctgcaggagaagatcaaggtgtacgagatggagcaggacaagaaggtggagaacagcaacaaggaggagatccaggagaaggagaccatcatcgaggagctgaacaccaagatcatcgaggaggagaagaagaccctggagctgaaggacaagctgaccaccgccgacaagctgctgggcgagctgcaggagcagatcgtgcagaagaaccaggagatcaagaacatgaagctggagctgaccaacagcaagcagaaggagagacagagcagcgaggagatcaagcagctgatgggcaccgtggaggagctgcagaagagaaaccacaaggacagccagttcgagaccgacatcgtgcagagaatggagcaggagacccagagaaagctggagcagctgagagccgagctggacgagatgtacggccagcagatcgtgcagatgaagcaggagctgatcagacagcacatggcccagatggaggagatgaagaccagacacaagggcgagatggagaacgccctgagaagctacagcaacatcaccgtgaacgaggaccagatcaagctgatgaacgtggccatcaacgagctgaacatcaagctgcaggacaccaacagccagaaggagaagctgaaggaggagctgggcctgatcctggaggagaagtgcgccctgcagagacagctggaggacctggtggaggagctgagcttcagcagagagcagatccagagagccagacagaccatcgccgagcaggagagcaagctgaacgaggcccacaagagcctgagcaccgtggaggacctgaaggccgagatcgtgagcgccagcgagagcagaaaggagctggagctgaagcacgaggccgaggtgaccaactacaagatcaagctggagatgctggagaaggagaagaacgccgtgctggacagaatggccgagagccaggaggccgagctggagagactgagaacccagctgctgttcagccacgaggaggagctgagcaagctgaaggaggacctggagatcgagcacagaatcaacatcgagaagctgaaggacaacctgggcatccactacaagcagcagatcgacggcctgcagaacgagatgagccagaagatcgagaccatgcagttcgagaaggacaacctgatcaccaagcagaaccagctgatcctggagatcagcaagctgaaggacctgcagcagagcctggtgaacagcaagagcgaggagatgaccctgcagatcaacgagctgcagaaggagatcgagatcctgagacaggaggagaaggagaagggcaccctggagcaggaggtgcaggagctgcagctgaagaccgagctgctggagaagcagatgaaggagaaggagaacgacctgcaggagaagttcgcccagctggaggccgagaacagcatcctgaaggacgagaagaagaccctggaggacatgctgaagatccacacccccgtgagccaggaggagagactgatcttcctggacagcatcaagagcaagagcaaggacagcgtgtgggagaaggagatcgagatcctgatcgaggagaacgaggacctgaagcagcagtgcatccagctgaacgaggagatcgagaagcagagaaacaccttcagcttcgccgagaagaacttcgaggtgaactaccaggagctgcaggaggagtacgcctgcctgctgaaggtgaaggacgacctggaggacagcaagaacaagcaggagctggagtacaagagcaagctgaaggccctgaacgaggagctgcacctgcagagaatcaaccccaccaccgtgaagatgaagagcagcgtgttcgacgaggacaagaccttcgtggccgagaccctggagatgggcgaggtggtggagaaggacaccaccgagctgatggagaagctggaggtgaccaagagagagaagctggagctgagccagagactgagcgacctgagcgagcagctgaagcagaagcacggcgagatcagcttcctgaacgaggaggtgaagagcctgaagcaggagaaggagcaggtgagcctgagatgcagagagctggagatcatcatcaaccacaacagagccgagaacgtgcagagctgcgacacccaggtgagcagcctgctggacggcgtggtgaccatgaccagcagaggcgccgagggcagcgtgagcaaggtgaacaagagcttcggcgaggagagcaagatcatggtggaggacaaggtgagcttcgagaacatgaccgtgggcgaggagagcaagcaggagcagctgatcctggaccacctgcccagcgtgaccaaggagagcagcctgagagccacccagcccagcgagaacgacaagctgcagaaggagctgaacgtgctgaagagcgagcagaacgacctgagactgcagatggaggcccagagaatctgcctgagcctggtgtacagcacccacgtggaccaggtgagagagtacatggagaacgagaaggacaaggccctgtgcagcctgaaggaggagctgatcttcgcccaggaggagaagatcaaggagctgcagaagatccaccagctggagctgcagaccatgaagacccaggagaccggcgacgagggcaagcccctgcacctgctgatcggcaagctgcagaaggccgtgagcgaggagtgcagctacttcctgcagaccctgtgcagcgtgctgggcgagtactacacccccgccctgaagtgcgaggtgaacgccgaggacaaggagaacagcggcgactacatcagcgagaacgaggaccccgagctgcaggactacagatacgaggtgcaggacttccaggagaacatgcacaccctgctgaacaaggtgaccgaggagtacaacaagctgctggtgctgcagaccagactgagcaagatctggggccagcagaccgacggcatgaagctggagttcggcgaggagaacctgcccaaggaggagaccgagttcctgagcatccacagccagatgaccaacctggaggacatcgacgtgaaccacaagagcaagctgagcagcctgcaggacctggagaagaccaagctggaggagcaggtgcaggagctggagagcctgatcagcagcctgcagcagcagctgaaggagaccgagcagaactacgaggccgagatccactgcctgcagaagagactgcaggccgtgagcgagagcaccgtgccccccagcctgcccgtggacagcgtggtgatcaccgagagcgacgcccagagaaccatgtaccccggcagctgcgtgaagaagaacatcgacggcaccatcgagttcagcggcgagttcggcgtgaaggaggagaccaacatcgtgaagctgctggagaagcagtaccaggagcagctggaggaggaggtggccaaggtgatcgtgagcatgagcatcgccttcgcccagcagaccgagctgagcagaatcagcggcggcaaggagaacaccgccagcagcaagcaggcccacgccgtgtgccagcaggagcagcactacttcaacgagatgaagctgagccaggaccagatcggcttccagaccttcgagaccgtggacgtgaagttcaaggaggagttcaagcccctgagcaaggagctgggcgagcacggcaaggagatcctgctgagcaacagcgacccccacgacatccccgagagcaaggactgcgtgctgaccatcagcgaggagatgttcagcaaggacaagaccttcatcgtgagacagagcatccacgacgagatcagcgtgagcagcatggacgccagcagacagctgatgctgaacgaggagcagctggaggacatgagacaggagctggtgagacagtaccaggagcaccagcaggccaccgagctgctgagacaggcccacatgagacagatggagagacagagagaggaccaggagcagctgcaggaggagatcaagagactgaacagacagctggcccagagaagcagcatcgacaacgagaacctggtgagcgagagagagagagtgctgctggaggagctggaggccctgaagcagctgagcctggccggcagagagaagctgtgctgcgagctgagaaacagcagcacccagacccagaacggcaacgagaaccagggcgaggtggaggagcagaccttcaaggagaaggagctggacagaaagcccgaggacgtgccccccgagatcctgagcaacgagagatacgccctgcagaaggccaacaacagactgctgaagatcctgctggaggtggtgaagaccaccgccgccgtggaggagaccatcggcagacacgtgctgggcatcctggacagaagcagcaagagccagagcagcgccagcctgatctggagaagcgaggccgaggccagcgtgaagagctgcgtgcacgaggagcacaccagagtgaccgacgagagcatccccagctacagcggcagcgacatgcccagaaacgacatcaacatgtggagcaaggtgaccgaggagggcaccgagctgagccagagactggtgagaagcggcttcgccggcaccgagatcgaccccgagaacgaggagctgatgctgaacatcagcagcagactgcaggccgccgtggagaagctgctggaggccatcagcgagaccagcagccagctggagcacgccaaggtgacccagaccgagctgatgagagagagcttcagacagaagcaggaggccaccgagagcctgaagtgccaggaggagctgagagagagactgcacgaggagagcagagccagagagcagctggccgtggagctgagcaaggccgagggcgtgatcgacggctacgccgacgagaagaccctgttcgagagacagatccaggagaagaccgacatcatcgacagactggagcaggagctgctgtgcgccagcaacagactgcaggagctggaggccgagcagcagcagatccaggaggagagagagctgctgagcagacagaaggaggccatgaaggccgaggccggccccgtggagcagcagctgctgcaggagaccgagaagctgatgaaggagaagctggaggtgcagtgccaggccgagaaggtgagagacgacctgcagaagcaggtgaaggccctggagatcgacgtggaggagcaggtgagcagattcatcgagctggagcaggagaagaacaccgagctgatggacctgagacagcagaaccaggccctggagaagcagctggagaagatgagaaagttcctggacgagcaggccatcgacagagagcacgagagagacgtgttccagcaggagatccagaagctggagcagcagctgaaggtggtgcccagattccagcccatcagcgagcaccagaccagagaggtggagcagctggccaaccacctgaaggagaagaccgacaagtgcagcgagctgctgctgagcaaggagcagctgcagagagacatccaggagagaaacgaggagatcgagaagctggagttcagagtgagagagctggagcaggccctgctggtggaggacagaaagcacttcggcgccgtggaggccaagcccgagctgagcctggaggtgcagctgcaggccgagagagacgccatcgacagaaaggagaaggagatcaccaacctggaggagcagctggagcagttcagagaggagctggagaacaagaacgaggaggtgcagcagctgcacatgcagctggagatccagaagaaggagagcaccaccagactgcaggagctggagcaggagaacaagctgttcaaggacgacatggagaagctgggcctggccatcaaggagagcgacgccatgagcacccaggaccagcacgtgctgttcggcaagttcgcccagatcatccaggagaaggaggtggagatcgaccagctgaacgagcaggtgaccaagctgcagcagcagctgaagatcaccaccgacaacaaggtgatcgaggagaagaacgagctgatcagagacctggagacccagatcgagtgcctgatgagcgaccaggagtgcgtgaagagaaacagagaggaggagatcgagcagctgaacgaggtgatcgagaagctgcagcaggagctggccaacatcggccagaagaccagcatgaacgcccacagcctgagcgaggaggccgacagcctgaagcaccagctggacgtggtgatcgccgagaagctggccctggagcagcaggtggagaccgccaacgaggagatgaccttcatgaagaacgtgctgaaggagaccaacttcaagatgaaccagctgacccaggagctgttcagcctgaagagagagagagagagcgtggagaagatccagagcatccccgagaacagcgtgaacgtggccatcgaccacctgagcaaggacaagcccgagctggaggtggtgctgaccgaggacgccctgaagagcctggagaaccagacctacttcaagagcttcgaggagaacggcaagggcagcatcatcaacctggagaccagactgctgcagctggagagcaccgtgagcgccaaggacctggagctgacccagtgctacaagcagatcaaggacatgcaggagcagggccagttcgagaccgagatgctgcagaagaagatcgtgaacctgcagaagatcgtggaggagaaggtggccgccgccctggtgagccagatccagctggaggccgtgcaggagtacgccaagttctgccaggacaaccagaccatcagcagcgagcccgagagaaccaacatccagaacctgaaccagctgagagaggacgagctgggcagcgacatcagcgccctgaccctgagaatcagcgagctggagagccaggtggtggagatgcacaccagcctgatcctggagaaggagcaggtggagatcgccgagaagaacgtgctggagaaggagaagaagctgctggagctgcagaagctgctggagggcaacgagaagaagcagagagagaaggagaagaagagaagcccccaggacgtggaggtgctgaagaccaccaccgagctgttccacagcaacgaggagagcggcttcttcaacgagctggaggccctgagagccgagagcgtggccaccaaggccgagctggccagctacaaggagaaggccgagaagctgcaggaggagctgctggtgaaggagaccaacatgaccagcctgcagaaggacctgagccaggtgagagaccacctggccgaggccaaggagaagctgagcatcctggagaaggaggacgagaccgaggtgcaggagagcaagaaggcctgcatgttcgagcccctgcccatcaagctgagcaagagcatcgccagccagaccgacggcaccctgaagatcagcagcagcaaccagaccccccagatcctggtgaagaacgccggcatccagatcaacctgcagagcgagtgcagcagcgaggaggtgaccgagatcatcagccagttcaccgagaagatcgagaagatgcaggagctgcacgccgccgagatcctggacatggagagcagacacatcagcgagaccgagaccctgaagagagagcactacgtggccgtgcagctgctgaaggaggagtgcggcaccctgaaggccgtgatccagtgcctgagaagcaaggagggcagcagcatccccgagctggcccacagcgacgcctaccagaccagagagatctgcagcagcgacagcggcagcgactggggccagggcatctacctgacccacagccagggcttcgacatcgccagcgagggcagaggcgaggagagcgagagcgccaccgacagcttccccaagaagatcaagggcctgctgagagccgtgcacaacgagggcatgcaggtgctgagcctgaccgagagcccctacagcgacggcgaggaccacagcatccagcaggtgagcgagccctggctggaggagagaaaggcctacatcaacaccatcagcagcctgaaggacctgatcaccaagatgcagctgcagagagaggccgaggtgtacgacagcagccagagccacgagagcttcagcgactggagaggcgagctgctgctggccctgcagcaggtgttcctggaggagagaagcgtgctgctggccgccttcagaaccgagctgaccgccctgggcaccaccgacgccgtgggcctgctgaactgcctggagcagagaatccaggagcagggcgtggagtaccaggccgccatggagtgcctgcagaaggccgacagaagaagcctgctgagcgagatccaggccctgcacgcccagatgaacggcagaaagatcaccctgaagagagagcaggagagcgagaagcccagccaggagctgctggagtacaacatccagcagaagcagagccagatgctggagatgcaggtggagctgagcagcatgaaggacagagccaccgagctgcaggagcagctgagcagcgagaagatggtggtggccgagctgaagagcgagctggcccagaccaagctggagctggagaccaccctgaaggcccagcacaagcacctgaaggagctggaggccttcagactggaggtgaaggacaagaccgacgaggtgcacctgctgaacgacaccctggccagcgagcagaagaagagcagagagctgcagtgggccctggagaaggagaaggccaagctgggcagaagcgaggagagagacaaggaggagctggaggacctgaagttcagcctggagagccagaagcagagaaacctgcagctgaacctgctgctggagcagcagaagcagctgctgaacgagagccagcagaagatcgagagccagagaatgctgtacgacgcccagctgagcgaggagcagggcagaaacctggagctgcaggtgctgctggagagcgagaaggtgagaatcagagagatgagcagcaccctggacagagagagagagctgcacgcccagctgcagagcagcgacggcaccggccagagcagaccccccctgcccagcgaggacctgctgaaggagctgcagaagcagctggaggagaagcacagcagaatcgtggagctgctgaacgagaccgagaagtacaagctggacagcctgcagaccagacagcagatggagaaggacagacaggtgcacagaaagaccctgcagaccgagcaggaggccaacaccgagggccagaagaagatgcacgagctgcagagcaaggtggaggacctgcagagacagctggaggagaagagacagcaggtgtacaagctggacctggagggccagagactgcagggcatcatgcaggagttccagaagcaggagctggagagagaggagaagagagagagcagaagaatcctgtaccagaacctgaacgagcccaccacctggagcctgaccagcgacagaaccagaaactgggtgctgcagcagaagatcgagggcgagaccaaggagagcaactacgccaagctgatcgagatgaacggcggcggcaccggctgcaaccacgagctggagatgatcagacagaagctgcagtgcgtggccagcaagctgcaggtgctgccccagaaggccagcgagagactgcagttcgagaccgccgacgacgaggacttcatctgggtgcaggagaacatcgacgagatcatcctgcagctgcagaagctgaccggccagcagggcgaggagcccagcctggtgagccccagcaccagctgcggcagcctgaccgagagactgctgagacagaacgccgagctgaccggccacatcagccagctgaccgaggagaagaacgacctgagaaacatggtgatgaagctggaggagcagatcagatggtacagacagaccggcgccggcagagacaacagcagcagattcagcctgaacggcggcgccaacatcgaggccatcatcgccagcgagaaggaggtgtggaacagagagaagctgaccctgcagaagagcctgaagagagccgaggccgaggtgtacaagctgaaggccgagctgagaaacgacagcctgctgcagaccctgagccccgacagcgagcacgtgaccctgaagagaatctacggcaagtacctgagagccgagagcttcagaaaggccctgatctaccagaagaagtacctgctgctgctgctgggcggcttccaggagtgcgaggacgccaccctggccctgctggccagaatgggcggccagcccgccttcaccgacctggaggtgatcaccaacagacccaagggcttcaccagattcagaagcgccgtgagagtgagcatcgccatcagcagaatgaagttcctggtgagaagatggcacagagtgaccggcagcgtgagcatcaacatcaacagagacggcttcggcctgaaccagggcgccgagaagaccgacagcttctaccacagcagcggcggcctggagctgtacggcgagcccagacacaccacctacagaagcagaagcgacctggactacatcagaagccccctgcccttccagaacagataccccggcacccccgccgacttcaaccccggcagcctggcctgcagccagctgcagaactacgacccctag

SEQ ID NO: 306448 - DNA, 4932 bp, Artificial Sequence
  derived and/or modified sequence
atggaggatgaggagaggcagaagaagcttgaagccggcaaggctaagatagaggagcttagcctggccttcctcgtacgccagctcgcacaattccgtcagcgcaaggctcagtcagacggccagtctccttccaagaaacaaaaaaaaaaacgcaagacatcgagtagcaaacatgatgtctccgcgcatcacgatctcaacatcgaccagtctcagtgcaacgaaatgtacatcaattcttctcagcgagtcgaatctaccgtaataccagagtccacgataatgcgcactcttcatagcggcgagatcacatcacatgaacagggctttagtgtggagctggagtctgaaatctccacaacagccgatgattgctctagtgaggtgaacggatgtagtttcgtgatgcgaaccggcaagccaaccaacctgctgagggaggaagagttcggagtggatgatagttatagtgagcaaggcgcccaggattcaccgacccacctggagatgatggagagtgaactggcaggcaaacagcatgagatagaggagctgaaccgcgaactggaagagatgcgagtgacatacggcaccgagggtttgcaacaactgcaagagttcgaggctgccattaagcagagggatgggattatcacacagctgactgccaatctgcagcaggcccggagagaaaaggatgagactatgcgcgaattcctggagctgaccgagcagagtcagaagctgcagatccagtttcagcaactccaagcctccgaaacactgaggaactctacacacagctcgacagccgccgaccttctgcaagcgaagcagcagatcctgactcaccagcagcaactcgaagagcaagatcaccttctggaagattatcagaagaaaaaggaggacttcactatgcagatctcatttctgcaggagaaaatcaaggtatacgagatggaacaagacaaaaaggtagaaaactccaacaaggaggagatccaagagaaggagacaatcatcgaggagcttaatacaaaaattattgaagaagaaaaaaagacactcgaactgaaagataaacttacaactgcagacaaacttcttggcgagttacaggagcagatcgtgcaaaaaaatcaggagataaaaaacatgaagcttgagctgactaatagcaaacagaaggagcggcaatcatctgaggagataaagcagcttatgggtactgtggaggagctgcagaagagaaaccacaaagactcccagtttgaaaccgatatcgttcagcgaatggagcaggagacccagcgcaagctagaacagctgagggcggaactggacgagatgtatgggcagcagattgtgcagatgaaacaagagctcattcggcagcacatggctcagatggaggagatgaaaacgaggcataagggagagatggagaacgccctcagatcttacagcaacattacagtcaatgaggaccagatcaagctcatgaatgtggccatcaacgagctgaatatcaaactgcaggataccaatagccagaaagaaaaactgaaggaggaactcggcctaattctagaagagaagtgcgccctacagagacaattggaagatctggttgaggaattgtcattttcccgggagcagatccagcgcgctaggcagactatcgccgagcaggaatcaaagctcaacgaggctcataaaagcctgagcaccgtggaggatcttaaagccgaaattgtttccgccagcgagtccagaaaagagttggagcttaaacatgaagccgaagtaacaaactacaaaatcaagctcgagatgctggagaaagagaagaatgccgtgctggacaggatggccgagtctcaggaggcagagctcgagagactaaggacccagttgctcttctcacatgaggaggagctttccaagttgaaagaggacttagaaatagaacaccgcatcaatatcgaaaagctgaaagacaatctggggatacattataaacaacagattgacggcttacagaacgaaatgtctcaaaagattgagactatgcagtttgaaaaggacaaccttattaccaagcagaaccaattaatcctggagatctctaagctgaaagatttacagcagtctctggtaaactcaaagtccgaggagatgactttgcagatcaatgaactgcagaaggagatagaaattctgaggcaagaggagaaggagaaaggaacgttagagcaagaagtgcaggagctccagcttaaaaccgaactgttggaaaaacagatgaaagaaaaggagaatgacctacaagaaaagttcgcccaattggaggccgaaaatagcatactaaaggacgagaagaaaacactcgaggatatgctcaagattcacacacctgtctcgcaggaagagaggttgatcttcctggacagcatcaagagcaaatctaaggactctgtgtgggagaaggagatagagatcctgatcgaagaaaacgaagatctcaaacaacagtgtatccagctcaatgaggaaatcgaaaagcaacgcaacaccttcagctttgccgagaaaaacttcgaagtcaattaccaggagctgcaggaagaatatgcctgcctcctcaaagttaaggatgatcttgaagatagtaagaacaaacaggagctcgagtataagtcaaagctgaaagccctgaacgaggagctgcatctgcagaggatcaatcctactacagtgaagatgaaaagcagcgtcttcgacgaggataagacgtttgttgccgagaccctagaaatgggagaggtggtggaaaaagacacaaccgaactcatggagaaactcgaggtgaccaagagagagaagctggaactgtctcagcgcctgagtgacttgtccgagcagcttaagcagaaacatggggagatctcctttctcaatgaggaggtgaaaagccttaaacaagaaaaggaacaggtctcactaagatgcagagaactggagattatcatcaaccacaaccgcgcggagaacgtgcagagctgtgacacacaggtgagttcccttctggatggggtcgtgacgatgaccagccgcggtgcggaagggagtgtgtccaaggtgaacaagtcatttggggaagaatcaaaaatcatggtggaggacaaggtaagctttgaaaatatgactgtgggggaagagtcaaaacaggaacaactgatcctggatcatctcccctctgtgacaaaggagagtagccttagggctacccaacctagcgagaatgataagttgcagaaggaactgaacgtactcaaatctgaacaaaacgacctgcgtctgcagatggaggcccagagaatctgcctcagtctcgtgtatagtacccacgtggaccaagttagagaatacatggagaacgaaaaggataaggccctgtgctctctgaaggaagagctcattttcgcccaagaagagaagattaaggagctgcagaagattcatcagcttgagctgcaaacgatgaagacgcaggaaaccggcgacgaaggaaagcctcttcatctcctgattggcaagttgcagaaagccgtcagtgaggagtgttcctactttctgcagaccctgtgctcagtgctaggcgagtattacaccccagccctaaagtgcgaagtgaatgctgaggacaaggagaactcgggtgactacatttccgagaacgaggaccccgaactccaggactatcggtacgaggtccaggacttccaggagaatatgcacacccttcttaataaagtgacggaggagtacaacaagcttctggtgttgcagacccgcctcagtaagatctggggacagcaaacggacggaatgaagcttgaattcggagaggagaacctccctaaagaggagaccgaatttctctccattcatagccagatgacaaaccttgaggatattgatgtgaaccataagtctaaattgagctctctgcaggatcttgagaagacgaaactcgaggaacaggtacaggaactggaatcccttatctcatcactccaacagcaactgaaagagacagagcagaactacgaagcagaaatacattgtttgcagaagcggctgcaggccgtctccgagtccactgtgccgcctagccttccagttgactcagttgtgatcaccgaatctgacgctcaaaggacgatgtatcctggttcttgcgtaaaaaagaatattgacggtacaatcgagttctctggagaattcggtgtcaaagaggagactaatatagtcaagttactggaaaaacagtatcaggaacaacttgaggaagaggtggctaaggttattgttagtatgtcaattgccttcgctcaacagactgagttgagtaggatcagcgggggtaaagaaaatacagctagctcgaagcaagcacacgccgtgtgtcagcaggaacagcattattttaatgaaatgaaactgagccaggatcagattggcttccaaacctttgagacggtcgatgtgaaatttaaggaggagttcaagcctctgagtaaggagcttggtgagcatggaaaggagattctcttgtcaaattccgatccacatgatatcccggagagtaaagattgtgtgctgaccatcagcgaggaaatgttcagcaaggacaagacatttattgtccgtcagagtatacatgatgaaatttcagtttcttccatggatgcgtcgaggcagttaatgctgaacgaagaacagctggaggacatgcgtcaagaactcgtgagacagtatcaggagcatcaacaggccaccgaactgctcaggcaagcacacatgcgtcagatggaacggcagcgggaggaccaggagcagcttcaagtgagagtgctgtag

SEQ ID NO: 306449 - DNA, 4932 bp, Artificial Sequence
  derived and/or modified sequence
atggaggatgaggagcggcagaagaagctggaggccggcaaggccaagattgaggagctgagcctggccttcctggtgcggcagctggcccagttccggcagaggaaggcccagagtgatggccagagccccagcaagaagcagaagaagaagaggaagaccagcagcagcaagcatgatgtgtctgcccaccacgacctgaacatcgaccagagccagtgcaatgagatgtacatcaacagcagccagagggtggagagcaccgtcatccctgagagcaccatcatgaggaccctgcacagcggggagatcaccagccatgagcagggcttctctgtggagctggagagcgagatcagcaccacagcagatgactgcagcagcgaggtgaatggctgcagctttgtgatgaggacaggcaagcccaccaacctgctgcgggaggaggagtttggagtggatgacagctacagcgagcagggcgcccaggacagccccacccacctggagatgatggagagcgagctggccggcaagcagcatgaaattgaggagctgaaccgggagctggaggagatgagggtgacctatggaacagagggcctgcagcagctgcaggagtttgaggccgccatcaagcagagagatggcatcatcacccagctgacagccaacctgcagcaggcccggcgggagaaggatgagaccatgagggagttcctggagctgacagagcagagccagaagctgcagatccagttccagcagctgcaggccagcgagaccctgaggaacagcacccacagcagcacagctgctgacctgctgcaggccaagcagcagatcctgacccaccagcagcagctggaggagcaggaccacctgctggaggactaccagaagaagaaggaggacttcaccatgcagatctccttcctgcaggagaagatcaaggtgtatgagatggagcaggacaagaaggtggagaacagcaacaaggaggagatccaggagaaggagaccatcatcgaggagctgaacaccaagatcatcgaggaggagaagaagaccctggagctgaaggacaagctgaccacagctgacaagctgctgggggagctgcaggagcagatcgtgcagaagaaccaggagatcaagaacatgaagctggagctgaccaacagcaagcagaaggagcggcagagcagcgaggagatcaagcagctgatgggcaccgtggaggagctgcagaagaggaaccacaaggacagccagtttgaaacagacatcgtgcagaggatggagcaggagacccagaggaagctggagcagctgcgggcagagctggatgagatgtatggccagcagatcgtgcagatgaagcaggagctgatccggcagcacatggcccagatggaggagatgaagaccaggcacaagggggagatggagaatgccctgcggagctacagcaacatcaccgtgaatgaagaccagatcaagctgatgaatgtggccatcaatgagctgaacatcaagctgcaggacaccaacagccagaaggagaagctgaaggaggagctgggcctcatcctggaggagaagtgtgccctgcagaggcagctggaggacctggtggaggagctgtccttcagccgggagcagatccagagggcccggcagaccatcgccgagcaggagagcaagctgaatgaggcccacaagagcctgagcacagtggaggacctgaaggccgagatcgtgtctgccagcgagagcaggaaggagctggagctgaagcatgaagctgaggtgaccaactacaagatcaagctggagatgctggagaaggagaagaatgctgtgctggacaggatggccgagagccaggaggccgagctggagcggctgcggacccagctgctcttcagccatgaggaggagctgagcaagctgaaggaggacctggagattgagcaccgcatcaacatcgagaagctgaaggacaacctgggcatccactacaagcagcagattgatggcctgcagaatgagatgagccagaagattgagaccatgcagtttgagaaggacaacctgatcaccaagcagaaccagctgatcctggagatcagcaagctgaaggacctgcagcagagcctggtgaacagcaagtctgaggagatgaccctgcagatcaatgagctgcagaaggagattgagatcctgcggcaggaggagaaggagaagggcaccctggagcaggaggtgcaggagctgcagctgaagacagagctgctggagaagcagatgaaggagaaggaaaatgacctgcaggagaagtttgcccagctggaggccgagaacagcatcctgaaggatgagaagaagaccctggaggacatgctgaagatccacacccctgtgtcccaggaggagcggctcatcttcctggacagcatcaagagcaagagcaaggacagcgtgtgggagaaggagattgagatcctgattgaggagaatgaagacctgaagcagcagtgcatccagctgaatgaggagattgagaagcagaggaacaccttctcctttgctgagaagaactttgaggtgaactaccaggagctgcaggaggagtatgcctgcctgctgaaggtgaaggatgacctggaggacagcaagaacaagcaggagctggagtacaagagcaagctgaaggccctgaatgaggagctgcacctgcagaggatcaaccccaccaccgtgaagatgaagagctctgtgtttgatgaggacaagacctttgtggccgagaccctggagatgggagaggtggtggagaaggacaccacagagctgatggagaagctggaggtgaccaagcgggagaagctggagctgagccagaggctgagtgacctgtctgagcagctgaagcagaagcacggggagatctccttcctgaatgaggaggtgaagagcctgaagcaggagaaggagcaggtgtccctgcgctgccgggagctggagatcatcatcaaccacaacagagcagaaaatgtgcagagctgtgacacccaggtgagcagcctgctggatggagtggtgaccatgaccagcagaggagctgagggctctgtgtccaaggtgaacaagagctttggagaggagagcaagatcatggtggaggacaaggtgtcctttgagaacatgacagtgggggaggagagcaagcaggagcagctgatcctggaccacctgcccagcgtgaccaaggagagcagcctgcgggccacccagcccagtgaaaatgacaagctgcagaaggagctgaatgtgctgaagtctgagcagaatgacctgcggctgcagatggaggcccagaggatctgcctgagcctggtgtacagcacccacgtggaccaggtgcgggagtacatggagaatgagaaggacaaggccctgtgcagcctgaaggaggagctgatctttgcccaggaggagaagatcaaggagctgcagaagatccaccagctggagctgcagaccatgaagacccaggagactggagatgagggcaagcccctgcacctgctgattggcaagctgcagaaggctgtgtctgaggagtgcagctacttcctgcagaccctgtgcagcgtgctgggggagtactacaccccagccctgaagtgtgaggtgaatgctgaggacaaggagaacagcggggactacatcagtgaaaatgaagatcctgagctgcaggactaccgctatgaggtgcaggacttccaggagaacatgcacaccctgctgaacaaggtgacagaggagtacaacaagctgctggtgctgcagacccggctgagcaagatctggggccagcagacagatggcatgaagctggagtttggagaggagaacctgcccaaggaggagacagagttcctgagcatccacagccagatgaccaacctggaggacattgatgtgaaccacaagagcaagctgagcagcctgcaggacctggagaagaccaagctggaggagcaggtgcaggagctggagagcctcatcagcagcctgcagcagcagctgaaggagacagagcagaactatgaagctgagatccactgcctgcagaagaggctgcaggccgtgtctgagagcacagtgccccccagcctgcctgtggacagcgtggtgatcacagaaagtgatgcccagaggaccatgtacccaggcagctgtgtgaagaagaacattgatggcaccatcgagttctctggagaatttggagtgaaggaggagaccaacatcgtgaagctgctggagaagcagtaccaggagcagctggaggaggaggtggccaaggtgattgtgtccatgagcatcgcctttgcccagcagacagagctgagccgcatcagcggcggcaaggaaaatacagccagcagcaagcaggcccatgctgtgtgccagcaggagcagcactacttcaatgagatgaagctgagccaggaccagatcggcttccagacctttgaaacagtggatgtgaagttcaaggaggagttcaagcccctgagcaaggagctgggggagcacggcaaggagatcctgctgagcaacagcgacccccatgacatccctgagagcaaggactgtgtgctgaccatcagcgaggagatgttcagcaaggacaagaccttcatcgtgcggcagagcatccatgatgagatctctgtgtcctccatggatgccagccggcagctgatgctgaatgaggagcagctggaggacatgaggcaggagctggtgcggcagtaccaggagcaccagcaggccacagagctgctgcggcaggcccacatgaggcagatggagcggcagcgggaggaccaggagcagctgcaggtgcgggtgctgtag

SEQ ID NO: 306450 - DNA, 4932 bp, Artificial Sequence
  derived and/or modified sequence
atggaggacgaggagcggcagaagaagctggaggccggcaaggccaagattgaggaacttagcctggcattcctggtacgtcagcttgctcagttcaggcagagaaaagcccagagcgatggccagtccccatccaagaagcagaagaaaaagcgaaagaccagttcttccaagcatgatgtctcagcacaccatgaccttaacatcgatcagtcccagtgtaatgaaatgtacatcaatagctcacagagagtcgaaagcactgtgattcccgagagtactatcatgcggacccttcacagtggcgaaataacttcgcacgagcaggggttttccgtggaacttgagtcagagatcagtacgacagcagatgactgtagttccgaagtcaacggctgtagtttcgtgatgcgtaccggcaaacccacaaatttactgcgggaggaagaattcggtgtggatgacagctactctgagcagggagctcaggactcacccacccacctcgagatgatggagtccgaactggccggcaaacagcacgaaatcgaggaactgaatcgagagctcgaagagatgagggtgacttacggtactgagggccttcagcaactccaggagtttgaggcagccatcaaacaacgggacggaataatcacccagttgaccgcaaacctccagcaggcccgtagagagaaagacgagacaatgagggagttcctggagctgaccgagcaaagtcagaagctgcagatccagttccagcagctacaggcatcagagacccttcgcaatagcactcattcgtctacagccgctgaccttcttcaggcgaagcagcagattttaacccaccagcagcaactggaggagcaggaccatctgctcgaggactaccagaaaaaaaaggaagactttacgatgcagatttcttttcttcaggagaagattaaagtgtatgagatggaacaggacaagaaagtggagaactctaataaggaggagattcaggaaaaggagacaattatcgaggagcttaacaccaagattatcgaagaagagaaaaagaccttagagctgaaagacaagctcacaactgcggataaattgttaggcgagttacaagagcaaatagtgcagaagaaccaggagattaagaacatgaagctcgaactcactaattccaagcagaaagagaggcagagcagtgaagagataaagcaactcatgggtaccgttgaagagttgcagaagcgcaaccataaagactcccaattcgagacagacatcgtgcagaggatggaacaggagacacagaggaagttagagcagctgagagctgagctggatgagatgtacggccagcagatcgtgcagatgaaacaggagctaatacgccagcatatggcccagatggaggagatgaagactcgccacaagggcgaaatggagaatgccctgagatcatacagcaacattactgtcaatgaggatcagatcaaactgatgaacgtggccattaacgagttgaacattaagctacaggataccaatagtcagaaggaaaagctgaaggaggagctaggcctgatattggaagaaaaatgtgcgttgcaacggcagttggaagatcttgtggaagaattgtctttttcaagagagcagatccagagggctaggcagactatagctgaacaagaaagtaagctgaatgaagcacacaaaagcctgtccaccgtagaggatctgaaagccgagattgtgagtgctagcgagtctcgaaaggaactcgagcttaagcatgaagcagaggtgacgaactataagatcaagctggaaatgttagagaaagaaaaaaacgcggtcctcgaccgtatggctgagtcccaggaagccgagctggagcgcttaaggacacaattgctgttttcccacgaggaggagctgagcaaactgaaggaggacttagagattgagcacagaataaatatcgaaaagttaaaagataatctgggtatccattataaacaacagattgatgggctgcagaatgaaatgagccagaagatcgagacgatgcagtttgagaaagataacctgataactaagcagaatcaactcattctggagatctcaaagctgaaggacctccagcagagtctggtgaactctaagtccgaggagatgacccttcagattaacgaattgcaaaaggagatcgagatcctgcgccaggaggaaaaggagaaaggaactctggaacaggaggtgcaggagctgcagctcaagacggaactgctcgagaaacagatgaaagagaaagaaaacgacttacaggagaagttcgcccagcttgaggctgaaaattccattttgaaggatgagaagaaaactttggaggacatgctgaagattcatacaccagtttcacaagaagagcggttaatcttcctggactccataaagagcaagtcaaaagactccgtttgggaaaaagaaatcgaaatactcatagaggaaaatgaggacctcaagcaacagtgtatacaactgaatgaggaaatcgagaaacagcgtaatacattctcatttgctgagaagaacttcgaagttaactaccaggagctgcaagaggagtatgcctgtctcttaaaggtaaaggacgatttagaggactctaagaacaaacaggagcttgaatataaatcaaagctgaaagcactgaacgaggaactgcacctgcagaggatcaaccctaccacagttaagatgaagagcagcgtgtttgatgaagataagaccttcgtcgcagaaacactcgaaatgggagaagtcgtggagaaggacaccaccgaactgatggagaaactggaggtaaccaaacgtgaaaaactggagctttctcaacgtctgtccgacttgtccgagcagctgaagcagaagcacggggagatatcctttctaaatgaggaagttaagtcgctgaagcaggagaaagagcaggttagtctgaggtgtagggagcttgaaatcattattaaccacaatcgagccgagaacgtgcaatcctgcgacactcaggtatcaagcttgctcgatggagtcgtgacaatgactagccgaggcgctgaaggctctgtgagcaaggttaataaatcgtttggagaggagagcaagatcatggtggaagataaggtgagctttgaaaatatgaccgtgggagaggagagcaaacaggagcagctgattctggatcatctcccatccgtaacaaaggaatcttcactgagagccacccaaccctccgagaacgataagctgcagaaagaactcaacgtgttaaagagcgagcagaacgacttgagactgcaaatggaagcccagaggatctgcctatctctggtttactcgacacatgttgaccaggtaagagaatacatggaaaacgagaaggacaaagcgctgtgttctctgaaagaggagctgatctttgcccaggaagaaaagattaaggaactgcagaagatccaccagctggagctccaaacaatgaaaacccaggaaaccggtgatgaaggaaagcccctgcacctgctgatcggtaaattacagaaggccgtaagcgaggagtgctcttattttctccagacactgtgttcggttctaggcgaatattatacccctgctctaaaatgtgaagtcaatgccgaagataaagaaaattccggtgactacatcagcgagaacgaagaccccgagctccaggattaccggtacgaggtacaagatttccaggagaatatgcatacactcctgaacaaggtgacagaggagtacaataagctcctagtcctgcagaccaggctcagcaaaatttgggggcagcagacagacggaatgaagctggaattcggcgaagagaatcttccgaaagaggagactgagttcctatctatccactcccagatgaccaacctagaagacatcgacgtaaatcacaaatctaagcttagctcactgcaggatctggagaaaactaagctggaggaacaggtacaggaactggaaagtctcatatccagtctgcagcaacagcttaaggaaactgagcagaactacgaggctgaaatccattgcctgcagaagcgcctgcaggccgtgagcgaaagtaccgtgccccccagtctccccgtggacagtgtcgttatcacagagtcagacgcacagagaacaatgtaccccggcagttgcgtgaagaagaacatagacggtacgatcgagttttccggtgaatttggagtgaaggaggagacaaatatcgtgaaattgcttgaaaagcagtatcaggaacagttagaagaagaggtcgccaaggtaatagtatccatgagcattgcttttgctcagcagacagagctgtcacggatttcaggaggaaaggaaaataccgcttcaagtaagcaggctcatgccgtgtgccagcaggaacagcactacttcaatgagatgaaactctcccaagatcagattggtttccagaccttcgagacagttgatgtcaaattcaaggaggagttcaagccgctctcaaaggagcttggcgaacacggcaaggagatcctgttatcaaatagcgatccgcacgacatcccagagagcaaggattgcgtactgaccatttctgaagaaatgttttccaaagacaagaccttcatagtgagacagagtatccacgatgagattagcgtgtcatctatggacgctagtaggcagctcatgctgaacgaggaacagcttgaggacatgagacaggagttagtgcggcagtatcaggagcatcagcaggccactgagcttctacgccaggctcacatgcgccagatggagcggcagcgggaagatcaggaacagttgcaagttcgagtgctgtag

SEQ ID NO: 306451 - DNA, 4932 bp, Artificial Sequence
  derived and/or modified sequence
atggaggatgaggaacggcagaaaaaactggaagctgggaaggccaaaattgaggagctgagtttagcttttctcgtgagacaactcgcccagtttcggcagcgcaaggcacagtctgacggacagtctcctagtaaaaagcagaagaagaaaagaaaaaccagtagttctaaacatgatgtttctgctcatcatgacctgaatatagatcagtcccagtgtaatgagatgtacataaattcaagccagagggtggagagtaccgttatcccagagagcacaattatgaggaccctacactctggtgaaattacctcccatgagcaggggttctcagtcgagctggaatccgagattagcactacggcagatgattgtagttctgaggttaatggctgctcatttgtgatgaggaccggaaaacccaccaatctgctccgcgaggaagaattcggcgtcgacgatagttactccgaacagggtgcgcaggactcacctacacacttggagatgatggagtccgaattggccggaaagcagcatgaaattgaggagctcaaccgcgagttggaagagatgcgagtcacctatggaactgaagggctccaacagcttcaagagttcgaggctgccatcaaacaacgcgatggcatcatcacccaattgaccgccaaccttcaacaagctcgcagagagaaagacgagaccatgagagagttcctagagctaaccgagcagtctcaaaagctccagattcagtttcaacagctccaggcgagcgaaacactgaggaactcaactcattctagcacagccgcagatctgttgcaggctaaacagcagatactgacacatcaacaacagctggaagaacaggaccacctgcttgaagattaccagaagaaaaaggaggattttactatgcagatctcgtttcttcaggagaaaatcaaagtctacgagatggaacaagataagaaagtggaaaactcaaacaaggaggagatccaggagaaagaaacaattatagaggaactcaataccaagattatagaagaggaaaaaaagacactggaacttaaggacaaactgactaccgcagataaactcctgggggagttacaggagcagatcgtgcagaagaaccaagagatcaagaacatgaagttggaattaactaactccaagcaaaaggagcgccagagctccgaggagatcaagcagttaatgggtacggtcgaagaactgcagaagagaaatcacaaagattcccagttcgaaaccgatatcgtccagagaatggagcaagaaacccagaggaaacttgaacagctgcgcgctgaactggacgagatgtacgggcagcaaatcgtgcaaatgaaacaagaactaattcgccagcacatggcccaaatggaggaaatgaagactcggcacaaaggcgaaatggagaacgccttgagaagttactctaatataacagttaacgaagatcagataaagttgatgaatgtggccattaatgagctgaacattaagctgcaggatacgaactcacagaaagaaaagttgaaagaggagctaggattgatcctagaggaaaaatgtgcgctgcagagacagttggaggatctggtggaagaactgtcttttagccgtgagcagatccagcgcgctaggcagaccatcgccgaacaagagagcaaacttaacgaagcccataagtccctgtctacagtggaagatttaaaggctgaaattgtcagcgcttccgagtctcgtaaagagctagagctcaagcacgaggctgaagttaccaactataaaatcaaactggagatgctggagaaagaaaagaatgctgtccttgatcgaatggccgagtcccaggaggcagagctcgagagattaaggacacaactgttgttctcacacgaggaagagctgtcaaaactgaaggaggatttggaaatcgaacacagaatcaatatcgagaagctgaaggataacctgggaatccactacaagcaacaaatagatggactccaaaacgagatgtcacagaagattgagaccatgcagtttgaaaaagacaacctgatcactaaacagaaccagcttattctggagatctctaaacttaaggatctccagcagtctctggtgaattcgaagtccgaggagatgaccttacagattaatgagctccagaaggaaatcgaaattctgcgacaggaagaaaaggagaagggtacgctggaacaggaagtacaggagctgcagctgaagaccgagctactggaaaagcagatgaaagagaaagagaacgacctgcaggagaagtttgctcagctcgaggcggaaaactcaattctaaaggacgaaaaaaaaactctggaagatatgctcaaaatccatacacccgtgtcacaagaagaaaggttgatttttctggacagtatcaagagtaagtccaaggattcggtgtgggagaaagaaatagagatcctgatcgaggagaacgaagatctgaagcaacagtgtatccagctcaacgaggaaatcgagaagcagcggaatacttttagctttgctgaaaagaactttgaggttaactatcaggaactacaagaggaatacgcctgccttctaaaagtgaaagacgaccttgaggattccaaaaacaagcaggaactcgagtacaaatctaaacttaaggccctgaatgaagaactccatcttcaacgcataaatccaactaccgtgaagatgaagagtagcgtttttgatgaggacaaaacctttgtagctgagacccttgagatgggcgaggtggtggagaaggatacaacagagttaatggaaaaactcgaagtaactaagcgggagaaattggagctgtcccagaggctgagcgatttatccgagcagctcaagcagaagcacggagaaatctcgtttctcaacgaggaggtgaaatcactcaagcaagagaaagagcaagtatctcttagatgccgtgagctggagattataatcaaccacaacagagctgaaaacgtccagagctgcgacactcaggtgtcaagtctcctggatggtgtcgtcaccatgacaagccgaggtgccgaaggcagtgtgtccaaggtgaacaaaagcttcggggaggaatccaaaattatggttgaggataaggtatcttttgaaaatatgacggtcggcgaagagagcaaacaggagcaattgattttagaccacctcccatcagttacaaaggagtcttctctcagagcaactcaacctagcgaaaatgacaagttgcagaaagaacttaacgtgctgaaaagcgaacagaatgacctgaggctccagatggaagctcagcgcatttgcctgtctttggtctactcgacacatgtagaccaggtgagagaatatatggaaaatgaaaaagacaaggctctgtgtagccttaaagaggagttgatcttcgctcaggaggaaaaaatcaaggaattgcaaaaaatccaccaacttgagttacagactatgaaaacacaggaaactggcgacgaaggaaaacccctgcatctacttatcggtaagctgcagaaggccgtgtccgaagagtgcagctacttcctacagactctatgcagcgtcctaggagagtattacacccccgcactgaagtgcgaagtcaatgctgaggacaaagaaaattctggggactatatcagtgaaaacgaagatcctgagttgcaagattatcggtacgaagtgcaagactttcaggagaatatgcacaccctgctcaacaaagtgacggaagaatataataaattgctcgtacttcaaacgcggttaagcaaaatttggggtcagcagacagacggcatgaagcttgagttcggagaggagaaccttcctaaagaggagaccgagttcttgtcgatacatagtcagatgactaacctggaagatatagacgtcaatcacaagagtaaactgagctccttacaggacctcgagaagacaaaacttgaggagcaggtacaggaactcgagtccctaataagctccctgcagcagcagttgaaggaaaccgaacagaactacgaagccgagatacactgcctccagaagcgactacaagccgtgtcggagtcgacagtgccgccttccctgcctgtcgactctgtcgtcatcaccgagtctgacgctcaaaggactatgtatccagggtcttgtgttaaaaaaaacatagacggaacaattgaattctcaggcgaatttggagtgaaggaggaaactaacatagttaagctgctcgagaagcaatatcaggagcagttagaggaagaagtggcaaaggtgattgtgtctatgagcatcgcctttgcccagcagactgaactgtctcgtatatctggtggaaaagaaaacactgcaagctcgaaacaggctcacgccgtgtgccaacaggagcagcactatttcaacgaaatgaaactgtcccaggatcagatcggctttcagacatttgaaacggtcgacgtaaagttcaaagaagagtttaaaccactgagtaaggagcttggtgaacacggaaaagagattctgttgtccaactccgacccccatgatattcctgaaagcaaggattgcgtgctgactatttcagaggagatgtttagcaaagataagacttttattgttcgtcagtccatacacgatgagatctcggtgtcctcaatggatgcctctcggcagttgatgcttaatgaggagcaactggaggatatgaggcaggagcttgtaagacaatatcaggaacaccagcaggctaccgagctgctgcgtcaggctcacatgagacagatggagaggcagagggaggatcaggaacagctgcaggtgagagttctgtag

SEQ ID NO: 306452 - DNA, 5157 bp, Artificial Sequence
  derived and/or modified sequence
gacgaagatggcggcggcggcggcggtgacggcgcttcccgtgcggctgaggacgatccgccagtgagcgcggagactgcttccacttcgggcgggggagcgccggaccgaatcggctctctaggccgtggagcttgccgtcccacctccgtccaaatcgacctttcctttctatccccaaccacccctcaacccctgttttcccctgccttccttgcagaggccatggaggacgaggagagacagaagaagctggaggccggcaaagccaagattgaagaactctctttagcttttcttgtcagacagcttgcccagtttcgacaaagaaaagctcagtcggatgggcagagtccttccaagaagcagaaaaaaaagagaaaaacgtcaagcagtaaacatgatgtgtcagcacaccatgatttgaatattgatcaatcacagtgtaatgaaatgtacataaatagttctcagagagtagaatcaactgtgattcctgaatctacaataatgagaactctacatagtggagaaataaccagtcatgagcagggcttctctgtggaactggaaagtgaaatttcaaccacagcagatgactgcagttcagaggtaaatggttgcagttttgtgatgagaacaggaaagcctacaaatttattaagggaagaagaatttggtgttgatgattcttattctgaacaaggagcacaagacagtccgactcatctagagatgatggaaagtgagttggctgggaagcagcatgagattgaagagctaaacagagagctggaagaaatgagggttacctatgggactgaaggactgcagcagttacaagaatttgaagctgccattaaacaaagagatggcattataacccagctcactgctaatttacaacaagcaagaagagaaaaggatgagacaatgagagaatttttagagttgacagaacagagtcaaaaattacagattcaatttcagcaattacaggctagtgaaactctgagaaacagcactcatagtagcacagctgcagacttactacaagccaaacaacagatcctcactcatcaacagcagcttgaagaacaagaccacttattagaagattatcagaaaaagaaagaagacttcacaatgcaaattagtttcttgcaagagaaaattaaagtatatgaaatggaacaagataaaaaagtagaaaactcaaataaagaagaaatacaggaaaaggagacaatcattgaagaattaaacacaaaaataatagaagaagaaaagaaaactcttgagctaaaggataaattaacaactgctgataaattactaggagaattacaagaacagattgtgcaaaagaaccaagaaataaaaaacatgaaattagagctgactaattctaagcaaaaagaaagacagtcttctgaagaaataaaacagttaatggggacagtcgaagaacttcagaagagaaatcataaagacagccagttcgaaactgatatagtacaacgaatggaacaagaaacacaaagaaagttagaacaactccgggcagagctggatgagatgtatgggcagcagatagtgcaaatgaaacaagaattaataagacaacacatggcacagatggaggaaatgaaaacacggcataagggagaaatggagaatgctttaaggtcatattcaaatattacagttaatgaagatcagataaagttaatgaatgtggcaataaatgaactgaatataaaattgcaagatactaactctcaaaaggaaaaactcaaggaagaactaggactaattttagaagaaaagtgtgctctacagagacagcttgaagaccttgttgaagaattgagcttttcaagggaacagattcagagagctagacagacaatagctgaacaagaaagtaaacttaatgaagcacataagtcccttagtacagtggaagatttgaaagctgagattgtttctgcatctgaatccagaaaggaactagaattaaaacatgaagcagaagttacaaattacaagataaaacttgaaatgttagaaaaagaaaagaatgctgtgttagacagaatggctgaatcacaagaagctgaattagagaggctgagaacacagcttctatttagtcacgaagaagagctttccaaactgaaggaagatttagaaattgaacatcgaataaatattgaaaaacttaaagataatttaggcattcactataaacagcagatagatggtttacagaatgaaatgagtcaaaagatagaaaccatgcagtttgaaaaggacaatttgataactaagcagaatcaattaattttggaaatttcaaagctaaaagatttacagcagtctcttgtaaattcaaagtcagaagaaatgactcttcaaatcaatgaacttcaaaaagaaattgaaatactcagacaagaagaaaaagaaaagggtacacttgaacaagaagttcaagaattacaacttaaaacagaattgttagaaaaacagatgaaggaaaaagagaatgatcttcaagaaaaatttgcacaacttgaagcagagaatagcattcttaaagatgaaaagaaaacccttgaagacatgttgaaaatacatactcctgttagccaagaagaaagattgattttcttagactccattaagtccaaatccaaagactctgtgtgggaaaaagaaatagaaatacttatagaggaaaatgaggacctcaaacaacaatgtattcagctaaatgaagagattgaaaagcaaaggaacactttttcatttgctgaaaaaaactttgaagttaactatcaagagttacaagaggagtatgcttgccttctcaaagtaaaagatgatttagaagacagtaaaaataaacaggaattagagtataaaagtaaacttaaagcacttaatgaagagcttcatttgcaaagaataaatccaactacagtgaaaatgaaaagttctgtctttgatgaagacaaaacttttgtagcagaaacattggaaatgggtgaggttgttgaaaaggatacaacagaactcatggaaaaacttgaggtaaccaagcgagagaaattagagctgtcacagagactgtctgatctttctgaacaattgaaacagaaacatggtgagattagttttctaaatgaagaagttaaatctttaaagcaagagaaagaacaagtttcattgagatgtagagagctagaaatcattattaaccacaacagggcagaaaatgtacagtcatgtgatactcaagtaagctctttattagatggagttgtgaccatgacaagcaggggtgctgaaggatcagtttctaaagtaaataaaagttttggtgaagaatcaaaaataatggtggaagataaagtttcttttgaaaatatgactgttggagaagaaagtaagcaagaacagttgattttggatcacttaccatctgtaacaaaggaatcatcacttagagcaactcaaccaagtgaaaatgataaacttcagaaagaactcaatgtacttaaatcagaacagaatgatttaaggctacagatggaagcccaacgcatttgcctctctctggtttattcaactcatgtggatcaggttcgtgaatatatggaaaatgaaaaagataaagctctttgcagtcttaaagaagagcttatttttgctcaagaggaaaagatcaaggaacttcagaaaatacaccagttagaactacagactatgaaaacacaagaaacaggtgatgaaggaaagcctttacatctgctcattggaaaacttcaaaaggcagtgtctgaagaatgttcttattttttacagactttatgcagtgtccttggtgaatattatactcctgctttaaaatgtgaagtaaatgcagaagacaaagagaattctggtgattacatttctgaaaatgaagatccagaattacaagattatagatatgaagttcaagactttcaagaaaatatgcacactcttctcaacaaagtaacagaagaatacaacaaactcttggtacttcaaacacgactaagcaagatctggggacagcagacagatggtatgaaacttgaatttggagaagaaaaccttccaaaagaggaaacagagtttttatcaatccattctcagatgaccaatttggaagacattgatgtcaatcataaaagcaagttatcttctctgcaagatcttgaaaaaactaaacttgaagaacaagttcaagaattagaaagcctcatatcctctttgcagcaacagttgaaagaaactgaacaaaactatgaggcagagatccactgtttacagaagaggcttcaagctgttagtgagtccacggttccgccaagcttacctgttgattcggtggtaattacagaatctgatgcacagagaacaatgtaccctggaagttgtgtgaaaaagaatattgatggtacaatagagttttctggtgaatttggagtgaaagaggaaacaaatatcgttaagttgcttgaaaaacaataccaagaacaattagaagaagaagtagctaaggttattgtgtcaatgagtatagcatttgctcaacaaactgaactgtctagaatatctgggggaaaagaaaatactgcatcatcaaagcaagcacatgctgtgtgtcagcaagaacaacattattttaatgaaatgaaattatcacaggatcaaattggttttcagacttttgagacagtggatgtgaaatttaaagaagaatttaaaccacttagtaaagagttaggagaacatggaaaggaaattttattatcaaatagtgatccccatgatataccagaatcaaaggactgtgtgctgactatttcagaagaaatgttctccaaagataaaacatttatagttagacagtctattcatgatgagatttcagtgtcaagcatggatgcttctagacaactaatgttgaatgaagaacagttggaagatatgagacaggaacttgtacgacaataccaagaacatcaacaggcaacggaattgttaaggcaagcacatatgcggcaaatggagagacagcgagaagaccaggaacagctacaagtaagggtcttgtag

SEQ ID NO: 306453 - DNA, 4932 bp, Artificial Sequence
  derived and/or modified sequence
atggaggacgaggagagacagaagaagctggaggccggcaaggccaagatcgaggagctgagcctggccttcctggtgagacagctggcccagttcagacagagaaaggcccagagcgacggccagagccccagcaagaagcagaagaagaagagaaagaccagcagcagcaagcacgacgtgagcgcccaccacgacctgaacatcgaccagagccagtgcaacgagatgtacatcaacagcagccagagagtggagagcaccgtgatccccgagagcaccatcatgagaaccctgcacagcggcgagatcaccagccacgagcagggcttcagcgtggagctggagagcgagatcagcaccaccgccgacgactgcagcagcgaggtgaacggctgcagcttcgtgatgagaaccggcaagcccaccaacctgctgagagaggaggagttcggcgtggacgacagctacagcgagcagggcgcccaggacagccccacccacctggagatgatggagagcgagctggccggcaagcagcacgagatcgaggagctgaacagagagctggaggagatgagagtgacctacggcaccgagggcctgcagcagctgcaggagttcgaggccgccatcaagcagagagacggcatcatcacccagctgaccgccaacctgcagcaggccagaagagagaaggacgagaccatgagagagttcctggagctgaccgagcagagccagaagctgcagatccagttccagcagctgcaggccagcgagaccctgagaaacagcacccacagcagcaccgccgccgacctgctgcaggccaagcagcagatcctgacccaccagcagcagctggaggagcaggaccacctgctggaggactaccagaagaagaaggaggacttcaccatgcagatcagcttcctgcaggagaagatcaaggtgtacgagatggagcaggacaagaaggtggagaacagcaacaaggaggagatccaggagaaggagaccatcatcgaggagctgaacaccaagatcatcgaggaggagaagaagaccctggagctgaaggacaagctgaccaccgccgacaagctgctgggcgagctgcaggagcagatcgtgcagaagaaccaggagatcaagaacatgaagctggagctgaccaacagcaagcagaaggagagacagagcagcgaggagatcaagcagctgatgggcaccgtggaggagctgcagaagagaaaccacaaggacagccagttcgagaccgacatcgtgcagagaatggagcaggagacccagagaaagctggagcagctgagagccgagctggacgagatgtacggccagcagatcgtgcagatgaagcaggagctgatcagacagcacatggcccagatggaggagatgaagaccagacacaagggcgagatggagaacgccctgagaagctacagcaacatcaccgtgaacgaggaccagatcaagctgatgaacgtggccatcaacgagctgaacatcaagctgcaggacaccaacagccagaaggagaagctgaaggaggagctgggcctgatcctggaggagaagtgcgccctgcagagacagctggaggacctggtggaggagctgagcttcagcagagagcagatccagagagccagacagaccatcgccgagcaggagagcaagctgaacgaggcccacaagagcctgagcaccgtggaggacctgaaggccgagatcgtgagcgccagcgagagcagaaaggagctggagctgaagcacgaggccgaggtgaccaactacaagatcaagctggagatgctggagaaggagaagaacgccgtgctggacagaatggccgagagccaggaggccgagctggagagactgagaacccagctgctgttcagccacgaggaggagctgagcaagctgaaggaggacctggagatcgagcacagaatcaacatcgagaagctgaaggacaacctgggcatccactacaagcagcagatcgacggcctgcagaacgagatgagccagaagatcgagaccatgcagttcgagaaggacaacctgatcaccaagcagaaccagctgatcctggagatcagcaagctgaaggacctgcagcagagcctggtgaacagcaagagcgaggagatgaccctgcagatcaacgagctgcagaaggagatcgagatcctgagacaggaggagaaggagaagggcaccctggagcaggaggtgcaggagctgcagctgaagaccgagctgctggagaagcagatgaaggagaaggagaacgacctgcaggagaagttcgcccagctggaggccgagaacagcatcctgaaggacgagaagaagaccctggaggacatgctgaagatccacacccccgtgagccaggaggagagactgatcttcctggacagcatcaagagcaagagcaaggacagcgtgtgggagaaggagatcgagatcctgatcgaggagaacgaggacctgaagcagcagtgcatccagctgaacgaggagatcgagaagcagagaaacaccttcagcttcgccgagaagaacttcgaggtgaactaccaggagctgcaggaggagtacgcctgcctgctgaaggtgaaggacgacctggaggacagcaagaacaagcaggagctggagtacaagagcaagctgaaggccctgaacgaggagctgcacctgcagagaatcaaccccaccaccgtgaagatgaagagcagcgtgttcgacgaggacaagaccttcgtggccgagaccctggagatgggcgaggtggtggagaaggacaccaccgagctgatggagaagctggaggtgaccaagagagagaagctggagctgagccagagactgagcgacctgagcgagcagctgaagcagaagcacggcgagatcagcttcctgaacgaggaggtgaagagcctgaagcaggagaaggagcaggtgagcctgagatgcagagagctggagatcatcatcaaccacaacagagccgagaacgtgcagagctgcgacacccaggtgagcagcctgctggacggcgtggtgaccatgaccagcagaggcgccgagggcagcgtgagcaaggtgaacaagagcttcggcgaggagagcaagatcatggtggaggacaaggtgagcttcgagaacatgaccgtgggcgaggagagcaagcaggagcagctgatcctggaccacctgcccagcgtgaccaaggagagcagcctgagagccacccagcccagcgagaacgacaagctgcagaaggagctgaacgtgctgaagagcgagcagaacgacctgagactgcagatggaggcccagagaatctgcctgagcctggtgtacagcacccacgtggaccaggtgagagagtacatggagaacgagaaggacaaggccctgtgcagcctgaaggaggagctgatcttcgcccaggaggagaagatcaaggagctgcagaagatccaccagctggagctgcagaccatgaagacccaggagaccggcgacgagggcaagcccctgcacctgctgatcggcaagctgcagaaggccgtgagcgaggagtgcagctacttcctgcagaccctgtgcagcgtgctgggcgagtactacacccccgccctgaagtgcgaggtgaacgccgaggacaaggagaacagcggcgactacatcagcgagaacgaggaccccgagctgcaggactacagatacgaggtgcaggacttccaggagaacatgcacaccctgctgaacaaggtgaccgaggagtacaacaagctgctggtgctgcagaccagactgagcaagatctggggccagcagaccgacggcatgaagctggagttcggcgaggagaacctgcccaaggaggagaccgagttcctgagcatccacagccagatgaccaacctggaggacatcgacgtgaaccacaagagcaagctgagcagcctgcaggacctggagaagaccaagctggaggagcaggtgcaggagctggagagcctgatcagcagcctgcagcagcagctgaaggagaccgagcagaactacgaggccgagatccactgcctgcagaagagactgcaggccgtgagcgagagcaccgtgccccccagcctgcccgtggacagcgtggtgatcaccgagagcgacgcccagagaaccatgtaccccggcagctgcgtgaagaagaacatcgacggcaccatcgagttcagcggcgagttcggcgtgaaggaggagaccaacatcgtgaagctgctggagaagcagtaccaggagcagctggaggaggaggtggccaaggtgatcgtgagcatgagcatcgccttcgcccagcagaccgagctgagcagaatcagcggcggcaaggagaacaccgccagcagcaagcaggcccacgccgtgtgccagcaggagcagcactacttcaacgagatgaagctgagccaggaccagatcggcttccagaccttcgagaccgtggacgtgaagttcaaggaggagttcaagcccctgagcaaggagctgggcgagcacggcaaggagatcctgctgagcaacagcgacccccacgacatccccgagagcaaggactgcgtgctgaccatcagcgaggagatgttcagcaaggacaagaccttcatcgtgagacagagcatccacgacgagatcagcgtgagcagcatggacgccagcagacagctgatgctgaacgaggagcagctggaggacatgagacaggagctggtgagacagtaccaggagcaccagcaggccaccgagctgctgagacaggcccacatgagacagatggagagacagagagaggaccaggagcagctgcaggtgagagtgctgtag

SEQ ID NO: 306454 - protein, 281 aa, Artificial Sequence
  derived and/or modified sequence
MDSYSTYLATVKVSGSWLEEQDEDIYEVESRVPLPHPFPLCEHLDENNSVIVNTSIFHFIHKRNGHILKLISKISLPTPPYSLEHAKVTQTELMRESFRQKQEATESLKCQEELRERLHEESRAREQLAVELSKAEGVIDGYADEKTLFERQIQEKTDIIDRLEQELLCASNRLQELEAEQQQIQEERELLSRQKEAMKAEAGPVEQQLLQETEKLMKEKLEVQCQAEKVRDDLQKQVKALEIDVEEQVSRFIELEQEKNTELMDLRQQNQALEKQLEKMR

SEQ ID NO: 306455 - DNA, 846 bp, Artificial Sequence
  derived and/or modified sequence
atggactcatactccacttatctggccactgtgaaggtctcaggctcctggctggaagagcaggatgaggacatttatgaggtggagagccgggttccacttcctcacccgtttcccctctgtgaacacttggatgaaaacaatagtgtgatcgtgaatacctcaatcttccactttatccacaaacgtaacggtcatatcctcaagctaatttccaaaattagtctgcccacgcctccttattctttagaacacgccaaggtaactcagacagagctgatgcgtgaaagctttagacagaaacaggaagcaacagagagcctcaagtgtcaagaagagctgagagaacgattgcatgaggagtctagggctcgagaacagttagccgtagaactgagtaaagcggagggggtcatcgatggctacgcggatgagaaaacccttttcgaaagacagattcaggagaaaacggatattattgatagacttgagcaggagctcctatgtgcgtccaaccgcttacaagaattggaagccgagcagcagcagatccaggaggagcgcgaactcttgtctaggcagaaagaggcgatgaaggctgaagcggggcccgtggaacagcagctgctgcaggagaccgaaaaactgatgaaggagaagctggaggttcaatgccaagctgaaaaagtacgagatgacctacagaagcaggtcaaagccctggaaatcgacgtggaagaacaagtgtcacgctttattgagctggagcaggagaaaaatacggagctgatggacttgagacagcagaatcaggctctcgaaaagcagttagagaagatgagatag

SEQ ID NO: 306456 - DNA, 846 bp, Artificial Sequence
  derived and/or modified sequence
atggacagctacagcacctacctggccaccgtgaaggtgtctggctcctggctggaggagcaggatgaggacatctatgaggtggagagccgggtgcccctgccccaccccttccccctgtgtgagcacctggatgagaacaacagcgtgattgtgaacaccagcatcttccacttcatccacaagagaaatggccacatcctgaagctgatcagcaagatcagcctgcccaccccaccctacagcctggagcacgccaaggtgacccagacagagctgatgagggagagcttccggcagaagcaggaggccacagagagcctgaagtgccaggaggagctgcgggagcggctgcacgaggagagccgggcccgggagcagctggccgtggagctgagcaaggccgagggcgtgattgatggctatgcagatgagaagaccctgtttgagcggcagatccaggagaagacagacatcatcgaccggctggagcaggagctgctgtgtgccagcaaccggctgcaggagctggaggccgagcagcagcagatccaggaggagcgggagctgctgagccggcagaaggaggccatgaaggccgaggccggccctgtggagcagcagctgctgcaggagacagagaagctgatgaaggagaagctggaggtgcagtgccaggccgagaaggtgagagatgacctgcagaagcaggtgaaggccctggagattgatgtggaggagcaggtgagccgcttcatcgagctggagcaggagaagaacacagagctgatggacctgcggcagcagaaccaggccctggagaagcagctggagaagatgaggtag

SEQ ID NO: 306457 - DNA, 846 bp, Artificial Sequence
  derived and/or modified sequence
atggacagctacagcacctacctggccaccgtgaaggtgagcggctcctggctggaagagcaggacgaagacatttacgaggtcgaatccagagtcccacttccccaccccttccctctgtgcgaacaccttgacgaaaataacagcgtgatcgtcaacacctcaatcttccacttcattcacaagagaaatggccacatcttgaaactgatcagcaagattagcctccctacacccccttacagtttagaacacgccaaggtcacacaaaccgagctgatgcgggaatccttccgtcaaaagcaggaggctactgagtccttaaagtgccaggaggaacttagagagcgcttgcatgaagaatctagagcaagggagcagctggctgtggagttgagcaaagccgaaggtgtcatcgacggctacgcggacgaaaaaaccttgtttgagcgccagatacaggaaaagactgacattatcgacaggttggagcaagagctgctgtgcgcaagcaacagactgcaggagctggaggcagagcagcagcaaattcaggaagagcgagaactgctatctaggcaaaaggaggccatgaaggccgaagccggacctgtggaacagcagctattgcaggagacagaaaaactgatgaaggaaaagctggaggttcagtgccaggcagaaaaagtaagggatgacctgcagaaacaggtgaaagcactcgagattgacgttgaggaacaggtgtcacgtttcatcgagctggaacaggaaaaaaacacggaactaatggacttacgccagcagaaccaggctcttgagaagcagctggagaagatgcggtag

SEQ ID NO: 306458 - DNA, 846 bp, Artificial Sequence
  derived and/or modified sequence
atggactcgtacagcacgtatctggccaccgtgaaggtaagcggaagctggctggaggagcaggacgaagatatctacgaagtagagtcccgcgttcccctgcctcacccctttcccctgtgcgaacacctggacgaaaacaacagcgtgatcgtaaatacctcaatattccacttcattcacaaacgaaatggtcatatcttaaagcttatctccaagatttcgctcccaacacccccatatagcttggagcacgccaaagtgacccaaaccgagctcatgagagagagctttagacagaagcaggaagctacggaatccctgaaatgtcaggaggagctgagggaaaggcttcatgaggagtcaagggctagggagcagctggctgttgaactgtctaaagctgaaggtgtaatcgacggatatgccgacgaaaaaaccctgttcgagcgtcaaatacaggagaaaacggacattatcgaccggctagaacaggaacttctttgcgccagtaacagattacaagagctggaagcagagcagcaacaaatccaggaggaacgagaacttcttagcagacagaaagaagctatgaaagccgaagccggacctgtggagcaacaactcctccaggagacggaaaaactgatgaaggagaaattggaggtccagtgccaggcagaaaaggttcgtgacgatctgcagaaacaagtaaaagcgttggaaatcgacgttgaggagcaagtgagtcggttcatcgaattagagcaggaaaaaaataccgaactgatggatctccggcagcagaatcaagcattggagaaacagctggagaagatgcgctag

SEQ ID NO: 306459 - DNA, 2622 bp, Artificial Sequence
  derived and/or modified sequence
atggattcttatagcacctatttggcaactgtcaaagtcagtggctcgtggttagaagagcaagatgaagacatttatgaggttgaatctcgcgtgcctttaccacatccttttcctctttgtgaacatttggatgaaaataactcagtaattgttaatacttctattttccattttattcataaaagaaacgggcatatattaaagcttatttctaaaatttcactgcctacccctccttattcacttgaacatgcgaaagtgacacagacagagttgatgcgtgagtcatttagacagaaacaagaagcaacagagtcccttaagtgccaagaggaacttcgagagcgccttcatgaggagtccagggccagagaacagctagctgtggagctcagtaaggctgagggcgtcattgatggctatgcagatgaaaaaactctttttgaaaggcaaattcaggaaaaaactgatataatagatcgtcttgagcaggagttgttatgtgcaagtaacaggttgcaagaattggaggcagagcaacagcagatccaagaagaaagagaattactgtccagacaaaaggaagctatgaaagcagaggcaggcccagttgaacaacaattactacaggagacagaaaaattaatgaaggaaaaactagaagtacaatgtcaagctgaaaaagtacgtgatgaccttcaaaaacaagtgaaagctctagaaatagatgtggaagaacaagtcagtaggtttatagagctggaacaagaaaaaaatactgaactaatggatttaagacagcaaaaccaagcattggaaaagcagttagaaaaaatgagaaaatttttagatgagcaagccattgacagagaacatgagagagatgtattccaacaggaaatacagaaactagaacagcaacttaaggttgttcctcgattccagcctatcagtgaacatcaaactagagaggttgaacagttagcaaatcatctgaaagaaaaaacagacaaatgcagtgagcttttgctctctaaagagcagcttcaaagggatatacaagaaaggaatgaagaaatagagaaactggagttcagagtaagagaactggagcaggcgcttcttgtgagtgcagatacttttcaaaaggtagaggaccgaaaacactttggagctgtagaagctaaaccagaattgtccctagaagtacaattgcaggctgaacgagatgccatagacagaaaggaaaaagagattacaaacttagaagagcaattagaacagtttagagaagaactggaaaataagaatgaagaagttcaacaattacatatgcaattagaaatacagaaaaaggaatctactacccgcctacaagaacttgaacaggaaaacaaattatttaaggatgacatggagaaactgggacttgccataaaggaatctgatgccatgtctactcaagaccaacatgtgctatttgggaaatttgctcaaataatacaggaaaaagaggtagaaattgaccaattaaatgaacaagttacgaaactccagcagcaacttaaaattacaacagataacaaggttattgaagaaaaaaatgaactgataagggatcttgaaacccaaatagaatgtttgatgagtgatcaagaatgtgtgaagagaaatagagaagaagaaatagagcagctcaatgaagtgattgaaaaacttcaacaggaattggcaaatattggacagaagacatcaatgaatgctcattccctctcagaagaagcagacagtttaaaacatcaattggatgtggttatagctgaaaagctggccttggaacagcaagtagaaaccgctaatgaagaaatgaccttcatgaaaaatgtacttaaagaaaccaattttaaaatgaatcagctaacacaggaattattcagcttaaagagagaacgtgaaagtgtggaaaagattcaaagcataccagagaatagtgttaacgtggctatagatcatctgagcaaagacaaacctgaactagaagtagtccttacagaggatgctcttaaatccctagaaaatcagacatacttcaaatcttttgaagaaaatggcaaaggttccataattaatttggaaacaaggttgctacaacttgagagcactgttagtgcaaaggacttagaacttacccagtgttataaacaaataaaagacatgcaagaacaaggccagtttgaaacagaaatgcttcaaaagaagattgtaaacctacagaaaatagttgaagaaaaagtggctgctgctcttgtcagtcaaatccaacttgaggcagttcaggaatatgcaaaattctgtcaagataatcaaacaatttcatcagaacctgaaagaacaaatattcagaatttaaatcaactaagagaagatgagttggggtcagatatatcagcattaaccttgagaatatcagaattagaaagccaggttgttgaaatgcatactagtttgattttagaaaaagaacaagtagaaattgcagaaaaaaatgttttagaaaaagaaaagaagctgctagaactacagaagctattggagggcaatgagaaaaaacagagagag

SEQ ID NO: 306460 - DNA, 846 bp, Artificial Sequence
  derived and/or modified sequence
atggacagctacagcacctacctggccaccgtgaaggtgagcggcagctggctggaggagcaggacgaggacatctacgaggtggagagcagagtgcccctgccccaccccttccccctgtgcgagcacctggacgagaacaacagcgtgatcgtgaacaccagcatcttccacttcatccacaagagaaacggccacatcctgaagctgatcagcaagatcagcctgcccacccccccctacagcctggagcacgccaaggtgacccagaccgagctgatgagagagagcttcagacagaagcaggaggccaccgagagcctgaagtgccaggaggagctgagagagagactgcacgaggagagcagagccagagagcagctggccgtggagctgagcaaggccgagggcgtgatcgacggctacgccgacgagaagaccctgttcgagagacagatccaggagaagaccgacatcatcgacagactggagcaggagctgctgtgcgccagcaacagactgcaggagctggaggccgagcagcagcagatccaggaggagagagagctgctgagcagacagaaggaggccatgaaggccgaggccggccccgtggagcagcagctgctgcaggagaccgagaagctgatgaaggagaagctggaggtgcagtgccaggccgagaaggtgagagacgacctgcagaagcaggtgaaggccctggagatcgacgtggaggagcaggtgagcagattcatcgagctggagcaggagaagaacaccgagctgatggacctgagacagcagaaccaggccctggagaagcagctggagaagatgagatag

SEQ ID NO: 306461 - protein, 19 aa, Artificial Sequence
  derived and/or modified sequence
MGWLTRIVCLFWGVLLTAR

SEQ ID NO: 306462 - protein, 37 aa, Artificial Sequence
  derived and/or modified sequence
MGWLTRIVCLFWGVLLTARANYQNGKNNVPRLKLSYK

SEQ ID NO: 306463 - DNA, 450 bp, Artificial Sequence
  derived and/or modified sequence
atgggatggctaacacgtatagtctgtctattttggggagtcctgctgactgccagggctaactaccagaacggcaagaataatgtacctcgactcaagctcagttacaaggaaatgctggagtccaacaacgttatcacctttaatggactcgccaatagttcttcataccacacattcctgctggatgaagagaggtccagattgtacgtcggtgccaaggaccatatcttctccttcgatttggttaatattaaggattttcagaagatcgtgtggccggtatcatatactcgacgagacgaatgtaaatgggcaggaaaggacatccttaaagagtgtgcaaatttcataaaagtgcttaaggcgtataaccaaactcatctctacgcatgtggcacgggcgctttccaccctatctgcacctacattgaaattgggcaccactag

SEQ ID NO: 306464 - DNA, 553 bp, Artificial Sequence
  derived and/or modified sequence
gttctcccattgtcagccagtctatttccagattgtttgaacttctctggccgcacaatacaggaaggaagactaaagcagcaaagggacctacagcgtctgcagcatgggctggttaactaggattgtctgtcttttctggggagtattacttacagcaagagcaaactatcagaatgggaagaacaatgtgccaaggctgaaattatcctacaaagaaatgttggaatccaacaatgtgatcactttcaatggcttggccaacagctccagttatcataccttccttttggatgaggaacggagtaggctgtatgttggagcaaaggatcacatattttcattcgacctggttaatatcaaggattttcaaaagattgtgtggccagtatcttacaccagaagagatgaatgcaagtgggctggaaaagacatcctgaaagaatgtgctaatttcatcaaggtacttaaggcatataatcagactcacttgtacgcctgtggaacgggggcttttcatccaatttgcacctacattgaaattggacatcat

SEQ ID NO: 306465 - DNA, 568 bp, Artificial Sequence
  derived and/or modified sequence
gagatgaagcctgatagatccgcccaggtgtaggtgaaatggtagagcctcaggggtaatagattctgtgctctcatgctgaagtttagtgctgtgtcttgactggctctctagcatcagtgtgatgggctgctcctggtacagttacaaagtgaacatgcttcttgctgctcacatttatccctaatctggagggcaacctggagctaggtaagaacagaacagccctttgacttcaacgcatggacaaaggacaacaaaggcaaatatttaaaaaaaccatccatgggacagtctaacataacaaagggaattattcatcaagaagaggccctttagcagggtatttaaagtgcccaggtacttacaataacaagttggactgaacacattgtatctcaggaattaagaatttttcctaaaagaagtttccagattgtttgaacttctctggccgcacaatacaggaaggaagactaaagcagcaaagggacctacagcgtctgcagcatgggctggttaactaggattgtctgtcttttctggggagtattacttacagcaagag

SEQ ID NO: 306466 - DNA, 450 bp, Artificial Sequence
  derived and/or modified sequence
atgggttggttgactcgaatcgtgtgtcttttttggggggtccttctgacagcaagagctaactatcagaatgggaaaaataacgtcccgagactgaagttaagctacaaggagatgttagaatctaataacgttataacctttaatggactggctaatagctcaagctaccacacttttctgctagacgaggagcggagtaggctctacgtaggggccaaagaccacattttttccttcgacttggtgaacattaaggattttcagaaaatcgtttggccagtgagctacacaaggagggatgaatgtaaatgggccggcaaagacattctgaaggaatgtgcaaattttatcaaagttctcaaggcgtacaatcagacccatttatacgcctgcggtaccggcgccttccaccccatttgcacttatattgaaattggccatcattag

SEQ ID NO: 306467 - DNA, 534 bp, Artificial Sequence
  derived and/or modified sequence
atttatccctaatctggagggcaacctggagctaggtaagaacagaacagccctttgacttcaacgcatggacaaaggacaacaaaggcacactcattctgtctcctgctaccctgtgaaaaggtgccttctgccattattgtaagcttcctgaggcctcctcagccatgtggaactaatatttaaaaaaaccatccatgggacagtctaacataacaaagggaattattcatcaagaagaggccctttagcagggtatttaaagtgcccaggtacttacaataacaagttggactgaacacattgtatctcaggaattaagaatttttcctaaaagaagtttccagattgtttgaacttctctggccgcacaatacaggaaggaagactaaagcagcaaagggacctacagcgtctgcagcatgggctggttaactaggattgtctgtcttttctggggagtattacttacagcaagagcaaactatcagaatgggaagaacaatgtgccaaggctgaaattatcctacaaag

SEQ ID NO: 306468 - DNA, 450 bp, Artificial Sequence
  derived and/or modified sequence
atggggtggctgacccggatagtatgtctcttttggggagtgctcctgacagctcgggcaaactaccagaacggtaaaaataatgtgccccgactaaagttatcatataaggaaatgcttgagtcgaataacgtgatcaccttcaatgggcttgctaattcttcctcctaccacacattcctgctggatgaggaacgatctcgcctctacgtgggcgcaaaagaccacatattcagttttgaccttgtcaatatcaaagattttcaaaagatcgtttggccagtgtcttatacgagaagggacgaatgcaagtgggcagggaaagacatccttaaagagtgcgctaactttatcaaagtactgaaagcctataatcagacccatctttacgcgtgcggcaccggcgccttccatcctatctgtacatacatagaaattggacatcattag

SEQ ID NO: 306469 - DNA, 450 bp, Artificial Sequence
  derived and/or modified sequence
atgggctggctgaccagaatcgtgtgcctgttctggggcgtgctgctgaccgccagagccaactaccagaacggcaagaacaacgtgcccagactgaagctgagctacaaggagatgctggagagcaacaacgtgatcaccttcaacggcctggccaacagcagcagctaccacaccttcctgctggacgaggagagaagcagactgtacgtgggcgccaaggaccacatcttcagcttcgacctggtgaacatcaaggacttccagaagatcgtgtggcccgtgagctacaccagaagagacgagtgcaagtgggccggcaaggacatcctgaaggagtgcgccaacttcatcaaggtgctgaaggcctacaaccagacccacctgtacgcctgcggcaccggcgccttccaccccatctgcacctacatcgagatcggccaccactag

SEQ ID NO: 306470 - DNA, 450 bp, Artificial Sequence
  derived and/or modified sequence
atgggctggctgacccgaatagtctgcctcttctggggcgtccttctaaccgctcgggctaattatcaaaatgggaagaataatgtgcctcggctaaagttaagctacaaagagatgttagagagtaataatgtaatcaccttcaatggtctcgccaatagctcgtcttaccacactttcctgttagatgaggaaagaagtaggttatacgttggagctaaagatcacattttttctttcgatctggtaaacattaaggactttcagaagatcgtctggcccgtctcctatacgagacgagacgaatgtaagtgggcgggcaaagacattctgaaagagtgcgcgaacttcatcaaagtcctaaaggcgtacaaccagacgcacctgtacgcatgtggtacaggggcattccatcccatctgcacctacattgagataggacaccattag

SEQ ID NO: 306471 - DNA, 450 bp, Artificial Sequence
  derived and/or modified sequence
atgggctggctgaccagaattgtgtgcctcttctggggcgtgctgctgacagcccgggccaactaccagaatggcaagaacaacgtgccccggctgaagctgagctacaaggagatgctggagagcaacaacgtcatcaccttcaacggcctggccaacagcagcagctaccacaccttcctgctggatgaggagaggagccggctgtatgtgggcgccaaggaccacatcttctcctttgacctggtgaacatcaaggacttccagaagatcgtgtggcctgtgtcctacaccaggagagatgagtgcaagtgggccggcaaggacatcctgaaggaatgtgccaacttcatcaaggtgctgaaggcctacaaccagacccacctgtatgcctgtggcaccggggccttccaccccatctgcacctacatcgagatcggccaccactag

SEQ ID NO: 306472 - DNA, 450 bp, Artificial Sequence
  derived and/or modified sequence
atgggctggctgacccggatcgtgtgcctgttctggggcgtgctgctgactgcccgagccaactatcagaacggcaagaacaacgtgccccgcctcaaactgagttacaaagaaatgctggaaagcaacaatgtgattactttcaacggcctcgctaattctagctcatatcatacttttctgctcgatgaggagcgatcccgcctctacgtgggcgcaaaggaccacatattcagcttcgaccttgtgaatatcaaagatttccagaagatcgtgtggccggtttcatatactaggcgggatgaatgtaagtgggccggaaaagacattctgaaagagtgcgctaactttatcaaggttcttaaagcttacaaccagactcacttatacgcctgcgggacaggggcgttccaccctatctgcacctacattgagatagggcaccactag

SEQ ID NO: 306473 - RNA, 450 nt, Artificial Sequence
  derived and/or modified sequence
auggguugguugacucgaaucgugugucuuuuuugggggguccuucugacagcaagagcuaacuaucagaaugggaaaaauaacgucccgagacugaaguuaagcuacaaggagauguuagaaucuaauaacguuauaaccuuuaauggacuggcuaauagcucaagcuaccacacuuuucugcuagacgaggagcggaguaggcucuacguaggggccaaagaccacauuuuuuccuucgacuuggugaacauuaaggauuuucagaaaaucguuuggccagugagcuacacaaggagggaugaauguaaaugggccggcaaagacauucugaaggaaugugcaaauuuuaucaaaguucucaaggcguacaaucagacccauuuauacgccugcgguaccggcgccuuccaccccauuugcacuuauauugaaauuggccaucauuag

SEQ ID NO: 306474 - RNA, 450 nt, Artificial Sequence
  derived and/or modified sequence
augggguggcugacccggauaguaugucucuuuuggggagugcuccugacagcucgggcaaacuaccagaacgguaaaaauaaugugccccgacuaaaguuaucauauaaggaaaugcuugagucgaauaacgugaucaccuucaaugggcuugcuaauucuuccuccuaccacacauuccugcuggaugaggaacgaucucgccucuacgugggcgcaaaagaccacauauucaguuuugaccuugucaauaucaaagauuuucaaaagaucguuuggccagugucuuauacgagaagggacgaaugcaagugggcagggaaagacauccuuaaagagugcgcuaacuuuaucaaaguacugaaagccuauaaucagacccaucuuuacgcgugcggcaccggcgccuuccauccuaucuguacauacauagaaauuggacaucauuag

SEQ ID NO: 306475 - protein, 237 aa, Artificial Sequence
  derived and/or modified sequence
  misc_feature (1)..(1): Xaa can be any naturally occurring amino acid
XEQGAETDPEAEPELELSDYPWFHGTLSRVKAAQLVLAGGPRNHGLFVIRQSETRPGEYVLTFNFQGKAKHLRLSLNGHGQCHVQHLWFQSVLDMLRHFHTHPIPLESGGSADITLRSYVRAQDPPPEPGPTPPAAPASPACWSDSPGQHYFSSLAAAACPPASPSDAAGASSSSASSSSAASGPAPPRPVEGQLSARSRSNSAERLLEAVAATAAEEPPEAAPGRARAVENQYSFY

SEQ ID NO: 306476 - protein, 632 aa, Artificial Sequence
  derived and/or modified sequence
MNGAGPGPAAAAPVPVPVPVPDWRQFCELHAQAAAVDFAHKFCRFLRDNPAYDTPDAGASFSRHFAANFLDVFGEEVRRVLVAGPTTRGAAVSAEAMEPELADTSALKAAPYGHSRSSEDVSTHAATKARVRKGFSLRNMSLCVVDGVRDMWHRRASPEPDAAAAPRTAEPRDKWTRRLRLSRTLAAKVELVDIQREGALRFMVADDAAAGSGGSAQWQKCRLLLRRAVAEERFRLEFFVPPKASRPKVSIPLSAIIEVRTTMPLEMPEKDNTFVLKVENGAEYILETIDSLQKHSWVADIQGCVDPGDSEEDTELSCTRGGCLASRVASCSCELLTDAVDLPRPPETTAVGAVVTAPHSRGRDAVRESLIHVPLETFLQTLESPGGSGSDSNNTGEQGAETDPEAEPELELSDYPWFHGTLSRVKAAQLVLAGGPRNHGLFVIRQSETRPGEYVLTFNFQGKAKHLRLSLNGHGQCHVQHLWFQSVLDMLRHFHTHPIPLESGGSADITLRSYVRAQDPPPEPGPTPPAAPASPACWSDSPGQHYFSSLAAAACPPASPSDAAGASSSSASSSSAASGPAPPRPVEGQLSARSRSNSAERLLEAVAATAAEEPPEAAPGRARAVENQYSFY

SEQ ID NO: 306477 - protein, 631 aa, Artificial Sequence
  derived and/or modified sequence
MNGAGPGPAAAAPVPVPVPVPDWRQFCELHAQAAAVDFAHKFCRFLRDNPAYDTPDAGASFSRHFAANFLDVFGEEVRRVLVAGPTTRGAAVSAEAMEPELADTSALKAAPYGHSRSSEDVSTHAATKARVRKGFSLRNMSLCVVDGVRDMWHRRASPEPDAAAAPRTAEPRDKWTRRLRLSRTLAAKVELVDIQREGALRFMVADDAAAGSGGSAQWQKCRLLLRRAVAEERFRLEFFVPPKASRPKVSIPLSAIIEVRTTMPLEMPEKDNTFVLKVENGAEYILETIDSLQKHSWVADIQGCVDPGPGPGDLEGSWTRSCLHPKRASEHWELGRDGSESPKGWGPGAVAHICDPNTLGGPAVETGFHHVGQAGLELQTSSDPPNSASRSATSGEQGAETDPEAEPELELSDYPWFHGTLSRVKAAQLVLAGGPRNHGLFVIRQSETRPGEYVLTFNFQGKAKHLRLSLNGHGQCHVQHLWFQSVLDMLRHFHTHPIPLESGGSADITLRSYVRAQDPPPEPGPTPPAAPASPACWSDSPGQHYFSSLAAAACPPASPSDAAGASSSSASSSSAASGPAPPRPVEGQLSARSRSNSAERLLEAVAATAAEEPPEAAPGRARAVENQYSFY

SEQ ID NO: 306478 - protein, 308 aa, Artificial Sequence
  derived and/or modified sequence
MNGAGPGPAAAAPVPVPVPVPDWRQFCELHAQAAAVDFAHKFCRFLRDNPAYDTPDAGASFSRHFAANFLDVFGEEVRRVLVAGPTTRGAAVSAEAMEPELADTSALKAAPYGHSRSSEDVSTHAATKARVRKGFSLRNMSLCVVDGVRDMWHRRASPEPDAAAAPRTAEPRDKWTRRLRLSRTLAAKVELVDIQREGALRFMVADDAAAGSGGSAQWQKCRLLLRRAVAEERFRLEFFVPPKASRPKVSIPLSAIIEVRTTMPLEMPEKDNTFVLKVENGAEYILETIDSLQKHSWVADIQGCVDPG

SEQ ID NO: 306479 - DNA, 1896 bp, Artificial Sequence
  derived and/or modified sequence
atgaacggcgccggccccggccccgccgccgccgcccccgtgcccgtgcccgtgcccgtgcccgactggagacagttctgcgagctgcacgcccaggccgccgccgtggacttcgcccacaagttctgcagattcctgagagacaaccccgcctacgacacccccgacgccggcgccagcttcagcagacacttcgccgccaacttcctggacgtgttcggcgaggaggtgagaagagtgctggtggccggccccaccaccagaggcgccgccgtgagcgccgaggccatggagcccgagctggccgacaccagcgccctgaaggccgccccctacggccacagcagaagcagcgaggacgtgagcacccacgccgccaccaaggccagagtgagaaagggcttcagcctgagaaacatgagcctgtgcgtggtggacggcgtgagagacatgtggcacagaagagccagccccgagcccgacgccgccgccgcccccagaaccgccgagcccagagacaagtggaccagaagactgagactgagcagaaccctggccgccaaggtggagctggtggacatccagagagagggcgccctgagattcatggtggccgacgacgccgccgccggcagcggcggcagcgcccagtggcagaagtgcagactgctgctgagaagagccgtggccgaggagagattcagactggagttcttcgtgccccccaaggccagcagacccaaggtgagcatccccctgagcgccatcatcgaggtgagaaccaccatgcccctggagatgcccgagaaggacaacaccttcgtgctgaaggtggagaacggcgccgagtacatcctggagaccatcgacagcctgcagaagcacagctgggtggccgacatccagggctgcgtggaccccggccccggccccggcgacctggagggcagctggaccagaagctgcctgcaccccaagagagccagcgagcactgggagctgggcagagacggcagcgagagccccaagggctggggccccggcgccgtggcccacatctgcgaccccaacaccctgggcggccccgccgtggagaccggcttccaccacgtgggccaggccggcctggagctgcagaccagcagcgacccccccaacagcgccagcagaagcgccaccagcggcgagcagggcgccgagaccgaccccgaggccgagcccgagctggagctgagcgactacccctggttccacggcaccctgagcagagtgaaggccgcccagctggtgctggccggcggccccagaaaccacggcctgttcgtgatcagacagagcgagaccagacccggcgagtacgtgctgaccttcaacttccagggcaaggccaagcacctgagactgagcctgaacggccacggccagtgccacgtgcagcacctgtggttccagagcgtgctggacatgctgagacacttccacacccaccccatccccctggagagcggcggcagcgccgacatcaccctgagaagctacgtgagagcccaggaccccccccccgagcccggccccaccccccccgccgcccccgccagccccgcctgctggagcgacagccccggccagcactacttcagcagcctggccgccgccgcctgcccccccgccagccccagcgacgccgccggcgccagcagcagcagcgccagcagcagcagcgccgccagcggccccgccccccccagacccgtggagggccagctgagcgccagaagcagaagcaacagcgccgagagactgctggaggccgtggccgccaccgccgccgaggagccccccgaggccgcccccggcagagccagagccgtggagaaccagtacagcttctactag

SEQ ID NO: 306480 - DNA, 714 bp, Artificial Sequence
  derived and/or modified sequence
tgagagcagggcgccgagaccgaccccgaggccgagcccgagctggagctgagcgactacccctggttccacggcaccctgagcagagtgaaggccgcccagctggtgctggccggcggccccagaaaccacggcctgttcgtgatcagacagagcgagaccagacccggcgagtacgtgctgaccttcaacttccagggcaaggccaagcacctgagactgagcctgaacggccacggccagtgccacgtgcagcacctgtggttccagagcgtgctggacatgctgagacacttccacacccaccccatccccctggagagcggcggcagcgccgacatcaccctgagaagctacgtgagagcccaggaccccccccccgagcccggccccaccccccccgccgcccccgccagccccgcctgctggagcgacagccccggccagcactacttcagcagcctggccgccgccgcctgcccccccgccagccccagcgacgccgccggcgccagcagcagcagcgccagcagcagcagcgccgccagcggccccgccccccccagacccgtggagggccagctgagcgccagaagcagaagcaacagcgccgagagactgctggaggccgtggccgccaccgccgccgaggagccccccgaggccgcccccggcagagccagagccgtggagaaccagtacagcttctactag

SEQ ID NO: 306481 - DNA, 927 bp, Artificial Sequence
  derived and/or modified sequence
atgaacggcgccggccccggccccgccgccgccgcccccgtgcccgtgcccgtgcccgtgcccgactggagacagttctgcgagctgcacgcccaggccgccgccgtggacttcgcccacaagttctgcagattcctgagagacaaccccgcctacgacacccccgacgccggcgccagcttcagcagacacttcgccgccaacttcctggacgtgttcggcgaggaggtgagaagagtgctggtggccggccccaccaccagaggcgccgccgtgagcgccgaggccatggagcccgagctggccgacaccagcgccctgaaggccgccccctacggccacagcagaagcagcgaggacgtgagcacccacgccgccaccaaggccagagtgagaaagggcttcagcctgagaaacatgagcctgtgcgtggtggacggcgtgagagacatgtggcacagaagagccagccccgagcccgacgccgccgccgcccccagaaccgccgagcccagagacaagtggaccagaagactgagactgagcagaaccctggccgccaaggtggagctggtggacatccagagagagggcgccctgagattcatggtggccgacgacgccgccgccggcagcggcggcagcgcccagtggcagaagtgcagactgctgctgagaagagccgtggccgaggagagattcagactggagttcttcgtgccccccaaggccagcagacccaaggtgagcatccccctgagcgccatcatcgaggtgagaaccaccatgcccctggagatgcccgagaaggacaacaccttcgtgctgaaggtggagaacggcgccgagtacatcctggagaccatcgacagcctgcagaagcacagctgggtggccgacatccagggctgcgtggaccccggctag

SEQ ID NO: 306482 - DNA, 1896 bp, Artificial Sequence
  derived and/or modified sequence
atgaacggcgctggaccaggccctgcggcggctgcccccgtgccggtacccgtgcctgtccctgattggcgacaattttgcgaactgcacgcccaggccgctgccgtcgatttcgcacataagttctgtagattcctcagagacaaccccgcctacgacaccccggacgctggtgcaagtttcagccgtcatttcgccgcgaattttctggatgtttttggagaggaagtgcgaagagttttagtcgctggccccacgaccaggggcgccgcagtcagtgctgaggctatggaacccgagttagccgatacatcagcattgaaggccgccccttacggacattcccgatccagcgaggacgtttctactcacgcagctacaaaagcgagagtaagaaagggcttctccctgcgaaacatgtcactttgtgtagtagatggtgtacgggacatgtggcatcggagggcaagccccgaaccagatgctgccgctgctcctagaacagccgagccaagagacaagtggacccggagactgcggctcagccgcacactcgccgccaaagtcgagctggttgacattcaacgggaaggagctctacggtttatggtggctgatgatgcagctgccgggtctggcgggtctgctcagtggcaaaaatgtaggctgctcctgagaagagcagtggctgaagagcggtttcgactagagttcttcgtgccccctaaagcctcacgacctaaggtgtcaatcccattgtcagccatcatcgaggtccgaaccaccatgcccttggaaatgcccgagaaagacaacaccttcgttctcaaagtggaaaacggagccgaatacatcctagagaccatagactcccttcagaagcacagttgggtggctgacattcaaggatgcgtggatccggggccaggccccggagacctcgaagggagttggacacgtagttgccttcaccctaaaagggcaagcgaacattgggagctaggccgtgatggaagcgagtcccccaagggatggggcccaggcgctgtggctcacatatgcgaccctaatacgctgggtgggcctgcagtggaaacaggcttccaccatgttggacaggctgggctcgagctccagacttcttccgatcctccaaacagcgcatcgcgctcggcgacttccggtgagcaaggcgcagagacggatcctgaggcagaacccgagcttgagctgagcgattatccatggttccatggtacgctgtcccgcgttaaagcagcccagctggtgctggccgggggaccccggaatcatggacttttcgtgatccgtcaaagcgaaactaggcccggcgagtatgtccttacgttcaactttcagggcaaggctaaacacttgagactcagcctcaatggacacggccaatgtcacgttcaacatctatggttccagtctgtgcttgatatgctccgccattttcacacgcaccctattcccttggaaagcgggggctcagccgatattaccctgaggtcctatgtcagggcccaggatcctcccccggaacctggtccgactccgcctgctgccccagctagtccagcctgttggagcgacagccctggccaacactatttcagcagcctcgcagctgcagcatgtccgcctgcctcgcctagcgatgccgcaggtgctagctcttccagcgctagcagctcaagcgcggccagcggtccagcccctccgagacccgtggaaggccagctgagcgctcgttctcgttccaattccgcagaaagactgcttgaggctgtggcagccaccgctgccgaggagccccctgaagcagctccaggcagggccagagctgtcgagaatcaatattcattctactag

SEQ ID NO: 306483 - DNA, 714 bp, Artificial Sequence
  derived and/or modified sequence
taagagcaaggtgcagagaccgaccctgaggctgaacctgaacttgagctttcagactatccctggtttcacgggacactgtctagagtaaaggccgcccaactggtgctcgctggcggccctcgcaaccacggtttgttcgtaataagacagtccgagaccaggcccggtgagtatgttctgacgttcaattttcagggcaaggcaaagcacctccggttaagcctcaacggccacggacagtgccatgtccagcatctgtggtttcagagcgtactggacatgcttcgccacttccacactcacccaattcccctggagagcgggggctctgccgatatcacactgcggagctatgtgcgggctcaagatcccccaccagagcccggacccactccgccagccgcccccgcctcaccagcttgctggtccgacagccccggccaacattactttagcagtctggccgctgcggcctgcccaccagccagtccttccgatgcggctggtgctagttcctcatctgccagcagctccagcgccgcctctggtccggcccccccacgacccgtcgaggggcaactgtccgctagaagcagatctaattctgccgaaaggctgctagaagccgtcgctgccacagctgcagaggagccacccgaagctgccccaggccgggcccgtgcggtcgagaaccagtattccttctactag

SEQ ID NO: 306484 - DNA, 927 bp, Artificial Sequence
  derived and/or modified sequence
atgaacggagccgggcccggacccgccgccgccgccccagtccctgtgcctgtccctgtgccagattggcgtcagttctgcgagttacacgcacaggccgcagcggtggactttgctcacaaattttgtcggttcctccgagacaatcccgcttacgacactcccgatgctggcgcgtccttttctaggcacttcgccgccaattttttggacgtttttggcgaagaagtccggcgggtgcttgttgcaggccctactacacgcggggccgctgtatcggctgaagcgatggaacctgaacttgccgacacgtcagctctcaaagcggcgccatatggccactcaaggtcctctgaggatgtctccacccacgccgcaactaaagctagggtgcgcaagggatttagcttgcggaatatgtcactgtgcgttgtcgatggcgtcagagatatgtggcatcgcagggccagccccgaaccagatgctgccgcagctcccaggaccgccgagccacgggataagtggacacgccgacttcggctcagccgcacgttggctgcgaaagtggagctggttgatattcagagggagggggctctgcggttcatggtggccgacgacgcagccgctggctctggtggcagtgcccagtggcagaaatgtcgcctcctgttacgtagagccgttgctgaggaaaggttccgtctggaattcttcgttccacctaaggcctctaggcccaaggtttccatccctctatccgcaatcatcgaagttagaactacaatgcctctagaaatgcctgagaaggacaacacattcgtactcaaggttgaaaacggcgccgaatacatcctggaaacgatagacagtttgcagaagcactcttgggtggctgacatccagggatgcgtcgaccctggatag

SEQ ID NO: 306485 - DNA, 1896 bp, Artificial Sequence
  derived and/or modified sequence
atgaatggagctggccctggccctgctgctgctgcccctgtgcctgtgcctgtgcctgtgcctgactggaggcagttctgtgagctgcacgcccaggccgctgctgtggactttgcccacaagttctgccgcttcctgcgggacaacccagcctatgacaccccagatgctggggccagcttcagccgccactttgctgccaacttcctggatgtgtttggagaggaggtgcggcgggtgctggtggccggccccaccaccagaggagctgctgtgtctgctgaggccatggagcctgagctggccgacaccagcgccctgaaggccgccccctacggccacagccgcagcagtgaagatgtgtccacccatgctgccaccaaggcccgggtgaggaagggcttcagcctgaggaacatgagcctgtgtgtggtggatggagtgcgggacatgtggcaccggcgggccagccctgagccagatgctgctgctgcccccaggacagctgagccccgggacaagtggacccggcggctgcggctgagcaggaccctggccgccaaggtggagctggtggacatccagcgggagggcgccctgcgcttcatggtggctgatgatgctgctgctggcagcggcggcagcgcccagtggcagaagtgccgcctgctgctgcggcgggctgtggccgaggagcgcttccggctggagttctttgtgccccccaaggccagccggcccaaggtgtccatccccctgagcgccatcatcgaggtgaggaccaccatgcccctggagatgcctgagaaggacaacacctttgtgctgaaggtggagaatggagctgagtacatcctggagaccatcgacagcctgcagaagcacagctgggtggccgacatccagggctgtgtggaccccggccctggccctggggacctggagggctcctggaccaggagctgcctgcaccccaagagggccagcgagcactgggagctgggcagagatggcagcgagagccccaagggctggggccctggagctgtggcccacatctgtgaccccaacaccctgggcggccctgctgtggagaccggcttccaccacgtgggccaggccggcctggagctgcagaccagcagtgacccccccaacagcgccagccgcagcgccaccagcggggagcagggcgctgagacagatcctgaggccgagcctgagctggagctgagtgactacccctggttccacggcaccctgagccgggtgaaggccgcccagctggtgctggccggcggccccaggaaccacggcctgtttgtgatccggcagagcgagaccaggcctggagaatatgtgctgaccttcaacttccagggcaaggccaagcacctgcggctgagcctgaatggacatggccagtgccacgtgcagcacctgtggttccagagcgtgctggacatgctgcggcacttccacacccaccccatccccctggagagcggcggcagcgctgacatcaccctgcggagctatgtgcgggcccaggaccccccacctgagcccggccccaccccacctgctgccccagccagccctgcctgctggagcgacagccctggccagcactacttcagcagcctggccgccgccgcctgccccccagccagccccagtgatgctgctggggccagcagcagcagcgccagcagcagcagcgctgccagcggccctgccccacccaggcctgtggagggccagctgagcgcccggagccgcagcaacagcgctgagcggctgctggaggccgtggccgccacagctgctgaggagcccccagaggccgcccctggccgggcccgggctgtggagaaccagtacagcttctactag

SEQ ID NO: 306486 - DNA, 714 bp, Artificial Sequence
  derived and/or modified sequence
tgagagcagggcgctgagacagatcctgaggccgagcctgagctggagctgagtgactacccctggttccacggcaccctgagccgggtgaaggccgcccagctggtgctggccggcggccccaggaaccacggcctgtttgtgatccggcagagcgagaccaggcctggagaatatgtgctgaccttcaacttccagggcaaggccaagcacctgcggctgagcctgaatggacatggccagtgccacgtgcagcacctgtggttccagagcgtgctggacatgctgcggcacttccacacccaccccatccccctggagagcggcggcagcgctgacatcaccctgcggagctatgtgcgggcccaggaccccccacctgagcccggccccaccccacctgctgccccagccagccctgcctgctggagcgacagccctggccagcactacttcagcagcctggccgccgccgcctgccccccagccagccccagtgatgctgctggggccagcagcagcagcgccagcagcagcagcgctgccagcggccctgccccacccaggcctgtggagggccagctgagcgcccggagccgcagcaacagcgctgagcggctgctggaggccgtggccgccacagctgctgaggagcccccagaggccgcccctggccgggcccgggctgtggagaaccagtacagcttctactag

SEQ ID NO: 306487 - DNA, 927 bp, Artificial Sequence
  derived and/or modified sequence
atgaatggagctggccctggccctgctgctgctgcccctgtgcctgtgcctgtgcctgtgcctgactggaggcagttctgtgagctgcacgcccaggccgctgctgtggactttgcccacaagttctgccgcttcctgcgggacaacccagcctatgacaccccagatgctggggccagcttcagccgccactttgctgccaacttcctggatgtgtttggagaggaggtgcggcgggtgctggtggccggccccaccaccagaggagctgctgtgtctgctgaggccatggagcctgagctggccgacaccagcgccctgaaggccgccccctacggccacagccgcagcagtgaagatgtgtccacccatgctgccaccaaggcccgggtgaggaagggcttcagcctgaggaacatgagcctgtgtgtggtggatggagtgcgggacatgtggcaccggcgggccagccctgagccagatgctgctgctgcccccaggacagctgagccccgggacaagtggacccggcggctgcggctgagcaggaccctggccgccaaggtggagctggtggacatccagcgggagggcgccctgcgcttcatggtggctgatgatgctgctgctggcagcggcggcagcgcccagtggcagaagtgccgcctgctgctgcggcgggctgtggccgaggagcgcttccggctggagttctttgtgccccccaaggccagccggcccaaggtgtccatccccctgagcgccatcatcgaggtgaggaccaccatgcccctggagatgcctgagaaggacaacacctttgtgctgaaggtggagaatggagctgagtacatcctggagaccatcgacagcctgcagaagcacagctgggtggccgacatccagggctgtgtggaccctggatag

SEQ ID NO: 306488 - DNA, 453 bp, Artificial Sequence
  derived and/or modified sequence
atggagaacaaccccagccacaaccctgtgagccccagccccttccccacccgcatcagcgcccccctgaacatgagccagagccacttccgggagaactggctgatgctgaagaagagcctggagggcaagctgtgccccagcagctgtggcagcctgaagtgccgggccagccgcagccccagcgtgggcaccggccccagcctgcccatcgagtgcttcctgtacatgaagacctggagcagcctgcagatgacagtggccagcgaggaggacaagaggcgggagaagacccagaatgccggcctgcccctcttctttgccagcacagtgggcaccgtgaccctgcccagcttccaccacctgcagctgcacacccacacccacaccctggtgccccagagcctgtttggcacctgcctgacagcccacctggagacccgctggagctag

SEQ ID NO: 306489 - DNA, 1896 bp, Artificial Sequence
  derived and/or modified sequence
atgaacggcgccggccccggccccgccgccgccgcccccgtgcccgtccctgtgcccgtccccgattggcggcagttctgtgaattacacgctcaggcagcagcagtcgactttgcccataagttttgtcggtttctgagggacaaccctgcctacgacaccccagacgctggggccagctttagcaggcactttgccgctaatttcttggatgtgttcggtgaggaggttcgacgcgtattggttgccgggccaactacacgcggagccgccgtgagcgccgaagctatggagcccgagctggccgataccagtgccttgaaggctgcgccctacggacactcacggtctagcgaggacgtttccacacacgctgcaacaaaagcacgggttagaaaagggttctcgctgagaaacatgtctttgtgcgtcgttgatggagtaagagacatgtggcaccggagagcctcccccgaaccagacgcggccgctgcccctcgaactgctgagccgcgcgataagtggacgaggagactccgtctgagcaggaccctggccgccaaagtcgagttagtggacatccagcgagaaggcgcactgaggttcatggtggctgatgacgctgccgcgggtagcggcgggtcagcccagtggcagaagtgcaggttactgctacgtagggctgtcgctgaagagaggttcagactggaattcttcgtacctccaaaggcatctcgcccgaaggtctcgattcctctttccgcgattatcgaagtgcgcacgacaatgcctttggaaatgcctgaaaaagacaatacttttgtgttaaaggttgagaatggggctgagtacatcttggaaaccattgacagcttgcaaaagcacagctgggttgcagatatccagggatgtgtggatccagggcctggtccaggagacttagaggggtcatggacccggtcctgcctgcaccccaagcgcgcaagtgaacattgggagctaggccgggacggaagcgaatcccccaaagggtggggccccggcgctgtggcccatatatgcgatcccaacactttagggggtcccgcagtggagacaggttttcaccatgtaggacaagctggactagagctgcagacgtcctctgacccacctaattcagcgtccaggagtgctacttctggtgagcaaggagcggagactgaccccgaggccgagcctgaactggagctgagtgattacccttggtttcacgggactctgtcccgggtgaaggctgcgcagctggtactagccgggggcccacgcaatcatggactcttcgtcatcaggcaaagcgagacccgacccggtgagtacgtgttgacattcaacttccagggcaaagcaaaacatttaaggctgagtctgaatggccacggccagtgccatgtacagcacctatggttccagtccgtgctggacatgctgagacactttcacactcatccaattcctctggagtccggcggctcagccgacatcaccctgaggtcctacgtgagagcacaagacccccccccagaaccaggccctacaccacccgctgcccccgcgtcaccagcttgttggagcgattctcctggccagcactactttagttcccttgcagccgctgcttgccctcccgcaagccctagtgacgccgcaggagccagcagttcgtccgcatccagttctagcgccgcaagcggaccagcccctccccggcctgtggaaggccagctgagcgcacgctccagatcaaactctgcggagcggctgctggaagctgtggcagccaccgccgctgaggagccacccgaggctgccccggggagagcccgggcagtcgaaaaccagtattccttctactag

SEQ ID NO: 306490 - DNA, 714 bp, Artificial Sequence
  derived and/or modified sequence
tgagagcagggcgccgagaccgaccccgaggccgagcccgagctggagctctcagactacccttggttccatgggaccctctcgcgagtgaaagctgctcagctcgtgcttgccgggggacccagaaaccacggcctgtttgttatccgccagtcagaaactagaccaggggagtacgtgctgacctttaactttcaggggaaggctaaacatttgaggttgtctttgaatgggcacgggcaatgccatgttcagcatttgtggtttcagagcgtcctggacatgctgaggcactttcacactcaccctatcccgctggagagtggcggctccgccgatatcactttacggtcgtatgtccgggcccaggacccgccacccgaacccggacccacgccaccagctgcacctgccagtccagcttgctggagcgattcaccgggacagcactactttagttctcttgccgctgcagcttgccccccagcttcccccagcgacgctgccggagccagctcctcatcggcctcctcttcttctgccgcttcaggcccagccccacctagaccggtcgagggccagctcagcgcaaggtccaggagcaactcggccgagcggctcttggaggccgttgcagccactgccgcggaggagccccccgaagcagcacccggcagggccagggcagtggagaatcagtactcgttctactag

SEQ ID NO: 306491 - DNA, 927 bp, Artificial Sequence
  derived and/or modified sequence
atgaacggcgccggccccggccccgccgccgccgcccccgtgcccgttccagttccagttcccgattggaggcaattctgcgaactccatgcccaagccgctgccgtcgactttgctcacaaattctgccggttcctgagggataaccctgcgtacgatactcctgatgccggcgcgtccttttcaaggcatttcgcagcgaatttcttagacgtcttcggggaggaagtgcgtcgggtgctggtcgcgggcccgacaactaggggcgctgctgtctctgctgaagctatggaacccgaacttgctgatacatccgccctgaaggcagcaccctacggccactctcgctcatccgaggacgtgtccacccacgccgccactaaggctagagtccgaaaagggttttccctccggaatatgtctctctgtgtcgtagatggagtcagagacatgtggcataggcgggcatccccggagcctgacgccgccgcagccccacgtactgcagaaccaagggataaatggaccaggcgcttgagattatccagaacgttggctgccaaagtggaactcgtcgatatccaaagagagggtgctcttcgttttatggttgccgatgacgcagctgccggcagcggcggctctgctcagtggcagaagtgtcggctcttgctgcgtagagcagtggcagaggagaggttccgccttgagtttttcgtaccgcccaaggccagtcgtcccaaggtgtcaattcctctttccgccattatcgaggttcgtactaccatgccgctcgagatgccagaaaaggataacaccttcgtgcttaaagtggaaaacggagcggaatatattctggagacaatcgattcactgcaaaaacatagttgggttgccgacatacagggatgtgtggatcccggttag

SEQ ID NO: 306492 - DNA, 1896 bp, Artificial Sequence
  derived and/or modified sequence
atgaatggagccggtccaggacctgccgctgctgcgcctgttcccgtgcctgtgccagtcccagattggaggcagttttgtgagctccacgcgcaggctgctgccgttgacttcgcccacaaattctgcagattcctgcgcgacaatcctgcttatgatacaccagacgccggagccagtttttcgcgccacttcgcagcaaacttcctcgatgtctttggggaagaagtacggagggtgctcgtggcgggtcccactacccgtggtgctgcagtttccgctgaggccatggaaccagagcttgctgacacctcagctttgaaggctgctccatacggacattcccggagctccgaagacgtgtccacgcatgcggctacaaaggcaagagtgcgcaagggcttctcgctccggaatatgagtttgtgcgttgtcgacggtgtgcgtgatatgtggcaccggagggcctcgcctgaacccgatgcggctgcagcacctcgcaccgccgaacccagggacaaatggacaaggcgcttgcggctgtccaggacgctggctgcaaaggttgaactagtcgacatccagagagagggcgcattacggttcatggttgcagatgatgccgcagctggtagcggaggcagcgctcaatggcagaagtgtagactcctgcttcgtagggctgtggccgaagaacgcttccggctcgagttttttgtgcctcctaaggcatcaagaccaaaagtgagcatccctttatctgcaatcatcgaggtccgaacaacaatgccactcgagatgcccgaaaaggacaacactttcgtgctcaaagtggagaatggtgccgaatatatcctggaaaccattgattctctacagaaacactcctgggtggctgacattcaggggtgcgtggaccctggacccggacccggagacctagaaggtagctggacgaggtcttgcttgcaccctaaacgggcttcggaacactgggagctgggtcgcgatggaagtgaaagtcccaagggctggggacctggagctgttgcgcatatctgtgacccaaatacactcggaggacccgcagtcgaaacaggatttcaccatgtggggcaggccggtctcgagctccagaccagctcggatcccccaaattctgccagcagatctgcaaccagtggggagcagggagcggaaaccgaccctgaagctgagccggaactggaactttctgattatccttggttccatggaaccctgagccgagtgaaagctgcccagctcgtgctggccggaggtccaaggaatcatggcctgtttgtgattaggcagtctgaaacccgccctggtgaatatgtcttgactttcaactttcaggggaaagcaaagcatctaagattatcacttaacggtcacggacagtgccatgtgcagcacctgtggttccagtctgttctggacatgttgcgccactttcatactcaccccattccactcgagagcggcggatctgccgatataacccttcgcagctacgtccgggctcaggatcctcccccagagcctggccctactcccccagcagcccctgcatcccctgcctgttggtccgactccccgggtcaacactattttagctccctcgccgctgcagcttgccctccggcaagcccatcagacgcggctggggctagctcatcctcagcgtcttctagctcagccgctagtgggccagcgcctcctaggcctgtggaaggccagctgtcagcgagatcacgcagtaacagtgccgaacggttactagaggccgttgcggctactgccgcagaagagccacccgaggccgcaccaggccgagcacgcgcagttgaaaaccagtactctttttactag

SEQ ID NO: 306493 - DNA, 714 bp, Artificial Sequence
  derived and/or modified sequence
taagaacagggcgcagagaccgatcccgaagccgagcctgagctggagttgtctgactacccttggtttcacggaactctgtctcgagttaaggcagcacagctcgtattggccggtggtccgaggaaccatgggctgtttgtcattcgacaatccgaaactagacccggagagtatgtcctgacttttaacttccagggtaaagcaaagcatctgcgactgagtctcaacgggcacgggcaatgtcacgtacagcatctgtggttccagtcagttttggacatgctgcgacactttcatactcaccccattccacttgagagcggaggctccgcagatattacattaaggtcttacgttagggctcaggatccacctccagagccgggtcccacccccccagccgctccggcaagccctgcttgctggagtgactcacctggccagcactacttctctagcttggccgctgccgcatgtccacccgcttcccccagcgacgccgctggtgcttcttcgagctccgcgagcagttcttctgccgcttcaggacccgctccacccagacctgtggagggacaattgagtgcaagatcgagaagcaacagtgcggagcgactgctcgaagctgtggcagccaccgccgcagaggagcctcctgaggccgctccagggagggctcgcgctgttgaaaaccaatactctttctactag

SEQ ID NO: 306494 - DNA, 927 bp, Artificial Sequence
  derived and/or modified sequence
atgaacggggctggtccgggtccagcggcagctgctcccgtcccggtacctgtgccggtacctgattggcgccagttttgcgagctccatgctcaggcggctgcagtggatttcgctcacaaattttgtcggtttctcagggacaatccagcttacgatactccggatgcaggagctagtttttctcggcacttcgctgccaacttccttgacgtgttcggagaggaggttcggagggttctggtcgctggcccaacgactcgcggagcagctgttagtgcggaggctatggaacctgaactcgcagacacctcagcactgaaagccgcaccctatggccattcccgctcatccgaagacgtaagtactcacgctgccaccaaggcaagagtacgcaaaggctttagtctaagaaacatgtccctgtgcgtggtcgatggcgttagggacatgtggcacaggcgggcttctccggaacccgatgctgcggctgctcccaggactgctgagccacgcgataagtggactcgcagactacggttgtctcgtactctggcagcaaaagtcgaactcgtggatattcagcgggaaggagcacttaggttcatggtagctgacgatgctgccgcaggatccggcggtagcgctcagtggcagaagtgtagactattacttagaagggcagtggccgaggaacgcttccgcctcgaatttttcgtcccacccaaggcatctcgtccaaaggtgtccatcccactctccgcgattatcgaagtgagaaccacaatgccgcttgagatgcccgaaaaggataatacgtttgtgctgaaagtcgaaaatggcgctgaatatattctggaaacaatcgatagtctgcagaaacattcttgggttgctgacatccagggctgtgtcgaccccggatag

SEQ ID NO: 306495 - DNA, 1896 bp, Artificial Sequence
  derived and/or modified sequence
atgaatggtgccggccctggccccgccgcagccgccccggtcccagtcccggtcccggtcccggactggcggcagttctgcgagctgcatgcgcaggcggccgccgtggactttgcgcacaagttctgccgtttcctgcgggacaacccagcttacgacacgcccgacgccggcgcctccttctcccgccacttcgccgccaacttcctggacgtcttcggcgaggaggtgcgccgcgtgctggtggctgggccgacgactcggggcgcggccgtgagcgcagaggccatggagccggagctcgcggacacctctgcactcaaggcggcgccctacggccactcgcggagctcggaggacgtgtccacgcacgcggccaccaaggcccgcgttcgcaagggcttctcgctgcgcaacatgagcctgtgcgtggtggacggcgtgcgcgacatgtggcaccggcgcgcctcgcccgagcccgacgcggcagctgccccgcgcaccgccgagccccgcgacaagtggacgcggcgcctgaggctgtcgcggacgctggctgccaaggtggagctggtggacattcaacgcgagggggcgctgcgcttcatggtggccgacgacgcggccgcgggctccgggggctcggctcagtggcagaagtgccgcctgctcctgcgcagggctgtggccgaggaacgcttccgcctggagttcttcgtgccgcccaaagcctccaggcccaaggtcagcatcccactgtcagccatcattgaggtccgcaccaccatgcccctggaaatgccagagaaggataacacattcgtcctcaaggtagagaatggagccgaatacatcttggagaccatcgactctctgcagaagcactcgtgggtagctgacatccagggctgcgtggaccccgggccagggcctggggacctggaaggaagttggaccaggtcttgtcttcaccccaagagagcctcagagcactgggagttgggcagagatggcagtgagtccccaaagggctgggggcctggtgcagtggctcacatctgtgaccccaacactttgggaggcccagctgtagagacggggtttcatcatgttggccaggctggtctcgaactccagacctcaagtgatccgcccaactcagcctcccgaagtgccacctcaggggaacagggtgcagagacggatcccgaggctgaacccgagctggagctatccgactacccatggttccacgggacactgtcccgggtcaaggctgctcaactggttctggcaggggggccccggaaccacggcctcttcgtgatccgccaaagtgagactcggcctggggagtacgtgctgaccttcaacttccagggcaaggccaagcacctgcgcctgtccctgaacggccacggccagtgtcacgtacagcatctgtggttccagtctgtgcttgacatgctccgccacttccacacacaccccatcccactggagtcagggggctcggccgacatcacccttcgcagctatgtgcgggcccaggaccccccaccagagccgggccccacgccccctgccgcgcccgcgtccccggcctgctggagcgactcgcccggccagcactacttctccagcctcgccgcggccgcctgcccgcctgcctcgccctccgacgccgccggcgcctcctcgtcttccgcctcgtcgtcctctgccgcgtcggggcccgcccccccgcgccccgtcgagggccagctcagcgcgcggagccgcagcaacagcgccgagcgcctgctggaggccgtggccgccaccgccgccgaggagcccccggaggccgcgcccggccgcgcgcgcgccgtggagaaccagtactccttctactag

SEQ ID NO: 306496 - DNA, 794 bp, Artificial Sequence
  derived and/or modified sequence
gggaacagggtgcagagacggatcccgaggctgaacccgagctggagctatccgactacccatggttccacgggacactgtcccgggtcaaggctgctcaactggttctggcaggggggccccggaaccacggcctcttcgtgatccgccaaagtgagactcggcctggggagtacgtgctgaccttcaacttccagggcaaggccaagcacctgcgcctgtccctgaacggccacggccagtgtcacgtacagcatctgtggttccagtctgtgcttgacatgctccgccacttccacacacaccccatcccactggagtcagggggctcggccgacatcacccttcgcagctatgtgcgggcccaggaccccccaccagagccgggccccacgccccctgccgcgcccgcgtccccggcctgctggagcgactcgcccggccagcactacttctccagcctcgccgcggccgcctgcccgcctgcctcgccctccgacgccgccggcgcctcctcgtcttccgcctcgtcgtcctctgccgcgtcggggcccgcccccccgcgccccgtcgagggccagctcagcgcgcggagccgcagcaacagcgccgagcgcctgctggaggccgtggccgccaccgccgccgaggagcccccggaggccgcgcccggccgcgcgcgcgccgtggagaaccagtactccttctactagcccgcggcgccgcccgggtgggacacgccaagctcttcagtgaagacacgatgttattaaaagcctgttttagggactgca

SEQ ID NO: 306497 - protein, 151 aa, Artificial Sequence
  derived and/or modified sequence
MQHREVRVKCVKALKGLYGNRDLTARLELFTGRFKDWMVSMIVDREYSVAVEAVRLLILILKLFYPECEIRTMGGREQRQSPGAQRTFFQLLLSFFVESKLHDHAAYLVDNLWDCAGTQLKDWEGLTSLLLEKDQSTCHMEPGPGTFHLLG

SEQ ID NO: 306498 - protein, 205 aa, Artificial Sequence
  derived and/or modified sequence
MIFSMLRKLPKVTCRDVLPEIRAICIEEIGCWMQSYSTSFLTDSYLKYIGWTLHDKHREVRVKCVKALKGLYGNRDLTARLELFTGCFKDWMVSMIMDREYSVAVEAVRLLILILKLFYPECEIRTMGGREQRQSPGAQRTFFQLLLSFFVESKLHDHAAYLVDNLWDCAGTQLKDWEGLTSLLLEKDQSTCHMEPGPGTFHLLG

SEQ ID NO: 306499 - protein, 262 aa, Artificial Sequence
  derived and/or modified sequence
MLHKEGIQFSLSELPPAGSSNQPPNLAFLELLSEFSPRLFHQDKQLLLSYLEKCLQHVSQAPGHPWGPVTTYCHSLSPVENTAETSPQVLPSSKRRRVEGPAKPNREDVSSSQEESLQLNSIPPTPTLTSTAVKSRQPLWGLKEMEEEDGSELDFAQGSQPVAGTERSRFLGPQYFQTPHNPSGPGLGNQLMRLSLMEEDEEEELEIQDESNEERQDTDMQASSYSSTSERGLDLLDSTELDIEITESLPLLGKSPHPYNSR

SEQ ID NO: 306500 - protein, 112 aa, Artificial Sequence
  derived and/or modified sequence
MSSPLQRAVGDTKRALSASSSSSASLPFDDRDSNHTSEGNGDSLLADEDTDFEDSLNRNVKKRAAKRPPKTTPVAKHPKKGSRVVHRHSRKQSEPPANDLFNAVKAAKSDMQ

SEQ ID NO: 306501 - DNA, 405 bp, Artificial Sequence
  derived and/or modified sequence
atgatcttttcgatgctccgcaaactgcctaaggtgacctgtcgggacgtattaccagagattcgggctatatgcatcgaagagatcgggtgttggatgcagagctactcaacctcatttctcaccgattcctacctaaaatacattggttggacactacatgataagcacagagaagtgcgagttaagtgcgtcaaggccctgaagggcctgtacggtaacagagacctgacggcacgactggagctgttcactggccggttcaaggactggatggtgtcaatgattgtggatcgcgagtattccgtggccgtcgaagctgttcgcttgctcattctcatattaaagaacatggagggggtgctcatggacgtcgactgtgagtcagtgtaccctattgtttag

SEQ ID NO: 306502 - DNA, 618 bp, Artificial Sequence
  derived and/or modified sequence
atgatcttctctatgctgaggaagctccccaaggtgacttgtcgcgacgtactgcccgagatcagagccatctgcattgaggagattggatgctggatgcagagctattccacaagtttccttactgattcatatctgaagtatattggatggaccctgcacgataagcaccgtgaggtcagagtcaagtgtgtcaaggcactgaaggggctctacggcaatagagatttaacagcccggctggaactttttaccgggcgattcaaggattggatggtgtccatgattgtggaccgggaatattctgttgctgtagaggctgtgcgtctgctgatccttatccttaagcttttttacccagaatgcgaaattcggaccatgggtgggcgagagcaacgccagtcccctggggcgcaaaggacattttttcagttactcctgtcattctttgtcgagtcgaagctgcacgatcatgcggcctatctggtagacaacttgtgggattgcgctggaacgcaactcaaggactgggagggtcttacgtcactgctcctcgaaaaagaccaaagcacgtgccatatggagcccggtcccggcaccttccatttactgggttag

SEQ ID NO: 306503 - DNA, 387 bp, Artificial Sequence
  derived and/or modified sequence
atgatcttttctatgctgcgaaagctcccaaaggtgacttgcagagacgtccttccagagattcgcgccatatgcattgaggaaataggttgttggatgcagtcttattcaacgagctttctgacggattcctatttgaaatatattggctggactttacacgataagcatagagaagtgagggttaagtgtgtcaaggccctgaagggcttatacggcaacagggacctcacagcacggttggaactgttcaccggcaggttcaaagactggatggtctcgatgatcgttgatagagaatacagcgtggctgttgaagcagttcggctcctgatactgatcttgaagatcggctcccaaacaccggctacccgcgaatgtatttag

SEQ ID NO: 306504 - DNA, 405 bp, Artificial Sequence
  derived and/or modified sequence
atgatcttctctatgttgcggaagctccctaaggttacatgtcgtgatgtactgccagaaataagggcgatttgcatcgaagagattggatgctggatgcagtcatattcaacctcatttttgaccgatagctatctaaagtatatcggatggacacttcatgataagcaccgtgaagtgagggttaagtgcgtaaaggcactcaagggcctctatggtaatagggacctgaccgcaaggttagagctattcaccggccgcttcaaggattggatggtgagtatgatcgtagaccgcgagtacagtgtggcggtagaggcagtgaggttattgattctaatccttaagaacatggagggcgtcctgatggacgtggactgcgaatctgtctaccccattgtgtag

SEQ ID NO: 306505 - DNA, 405 bp, Artificial Sequence
  derived and/or modified sequence
atgattttttcaatgttacgaaaactgcctaaagttacctgccgcgacgttctacctgaaatccgggctatttgcatcgaagaaattgggtgttggatgcagagctattctacctcatttctcaccgatagctatcttaagtacattggttggacactacatgacaagcatcgcgaggtcagagtgaaatgcgtcaaagctctcaaggggctgtacggcaaccgcgaccttaccgcccgactagagttgttcactgggcgatttaaggattggatggtgagcatgatcgtcgacagagagtattcagtggcggtggaagcggttcgactgctgattctcattctcaagaacatggaaggcgtcctcatggatgtcgattgcgaatccgtgtacccaatcgtttag

SEQ ID NO: 306506 - DNA, 405 bp, Artificial Sequence
  derived and/or modified sequence
atgattttctctatgctgaggaaactccctaaagtcacttgccgcgatgtccttccggagatccgtgccatctgtatcgaagagattggctgctggatgcagtcttatagcacctccttcttaactgatagctatctgaagtacattggatggactctgcatgacaaacaccgggaggttagggtcaaatgtgtgaaggccctaaaagggttgtacggtaatcgtgacctgaccgcccgactcgaactattcaccggacgctttaaggattggatggtgtcaatgatagtggatcgcgagtactcagtggcagtcgaggcagtaagactattgattctgattctgaagaacatggagggggttttgatggacgttgattgcgagtcagtctaccctatcgtctag

SEQ ID NO: 306507 - DNA, 618 bp, Artificial Sequence
  derived and/or modified sequence
atgatcttctccatgctgcgtaaactgcccaaagtgacttgcagggacgtcctgcctgaaatccgagctatatgcatcgaagagatcggctgttggatgcagtcttactcaactagttttctgactgacagttatttgaaatacatcggctggacactgcacgacaagcacagggaggtgcgcgtgaagtgcgtcaaggcacttaagggactgtatggtaaccgcgatctcaccgccaggctggagctatttacaggctgctttaaagattggatggtgtccatgattatggatcgcgaatatagtgtggcagttgaggctgtgaggcttctgatccttatactgaagctcttttaccctgagtgtgaaattcgcacaatgggcggacgcgaacaacggcagtcacctggggctcagcgcactttcttccaacttcttctcagcttctttgtggagtctaagcttcacgaccacgctgcttatctcgttgataacctttgggattgtgctggcacccagctaaaggactgggagggcctcacatctctcctcctggagaaagatcagtctacatgtcacatggaaccgggccccggcacatttcatctgctcggatag

SEQ ID NO: 306508 - DNA, 405 bp, Artificial Sequence
  derived and/or modified sequence
atgatattcagtatgctgcggaaattacccaaggttacttgcagagatgttctgccagagatccgggccatatgcatcgaggagatcggctgctggatgcagagctactcaacgagtttccttactgactcctatttaaaatatataggatggaccctccacgataaacatagagaagtccgcgtgaaatgtgtgaaagcgctcaagggactttacggcaacagagatctgacggctagactggaactgttcactggatgctttaaggattggatggtttctatgatcatggatcgggaatatagtgtggcagtggaagccgtgcgcctgctgattctgatcctcaagaatatggagggcgtcctgatggatgtcgattgtgaatcggtctatccaattgtgtag

SEQ ID NO: 306509 - DNA, 351 bp, Artificial Sequence
  derived and/or modified sequence
atgatcttctctatgctgcggaaactccccaaggtgacatgcagagacgtgctgcccgagatcagggctatctgtattgaggagatcggatgttggatgcagagttattccaccagctttctcacggattcctacctcaagtacattggttggacattacacgacaagcaccgggaggtgcgagtgaagtgcgtgaaggccctaaagggtctgtatgggaaccgagatcttaccgctcgcctggagctgttcaccggctgctttaaggattggatggtttccatgatcatggatagagagtacagcgtggcagtggaagcagtgaggctgctgatcctcattttaaagtag

SEQ ID NO: 306510 - DNA, 405 bp, Artificial Sequence
  derived and/or modified sequence
atgatcttctccatgctgaggaagctgcccaaggtgacctgcagagatgtgctgcctgagatccgggccatctgcatcgaggagatcggctgctggatgcagagctacagcaccagcttcctgacagacagctacctgaagtacatcggctggaccctgcatgacaagcaccgggaggtgcgggtgaagtgtgtgaaggccctgaagggcctgtatggcaacagagacctgacagcccggctggagctgttcaccggccgcttcaaggactggatggtgtccatgattgtggaccgggagtacagcgtggccgtggaggccgtgcggctgctgatcctgatcctgaagaacatggagggcgtgctgatggatgtggactgtgagagcgtgtaccccatcgtgtag

SEQ ID NO: 306511 - DNA, 618 bp, Artificial Sequence
  derived and/or modified sequence
atgatcttctccatgctgaggaagctgcccaaggtgacctgcagagatgtgctgcctgagatccgggccatctgcatcgaggagatcggctgctggatgcagagctacagcaccagcttcctgacagacagctacctgaagtacatcggctggaccctgcatgacaagcaccgggaggtgcgggtgaagtgtgtgaaggccctgaagggcctgtatggcaacagagacctgacagcccggctggagctgttcaccggccgcttcaaggactggatggtgtccatgattgtggaccgggagtacagcgtggccgtggaggccgtgcggctgctgatcctgatcctgaagctgttctacccagaatgtgagatccgcaccatgggcggccgggagcagaggcagagccctggggcccagaggaccttcttccagctgctgctgtccttctttgtggagagcaagctgcatgaccatgctgcctacctggtggacaacctgtgggactgtgccggcacccagctgaaggactgggagggcctgaccagcctgctgctggagaaggaccagagcacctgccacatggagcccggccctggcaccttccacctgctgggctag

SEQ ID NO: 306512 - DNA, 387 bp, Artificial Sequence
  derived and/or modified sequence
atgatcttctccatgctgaggaagctgcccaaggtgacctgcagagatgtgctgcctgagatccgggccatctgcatcgaggagatcggctgctggatgcagagctacagcaccagcttcctgacagacagctacctgaagtacatcggctggaccctgcatgacaagcaccgggaggtgcgggtgaagtgtgtgaaggccctgaagggcctgtatggcaacagagacctgacagcccggctggagctgttcaccggccgcttcaaggactggatggtgtccatgattgtggaccgggagtacagcgtggccgtggaggccgtgcggctgctgatcctgatcctgaagattggcagccagaccccagccacccgggagtgcatctag

SEQ ID NO: 306513 - DNA, 618 bp, Artificial Sequence
  derived and/or modified sequence
atgatcttctccatgctgaggaagctgcccaaggtgacctgcagagatgtgctgcctgagatccgggccatctgcatcgaggagatcggctgctggatgcagagctacagcaccagcttcctgacagacagctacctgaagtacatcggctggaccctgcatgacaagcaccgggaggtgcgggtgaagtgtgtgaaggccctgaagggcctgtatggcaacagagacctgacagcccggctggagctgttcaccggctgcttcaaggactggatggtgtccatgatcatggaccgggagtacagcgtggccgtggaggccgtgcggctgctgatcctgatcctgaagctgttctacccagaatgtgagatccgcaccatgggcggccgggagcagaggcagagccctggggcccagaggaccttcttccagctgctgctgtccttctttgtggagagcaagctgcatgaccatgctgcctacctggtggacaacctgtgggactgtgccggcacccagctgaaggactgggagggcctgaccagcctgctgctggagaaggaccagagcacctgccacatggagcccggccctggcaccttccacctgctgggctag

SEQ ID NO: 306514 - DNA, 405 bp, Artificial Sequence
  derived and/or modified sequence
atgatcttctccatgctgaggaagctgcccaaggtgacctgcagagatgtgctgcctgagatccgggccatctgcatcgaggagatcggctgctggatgcagagctacagcaccagcttcctgacagacagctacctgaagtacatcggctggaccctgcatgacaagcaccgggaggtgcgggtgaagtgtgtgaaggccctgaagggcctgtatggcaacagagacctgacagcccggctggagctgttcaccggctgcttcaaggactggatggtgtccatgatcatggaccgggagtacagcgtggccgtggaggccgtgcggctgctgatcctgatcctgaagaacatggagggcgtgctgatggatgtggactgtgagagcgtgtaccccatcgtgtag

SEQ ID NO: 306515 - DNA, 351 bp, Artificial Sequence
  derived and/or modified sequence
atgatcttctccatgctgaggaagctgcccaaggtgacctgcagagatgtgctgcctgagatccgggccatctgcatcgaggagatcggctgctggatgcagagctacagcaccagcttcctgacagacagctacctgaagtacatcggctggaccctgcatgacaagcaccgggaggtgcgggtgaagtgtgtgaaggccctgaagggcctgtatggcaacagagacctgacagcccggctggagctgttcaccggctgcttcaaggactggatggtgtccatgatcatggaccgggagtacagcgtggccgtggaggccgtgcggctgctgatcctgatcctgaagtag

SEQ ID NO: 306516 - DNA, 405 bp, Artificial Sequence
  derived and/or modified sequence
atgatcttcagcatgctgcggaagctgcccaaggtgacctgccgggatgttctgccagaaataagggctatctgcatcgaggaaattggatgctggatgcagtcttactcaacaagcttcttgactgatagctacctgaaatacatcgggtggacactgcacgacaagcaccgagaagttcgtgtgaaatgtgtcaaggcgctaaaggggctgtacgggaaccgggatcttactgcccggctggaattgttcaccggccggtttaaagactggatggtgtccatgatcgtcgatagagaatacagcgtagctgtagaggctgtgcggctgctcattttgatcctgaagaacatggagggagtgctgatggacgtcgactgcgagtcagtgtaccccatcgtatag

SEQ ID NO: 306517 - DNA, 618 bp, Artificial Sequence
  derived and/or modified sequence
atgatcttcagcatgctgcggaagctgcccaaggtgacctgccgggatgtcctacccgaaattcgcgctatttgtattgaggaaatcggttgttggatgcagagttacagtacatcctttctcaccgacagctaccttaaatatatcggctggacacttcacgataagcacagggaagtgcgggtgaaatgtgtcaaagctcttaaaggcctgtacggcaaccgggatctcacagcacggttagaactctttacaggtcgattcaaagactggatggtctccatgattgtggatcgtgagtattcagtagctgtagaagctgtaaggctcctgattctgatcctgaagctgttttatccggagtgcgagatcagaaccatgggcggcagggaacaaagacagagccccggtgcccagcgcaccttttttcagcttctgttgagtttcttcgtggaatccaaacttcacgatcacgctgcctacctcgtggacaacctgtgggactgcgccggaacccaacttaaggattgggagggcttgacctctctgctgctggagaaggatcagagcacctgccacatggaaccaggccctggcaccttccatctgctcggttag

SEQ ID NO: 306518 - DNA, 387 bp, Artificial Sequence
  derived and/or modified sequence
atgatcttcagcatgctgcggaagctgcccaaggtgacctgccgggatgtgctcccagagattagagccatctgtattgaggagatcggatgttggatgcagtcttactcaacatcatttcttacggacagctatctgaagtacatagggtggacgctgcatgacaaacatcgtgaagtgcgggtgaaatgcgttaaggcgttgaagggcctctacggcaatcgcgatctgacagcacggctggagctgttcaccggtaggttcaaagactggatggtgtctatgattgtagacagagagtacagcgtcgccgtcgaggccgtcagactgttaattcttatcctgaagatcggttcacagactccagctacgcgggagtgtatctag

SEQ ID NO: 306519 - DNA, 405 bp, Artificial Sequence
  derived and/or modified sequence
atgatcttcagcatgctgcggaagctgcccaaggtgacctgccgggatgtgctgccagaaatccgcgctatatgcattgaagaaattggttgctggatgcaaagttactccacaagttttttaacagacagctatcttaagtatattggatggactctgcatgataaacatagagaagtccgagttaaatgcgtcaaggcgttaaaggggctctatggcaatagagatctcacagcccgtctggagctgttcaccggaaggttcaaagattggatggtatcgatgatcgtcgatcgcgaatatagcgtggccgtcgaagcggtacgtctcttgatattaatattgaaaaatatggaaggagtgctgatggatgtcgattgcgaatccgtttacccaatagtgtag

SEQ ID NO: 306520 - DNA, 405 bp, Artificial Sequence
  derived and/or modified sequence
atgatcttcagcatgctgcggaagctgcccaaggtgacctgccgggacgtcttgcccgagatacgggccatatgcatcgaggagattggctgctggatgcagtcttactcaacaagctttctaacggattcctatctgaagtacatcgggtggactctgcacgataaacacagagaggttcgggtgaagtgtgttaaagccctgaagggattgtacggcaatcgggacctcaccgctagacttgaattgttcaccggacgtttcaaagactggatggtctccatgatcgtcgaccgggaatactccgtggccgttgaggcagttcgactcctaatactcatcctcaagaacatggaaggagtcctgatggatgtagattgtgagagcgtatatcccatcgtgtag

SEQ ID NO: 306521 - DNA, 405 bp, Artificial Sequence
  derived and/or modified sequence
atgatcttcagcatgctgcggaagctgcccaaggtgacctgccgggacgtgctgcctgagattcgcgccatctgcatcgaggagatcggctgctggatgcaatcttattcaacgagcttcctgaccgactcgtacctaaaatatattggatggactctccacgacaagcaccgcgaggtgagagtgaaatgtgtaaaggcacttaagggactgtatggaaacagagacctgaccgctcggctcgagctgtttacggggcgcttcaaggattggatggtgagcatgattgtcgatcgagagtacagtgtggccgtcgaggctgtcaggctcttgatccttattctaaaaaatatggagggggtgcttatggatgttgactgcgagtctgtctaccccatcgtgtag

SEQ ID NO: 306522 - DNA, 618 bp, Artificial Sequence
  derived and/or modified sequence
atgatcttcagcatgctgcggaagctgcccaaggtgacctgccgggatgtactgcccgaaatccgtgccatctgtatcgaggaaatcggatgttggatgcagagttacagcacatctttcttgaccgatagctatttgaagtacatcggctggactctccacgacaagcaccgcgaggtacgggtgaagtgtgttaaagcccttaagggactctacgggaatcgtgacctcaccgcccggctagagctctttactggctgcttcaaagattggatggtatctatgattatggatagagaatactccgtggctgtggaggccgtgcgactcctgattctgatcttaaagcttttctaccctgagtgcgaaattaggacgatgggcggtagggagcagagacagagtccaggagctcagcggacatttttccagctcctgctttcgttttttgtcgagtccaagctacacgatcatgcagcctatctggtggacaacttgtgggactgcgccggaacccagttgaaagactgggaggggttgaccagcctgttgttggagaaagaccagtctacttgccacatggagccagggcctggcacgttccacctgctggggtag

SEQ ID NO: 306523 - DNA, 405 bp, Artificial Sequence
  derived and/or modified sequence
atgatcttcagcatgctgcggaagctgcccaaggtgacctgccgggacgtgcttcccgagatccgagctatctgtatcgaggagattgggtgttggatgcagtcctactccaccagtttcctgaccgactcatacttgaaatatattgggtggactctgcacgacaagcacagggaagttcgagtgaaatgtgtcaaagcactgaagggactgtacggcaatcgtgatctgaccgcaaggctagagctatttactgggtgcttcaaagattggatggtgtctatgatcatggatagggagtattcagtggcagtcgaggccgtgcggctcctgatacttatcctcaagaacatggagggtgtgctgatggacgtggattgcgaatctgtgtacccaattgtgtag

SEQ ID NO: 306524 - DNA, 351 bp, Artificial Sequence
  derived and/or modified sequence
atgatcttcagcatgctgcggaagctgcccaaggtgacctgccgggatgttctgccagaaatcagggccatttgcatcgaagagatcggatgctggatgcagtcttactcgacatcatttctgactgattcctacctgaaatacatcgggtggactctacatgacaagcaccgagaagtccgagtgaagtgtgtgaaggctctcaagggtctgtacggcaatagggacctgacagcccggttggaactgtttacaggctgttttaaggactggatggtttccatgatcatggacagagagtactctgtagccgtggaggccgtacgactgctgatactgatcttgaaatag

SEQ ID NO: 306525 - DNA, 788 bp, Artificial Sequence
  derived and/or modified sequence
ccgaacgcccgcagcagggtcagaagggaggtggtcgccctccgtcgtggtctggcgtgtattccgagccttggtgtctggcggtttccgagcgttggtgtctggcggtttccgagcgttggtgtctggcggtttccgaccgttggtgtctggcggtttccgaccgttggtgtctggcacgcgccaccctctcttgctttggttgcgccatgccgatgtaccagacaagaagacaagaaaatgatttgaggacagcttcaatcgcggtgtgaagaagaaagcagcaaaacgaccactgaaaacaacgccggtggcaaaatatccaaagaaagggtcccaagcggtacatcgtcatagccggaaacagtcagagccaccagccaatgatcttttcaatgctgcgaaagctgccaaaagtgacatgcagggatgtccttcctgagatccgtgctatctgcattgaggaaattgggtgttggatgcaaagctacagcacgtctttcctcaccgacagctatttaaaatatattggttggactctgcatgataagcaccgagaagtccgcgtgaagtgcgtgaaggctctgaaagggctgtacggtaaccgggacctgaccgcacgcctggagctcttcactggccgcttcaaggactggatggtttccatgatcgtggacagagagtacagtgtggcagtggaggccgtcagattactgatacttatccttaagaacatggaaggggtgctgatggacgtggactgtgagagcgtctaccccattgtgtag

SEQ ID NO: 306526 - DNA, 1768 bp, Artificial Sequence
  derived and/or modified sequence
agagcacaccggactgcgttttttttccgaacgcccgcagcagggtcagaagggaggtggtcgccctccgtcgtggtctggcgtgtattccgagccttggtgtctggcggtttccgagcgttggtgtctggcggtttccgagcgttggtgtctggcggtttccgaccgttggtgtctggcggtttccgaccgttggtgtctggcacgcgccaccctctcttgctttggttgcgccatgccgatgtaccagacaagaagacaagaaaatgatttgaggacagcttcaatcgcggtgtgaagaagaaagcagcaaaacgaccactgaaaacaacgccggtggcaaaatatccaaagaaagggtcccaagcggtacatcgtcatagccggaaacagtcagagccaccagccaatgatcttttcaatgctgcgaaagctgccaaaagtgacatgcagggatgtccttcctgagatccgtgctatctgcattgaggaaattgggtgttggatgcaaagctacagcacgtctttcctcaccgacagctatttaaaatatattggttggactctgcatgataagcaccgagaagtccgcgtgaagtgcgtgaaggctctgaaagggctgtacggtaaccgggacctgaccgcacgcctggagctcttcactggccgcttcaaggactggatggtttccatgatcgtggacagagagtacagtgtggcagtggaggccgtcagattactgatacttatccttaaacttttctaccctgagtgcgagataagaacgatgggtggaagagagcaacgccagagcccaggtgcccagaggactttcttccagcttctgctgtccttctttgtggagagcaagctccacgaccacgctgcttacttagtagacaacctgtgggactgtgcagggactcagctgaaggactgggagggtctgacaagcctgctgctggagaaggaccagagcacgtgccacatggagccagggccagggaccttccacctcctagggtgaaaccaggagagattgcttgcttcacttgtacaaggcaggaacggtggcatggggtgggggaaacttggagttggaaggtggctaatctttgattctatgtttttgatcctcctggcactccagacctgggtgatgtgcaggagagcacactgatagaaatccttgtgtccagtgcccagcaactcctgcctcagcctcccgagcagctgggactacaggcgcccgccaccacgcctggctaacttttttgtatttttagtagagacgggttttcaccgtgttagccaggatggtcttgatctcttgaccttgtgatccacctgcctcatcatcccaaagtgctgggattacaggcgtgagccactgcgcccagcatgttagacaatttttaattcatcctctctgtgctgttgttttctcagctgtgaaaggaatattctggtggggacaaggttacagagttgctgagagggtctcatgacatgaaggtactggccttggcacagtgcctgggggggcggggactccgcacatgcctgtgatgtcacagttactgtcagttcacagtgaaccttccctccttttcctgttgactttcccacactcctgtaaccctccctccctcccttcttcctctctctctctctcactcacgcacacgcacacacacacacacacacacacacacacactccattcactgtctccatgactctggagtaaactaacgtctcgagttgc

SEQ ID NO: 306527 - DNA, 1200 bp, Artificial Sequence
  derived and/or modified sequence
ccgaacgcccgcagcagggtcagaagggaggtggtcgccctccgtcgtggtctggcgtgtattccgagccttggtgtctggcggtttccgagcgttggtgtctggcggtttccgagcgttggtgtctggcggtttccgaccgttggtgtctggcggtttccgaccgttggtgtctggcacgcgccaccctctcttgctttggttgcgccatgccgatgtaccagacaagaagacaagaaaatgatttgaggacagcttcaatcgcggtgtgaagaagaaagcagcaaaacgaccactgaaaacaacgccggtggcaaaatatccaaagaaagggtcccaagcggtacatcgtcatagccggaaacagtcagagccaccagccaatgatcttttcaatgctgcgaaagctgccaaaagtgacatgcagggatgtccttcctgagatccgtgctatctgcattgaggaaattgggtgttggatgcaaagctacagcacgtctttcctcaccgacagctatttaaaatatattggttggactctgcatgataagcaccgagaagtccgcgtgaagtgcgtgaaggctctgaaagggctgtacggtaaccgggacctgaccgcacgcctggagctcttcactggccgcttcaaggactggatggtttccatgatcgtggacagagagtacagtgtggcagtggaggccgtcagattactgatacttatccttaaaatcggctcccagacacctgccactcgtgaatgcatctgataaactcactcacactgaggccttggggactgagagtgcgatgacatggatcctgcggacaaaccgccccagggcgtacctagcaccgaagcatcaggcgccactaggtctccagctccttctcggatgacgtccttcagcacgccccggtcccccgagatgtccagcatcctctgacttaaccgctcgtacagggactgatggagaatgaaagccaggcctcagagccgcagacccacccggccacccctcagcgtctacgcccccgaaacgtctgggccctcacctggccgggggcgtcgtccccttccaggactccctggtttaacgcgcttccccccatgtcctagctgccctccctgtggcgtgagccttcggcctggtgcgccccgctgcccttcctggctgtgactctggtggggttccgaag

SEQ ID NO: 306528 - DNA, 983 bp, Artificial Sequence
  derived and/or modified sequence
agaagggaggtggtcgccctccgtcgtggtctggcgtgtattccgagcgttggtgtctggcggtttccgagcgttggtgtctggcggtttccgaccgttggtgtctggcggtttccgaccgttggtgtctggcacgcgccaccctctcttgctttggttgcgccatgccgatgtaccagagacggggttttgccatgttgaccaggctggtcttgaactcctgacctcaggcgatccgcccgccttgaactcccaaagtgctggattacaggtgtgagccaccgtgcccggcacctaaacaacatagttttgatatagacaagaagacaagaaaatgatttgaggacagcttcaatcgcggtgtgaagaagaaagcagcaaaacgaccactgaaaacaacgccggtggcaaaatatccaaagaaagggtcccaagcggtacatcgtcatagccggaaacagtcagagccaccagccaatgatattttcaatgctgcgaaagctgccaaaagtgacatgcagggatgtccttcctgagatccgtgctatctgcattgaggaaattgggtgttggatgcaaagctacagcacgtctttcctcaccgacagctatttaaaatatattggttggactctgcatgataagcaccgagaagtccgcgtgaagtgcgtgaaggctctgaaagggctgtacggtaaccgggacctgaccgcacgcctggagctcttcactggccgcttcaaggactggatggtttccatgatcgtggacagagagtacagtgtggcagtggaggccgtcagattactgatacttatccttaagaacatggaaggggtgctgatggacgtggactgtgagagcgtctaccccattgtgtaggcctctaattgaggcctggcctctgctgtgggtgaatttctgtactggaaacttttctaccctgagtgcgagataagaacgatgggtggaagagagcaacg

SEQ ID NO: 306529 - DNA, 1016 bp, Artificial Sequence
  derived and/or modified sequence
gggtctgcgcccctctccgtgtggagcccacctgcatgtactggctccccaacatgcacggcaggagcggcggcccagcacttggcactggccacttgcagacaagaagacaagaaaatgatttgaggacagcttcaatcgcggtgtgaagaagaaagcagcaaaacgaccactgaaaacaacgccggtggcaaaatatccaaagaaagggtcccaagcggtacatcgtcatagccggaaacagtcagagccaccagccaatgatattttcaatgctgcgaaagctgccaaaagtgacatgcagggatgtccttcctgagatccgtgctatctgcattgaggaaattgggtgttggatgcaaagctacagcacgtctttcctcaccgacagctatttaaaatatattggttggactctgcatgataagcaccgagaagtccgcgtgaagtgcgtgaaggctctgaaagggctgtacggtaaccgggacctgaccgcacgcctggagctcttcactggccgcttcaaggactggatggtttccatgatcgtggacagagagtacagtgtggcagtggaggccgtcagattactgatacttatccttaagaacatggaaggggtgctgatggacgtggactgtgagagcgtctaccccattgtgtaggcctctaattgaggcctggcctctgctgtgggtgaatttctgtactggaaacttttctaccctgagtgcgagataagaacgatgggtggaagagagcaacgccagagcccaggcgcccagaggactttcttccagcttctgctgtccttctttgtggagagcaaggtgacatacacagagagaactctggctgttgtgcataggacctacaagtgggctggggttggtggctcacgcctgtaagcccagcactttgggaggctgaggtgggaggatcctttgagcccaggagtttgagaccagcttgggcaacatagtgagaccctgtctctaccaaaaaaaaaaaaaaaa

SEQ ID NO: 306530 - DNA, 2140 bp, Artificial Sequence
  derived and/or modified sequence
acaccggactgcgttttttttccgaacgcccgcagcagggtcagaagggaggtggtcgccctccgtcgtggtctggcgtgtattccgagcgttggtgtctggcggtttccgagcgttggtgtctggcggtttccgaccgttggtgtctggcggtttccgaccgttggtgtctggcacgcgccaccctctcttgctttggttgcgccatgccgatgtaccagacaagaagacaagaaaatgatttgaggacagcttcaatcgcggtgtgaagaagaaagcagcaaaacgaccactgaaaacaacgccggtggcaaaatatccaaagaaagggtcccaagcggtacatcgtcatagccggaaacagtcagagccaccagccaatgatattttcaatgctgcgaaagctgccaaaagtgacatgcagggatgtccttcctgagatccgtgctatctgcattgaggaaattgggtgttggatgcaaagctacagcacgtctttcctcaccgacagctatttaaaatatattggttggactctgcatgataagcaccgagaagtccgcgtgaagtgcgtgaaggctctgaaagggctgtacggtaaccgggacctgaccgcacgcctggagctcttcactggccgcttcaaggactggatggtttccatgatcgtggacagagagtacagtgtggcagtggaggccgtcagattactgatacttatccttaagaacatggaaggggtgctgatggacgtggactgtgagagcgtctaccccattgtgtaggcctctaattgaggcctggcctctgctgtgggtgaatttctgtactggaaacttttctaccctgagtgcgagataagaacgatgggtggaagagagcaacgccagagcccaggcgcccagaggactttcttccagcttctgctgtccttctttgtggagagcaaggtgacatacacagagagaactctggctgttgtgcataggacctacaagtgggctggggttggtggctcacgcctgtaagcccagcactttgggaggctgaggtgggaggatcctttgagcccaggagtttgagaccagcttgggcaacatagtgagaccctgtctctaccaaaaaaaaaaaaaaaaaagacaaatggagaaggatgggggtgtacactgtaggaaggagagcgatatttaatcagtaaccacttcctagggtattttaacatgccatcactaaatccccatgcacctccttccccagctccacgaccacgctgcttacttagtagacaacctgtgggactgtgcagggactcagctgaaggactgggagggtctgacaagcctgctgctggagaaggaccagagcacgtgccacatggagccagggccagggaccttccacctcctagggtgaaaccaggagagattgcttgcttcacttgtacaaggcaggaacggtggcatggcgtgggggaaacttggagttggaaggtggctaatctttgattctatgtttttgatcctcctggcactccagacctgggtgatatgcaggagagcacactgatagaaatccttgtgtccagtgcccagcaactcctgcctcagcctcccgagcagctgggactacaggtgcccgccaccacgcccggctaacttttttgtatttttagtagagacgggttttcaccgtgttagccaggatggtcttgatctcttgaccttgtgatccacctgcctcatcatcccaaagtgctgggattacaggcgtgagccactgcgcccagcatgttagacaatttttaattcatcctctctgtgctgttgttttctcagctgtgaaaggaatattctggtggggacaaggttacagagttgctgagagggtctcatgacatgaaggtactggccttggcacagtgcctgggggggcggggactccgcacatgcctgtgatgtcacagttactgtcagttcacagcgaaccttccctccttttcctgttgactttcccacactcctgtaaccatccctccctcccttcttcctctctctctctctcactcacgcacacgcacacacacacacacacactccattcactgtctccatgactctggagtaaactaacgtctcgagtt

SEQ ID NO: 306531 - DNA, 1821 bp, Artificial Sequence
  derived and/or modified sequence
ccgaacgcccgcagcagggtcagaagggaggtggtcgccctccgtcgtggtctggcgtgtattccgagccttggtgtctggcggtttccgagcgttggtgtctggcggtttccgagcgttggtgtcttggcggtttccgaccgttggtgtctggcggtttccgaccgttggtgtctggcacgcgccaccctctcttgctttggttgcgccatgccgatgtaccagacaagaagacaagaaaatgatttgaggacagcttcaatcgcggtgtgaagaagaaagcagcaaaacgaccactgaaaacaacgccggtggcaaaatatccaaagaaagggtcccaagcggtacatcgtcatagccggaaacagtcagagccaccagccaatgatcttttcaatgctgcgaaagctgccaaaagtgacatgcagggatgtccttcctgagatccgtgctatctgcattgaggaaattgggtgttggatgcaaagctacagcacgtctttcctcaccgacagctatttaaaatatattggttggactctgcatgataagcaccgagaagtccgcgtgaagtgcgtgaaggctctgaaagggctgtacggtaaccgggacctgaccgcacgcctggagctcttcactggctgcttcaaggactggatggtttccatgatcatggacagagagtacagtgtggcagtggaggccgtcagattactgatacttatccttaaacttttctaccctgagtgcgagataagaacgatgggtggaagagagcaacgccagagcccaggtgcccagaggactttcttccagcttctgctgtccttctttgtggagagcaagctccacgaccacgctgcttacttagtagacaacctgtgggactgtgcagggactcagctgaaggactgggagggtctgacaagcctgctgctggagaaggaccagagcacgtgccacatggagccagggccagggaccttccacctcctagggtgaaaccaggagagattgcttgcttcacttgtacaaggcaggaacggtggcatggggtgggggaaacttggagttggaaggtggctaatctttgattctatgtttttgatcctcctggcactccagacctgggtgatgtgcaggagagcacactgatagaaatccttgtgtccagtgcccagcaactcctgcctcagcctcccgagcagctgggactacaggcgcccgccaccacgcctggctaacttttttgtatttttagtagagacgggttttcaccgtgttagccaggatggtcttgatctcttgaccttgtgatccacctgcctcatcatcccaaagtgctgggattacaggcgtgagccactgcgcccagcatgttagacaatttttaattcatcctctctgtgctgttgttttctcagctgtgaaaggaatattctggtggggacaaggttacagagttgctgagagggtctcatgacatgaaggtactggccttggcacagtgcctgggggggcggggactccgcacatgcctgtgatgtcacagttactgtcagttcacagcgaaccttccctccttttcctgttgactttcccacactcctgtaaccctccctccctcccttcttcctctctctctctctcactcacgcacacgcacacacacacacacacacacacacacacacactccattctctgtctccatgactctggagtaaactaacgtctcgagttgccattggaagccccattgtcctcattttgttttgttttgtttgtttgagacggggtctcgctctgtcccccaggctg

SEQ ID NO: 306532 - DNA, 1262 bp, Artificial Sequence
  derived and/or modified sequence
tttttccgaacgcccgcagcagggtcagaagggaggtggtcgccctccgtcgtggtctggcgtgtattccgagccttggtgtctggcggtttccgagcgttggtgtctggcggtttccgagcgttggtgtcttggcggtttccgaccgttggtgtctggcggtttccgaccgttggtgtctggcacgcgccaccctctcttgctttggttgcgccatgccgatgtaccaggtaaagccctatcaccgggtctgcgcccctctccgtgtggagcccacctgcatgtactggctccccaacatgcacggcaggagcggcggcccagcacttggcactggccacttgcagacaagaagacaagaaaatgatttgaggacagcttcaatcgcggtgtgaagaagaaagcagcaaaacgaccactgaaaacaacgccggtggcaaaatatccaaagaaagggtcccaagcggtacatcgtcatagccggaaacagtcagagccaccagccaatgatcttttcaatgctgcgaaagctgccaaaagtgacatgcagggatgtccttcctgagatccgtgctatctgcattgaggaaattgggtgttggatgcaaagctacagcacgtctttcctcaccgacagctatttaaaatatattggttggactctgcatgataagcaccgagaagtccgcgtgaagtgcgtgaaggctctgaaagggctgtacggtaaccgggacctgaccgcacgcctggagctcttcactggctgcttcaaggactggatggtttccatgatcatggacagagagtacagtgtggcagtggaggccgtcagattactgatacttatccttaagaacatggaaggggtgctgatggacgtggactgtgagagcgtctaccccattgtgtaggcctctaattgaggcctggcctctgctgtgggtgaatttctgtactggaaacttttctaccctgagtgcgagataagaacgatgggtggaagagagcaacgccagagcccaggtgcccagaggactttcttccagcttctgctgtccttctttgtggagagcaaggtgacatacacagagataactctggctgttgtgcataggacctacaagtgggctggggttggtggttcacgcctgtaagcccaacactttgggaggctgaggtgggaggatcctttgagcccaggagtttgagaccagcttgggcaacatagtgagaccctgtctctaccaaaaaaaaaaaaaaaa

SEQ ID NO: 306533 - DNA, 1716 bp, Artificial Sequence
  derived and/or modified sequence
gaacgcccgcagcagggtcagaagggaggtggtcgccctccgtcgtggtctggcgtgtattccgagccttggtgtctggcggtttccgagcgttggtgtctggcggtttccgagcgttggtgtcttggcggtttccgaccgttggtgtctggcggtttccgaccgttggtgtctggcacgcgccaccctctcttgctttggttgcgccatgccgatgtaccagacaagaagacaagaaaatgatttgaggacagcttcaatcgcggtgtgaagaagaaagcagcaaaacgaccactgaaaacaacgccggtggcaaaatatccaaagaaagggtcccaagcggtacatcgtcatagccggaaacagtcagagccaccagccaatgatcttttcaatgctgcgaaagctgccaaaagtgacatgcagggatgtccttcctgagatccgtgctatctgcattgaggaaattgggtgttggatgcaaagctacagcacgtctttcctcaccgacagctatttaaaatatattggttggactctgcatgataagcaccgagaagtccgcgtgaagtgcgtgaaggctctgaaagggctgtacggtaaccgggacctgaccgcacgcctggagctcttcactggctgcttcaaggactggatggtttccatgatcatggacagagagtacagtgtggcagtggaggccgtcagattactgatacttatccttaagtgagtcctgggaagaggggaggccagtgtctcagacctttgcccttccagggtcatctccctccacctgtcacagctgactcttccatctgtgcaggttgactgaggtcattcctgagttgcagtatgttgagagggtaatatttctgtcttctctaactccccatactcccttgtcttccactctccatttaggagttttttgtgagttatgtccttgttgcttttgcctctttttctttctagccttgattgtgccagaagacaatgtccctattcacacactctttctgcttttctgtgggcaggaacatggaaggggtgctgatggacgtggactgtgagagcgtctaccccattgtgtaggcctctaattgaggcctggcctctgctgtgggtgaatttctgtactggaagtgagtggggctccttttacgtttctttaacaccaccctctcggtttctctcccacatgtgctgctgccctacttaaggcctccccatctccgtggaagtctctctgctgtctcttttcctctctcagctccttggggctttccttagctctgcacctccttttcctttatcatctccttgggccatctcctccctctgtggtcatcattacacctccttgtttcctcctgtgctgagccctttccttgtgtccattccaccagacttttctaccctgagtgcgagataagaacgatgggtggaagagagcaacgccagagcccaggtgcccagaggactttcttccagcttctgctgtccttctttgtggagagcaaggtgacatacacagagataactctggctgttgtgcataggacctacaagtgggctggggttggtggttcacgcctgtaagcccaacactttgggaggctgaggtgggaggatcctttgagcccaggagtttgagaccagcttgggcaacatagtgagaccctgtctctaccaaaaaaaaaaaaaaaaaaaaaa

SEQ ID NO: 306534 - DNA, 405 bp, Artificial Sequence
  derived and/or modified sequence
atgattttttccatgcttcgcaagttgcctaaagtcacctgccgagacgtattgcctgagattagagccatctgtatcgaagagattggatgctggatgcaatcgtatagtaccagcttcctgactgactcctacctgaaatatattggctggaccctgcatgataagcacagggaggtgcgggtgaagtgtgtcaaagcccttaaggggttgtacgggaatagggacctgacagccagactcgaactttttaccggccgtttcaaagattggatggtaagcatgatcgtggatcgagagtattctgttgccgtagaagccgtgcgcctcctgatcctcatactgaagaatatggagggagttctgatggacgttgattgcgaatccgtgtatcccattgtctag

SEQ ID NO: 306535 - DNA, 618 bp, Artificial Sequence
  derived and/or modified sequence
atgatctttagcatgttgcgcaaactgcctaaagttacatgtagggatgttttgcctgagattagggccatctgtatagaagaaattgggtgctggatgcagtcctacagcactagcttcctcaccgattcctacctaaaatacattggctggacactacatgataaacaccgcgaggtgcgtgtcaagtgcgtcaaggctttgaaagggttgtacggtaatcgagatttgacagccaggctcgagctttttacggggaggtttaaagactggatggtgtcaatgatcgtagatagggagtactccgtagctgtggaagcagtgaggctactgatccttatactgaaattgttctatccagaatgtgaaattaggactatgggaggacgcgagcagcgccagagccccggagcacagcgaactttctttcagcttttactatcttttttcgtagagtccaaattgcacgatcacgcggcttacctggtggacaacctctgggactgtgcgggtacccaacttaaagattgggaaggtctcaccagcctgcttctcgagaaagatcaaagtacttgtcacatggaacccggtcctggcacattccatctgcttggttag

SEQ ID NO: 306536 - DNA, 387 bp, Artificial Sequence
  derived and/or modified sequence
atgatcttttccatgcttcgcaaactgccgaaggtgacctgtcgggatgtgttacccgagattcgcgcaatctgcatcgaggagattggctgttggatgcagagctacagtacttcattcttgacggacagctacctcaagtatattggatggacactccacgacaagcatcgggaggtccgagtgaagtgcgtgaaggctttgaaaggcttatacggtaaccgcgacctgactgccaggctcgagctcttcaccgggaggttcaaggattggatggttagcatgatagtagaccgggagtacagcgtggccgtggaagcggttagactcctcattcttatactcaagatcggtagccagacccccgcaacaagagaatgtatttag

SEQ ID NO: 306537 - DNA, 405 bp, Artificial Sequence
  derived and/or modified sequence
atgatattcagcatgctccgcaagctgccaaaagtgacatgcagggatgtgctgccagagataagagctatttgcatcgaagaaatcggatgttggatgcagtcatactcaacaagcttccttacagactcatatctcaagtacataggatggacgctgcatgacaagcacagggaagtgcgggttaagtgcgttaaagccctgaaagggctctatggtaatagggatttgacagccagactcgagctcttcaccggacggtttaaggattggatggtttccatgatagtggaccgcgagtattcagttgctgttgaagctgtgagacttcttatcctcatcctgaaaaacatggaaggggttctcatggacgttgactgtgagagtgtgtaccccattgtttag

SEQ ID NO: 306538 - DNA, 405 bp, Artificial Sequence
  derived and/or modified sequence
atgatttttagcatgctcagaaagttgcccaaggtaacctgtagggacgtgttaccagagatacgcgcaatctgtatcgaagagatagggtgctggatgcagagctattccacatcttttctcactgattcctacttgaaatacattggttggactcttcacgacaagcaccgggaggtgcgtgtcaaatgtgttaaggccctgaagggcctatacgggaatcgagacctgactgcacggctagagctatttacaggtcgttttaaagactggatggtgtccatgatcgtcgaccgcgagtactcagtcgccgtagaagctgttcggctcttaatcttaattctcaagaacatggaaggtgtcctcatggacgttgactgtgaatccgtgtaccctatcgtgtag

SEQ ID NO: 306539 - DNA, 405 bp, Artificial Sequence
  derived and/or modified sequence
atgatattcagcatgctgcgtaagctgcccaaagtgacttgtagagacgtgctccccgagattagggctatttgcattgaggagatcggatgttggatgcagtcctattctactagttttcttactgatagctaccttaaatacatcggctggacccttcatgacaaacaccgcgaggttagggtaaaatgcgtgaaggccctgaaaggcctgtacggaaacagggatttgacagcacggttggagctcttcacgggcaggttcaaagattggatggtcagcatgatcgtagatcgggagtacagcgtggcagtggaagctgttagactgctaatcctgattctcaagaatatggaaggtgtcttgatggacgtggattgtgaaagtgtttaccctatagtgtag

SEQ ID NO: 306540 - DNA, 618 bp, Artificial Sequence
  derived and/or modified sequence
atgattttttccatgctgcgcaagttgcctaaggtgacttgcagggatgtattacccgaaattagggcaatttgcattgaagagattggatgctggatgcaaagttattctacgagtttcttgacggattcatacctcaagtacatcggctggacactgcatgacaagcaccgcgaggttagggttaagtgtgttaaggcactcaaggggctgtacggcaaccgtgacttgacggctcgacttgagctcttcaccggctgcttcaaagattggatggtatcaatgataatggatagggagtatagtgtggccgtcgaagcggtgcgtctcttgattctaattctcaaactattctatccggaatgtgaaatcagaacaatggggggaagggagcaacgccagtcaccgggagcacagaggaccttttttcagcttttactaagctttttcgtagagtccaagctgcacgatcatgctgcctacctggtcgacaacctgtgggactgtgccggaacacagttaaaagactgggaggggttaacatcgctcctgttggaaaaagatcagagtacgtgtcacatggagcccggtccaggcacatttcatcttcttggctag

SEQ ID NO: 306541 - DNA, 405 bp, Artificial Sequence
  derived and/or modified sequence
atgatcttttcaatgcttcgtaagctcccaaaggtgacctgtagggacgttttgccagaaattcgcgctatatgcattgaggaaatagggtgttggatgcagtcttacagcacatcgtttttgacagattcctatctaaagtacattggatggacccttcacgataaacatagggaggtccgggtgaagtgcgttaaggccctgaaaggactgtacggcaatcgcgatttaaccgcacgccttgagttgttcactggatgtttcaaggattggatggtatcaatgatcatggatcgagagtacagtgtcgcagtggaagctgttcggctgctaatactaatcctaaagaacatggaaggggtgctgatggacgtggactgcgagtcagtgtacccaattgtctag

SEQ ID NO: 306542 - DNA, 351 bp, Artificial Sequence
  derived and/or modified sequence
atgattttcagcatgctacgcaaactcccaaaagtgacatgtcgcgacgtgctccccgagattcgcgctatatgcattgaggagattgggtgttggatgcagtcctacagcacttcatttctgaccgacagttatctgaaatacattggctggacactacacgataaacaccgtgaagttagagtgaagtgcgtaaaggctctgaaaggcttgtacggcaatagggatttgacagccagacttgaactgtttacaggatgttttaaggattggatggtcagcatgatcatggatcgagagtactctgtcgccgttgaagctgtcaggttattgatcctgatcctcaagtag

SEQ ID NO: 306543 - DNA, 405 bp, Artificial Sequence
  derived and/or modified sequence
atgatcttcagcatgctgagaaagctgcccaaggtgacctgcagagacgtgctgcccgagatcagagccatctgcatcgaggagatcggctgctggatgcagagctacagcaccagcttcctgaccgacagctacctgaagtacatcggctggaccctgcacgacaagcacagagaggtgagagtgaagtgcgtgaaggccctgaagggcctgtacggcaacagagacctgaccgccagactggagctgttcaccggcagattcaaggactggatggtgagcatgatcgtggacagagagtacagcgtggccgtggaggccgtgagactgctgatcctgatcctgaagaacatggagggcgtgctgatggacgtggactgcgagagcgtgtaccccatcgtgtag

SEQ ID NO: 306544 - DNA, 618 bp, Artificial Sequence
  derived and/or modified sequence
atgatcttcagcatgctgagaaagctgcccaaggtgacctgcagagacgtgctgcccgagatcagagccatctgcatcgaggagatcggctgctggatgcagagctacagcaccagcttcctgaccgacagctacctgaagtacatcggctggaccctgcacgacaagcacagagaggtgagagtgaagtgcgtgaaggccctgaagggcctgtacggcaacagagacctgaccgccagactggagctgttcaccggcagattcaaggactggatggtgagcatgatcgtggacagagagtacagcgtggccgtggaggccgtgagactgctgatcctgatcctgaagctgttctaccccgagtgcgagatcagaaccatgggcggcagagagcagagacagagccccggcgcccagagaaccttcttccagctgctgctgagcttcttcgtggagagcaagctgcacgaccacgccgcctacctggtggacaacctgtgggactgcgccggcacccagctgaaggactgggagggcctgaccagcctgctgctggagaaggaccagagcacctgccacatggagcccggccccggcaccttccacctgctgggctag

SEQ ID NO: 306545 - DNA, 387 bp, Artificial Sequence
  derived and/or modified sequence
atgatcttcagcatgctgagaaagctgcccaaggtgacctgcagagacgtgctgcccgagatcagagccatctgcatcgaggagatcggctgctggatgcagagctacagcaccagcttcctgaccgacagctacctgaagtacatcggctggaccctgcacgacaagcacagagaggtgagagtgaagtgcgtgaaggccctgaagggcctgtacggcaacagagacctgaccgccagactggagctgttcaccggcagattcaaggactggatggtgagcatgatcgtggacagagagtacagcgtggccgtggaggccgtgagactgctgatcctgatcctgaagatcggcagccagacccccgccaccagagagtgcatctag

SEQ ID NO: 306546 - DNA, 618 bp, Artificial Sequence
  derived and/or modified sequence
atgatcttcagcatgctgagaaagctgcccaaggtgacctgcagagacgtgctgcccgagatcagagccatctgcatcgaggagatcggctgctggatgcagagctacagcaccagcttcctgaccgacagctacctgaagtacatcggctggaccctgcacgacaagcacagagaggtgagagtgaagtgcgtgaaggccctgaagggcctgtacggcaacagagacctgaccgccagactggagctgttcaccggctgcttcaaggactggatggtgagcatgatcatggacagagagtacagcgtggccgtggaggccgtgagactgctgatcctgatcctgaagctgttctaccccgagtgcgagatcagaaccatgggcggcagagagcagagacagagccccggcgcccagagaaccttcttccagctgctgctgagcttcttcgtggagagcaagctgcacgaccacgccgcctacctggtggacaacctgtgggactgcgccggcacccagctgaaggactgggagggcctgaccagcctgctgctggagaaggaccagagcacctgccacatggagcccggccccggcaccttccacctgctgggctag

SEQ ID NO: 306547 - DNA, 405 bp, Artificial Sequence
  derived and/or modified sequence
atgatcttcagcatgctgagaaagctgcccaaggtgacctgcagagacgtgctgcccgagatcagagccatctgcatcgaggagatcggctgctggatgcagagctacagcaccagcttcctgaccgacagctacctgaagtacatcggctggaccctgcacgacaagcacagagaggtgagagtgaagtgcgtgaaggccctgaagggcctgtacggcaacagagacctgaccgccagactggagctgttcaccggctgcttcaaggactggatggtgagcatgatcatggacagagagtacagcgtggccgtggaggccgtgagactgctgatcctgatcctgaagaacatggagggcgtgctgatggacgtggactgcgagagcgtgtaccccatcgtgtag

SEQ ID NO: 306548 - DNA, 351 bp, Artificial Sequence
  derived and/or modified sequence
atgatcttcagcatgctgagaaagctgcccaaggtgacctgcagagacgtgctgcccgagatcagagccatctgcatcgaggagatcggctgctggatgcagagctacagcaccagcttcctgaccgacagctacctgaagtacatcggctggaccctgcacgacaagcacagagaggtgagagtgaagtgcgtgaaggccctgaagggcctgtacggcaacagagacctgaccgccagactggagctgttcaccggctgcttcaaggactggatggtgagcatgatcatggacagagagtacagcgtggccgtggaggccgtgagactgctgatcctgatcctgaagtag

SEQ ID NO: 306549 - DNA, 339 bp, Artificial Sequence
  derived and/or modified sequence
atgagcagccccctgcagagagccgtgggcgacaccaagagagccctgagcgccagcagcagcagcagcgccagcctgcccttcgacgacagagacagcaaccacaccagcgagggcaacggcgacagcctgctggccgacgaggacaccgacttcgaggacagcctgaacagaaacgtgaagaagagagccgccaagagaccccccaagaccacccccgtggccaagcaccccaagaagggcagcagagtggtgcacagacacagcagaaagcagagcgagccccccgccaacgacctgttcaacgccgtgaaggccgccaagagcgacatgcagtag

SEQ ID NO: 306550 - DNA, 339 bp, Artificial Sequence
  derived and/or modified sequence
atgtccagcccattacagagggcagtgggggacacaaagcgagctttaagcgcttctagtagttcctctgcaagcctgccgttcgatgacagggatagtaaccatacctctgaaggtaacggggacagccttttagccgatgaggatactgatttcgaggactcattgaataggaacgttaaaaaacgcgccgctaaaagaccgcctaaaactacccccgtagcaaaacatccgaaaaaaggttctcgcgttgtgcatcgccacagccggaagcaatctgagccgcctgcaaatgacctgtttaatgctgtgaaggcagctaaatcagacatgcagtag

SEQ ID NO: 306551 - DNA, 339 bp, Artificial Sequence
  derived and/or modified sequence
atgagcagccccctgcagagagctgtgggggacaccaagagggccctgagcgccagcagcagcagcagcgccagcctgccctttgatgaccgggacagcaaccacaccagcgagggcaatggagacagcctgctggctgatgaggacacagactttgaggacagcctgaacagaaatgtgaagaagagagctgccaagaggcctcccaagaccacccctgtggccaagcaccccaagaagggcagccgggtggtgcaccgccacagcaggaagcagagcgagcccccagccaatgacctcttcaatgctgtgaaggccgccaagagtgacatgcagtag

SEQ ID NO: 306552 - DNA, 339 bp, Artificial Sequence
  derived and/or modified sequence
atgagcagccccctgcagcgggccgtgggcgacaccaagcgggccctaagcgcctcatctagttcgtcggcttctctgcctttcgatgatcgcgactctaatcatacgtcagagggaaacggggattcgcttcttgccgatgaggacactgactttgaagacagcctcaataggaatgtcaagaagcgagccgccaagaggccgccgaagaccacacctgtggccaagcaccccaagaaaggctcgagagtggttcacagacatagtcggaagcaaagcgagccccccgctaacgatcttttcaatgcggtgaaagctgctaagagcgatatgcaatag

SEQ ID NO: 306553 - DNA, 339 bp, Artificial Sequence
  derived and/or modified sequence
atgtcaagccccctccagcgggcagtgggtgacacgaaaagggccctgtcagcatcctccagcagctccgccagccttccctttgacgaccgcgattcaaatcatacaagtgaaggaaacggagactctctgctggccgatgaggatacagatttcgaggactccctcaatcggaacgttaaaaaaagggccgctaagagacctcctaagacaacaccggtggcgaaacaccccaagaagggcagcagggtcgttcacagacatagtcggaagcagagtgagccgccagccaacgatcttttcaatgcagtcaaagccgcaaaatccgacatgcagtag

SEQ ID NO: 306554 - DNA, 605 bp, Artificial Sequence
  derived and/or modified sequence
gggcgagccgttgggattgcgcttgcgcacagcgtgtcttgtacgttcccgcgcttttctggaatctttcgcccccggaagggcagcggcgggcgcctgtgtggaagctggatcgccatacctaccctgtggtcctcatcttcctggcctcatagctcctcctctccaagcatgtcttccccgttgcaaagagctgtgggagataccaagagggccttgtctgcatcttctagttcctctgccagtctaccctttgatgacagggactcaaaccatacctcagaggggaatggcgactctttgttagctgatgaagacactgactttgaagacagcttgaatcgcaatgtgaagaagagagcagcaaaacgaccaccgaaaacaacaccggtggcaaaacatccaaagaaagggtcccgagtggtacatcgtcatagccggaaacagtcagagccaccagccaatgatcttttcaatgctgtgaaagccgccaaaagtgacatgcagtctttggtagatgagtggctggatagctacaagcaagaccaggatgcaggatttctggagcttgttaactttttcatccaatcttgcggatgtaaagg

SEQ ID NO: 306555 - DNA, 534 bp, Artificial Sequence
  derived and/or modified sequence
atctttcgcccccggaagggcagcggcgggcgcctgtgtggaaggtggggtggccagagacacccgagggacctgaggtggggaccttccctgaaccctgctcggccagaagtcactcttccaggctctgacagctggatcgccatacctaccctgtggtcctcatcttcctggcctcatagctcctcctctccaagcatgtcttccccgttgcaaagagctgtgggagataccaagagggccttgtctgcatcttctagttcctctgccagtctaccctttgatgacagggactcaaaccatacctcagaggggaatggcgactctttgttagctgatgaagacactgactttgaagacagcttgaatcgcaatgtgaagaagagagcagcaaaacgaccaccgaaaacaacaccggtggcaaaacatccaaagaaagggtcccgagtggtacatcgtcatagccggaaacagtcagagccaccagccaatgatcttttcaatgctgtgaaagccgccaaaagtgacatgcag

SEQ ID NO: 306556 - DNA, 456 bp, Artificial Sequence
  derived and/or modified sequence
atgcagcatagagaggtgagggtcaagtgtgtcaaggccttgaaagggctttacggcaacagagacctgacagctagactcgagctgttcaccggtcgattcaaggactggatggtttccatgatcgttgacagagaatatagtgttgcagtggaggccgtgcgccttcttatccttattttaaagttgttttatcccgaatgtgaaattaggaccatggggggcagagaacaaaggcagtccccaggcgcccaacgaacatttttccagctcctgctgtcgttttttgtggagagcaagctccacgatcacgcagcgtaccttgtagataatttatgggactgtgccggcacgcagttgaaggactgggagggtctgaccagcctgctgctggagaaagatcagtctacctgccacatggagcctggacccggcaccttccacctgctggggtag

SEQ ID NO: 306557 - DNA, 378 bp, Artificial Sequence
  derived and/or modified sequence
atgcagcaccgtgaagtgagagttaaatgtgtgaaagctctgaaggggttatacggaaatcgtgacctcactgctcgacttgaactcttcacgggtagattcaaagattggatggtgagtatgatagtggatagggaatacagcgtcgcagtcgaagccgtaaggctgcttattttaattcttaagctcttttaccccgagtgcgagattcgtacaatgggaggaagggagcaacgccagtcgcctggcgctcaaagaacatttttccagcttctgctcagcttttttgtcgagtcaaaagtgacctataccgagaggacgctggcagtcgtccaccgcacttacaagtgggctggcgttgggggtagcaggttatag

SEQ ID NO: 306558 - DNA, 240 bp, Artificial Sequence
  derived and/or modified sequence
atgggcggccgtgagcaacgtcagtcacccggggcccagcggacattcttccagttgttattaagcttcttcgttgagtcaaagttacacgatcatgcagcgtaccttgtggataatctctgggactgcgctggcacgcaactgaaagactgggagggcctgacaagtttgttattggagaaagatcagagcacttgccacatggaacccggtcccggcacatttcacctgctgggctag

SEQ ID NO: 306559 - DNA, 456 bp, Artificial Sequence
  derived and/or modified sequence
atgcagcatagagaggtccgtgtgaaatgcgtcaaagccctcaagggactttacggcaacagagaccttactgcccgcctagagctcttcacaggctgctttaaagactggatggtgtccatgatcatggacagagaatatagcgtggccgtcgaggcggtacggctactcattctaatacttaagctgttctacccggagtgcgaaattcggaccatggggggaagggaacagcgccagagtccaggcgctcaacgcaccttcttccagttgctactgtccttttttgtggagtctaagctccacgatcacgcagcttacctggttgataatctgtgggactgcgccggcactcaacttaaggattgggagggcctgactagtctgttgctggaaaaagatcagtcaacctgtcacatggaacctggtcccggaacctttcatcttcttgggtag

SEQ ID NO: 306560 - DNA, 456 bp, Artificial Sequence
  derived and/or modified sequence
atgcagcaccgggaggtgcgggtgaagtgtgtgaaggccctgaagggcctgtatggcaacagagacctgacagcccggctggagctgttcaccggccgcttcaaggactggatggtgtccatgattgtggaccgggagtacagcgtggccgtggaggccgtgcggctgctgatcctgatcctgaagctgttctacccagaatgtgagatccgcaccatgggcggccgggagcagaggcagagccctggggcccagaggaccttcttccagctgctgctgtccttctttgtggagagcaagctgcatgaccatgctgcctacctggtggacaacctgtgggactgtgccggcacccagctgaaggactgggagggcctgaccagcctgctgctggagaaggaccagagcacctgccacatggagcccggccctggcaccttccacctgctgggctag

SEQ ID NO: 306561 - DNA, 378 bp, Artificial Sequence
  derived and/or modified sequence
atgcagcaccgggaggtgcgggtgaagtgtgtgaaggccctgaagggcctgtatggcaacagagacctgacagcccggctggagctgttcaccggccgcttcaaggactggatggtgtccatgattgtggaccgggagtacagcgtggccgtggaggccgtgcggctgctgatcctgatcctgaagctgttctacccagaatgtgagatccgcaccatgggcggccgggagcagaggcagagccctggggcccagaggaccttcttccagctgctgctgtccttctttgtggagagcaaggtgacctacacagagaggaccctggccgtggtgcacaggacctacaagtgggccggcgtgggcggcagccggctgtag

SEQ ID NO: 306562 - DNA, 240 bp, Artificial Sequence
  derived and/or modified sequence
atgggcggccgggagcagaggcagagccctggggcccagaggaccttcttccagctgctgctgtccttctttgtggagagcaagctgcatgaccatgctgcctacctggtggacaacctgtgggactgtgccggcacccagctgaaggactgggagggcctgaccagcctgctgctggagaaggaccagagcacctgccacatggagcccggccctggcaccttccacctgctgggctag

SEQ ID NO: 306563 - DNA, 456 bp, Artificial Sequence
  derived and/or modified sequence
atgcagcaccgggaggtgcgggtgaagtgtgtgaaggccctgaagggcctgtatggcaacagagacctgacagcccggctggagctgttcaccggctgcttcaaggactggatggtgtccatgatcatggaccgggagtacagcgtggccgtggaggccgtgcggctgctgatcctgatcctgaagctgttctacccagaatgtgagatccgcaccatgggcggccgggagcagaggcagagccctggggcccagaggaccttcttccagctgctgctgtccttctttgtggagagcaagctgcatgaccatgctgcctacctggtggacaacctgtgggactgtgccggcacccagctgaaggactgggagggcctgaccagcctgctgctggagaaggaccagagcacctgccacatggagcccggccctggcaccttccacctgctgggctag

SEQ ID NO: 306564 - DNA, 456 bp, Artificial Sequence
  derived and/or modified sequence
atgcagcaccgggaggtgcgggtgaagtgcgtgaaggccctgaagggtctgtacggaaatagagatttgacggccagacttgagctctttacgggacggtttaaggattggatggtctcaatgatagtggaccgggaatacagcgtagctgtagaggctgtgcggctcttaatactcattctcaagcttttctacccggaatgtgagattcgtaccatgggcggacgcgagcagcggcagagcccaggagcccagaggactttcttccagctgctcctatcttttttcgtggagtccaagctgcacgatcacgccgcatacctggttgataacctgtgggattgtgcgggaacacagctgaaagactgggagggcctaacatctttgctgctggagaaggatcagtctacttgccatatggaaccaggcccgggcacattccatctgttagggtag

SEQ ID NO: 306565 - DNA, 378 bp, Artificial Sequence
  derived and/or modified sequence
atgcagcaccgggaggtgcgggtgaagtgcgtgaaggccctgaagggcctctacggcaatagagatctgacggctcgactggagctgttcacaggtcggtttaaagattggatggttagcatgatagtcgaccgagagtacagtgtggcggttgaggccgtgcgcctgctgatcctgatccttaaactcttttatccagagtgtgagattagaaccatggggggccgtgagcaaagacagagtcccggtgcccagagaacattcttccagctgctgctgagcttctttgtagaatccaaggtgacttatacagagcggacccttgccgtcgtacaccgcacctataaatgggctggggtgggggggtccaggctttag

SEQ ID NO: 306566 - DNA, 240 bp, Artificial Sequence
  derived and/or modified sequence
atgggcggccgggagcagcggcagagccccggcgcccagcggaccttttttcaactgctcctgagtttcttcgtggaatccaaacttcatgatcatgcagcctatctagttgacaatttgtgggattgcgccgggacccagctcaaagattgggaagggctcacatcgctgctgctggaaaaggaccagagcacatgccatatggagcccggccctggaacattccatctgctcggatag

SEQ ID NO: 306567 - DNA, 456 bp, Artificial Sequence
  derived and/or modified sequence
atgcagcaccgggaggtgcgggtgaagtgcgtgaaggccctgaagggactctacgggaacagggatctgacagcccggctcgagcttttcaccggatgctttaaggactggatggtgagtatgatcatggatagggaatattcggttgctgttgaagccgtccggctgctcattttaatcctcaagttgttttaccctgaatgtgagataagaactatgggcggccgcgaacaacggcaatctcccggggcacagcgaaccttctttcagctgctgctgtcattctttgtagaatctaagctgcatgatcatgccgcctatctggtggacaacctgtgggattgcgccggaacccagctgaaggattgggagggccttacgagtctactgctggaaaaggaccagtccacatgccacatggagcccggcccaggaacctttcacttgcttgggtag

SEQ ID NO: 306568 - DNA, 921 bp, Artificial Sequence
  derived and/or modified sequence
gttttttttccgaacgcccgcagcagggtcagaagggaggtggtcgccctccgtcgtggtctggcgtgtattccgagccttggtgtctggcggtttccgagcgttggtgtctggcggtttccgagcgttggtgtctggcggtttccgaccgttggtgtctggcggtttccgaccgttggtgtctggcacgcgccaccctctcttgctttggttgcgccatgccgatgtaccagacaagaagacaagaaaatgatttgaggacagcttcaatcgcggtgtgaagaagaaagcagcaaaacgaccactgaaaacaacgccggtggcaaaatatccaaagaaagggtcccaagcggtacatcgtcatagccggaaacagtcagagccaccagccaatgatcttttcaatgctgcgaaagctgccaaaagtgacatgcagcaccgagaagtccgcgtgaagtgcgtgaaggctctgaaagggctgtacggtaaccgggacctgaccgcacgcctggagctcttcactggccgcttcaaggactggatggtttccatgatcgtggacagagagtacagtgtggcagtggaggccgtcagattactgatacttatccttaaacttttctaccctgagtgcgagataagaacgatgggtggaagagagcaacgccagagcccaggtgcccagaggactttcttccagcttctgctgtccttctttgtggagagcaagctccacgaccacgctgcttacttagtagacaacctgtgggactgtgcagggactcagctgaaggactgggagggtctgacaagcctgctgctggagaaggaccagagcacgtgccacatggagccagggccagggaccttccacctcctagggtgaaaccaggagagattgcttgcttcacttgtacaagg

SEQ ID NO: 306569 - DNA, 1031 bp, Artificial Sequence
  derived and/or modified sequence
agaagggaggtggtcgccctccgtcgtggtctggcgtgtattccgagcgttggtgtctggcggtttccgagcgttggtgtctggcggtttccgaccgttggtgtctggcggtttccgaccgttggtgtctggcacgcgccaccctctcttgctttggttgcgccatgccgatgtaccagacaagaagacaagaaaatgatttgaggacagcttcaatcgcggtgtgaagaagaaagcagcaaaacgaccactgaaaacaacgccggtggcaaaatatccaaagaaagggtcccaagcggtacatcgtcatagccggaaacagtcagagccaccagccaatgatattttcaatgctgcgaaagctgccaaaagtgacatgcagcaccgagaagtccgcgtgaagtgcgtgaaggctctgaaagggctgtacggtaaccgggacctgaccgcacgcctggagctcttcactggccgcttcaaggactggatggtttccatgatcgtggacagagagtacagtgtggcagtggaggccgtcagattactgatacttatccttaaacttttctaccctgagtgcgagataagaacgatgggtggaagagagcaacgccagagcccaggcgcccagaggactttcttccagcttctgctgtccttctttgtggagagcaaggtgacatacacagagagaactctggctgttgtgcataggacctacaagtgggctggggttggtggctcacgcctgtaagcccagcactttgggaggctgaggtgggaggatcctttgagcccaggagtttgagaccagcttgggcaacatagtgagaccctgtctctaccaaaaaaaaaaaaaaaaaagacaaatggagaaggatgggggtgtacactgtaggaaggagagcgatatttaatcagtaaccacttcctagggtattttaacatgccatcactaaatccccatgcacctccttccccagctccacgaccacgctgcttacttagtagacaacctgtgggactgtgca

SEQ ID NO: 306570 - DNA, 1340 bp, Artificial Sequence
  derived and/or modified sequence
gtcgccctccgtcgtggtctggcgtgtattccgagcgttggtgtctggcggtttccgagcgttggtgtctggcggtttccgaccgttggtgtctggcggtttccgaccgttggtgtctggcacgcgccaccctctcttgctttggttgcgccatgccgatgtaccagacaagaagacaagaaaatgatttgaggacagcttcaatcgcggtgtgaagaagaaagcagcaaaacgaccactgaaaacaacgccggtggcaaaatatccaaagaaagggtcccaagcggtacatcgtcatagccggaaacagtcagagccaccagccaatgatattttcaatgctgcgaaagctgccaaaagtgacatgcagcaccgagaagtccgcgtgaagtgcgtgaaggctctgaaagggctgtacggtaaccgggacctgaccgcacgcctggagctcttcactggccgcttcaaggactggatggtttccatgatcgtggacagagagtacagtgtggcagtggaggccgtcagattactgatacttatccttaagaacatggaaggggtgctgatggacgtggactgtgagagcgtctaccccattgtgtaggcctctaattgaggcctggcctctgctgtgggtgaatttctgtactggaaacttttctaccctgagtgcgagataagaacgatgggtggaagagagcaacgccagagcccaggcgcccagaggactttcttccagcttctgctgtccttctttgtggagagcaagctccacgaccacgctgcttacttagtagacaacctgtgggactgtgcagggactcagctgaaggactgggagggtctgacaagcctgctgctggagaaggaccagagcacgtgccacatggagccagggccagggaccttccacctcctagggtgaaaccaggagagattgcttgcttcacttgtacaaggcaggaacggtggcatggcgtgggggaaacttggagttggaaggtggctaatctttgattctatgtttttgatcctcctggcactccagacctgggtgatatgcaggagagcacactgatagaaatccttgtgtccagtgcccagcaactcctgcctcagcctcccgagcagctgggactacaggtgcccgccaccacgcccgtctctactaaaaatacaaaaaaaattagccaggcatggtggcgggcgcctatatggtcccagctactcaggaggctggggcaagagaatggcgtgagcccgggaggtggagcttgcagcgagcggaaattgcgccactgcactccagcctgggcgacagagtgagactccgtctc

SEQ ID NO: 306571 - DNA, 1697 bp, Artificial Sequence
  derived and/or modified sequence
ccgaacgcccgcagcagggtcagaagggaggtggtcgccctccgtcgtggtctggcgtgtattccgagccttggtgtctggcggtttccgagcgttggtgtctggcggtttccgagcgttggtgtcttggcggtttccgaccgttggtgtctggcggtttccgaccgttggtgtctggcacgcgccaccctctcttgctttggttgcgccatgccgatgtaccagacaagaagacaagaaaatgatttgaggacagcttcaatcgcggtgtgaagaagaaagcagcaaaacgaccactgaaaacaacgccggtggcaaaatatccaaagaaagggtcccaagcggtacatcgtcatagccggaaacagtcagagccaccagccaatgatcttttcaatgctgcgaaagctgccaaaagtgacatgcagcaccgagaagtccgcgtgaagtgcgtgaaggctctgaaagggctgtacggtaaccgggacctgaccgcacgcctggagctcttcactggctgcttcaaggactggatggtttccatgatcatggacagagagtacagtgtggcagtggaggccgtcagattactgatacttatccttaaacttttctaccctgagtgcgagataagaacgatgggtggaagagagcaacgccagagcccaggtgcccagaggactttcttccagcttctgctgtccttctttgtggagagcaagctccacgaccacgctgcttacttagtagacaacctgtgggactgtgcagggactcagctgaaggactgggagggtctgacaagcctgctgctggagaaggaccagagcacgtgccacatggagccagggccagggaccttccacctcctagggtgaaaccaggagagattgcttgcttcacttgtacaaggcaggaacggtggcatggggtgggggaaacttggagttggaaggtggctaatctttgattctatgtttttgatcctcctggcactccagacctgggtgatgtgcaggagagcacactgatagaaatccttgtgtccagtgcccagcaactcctgcctcagcctcccgagcagctgggactacaggcgcccgccaccacgcctggctaacttttttgtatttttagtagagacgggttttcaccgtgttagccaggatggtcttgatctcttgaccttgtgatccacctgcctcatcatcccaaagtgctgggattacaggcgtgagccactgcgcccagcatgttagacaatttttaattcatcctctctgtgctgttgttttctcagctgtgaaaggaatattctggtggggacaaggttacagagttgctgagagggtctcatgacatgaaggtactggccttggcacagtgcctgggggggcggggactccgcacatgcctgtgatgtcacagttactgtcagttcacagcgaaccttccctccttttcctgttgactttcccacactcctgtaaccctccctccctcccttcttcctctctctctctctcactcacgcacacgcacacacacacacacacacacacacacacacactccattctctgtctccatgactctggagtaaactaacgtctcgagttgccattggaagccccattgtcctcattttgttttgttttgtttgtttgagacggggtctcgctctgtcccccaggctg

SEQ ID NO: 306572 - DNA, 456 bp, Artificial Sequence
  derived and/or modified sequence
atgcagcacagagaagtgcgggtgaagtgcgtgaaggctctgaaggggctgtacggaaatagagatctgacagcacgtctcgagctctttactggtagattcaaagactggatggtgtccatgattgtcgaccgcgagtacagcgttgcggtcgaggccgtgaggctcctcatcctaattttgaagctattctatccagagtgtgaaatccggactatgggtggccgtgaacagcgacagagcccaggagctcagcggacattttttcagctcttgctgtcattttttgtggagtcaaagttgcacgaccatgccgcttatcttgttgataacctgtgggactgcgctggtactcagttaaaagactgggaagggcttacaagcttgctgctggagaaggaccagagtacatgtcacatggaaccaggccctggtaccttccatttgctggggtag

SEQ ID NO: 306573 - DNA, 378 bp, Artificial Sequence
  derived and/or modified sequence
atgcagcacagagaagtccgcgtgaagtgtgttaaggctcttaaaggactttacggcaaccgggacctgacggccagactggaactgttcacggggcgatttaaagactggatggtgtctatgattgtcgaccgggaatactctgtcgcagtagaggcagtaagactcttgatcctgatccttaagcttttctatccagaatgtgagatcagaacaatgggagggagggagcaacgccagtctccaggcgctcagcgaaccttctttcaactgctcctttctttcttcgtggagagtaaggtgacatacacagagcggacactggccgtggtccataggacatataagtgggccggtgtgggcggaagcaggctgtag

SEQ ID NO: 306574 - DNA, 240 bp, Artificial Sequence
  derived and/or modified sequence
atgggcggacgagaacaacggcagtcacccggtgcccagcgcacatttttccaattgctgctttcttttttcgttgaatctaagctgcatgatcatgcggcttatttggtggataacctttgggactgtgccggaacccagcttaaggattgggaagggctgacgtctcttctgctagaaaaggaccaaagcacttgccacatggaacccggacccggaaccttccatctgctggggtag

SEQ ID NO: 306575 - DNA, 456 bp, Artificial Sequence
  derived and/or modified sequence
atgcagcaccgtgaggtccgggtcaaatgtgtgaaggctctcaaagggctatatggcaatagagatctcactgctcgcctagagctctttactgggtgcttcaaggattggatggttagcatgataatggaccgcgagtactccgtagcagttgaggctgtacggctgctgatactgatcctaaagctattttatcccgaatgcgagatccgcacgatgggcggtagagagcagcgccagagtccaggcgctcagagaacttttttccagctgctgttgagtttttttgttgaatccaaactccacgaccacgccgcttatcttgtggacaatctttgggattgcgcaggcacccagctcaaggactgggaaggattgaccagtttactgcttgagaaggatcagagcacttgtcatatggagccagggcctgggacctttcacctgctggggtag

SEQ ID NO: 306576 - DNA, 456 bp, Artificial Sequence
  derived and/or modified sequence
atgcagcacagagaggtgagagtgaagtgcgtgaaggccctgaagggcctgtacggcaacagagacctgaccgccagactggagctgttcaccggcagattcaaggactggatggtgagcatgatcgtggacagagagtacagcgtggccgtggaggccgtgagactgctgatcctgatcctgaagctgttctaccccgagtgcgagatcagaaccatgggcggcagagagcagagacagagccccggcgcccagagaaccttcttccagctgctgctgagcttcttcgtggagagcaagctgcacgaccacgccgcctacctggtggacaacctgtgggactgcgccggcacccagctgaaggactgggagggcctgaccagcctgctgctggagaaggaccagagcacctgccacatggagcccggccccggcaccttccacctgctgggctag

SEQ ID NO: 306577 - DNA, 378 bp, Artificial Sequence
  derived and/or modified sequence
atgcagcacagagaggtgagagtgaagtgcgtgaaggccctgaagggcctgtacggcaacagagacctgaccgccagactggagctgttcaccggcagattcaaggactggatggtgagcatgatcgtggacagagagtacagcgtggccgtggaggccgtgagactgctgatcctgatcctgaagctgttctaccccgagtgcgagatcagaaccatgggcggcagagagcagagacagagccccggcgcccagagaaccttcttccagctgctgctgagcttcttcgtggagagcaaggtgacctacaccgagagaaccctggccgtggtgcacagaacctacaagtgggccggcgtgggcggcagcagactgtag

SEQ ID NO: 306578 - DNA, 240 bp, Artificial Sequence
  derived and/or modified sequence
atgggcggcagagagcagagacagagccccggcgcccagagaaccttcttccagctgctgctgagcttcttcgtggagagcaagctgcacgaccacgccgcctacctggtggacaacctgtgggactgcgccggcacccagctgaaggactgggagggcctgaccagcctgctgctggagaaggaccagagcacctgccacatggagcccggccccggcaccttccacctgctgggctag

SEQ ID NO: 306579 - DNA, 456 bp, Artificial Sequence
  derived and/or modified sequence
atgcagcacagagaggtgagagtgaagtgcgtgaaggccctgaagggcctgtacggcaacagagacctgaccgccagactggagctgttcaccggctgcttcaaggactggatggtgagcatgatcatggacagagagtacagcgtggccgtggaggccgtgagactgctgatcctgatcctgaagctgttctaccccgagtgcgagatcagaaccatgggcggcagagagcagagacagagccccggcgcccagagaaccttcttccagctgctgctgagcttcttcgtggagagcaagctgcacgaccacgccgcctacctggtggacaacctgtgggactgcgccggcacccagctgaaggactgggagggcctgaccagcctgctgctggagaaggaccagagcacctgccacatggagcccggccccggcaccttccacctgctgggctag

SEQ ID NO: 306580 - DNA, 789 bp, Artificial Sequence
  derived and/or modified sequence
atgctgcacaaggagggcatccagttcagcctgagcgagctgccccccgccggcagcagcaaccagccccccaacctggccttcctggagctgctgagcgagttcagccccagactgttccaccaggacaagcagctgctgctgagctacctggagaagtgcctgcagcacgtgagccaggcccccggccacccctggggccccgtgaccacctactgccacagcctgagccccgtggagaacaccgccgagaccagcccccaggtgctgcccagcagcaagagaagaagagtggagggccccgccaagcccaacagagaggacgtgagcagcagccaggaggagagcctgcagctgaacagcatcccccccacccccaccctgaccagcaccgccgtgaagagcagacagcccctgtggggcctgaaggagatggaggaggaggacggcagcgagctggacttcgcccagggcagccagcccgtggccggcaccgagagaagcagattcctgggcccccagtacttccagaccccccacaaccccagcggccccggcctgggcaaccagctgatgagactgagcctgatggaggaggacgaggaggaggagctggagatccaggacgagagcaacgaggagagacaggacaccgacatgcaggccagcagctacagcagcaccagcgagagaggcctggacctgctggacagcaccgagctggacatcgagatcaccgagagcctgcccctgctgggcaagagcccccacccctacaacagcagatag

SEQ ID NO: 306581 - DNA, 789 bp, Artificial Sequence
  derived and/or modified sequence
atgttgcacaaagagggaattcagttcagtctgtcggagctgccccctgccggaagcagcaatcagcctcccaacttggctttcctcgagctcctctccgaattctccccgaggctgttccaccaggataaacaattactcctgtcctatctggagaagtgtcttcaacatgtttctcaggcaccaggtcacccctggggtcccgtgacaacctactgtcactctctctcaccagtcgaaaacaccgcagaaacttccccccaggtcctacctagctcaaagcgtagacgtgttgagggacctgctaagcccaacagggaggatgtgagtagctcacaggaagagtcgctgcagttaaactccattcctcctactcctacgctgactagtacggccgttaagtctcggcagccgctatggggcctgaaggagatggaggaagaggatggtagtgagctggatttcgcgcagggatcccaacctgtcgctgggaccgagaggtccagatttttgggtcctcagtatttccagacaccacataacccaagcggtcccggtctggggaaccagctgatgagactgagtttaatggaggaagatgaggaagaagaacttgagattcaggacgaatcgaatgaggaacgccaggataccgatatgcaagcttctagttactcgagtacttcagagagaggcctcgacctgcttgattctactgagcttgacatagaaatcaccgagagtctgccactgctagggaagtcaccccacccttacaattcccggtag

SEQ ID NO: 306582 - DNA, 789 bp, Artificial Sequence
  derived and/or modified sequence
atgctgcacaaggagggcatccagttcagcctgtctgagctgcccccagctggcagcagcaaccagccccccaacctggccttcctggagctgctgtctgagttcagccccaggctcttccaccaggacaagcagctgctgctgagctacctggagaagtgcctgcagcacgtgtcccaggcccctggccacccctggggccctgtgaccacctactgccacagcctgagccctgtggagaacacagctgagaccagcccccaggtgctgcccagcagcaagagaagaagagtggagggccctgccaagcccaacagagaagatgtgagcagcagccaggaggagagcctgcagctgaacagcatcccccccacccccaccctgaccagcacagctgtgaagagccggcagcccctgtggggcctgaaggagatggaggaggaggatggcagcgagctggactttgcccagggcagccagcctgtggccggcacagagaggagccgcttcctgggcccccagtacttccagaccccccacaaccccagcggccctggcctgggcaaccagctgatgaggctgagcctgatggaggaggatgaggaggaggagctggagatccaggatgagagcaatgaggagcggcaggacacagacatgcaggccagcagctacagcagcaccagcgagcggggcctggacctgctggacagcacagagctggacatcgagatcacagagagcctgcccctgctgggcaagagcccccacccctacaacagcaggtag

SEQ ID NO: 306583 - DNA, 789 bp, Artificial Sequence
  derived and/or modified sequence
atgctgcacaaggagggcatccagttcagcctgagcgagctgccccctgccggcagttccaatcaacctccaaacctggccttcttggaactgttatccgagttctcaccacgcctttttcaccaggataaacaattgttattgtcctacctggagaagtgtctccaacatgtgagccaggctcccgggcatccctggggacccgtgacaacctactgtcacagtctttctcctgttgagaacacagctgagacatcacctcaagtgctaccatccagtaaacggagaagggtggaaggacctgcaaaaccaaatcgtgaagacgtttcgtccagtcaggaagaatctttacagttaaattcgatcccaccaacgcctactctcacgtccacagccgtaaaaagcagacagcccctgtgggggctgaaagagatggaagaggaggatggtagcgaactggactttgcccagggctcccagccagtggcgggaactgagaggtcgaggtttctgggaccccagtattttcagaccccgcacaacccgtccggacccggactgggcaatcagctaatgagactttcacttatggaagaggacgaagaagaagaactggagattcaagacgagagcaacgaagagcggcaagatacagacatgcaggcaagcagctactccagtaccagcgagcggggactggacctgttggattctacagaactagacattgagattactgagagtctccctctgctggggaagtccccccacccctacaacagccgttag

SEQ ID NO: 306584 - DNA, 789 bp, Artificial Sequence
  derived and/or modified sequence
atgttgcacaaagagggaatacagttttccctgagtgaactgccgcctgcaggctctagcaatcaacctcccaacctcgctttcctcgagctgctgagcgagttcagtccacgacttttccaccaagacaaacagctgttactttcttacttggagaagtgtctgcaacacgtgagtcaggcacctggacatccgtggggacctgttaccacctactgccatagcctgtcccctgtggagaacactgctgagacaagcccacaggtcctcccctcttctaagcgcagaagagtggagggacccgctaaacccaatcgggaggatgtgtcctccagtcaggaagagtcccttcagctcaattcaatacccccaacgcctacgctgactagcaccgccgtgaaatcacggcagcccctgtgggggcttaaggaaatggaagaagaggacggatccgagctggatttcgcacaaggatctcagccagtggccggaaccgagcgcagtcggtttttgggccctcagtattttcaaactcctcataacccatctgggcctggcttgggaaatcagttgatgagactgagtcttatggaggaagatgaggaagaggagttggagattcaggacgaatccaacgaagaacgtcaggacacggacatgcaggcaagctcctattcttcaacaagcgagagaggactggacctgctggactcaacagaactagatatcgagattacagagagtctgccactgttaggaaaatcaccacacccatacaatagccgctag

SEQ ID NO: 306585 - DNA, 981 bp, Artificial Sequence
  derived and/or modified sequence
aagaatgtggcaaaggctttagtatattctcaacccttactaaacataagataattcatactggagagaaaccctacaaatgcaatgaatgtggtaaagcctttaactggtcctcaactcttactaaacataagagaattcatactggagagaaaccctacaaatgtgaagaatgtggcaaagcttttaaccagtcctcaacccttactagacataagatagttcatactggagagaaaccctacaaatgtgaagaatgtggtaaagcctttaaacggtccacaactctaaaacataagagaatttatactaaagagaaaccatacaaatgtgaagaatgtggaaaagcctttagtgtattctcaacccttactaaacataagataattcatactggagcaaaaccttacaaatgtgacgaatgtggcagtgcctttagggcattctcaacccttactgaacataagagagttcatactggagagaaaccttacaaatgcaatgaatgtggtaaagcctttaactggtcctcaactcttactaaacataagagaattcatactggagagaagccctacaaatgtgaagaatgtggcaaagcttttaaccggtcctcaaaccttactcgacataagaaaattcatactggagagaaaccatacaaacctaaaagatgtgacagtgcttttgacaacaccccaaacttttctagacataaaagaaatcatatgggtgagaaatcctagaaatgtgaagaatgtgacaaagcctttaagcggttgtcacacttgattgtatataagataattcatactggagaaaactcccagaagtgtgacaaatgtgacaaaacatttaattaattctcataccttattgcacaggaaagcatttatacttgagaaaaattgtataaagaatggaaaagtcattaatatctgctcatatcttaacatcagcgagttggtatttaataaaagc

SEQ ID NO: 306586 - DNA, 717 bp, Artificial Sequence
  derived and/or modified sequence
atgaagaacgtggccaacaccgtgaccatcagccacatcctgccccacatcaagatcatccacaccgaggagaagcccgacaagtgcgaggagtgcaacaaggtgttcaactggagcagcacccacaccaagtacaagagaatccacaccgaggacaagttctacaagtacgaggagtgcgacaagagcttcaagaacatcagcaccctgatcacccacaagatcatctacgtggtggagaagttctacaagtgcgaggagtgcggcaaggtgttcttcttcttcctgaagtggagcctgaccctgagccccaagctggagtgcaacggcgccatcagcgtgcactgcaacctgagactgctgggcagcagcgacagcctggccagcaccagccaggccgccggcatcgccggcgcctgccaccacgcccagctgatcttcgtgttcctggtggagaccggcttccaccacttcgaccaggccggcttcgagctgctgaccagcagcgacccccccgccctggccagccagagcgcccccaagtgctgggactacaagcacgagcccctgagccccgtggagtgcggcaaggtgttcaacaagctgagcaaccacaccggcgagaagctgtacaagcccaagagacacgacagcgccctggagaacaccctgaacttcagcaagcacaagagaaaccacagcgtgaagaagccctag

SEQ ID NO: 306587 - DNA, 717 bp, Artificial Sequence
  derived and/or modified sequence
atgaagaatgtggctaacacggttacgatctcacacatactgccccatatcaaaattatacacacagaagagaagccggacaagtgcgaggagtgcaacaaggtgttcaactggagctcgacacacaccaagtacaaacgaatccacaccgaggacaagttctataagtatgaggaatgcgataaaagctttaaaaatatttctaccctcatcacgcacaagataatatatgtggttgagaagttttataagtgcgaagaatgtggcaaagtttttttcttttttctcaaatggagcctgaccctgtctcctaagctggagtgtaacggcgcaattagtgtccactgtaatctgaggctgctgggctcctctgactcacttgcgtctacttctcaagccgccgggatcgcgggtgcatgccaccatgctcagcttatctttgtcttcttagttgagaccgggttccatcatttcgaccaggccggattcgagttattgacgagcagcgatccacccgctctggcaagccaaagtgcacccaagtgttgggattacaagcatgagccactctcacccgtggagtgcgggaaggtctttaataagctctccaaccacacaggggaaaaactgtacaaacctaagcggcatgattctgcccttgagaacaccctgaacttttcgaaacataagaggaatcattctgttaagaagccatag

SEQ ID NO: 306588 - DNA, 717 bp, Artificial Sequence
  derived and/or modified sequence
atgaagaatgtggccaacacagtgaccatcagccacatcctgccccacatcaagatcatccacacagaggagaagccagacaagtgtgaggagtgcaacaaggtgttcaactggagcagcacccacaccaagtacaagaggatccacacagaggacaagttctacaagtatgaagaatgtgacaagagcttcaagaacatcagcaccctcatcacccacaagatcatctacgtggtggagaagttctacaagtgtgaagaatgtgggaaggtgttcttcttcttcctgaagtggagcctgaccctgagccccaagctggagtgcaatggagccatctctgtgcactgcaacctgcggctgctgggcagcagtgacagcctggccagcaccagccaggccgccggcattgctggggcctgccaccacgcccagctgatctttgtgttcctggtggagaccggcttccaccactttgaccaggccggctttgagctgctgaccagcagtgaccccccagccctggccagccagagcgcccccaagtgctgggactacaagcatgagcccctgagccctgtggagtgtgggaaggtgttcaacaagctgagcaaccacactggagagaagctgtacaagcccaagagacatgacagcgccctggagaacaccctgaacttcagcaagcacaagaggaaccacagcgtgaagaagccctag

SEQ ID NO: 306589 - DNA, 717 bp, Artificial Sequence
  derived and/or modified sequence
atgaagaacgtggccaacaccgtgaccatcagccacatcctgccccatataaaaattatccacacagaggaaaaacccgacaagtgtgaagagtgcaacaaagtgttcaattggtcctcaactcacactaaatacaaaaggatccatacagaagacaagttctataaatacgaggaatgcgacaagtccttcaagaatatctctaccctgattacgcataagatcatctatgtagtagagaagttttacaagtgtgaggaatgtgggaaggtgttctttttcttcctcaagtggagtttgacattgtcaccaaaactggagtgcaacggggccatatccgtccattgtaatctgagattattaggttcttcggacagcctggcgagcacatcccaggccgcaggtatcgccggggcctgtcaccacgcccagctgatttttgtgttcctcgtggagactggatttcatcatttcgatcaagccggatttgaattgctgacctcgtctgacccccctgcattggcttcacaatccgccccaaagtgctgggattacaagcacgaaccgctgtcccctgtggagtgcggcaaagtgttcaacaagctgtccaaccatactggggagaagttgtacaaacccaagcggcacgactcagctcttgagaatacactgaatttctcgaaacacaaaaggaaccactcagtcaagaaaccatag

SEQ ID NO: 306590 - DNA, 717 bp, Artificial Sequence
  derived and/or modified sequence
atgaaaaatgtggcaaatactgtcacaattagccacatactaccccacataaagataatccacaccgaagaaaaaccggacaagtgcgaggagtgtaataaggtattcaattggagctctacccacactaaatacaagcgcattcatacggaagataagttctataagtatgaggagtgcgacaaatccttcaaaaacatttctacgctgataacccataaaataatctatgtggtggaaaagttttataagtgcgaagaatgcggcaaggtgttttttttcttcttgaaatggtccctcacactcagcccaaagcttgagtgtaacggagctatttccgtccactgtaaccttcgtcttctggggtcaagcgattccctggccagtacaagtcaggctgcagggatagccggtgcctgccatcacgctcagcttattttcgtgttcctggttgagaccgggtttcaccactttgatcaggccggatttgagctgctgactagcagcgaccctccagctctggcttctcaatccgcccctaagtgttgggattataagcatgagcccctttctcctgtcgagtgtggtaaggtcttcaacaaactttcaaaccatactggagaaaaactatacaaaccgaagcgacacgatagcgccctggagaacactctcaacttcagcaagcataagaggaaccacagcgttaagaagccctag

SEQ ID NO: 306591 - protein, 1419 aa, Artificial Sequence
  derived and/or modified sequence
MQRSPLEKASVVSKLFFSWTRPILRKGYRQRLELSDIYQIPSVDSADNLSEKLEREWDRELASKKNPKLINALRRCFFWRFMFYGIFLYLGEVTKAVQPLLLGRIIASYDPDNKEERSIAIYLGIGLCLLFIVRTLLLHPAIFGLHHIGMQMRIAMFSLIYKKTLKLSSRVLDKISIGQLVSLLSNNLNKFDEGLALAHFVWIAPLQVALLMGLIWELLQASAFCGLGFLIVLALFQAGLGRMMMKYRDQRAGKISERLVITSEMIENIQSVKAYCWEEAMEKMIENLRQTELKLTRKAAYVRYFNSSAFFFSGFFVVFLSVLPYALIKGIILRKIFTTISFCIVLRMAVTRQFPWAVQTWYDSLGAINKIQDFLQKQEYKTLEYNLTTTEVVMENVTAFWEETSLLMVIMGELEPSEGKIKHSGRISFCSQFSWIMPGTIKENIIFGVSYDEYRYRSVIKACQLEEDISKFAEKDNIVLGEGGITLSGGQRARISLARAVYKDADLYLLDSPFGYLDVLTEKEIFESCVCKLMANKTRILVTSKMEHLKKADKILILHEGSSYFYGTFSELQNLQPDFSSKLMGCDSFDQFSAERRNSILTETLHRFSLEGDAPVSWTETKKQSFKQTGEFGEKRKNSILNPINSIRKFSIVQKTPLQMNGIEEDSDEPLERRLSLVPDSEQGEAILPRISVISTGPTLQARRRQSVLNLMTHSVNQGQNIHRKTTASTRKVSLAPQANLTELDIYSRRLSQETGLEISEEINEEDLKECFFDDMESIPAVTTWNTYLRYITVHKSLIFVLIWCLVIFLAEVAASLVVLWLLGNTPLQDKGNSTHSRNNSYAVIITSTSSYYVFYIYVGVADTLLAMGFFRGLPLVHTLITVSKILHHKMLHSVLQAPMSTLNTLKAGGILNRFSKDIAILDDLLPLTIFDFIQLLLIVIGAIAVVAVLQPYIFVATVPVIVAFIMLRAYFLQTSQQLKQLESEGRSPIFTHLVTSLKGLWTLRAFGRQPYFETLFHKALNLHTANWFLYLSTLRWFQMRIEMIFVIFFIAVTFISILTTGEGEGRVGIILTLAMNIMSTLQWAVNSSIDVDSLMRSVSRVFKFIDMPTEGKPTKSTKPYKNGQLSKVMIIENSHVKKDDIWPSGGQMTVKDLTAKYTEGGNAILENISFSISPGQRVGLLGRTGSGKSTLLSAFLRLLNTEGEIQIDGVSWDSITLQQWRKAFGVIPQKVFIFSGTFRKNLDPYEQWSDQEIWKVADEVGLRSVIEQFPGKLDFVLVDGGCVLSHGHKQLMCLARSVLSKAKILLLDEPSAHLDPVTYQIIRRTLKQAFADCTVILCEHRIEAMLECQQFLVIEENKVRQYDSIQKLLNERSLFRQAISPSDRVKLFPHRNSSKCKSKPQIAALKEETEEEVQDTRL

SEQ ID NO: 306592 - protein, 190 aa, Artificial Sequence
  derived and/or modified sequence
  misc_feature (1)..(1): Xaa can be any naturally occurring amino acid
XKGLWTLRAFGRQPYFETLFHKALNLHTANWFLYLSTLRWFQMRIEMIFVIFFIAVTFISILTTGEGEGRVGIILTLAMNIMSTLQWAVNSSIDVDSLMRSVSRVFKFIDMPTEGKPTKSTKPYKNGQLSKVMIIENSHVKKDDIWPSGGQMTVKDLTAKYTEGGNAILENISFSISPGQRVRFEHCLLC

SEQ ID NO: 306593 - DNA, 567 bp, Artificial Sequence
  derived and/or modified sequence
aagggcctgtggaccctgcgcgccttcggccgccagccctacttcgagaccctgttccacaaggccctgaacctgcacaccgccaactggttcctgtacctgagcaccctgcgctggttccagatgcgcatcgagatgatcttcgtgatcttcttcatcgccgtgaccttcatcagcatcctgaccaccggcgagggcgagggccgcgtgggcatcatcctgaccctggccatgaacatcatgagcaccctgcagtgggccgtgaacagcagcatcgacgtggacagcctgatgcgcagcgtgagccgcgtgttcaagttcatcgacatgcccaccgagggcaagcccaccaagagcaccaagccctacaagaacggccagctgagcaaggtgatgatcatcgagaacagccacgtgaagaaggacgacatctggcccagcggcggccagatgaccgtgaaggacctgaccgccaagtacaccgagggcggcaacgccatcctggagaacatcagcttcagcatcagccccggccagcgcgtgcgcttcgagcactgcctgctgtgc

SEQ ID NO: 306594 - DNA, 573 bp, Artificial Sequence
  derived and/or modified sequence
tgaaagggcctgtggaccctgagagccttcggcagacagccctacttcgagaccctgttccacaaggccctgaacctgcacaccgccaactggttcctgtacctgagcaccctgagatggttccagatgagaatcgagatgatcttcgtgatcttcttcatcgccgtgaccttcatcagcatcctgaccaccggcgagggcgagggcagagtgggcatcatcctgaccctggccatgaacatcatgagcaccctgcagtgggccgtgaacagcagcatcgacgtggacagcctgatgagaagcgtgagcagagtgttcaagttcatcgacatgcccaccgagggcaagcccaccaagagcaccaagccctacaagaacggccagctgagcaaggtgatgatcatcgagaacagccacgtgaagaaggacgacatctggcccagcggcggccagatgaccgtgaaggacctgaccgccaagtacaccgagggcggcaacgccatcctggagaacatcagcttcagcatcagccccggccagagagtgagattcgagcactgcctgctgtgctag

SEQ ID NO: 306595 - DNA, 573 bp, Artificial Sequence
  derived and/or modified sequence
taaaagggactgtggaccttgcgcgcatttggaagacagccttattttgagaccctgttccataaggcgcttaacctgcataccgcgaattggttcctgtacctctcaactctgaggtggttccaaatgcggatcgagatgatttttgtgatcttttttatcgcggttacattcatcagcatactaaccacaggggaaggcgagggcagggttgggatcattctcactttggccatgaacatcatgtccaccttgcagtgggccgttaatagtagcatcgatgttgactcgttgatgcgaagtgtgtcccgcgtgttcaagtttattgatatgccaaccgaaggcaagccaaccaagtcgaccaaaccgtataagaacggtcaactctcaaaagttatgattattgagaactcgcacgtcaaaaaggatgatatttggcccagcgggggccagatgaccgtgaaggacctgactgccaaatacacggagggcggaaatgccatcctggagaacatctccttttctatctcccccgggcagagagtgcgcttcgagcattgtctgctgtgttag

SEQ ID NO: 306596 - DNA, 573 bp, Artificial Sequence
  derived and/or modified sequence
tgaaaaggcctgtggaccctgcgggccttcggccggcagccctactttgagaccctcttccacaaggccctgaacctgcacacagccaactggttcctgtacctgagcaccctgcgctggttccagatgagaattgagatgatctttgtgatcttcttcatcgctgtgaccttcatcagcatcctgaccaccggggagggggagggccgggtgggcatcatcctgaccctggccatgaacatcatgagcaccctgcagtgggccgtgaacagcagcattgatgtggacagcctgatgaggtctgtgtccagggtcttcaagttcatcgacatgcccacagagggcaagcccaccaagagcaccaagccctacaagaatggccagctgagcaaggtgatgatcatcgagaacagccacgtgaagaaggatgacatctggcccagcggcggccagatgacagtgaaggacctgacagccaagtacacagagggcggcaatgccatcctggagaacatctccttcagcatcagccctggccagagggtgcgctttgagcactgcctgctgtgctag

SEQ ID NO: 306597 - DNA, 682 bp, Artificial Sequence
  derived and/or modified sequence
taaaaggactatggacacttcgtgccttcggacggcagccttactttgaaactctgttccacaaagctctgaatttacatactgccaactggttcttgtacctgtcaacactgcgctggttccaaatgagaatagaaatgatttttgtcatcttcttcattgctgttaccttcatttccattttaacaacaggagaaggagaaggaagagttggtattatcctgactttagccatgaatatcatgagtacattgcagtgggctgtaaactccagcatagatgtggatagcttgatgcgatctgtgagccgagtctttaagttcattgacatgccaacagaaggtaaacctaccaagtcaaccaaaccatacaagaatggccaactctcgaaagttatgattattgagaattcacacgtgaagaaagatgacatctggccctcagggggccaaatgactgtcaaagatctcacagcaaaatacacagaaggtggaaatgccatattagagaacatttccttctcaataagtcctggccagagggtgagatttgaacactgcttgctttgttagactgtgttcagtaagtgaatcccagtagcctgaagcaatgtgttagcagaatctatttgtaacattattattgtacagtagaatcaatattaaacacacatgttttatta

SEQ ID NO: 306598 - DNA, 573 bp, Artificial Sequence
  derived and/or modified sequence
tgaaagggcctgtggaccctgcgggccttcggccggcagccctactttgagaccttgttccacaaagccttaaatttacatactgcaaactggttcctgtacctgagcacactgcgttggttccaaatgcgaatagagatgatttttgttatcttctttatcgctgtgactttcatctccatcctgacaaccggtgagggagagggcagggtaggaatcattctgacactcgctatgaatattatgagcactctgcagtgggcagtgaattctagtatcgatgttgatagcctgatgcgttcggtgtcaagagtcttcaagttcatcgatatgcctactgagggaaaacctaccaagagcacaaagccttacaagaacggacagctttccaaggtgatgatcatagagaactctcatgtgaagaaagatgacatctggccatcgggagggcagatgaccgtgaaggacctgaccgcaaaatatacagaaggcggtaacgcaattttggagaatattagcttcagtatatcgcctggtcagcgcgttagattcgagcactgcctactgtgttag

SEQ ID NO: 306599 - DNA, 573 bp, Artificial Sequence
  derived and/or modified sequence
taaaaaggactctggaccctgcgtgcctttggacgccagccttacttcgaaacactgtttcacaaagcactcaacctccatacagctaattggttcttatatttgtccaccctgcggtggtttcagatgaggatcgaaatgatttttgtgattttcttcattgccgtaaccttcatttcaatcctcactaccggcgagggcgagggaagggtcgggattattctgacactggcaatgaacatcatgagtaccctccagtgggctgtcaatagttccatcgatgtagatagcctgatgcggagtgtctcccgagtctttaagtttatcgatatgccaacggagggcaaaccgactaaatctaccaagccatataagaacgggcagctcagtaaagtgatgattattgagaactctcatgtgaagaaggatgacatctggcccagcggcggtcagatgactgtaaaagacctgactgccaagtacactgagggtgggaatgctattctggaaaatatcagcttctccatctccccaggccagcgggtacggttcgagcactgcttgctgtgttag

SEQ ID NO: 306600 - DNA, 573 bp, Artificial Sequence
  derived and/or modified sequence
tgaaaaggtctttggacattgcgggccttcggcagacagccctactttgagactctctttcacaaagcactcaatcttcacactgcaaattggttcctgtacctcagcaccctgcggtggtttcagatgcgaatcgagatgatttttgttattttttttatagcagtgaccttcatctcaattttaacaaccggagaaggcgaaggcagagtgggcataatcctgacgctagctatgaatataatgtccaccttacaatgggctgtaaatagttcgatagatgttgatagcctaatgcggtcagtcagtcgcgtattcaagtttatcgatatgcccaccgaaggcaaacccactaaaagcaccaaaccatataagaacggtcagctgagtaaggtcatgattatcgaaaacagccacgtcaagaaggacgatatttggcctagcggcggacagatgacagtgaaggacctcacagcaaaatacactgaaggaggcaacgctattctggaaaacatttccttcagtatctctccaggacaacgcgtacgcttcgaacactgccttctctgttag

SEQ ID NO: 306601 - DNA, 573 bp, Artificial Sequence
  derived and/or modified sequence
tgaaaaggactgtggactctgagagccttcggacggcaaccttattttgagactctgttccataaagccctgaatctgcatacagctaattggttcttatacctatccaccctgcgctggtttcaaatgcgcatcgagatgatctttgtaatcttcttcatagctgtgacattcatctccatactgaccaccggcgaaggcgaagggagagtgggtatcattctgacactagccatgaacattatgtcaacactgcagtgggccgtgaattcttcgattgatgtcgattccctgatgcgcagtgtgtcacgcgtattcaaattcatagacatgcccacggagggcaaaccaactaagtctaccaaaccctacaaaaatggtcagctgtcaaaggttatgattattgagaacagccatgtgaagaaagatgatatttggcctagcggtggtcagatgacagttaaggatctaaccgccaagtatacagagggcggaaatgctattttagaaaatatttcattctctatttctccaggacaacgggtgagattcgagcactgtctgctttgttag

SEQ ID NO: 306602 - DNA, 423 bp, Artificial Sequence
  derived and/or modified sequence
atggacctgctgccgaccagcattctgctcgcttctctttggatatgtagtcacttgcacccacctggcgtgtccgtggatttgccgcctacttccatactactggtctctttgtggatctgctcccacctccacccccctggggtgtctgttgaccgaccaccaccaccctctagctggtgcctttgtggctcacctcccacttccatcctgctggtgagcctttggatctgttctccccctccatcttcatggtgtttgtgtggcagtgcgccaacatccattctgctggtatcactctggatttggagactgtgggggctcaccgaggtcggccacgtggaattcgtgttccttccctggctgatctcatggaacatcatgttcagtaagcttttcagctgctttttgtatctcggatag

SEQ ID NO: 306603 - RNA, 573 nt, Artificial Sequence
  derived and/or modified sequence
ugaaaaggucuuuggacauugcgggccuucggcagacagcccuacuuugagacucucuuucacaaagcacucaaucuucacacugcaaauugguuccuguaccucagcacccugcggugguuucagaugcgaaucgagaugauuuuuguuauuuuuuuuauagcagugaccuucaucucaauuuuaacaaccggagaaggcgaaggcagagugggcauaauccugacgcuagcuaugaauauaauguccaccuuacaaugggcuguaaauaguucgauagauguugauagccuaaugcggucagucagucgcguauucaaguuuaucgauaugcccaccgaaggcaaacccacuaaaagcaccaaaccauauaagaacggucagcugaguaaggucaugauuaucgaaaacagccacgucaagaaggacgauauuuggccuagcggcggacagaugacagugaaggaccucacagcaaaauacacugaaggaggcaacgcuauucuggaaaacauuuccuucaguaucucuccaggacaacgcguacgcuucgaacacugccuucucuguuag

SEQ ID NO: 306604 - RNA, 573 nt, Artificial Sequence
  derived and/or modified sequence
ugaaaaggacuguggacucugagagccuucggacggcaaccuuauuuugagacucuguuccauaaagcccugaaucugcauacagcuaauugguucuuauaccuauccacccugcgcugguuucaaaugcgcaucgagaugaucuuuguaaucuucuucauagcugugacauucaucuccauacugaccaccggcgaaggcgaagggagaguggguaucauucugacacuagccaugaacauuaugucaacacugcagugggccgugaauucuucgauugaugucgauucccugaugcgcagugugucacgcguauucaaauucauagacaugcccacggagggcaaaccaacuaagucuaccaaacccuacaaaaauggucagcugucaaagguuaugauuauugagaacagccaugugaagaaagaugauauuuggccuagcgguggucagaugacaguuaaggaucuaaccgccaaguauacagagggcggaaaugcuauuuuagaaaauauuucauucucuauuucuccaggacaacgggugagauucgagcacugucugcuuuguuag

SEQ ID NO: 306605 - protein, 465 aa, Artificial Sequence [sequence omitted]

SEQ ID NO: 306606 - protein, 159 aa, Artificial Sequence
  derived and/or modified sequence
MLRVLLSAQTSPARLSGLLLIPPVQPCCLGPSKWGDRPVGGGPSAGPVQGLQRLLEQAKSPGELLRWLGQNPSKVRAHHYSVALRRLGQLLGSRPRPPPVEQVTLQDLSQLIIRNCPSFDIHTIHVCLHLAVLLGGTEVGPALWATELPAPGTAVYALP

SEQ ID NO: 306607 - DNA, 1609 bp, Artificial Sequence
  derived and/or modified sequence
gggaagatggcggactcggtggctagccgatgaggaggccgcggggggaacccggcccccgggccccgagaccgactgagggagcgacctgcgcagggcccggggagtcatggtctccatcacccaactccatgcttcgagtcctgctctctgctcagacctcccctgctcggctgtctggcctgctgctgatccctccagtacagccctgctgtttggggcccagcaaatggggggaccggcctgttggaggaggccccagtgcaggtcctgtgcaaggactgcagcggcttctggaacaggcgaagagccctggggagctgctgcgctggctgggccagaaccccagcaaggtgcgcgcccaccactactcggtggcgcttcgtcgtctgggccagctcttggggtctcggccacggccccctcctgtggagcaggtcacactgcaggacttgagtcagctcatcatccgaaactgcccctcctttgacattcacaccatccacgtgtgtctgcaccttgcagtcttacttggctttccatctgatggtcccctggtgtgtgccctggaacaggagcgaaggctccgcctccctccgaagccacctccccctttgcagccccttctccgaggtgggcaagggttggaagctgctctaagctgcccccgttttctgcggtatccacggcagcatctgatcagcagcctggcagaggcaaggccagaggaactgactccccacgtgatggtgctcctggcccagcacctggcccggcaccggttgcgggagccccagcttctggaagccattgcccacttcctggtggttcaggaaacgcaactcagcagcaaggtggtacagaagttggtcctgccctttgggcgactgaactacctgcccctggaacagcagtttatgccctgccttgagaggatcctggctcgggaagcaggggtggcacccctggctacagtcaacatcttgatgtcactgtgccaactgcggtgcctgcccttcagagccctgcactttgttttttcccctggcttcatcaactacatcagtggcacccctcatgctctgattgtgcgtcgctacctctccctgctggacacggccgtggagctggagctcccaggataccggggtccccgccttccccgaaggcagcaagtgcccatctttccccagcctctcatcaccgaccgtgcccgctgcaagtacagtcacaaggacatagtagctgaggggttgcgccagctgctgggggaggagaaataccgccaggacctgactgtgcctccaggctactgcacagacttcctgctgtgcgccagcagctctggtgctgtgcttcccgtgaggacccaggaccccttcctgccatacccaccaagggcctgccccagctcaagagctacctgaggcagaagctccaggccctgggcctgcgctgggggcctgaagggggctgaggggttgatgtggggttcaggatggcccccccatggggggtggatgatttgcactttggttccctgtgttttgatttctcattaaagttcctttccttccccgttgtgaatctcagttttgggacggggagc

SEQ ID NO: 306608 - DNA, 1398 bp, Artificial Sequence
  derived and/or modified sequence
atgcgcagacccaggggcgagcctggtccccgagctccacgtcccaccgaaggggctacttgcgctgggcctggagaatcttggtctccctcccctaattcaatgctccgggtactgctctcggctcaaacgtcacctgctagactctccggtttattattgattccaccagtacagccttgctgtctcggccctagcaaatggggagatcgcccagttgggggggggcccagcgcaggccctgtacagggtctccagcgtctcctggagcaggctaagtcgccgggggagttgttgagatggctgggccagaacccttctaaggtacgcgctcatcattacagtgtcgccctgaggcggcttgggcaactactagggtcccgccctcgtcctcctcctgtcgaacaggtgacactgcaggaccttagtcagttgatcattcgaaattgtccatcgtttgatatccacacaattcacgtttgcttacacctagctgtgctgctcggcttcccttccgacgggccactggtgtgtgcactcgaacaggaacggcggttgcggctgcccccgaagccaccccccccattgcagccacttcttcgtggcggacagggcttggaggcagcactgagttgtccacgttttctgaggtacccccggcaacatcttatttcttccctcgccgaagctaggccggaagaattaaccccacacgtaatggtgctgctcgcccagcacttagccaggcatcgactaagagagccacaattgctggaggcgattgcccactttcttgtagtgcaggagactcaactatcttctaaagttgtgcagaagttggttttgccatttggacgcctgaattacttacctttggagcagcaatttatgccgtgccttgaacgcatcctggctcgagaggccggcgtagcccccctcgcgacagtgaacatcctgatgtctctctgtcaattgagatgcttgcctttccgggctctgcactttgtcttcagccctgggttcatcaattatatctccggaacccctcacgccttaatcgtgcggcgctacctgtccctgcttgacactgccgtagagctagagctgcctggctatcgcgggccacggctcccgagaaggcaacaggtgcccatttttcctcagccacttattacggaccgggcccggtgtaaatattcccacaaagatatcgttgctgaagggctccgccagctgctgggggaagagaagtataggcaggatctgacagtgccgccaggctattgcactgatttcctcctctgcgcctcctctagcggagcagtgcttcctgtgaggacacaggatccctttttaccctatcctcccagagcctgcccatcttcccgtgctacttag

SEQ ID NO: 306609 - DNA, 1398 bp, Artificial Sequence
  derived and/or modified sequence
atgaggcggcccagaggagagcccggcccccgggccccccggcccacagagggcgccacctgtgccggccctggagagagctggagccccagccccaacagcatgctgcgggtgctgctgagcgcccagaccagccctgcccggctgagcggcctgctgctgatcccccctgtgcagccctgctgcctgggccccagcaagtggggagacaggcctgtgggcggcggccccagcgctggccctgtgcagggcctgcagaggctgctggagcaggccaagagccctggagagctgctgcgctggctgggccagaaccccagcaaggtgcgggcccaccactacagcgtggccctgcggcggctgggccagctgctgggcagccggcccaggcctcctcctgtggagcaggtgaccctgcaggacctgagccagctgatcatccggaactgccccagctttgacatccacaccatccacgtgtgcctgcacctggccgtgctgctgggcttccccagtgatggccccctggtgtgtgccctggagcaggagcggcggctgcggctgccccccaagcccccaccacccctgcagcccctgctgcggggcggccagggcctggaggccgccctgagctgcccccgcttcctgcgctacccccggcagcacctgatcagcagcctggccgaggcccggcctgaggagctgaccccccacgtgatggtgctgctggcccagcacctggcccggcaccggctgcgggagccccagctgctggaggccatcgcccacttcctggtggtgcaggagacccagctgagcagcaaggtggtgcagaagctggtgctgcccttcggccgcctgaactacctgcccctggagcagcagttcatgccctgcctggagcgcatcctggcccgggaggccggcgtggcccccctggccaccgtgaacatcctgatgagcctgtgccagctgcgctgcctgcccttccgggccctgcactttgtgttcagccctggcttcatcaactacatcagcggcaccccccacgccctgattgtgcggcgctacctgagcctgctggacacagctgtggagctggagctgcccggctaccggggcccccggctgccccggcggcagcaggtgcccatcttcccccagcccctcatcacagaccgggcccgctgcaagtacagccacaaggacatcgtggccgagggcctgcggcagctgctgggggaggagaagtaccggcaggacctgactgtgcccccaggctactgcacagacttcctgctgtgtgccagcagcagtggagctgtgctgcctgtgaggacccaggaccccttcctgccctacccaccccgggcctgccccagcagccgggccacctag

SEQ ID NO: 306610 - DNA, 1398 bp, Artificial Sequence
  derived and/or modified sequence
atgcggcggccccggggcgagcccggcccccgggccccccggcccactgagggtgccacgtgtgctggtccgggtgagtcttggtctccatccccgaattctatgttacgcgtgcttttaagcgcccagacttcgccagcacggctgtccggactgctgttgattcctccagtacagccatgctgcctgggcccctcaaagtggggcgatcggccggtagggggcggtccttccgcaggccctgtgcaaggcctccaaagattgctagagcaggcgaagtcccctggagagttactgaggtggctgggccagaacccatctaaggtccgagctcatcactatagcgtggccttgcggagattggggcagctactggggagtcggccaaggccaccccctgtagagcaggtcacactgcaggatctgtcgcagctgattatcagaaactgcccaagtttcgatattcatacaattcatgtgtgtttgcacttggcagttctgctcggattcccaagcgatggccctctggtgtgcgcattggagcaggaaagaagactcagacttccccctaaacccccacctcctctccagcctcttcttcgcggtggacaaggactggaggcagctttaagctgtccacggttcctgcgctaccctaggcagcaccttataagttcgctcgctgaggctcggcccgaggagctcacacctcatgtcatggtgctgcttgctcagcacttggctcgacaccgactccgggaacctcagttgctcgaagctatagctcatttcttagtagtacaggaaacccaactctcatctaaggtcgtacagaagctagttcttccatttggacggttaaactacctcccgctggaacagcagtttatgccctgcctggagaggatcctcgcccgagaagcaggagtggcacctttggcaaccgtgaatatactgatgtctctttgtcagctccgttgtcttccgttccgggctcttcactttgtctttagcccgggctttataaactacatcagcggtactccccacgccctcattgtacggagatatttatccctcttagacacagccgtggagctggagctccctgggtaccggggcccaaggctccctcggagacagcaggttccgatattcccacagccactgatcaccgatcgtgccagatgcaagtactcgcacaaggatatcgtagcagagggcctgcgacaacttctgggtgaagagaagtataggcaggatctcactgtaccaccaggttattgtactgatttcctgctttgcgcgagttctagtggcgctgtgttgccggtgcgcactcaggatccttttctgccctaccctcccagggcctgcccttccagccgggctacgtag

SEQ ID NO: 306611 - DNA, 1398 bp, Artificial Sequence
  derived and/or modified sequence
atgaggaggcctcgcggtgagcctgggcctagggcacccagaccaaccgagggagccacctgcgctggtccaggggaatcgtggagcccttcgcctaacagcatgctcagagtactactgtcagcccagaccagcccagctcgtctgtccggactcttactcattccaccagttcaaccttgctgtctgggccctagtaagtggggggaccggcctgttgggggtggcccttcagcgggtcccgtgcaaggtctgcagaggctgttggagcaagctaagtcaccgggtgagctgctccgatggctggggcagaacccaagcaaggtgagggcacaccactacagcgttgctctgcggaggctgggccaattactgggaagtcgcccacggccaccacctgtggagcaagtcaccctgcaggatctcagccagctgattattcggaactgcccctcctttgacatccacaccattcatgtgtgcctccatttggcagtcctgctcggctttccgagtgacggtcctcttgtgtgcgccttggaacaggagcgaagactgaggctgccacccaaaccccctccccctctgcaaccactgctccgtgggggacagggcctagaagctgctctgtcatgtccgaggttcctgagatacccacgccagcatcttatctcttcactggcggaagcaaggccagaagagttgacaccccacgtgatggtcttactcgcacagcacctcgcacgacacaggttgcgggagcctcagctgctggaggcaatcgctcacttcctggtggtgcaggagacacagctcagctccaaggtggtccagaaactcgttttaccgtttggcagactgaactacctgcctctcgagcaacaattcatgccctgccttgagcgcatcctcgcacgagaggcaggagtcgcccctttggccaccgtgaacattctcatgagtctgtgtcagctgaggtgccttcccttccgggctctccactttgtattctctcccggatttatcaactacatttcgggtacaccacacgcacttattgtgcggcgttatctgtcactgctggatacagctgtcgagttggagctgcccggatataggggtccgcgtcttcccaggcggcagcaggtaccaatatttcctcagcccttgatcacagacagagcccgatgcaaatactcacataaggatattgtcgcagaggggctgaggcagcttttgggagaggagaagtacaggcaggacctcactgtcccgccaggttattgtaccgactttctattgtgcgcgagttcgtctggagccgtgttgcctgttcgaactcaagaccccttcctgccatacccgccaagagcatgcccaagttcgagggctacctag

SEQ ID NO: 306612 - DNA, 1398 bp, Artificial Sequence
  derived and/or modified sequence
atgagaagacccagaggcgagcccggccccagagcccccagacccaccgagggcgccacctgcgccggccccggcgagagctggagccccagccccaacagcatgctgagagtgctgctgagcgcccagaccagccccgccagactgagcggcctgctgctgatcccccccgtgcagccctgctgcctgggccccagcaagtggggcgacagacccgtgggcggcggccccagcgccggccccgtgcagggcctgcagagactgctggagcaggccaagagccccggcgagctgctgagatggctgggccagaaccccagcaaggtgagagcccaccactacagcgtggccctgagaagactgggccagctgctgggcagcagacccagacccccccccgtggagcaggtgaccctgcaggacctgagccagctgatcatcagaaactgccccagcttcgacatccacaccatccacgtgtgcctgcacctggccgtgctgctgggcttccccagcgacggccccctggtgtgcgccctggagcaggagagaagactgagactgccccccaagccccccccccccctgcagcccctgctgagaggcggccagggcctggaggccgccctgagctgccccagattcctgagataccccagacagcacctgatcagcagcctggccgaggccagacccgaggagctgaccccccacgtgatggtgctgctggcccagcacctggccagacacagactgagagagccccagctgctggaggccatcgcccacttcctggtggtgcaggagacccagctgagcagcaaggtggtgcagaagctggtgctgcccttcggcagactgaactacctgcccctggagcagcagttcatgccctgcctggagagaatcctggccagagaggccggcgtggcccccctggccaccgtgaacatcctgatgagcctgtgccagctgagatgcctgcccttcagagccctgcacttcgtgttcagccccggcttcatcaactacatcagcggcaccccccacgccctgatcgtgagaagatacctgagcctgctggacaccgccgtggagctggagctgcccggctacagaggccccagactgcccagaagacagcaggtgcccatcttcccccagcccctgatcaccgacagagccagatgcaagtacagccacaaggacatcgtggccgagggcctgagacagctgctgggcgaggagaagtacagacaggacctgaccgtgccccccggctactgcaccgacttcctgctgtgcgccagcagcagcggcgccgtgctgcccgtgagaacccaggaccccttcctgccctacccccccagagcctgccccagcagcagagccacctag

SEQ ID NO: 306613 - DNA, 2475 bp, Artificial Sequence
  derived and/or modified sequence
gaagatggcggactcggtggctagccgatgaggaggccgcggggggaacccggcccccgggccccgagaccgactgagggagcgacctgcgcagggcccggggagtcatgtaggggtggcgcctgcggggagggctgcgggagggcagcgggagctggtgttagcggcagcggccacggtctcctggcgtccctgggccggggtgggtgttggggcccccgacttcgccgactccgcgccatcgcaaagcggtgcactcgggctccacgcgcgccctgcgaggtgggcgctgcgttttcatttcacgggtgaggagacttagagagacgaagccacttgtccaaggtcacgccgctggtgagtgggagcgcccagcatggaacccagcaccgtccagccgcggagcccgcgttccaccctctgtgccgccgccgcctcctgtgggagagggaggtggtcgggagagtgcacgccggtgccgcctgggctccagactgggcgcgaccactaacccggttaatgacctcgggcttaacttaaccccttcgctgctctgggcctgcgtttctccaccggtgaaatgagggtctccatcacccaactccatgcttcgagtcctgctctctgctcagacctcccctgctcggctgtctggcctgctgctgatccctccagtacagccctgctgtttggggcccagcaaatggggggaccggcctgttggaggaggccccagtgcaggtcctgtgcaaggactgcagcggcttctggaacaggcgaagagccctggggagctgctgcgctggctgggccagaaccccagcaaggtgcgcgcccaccactactcggtggcgcttcgtcgtctgggccagctcttggggtctcggccacggccccctcctgtggagcaggtcacactgcaggacttgagtcagctcatcatccgaaactgcccctcctttgacattcacaccatccacgtgtgtctgcaccttgcagtcttacttggtggtacagaagttggtcctgccctttgggcgactgaactacctgcccctggaacagcagtttatgccctgccttgagaggatcctggctcgggaagcaggggtggcacccctggctacagtcaacatcttgatgtcactgtgccaactgcggtgcctgcccttcagagccctgcactttgttttttcccctggcttcatcaactacatcagtggtacgcagccaggatggctggctgggcccctgagggctggagaggcaggggagcagggtggcctgcagcccagagccccagtccccgcctccccacaggcacccctcatgctctgattgtgcgtcgctacctctccctgctggacacggccgtggagctggagctcccaggataccggggtccccgccttccccgaaggcagcaagtgcccatctttccccagcctctcatcaccgaccgtgcccgctgcaagtacaggtggatggggcagcctggggcaaggggaggggccagcctgggaccagcagagtggaaaagccagagggaccatgaagcgccaaagctaaggagctctcggccaccataaaactgggccctgaagcagcagagggctttgcccagggtggtggcactagactgggacagattaggatgaggtgccgggcccttcctgctactggtgtcctttctcctcagtcacaaggacatagtagctgaggggttgcgccagctgctgggggaggagaaataccgccaggacctgactgtgcctccaggctactgcacaggtgagcaaggggcaggcggcaggcccggggagacggagccctggctaaggccgccggccctgctcccctccagacttcctgctgtgcgccagcagctctggtgctgtgcttcccgtgaggacccaggaccccttcctgccatacccaccaaggtcctgcccacagggccaggctgcctctagcgccactactcgagaccctgcccagaggtaaaggaggcagggtgggggagccctggccaccttgcccgccatgccctgagccacgtccctccccctgcagggtggtgctggtgttgcgggaacgctggcatttctgccgggacggccgggtgctgctgggctcgagggccctgagggagcggcacctaggcctgatgggctaccagctcctgccggtgagtggccctggcctggcccgtggcgcatcctcactcccagcctgcgggtaacctgccgccctctcctctccccacagctacccttcgaggaactggagtcccagagaggcctgccccagctcaagagctacctgaggcagaagctccaggccctgggcctgcgctgggggcctgaagggggctgaggggttgatgtggggttcaggatggcccccccatggggggtggatgatttgcactttggttccctgtgttttgatttctcattaaagttcctttccttc

SEQ ID NO: 306614 - DNA, 480 bp, Artificial Sequence
  derived and/or modified sequence
atgttaagagtgcttctgtcagctcagacatctcccgcgcgcctctccggactacttctaatcccgccggtgcagccttgctgcctaggcccaagtaagtggggcgatcggcctgtcggagggggcccctccgccgggccagtgcagggcctgcagaggctcctggaacaagccaagtcacctggtgagttgctgcgctggctcggacagaatcctagcaaagttagagcacatcactattcagtcgctctgaggcggttgggtcagctcctggggtcccgccctcgccctccacccgtcgagcaggttacactacaagacttgtcacaattgattattcgcaattgtcctagcttcgacatacacactattcacgtatgtttgcacctggccgtgctgctcggaggaacagaagtggggcccgcactgtgggcaacggagctgccagcccccggaaccgccgtatacgccctcccctag

SEQ ID NO: 306615 - DNA, 480 bp, Artificial Sequence
  derived and/or modified sequence
atgctgcgggtgctgctgagcgcccagaccagccctgcccggctgagcggcctgctgctgatcccccctgtgcagccctgctgcctgggccccagcaagtggggagacaggcctgtgggcggcggccccagcgctggccctgtgcagggcctgcagaggctgctggagcaggccaagagccctggagagctgctgcgctggctgggccagaaccccagcaaggtgcgggcccaccactacagcgtggccctgcggcggctgggccagctgctgggcagccggcccaggcctcctcctgtggagcaggtgaccctgcaggacctgagccagctgatcatccggaactgccccagctttgacatccacaccatccacgtgtgcctgcacctggccgtgctgctgggcggcacagaggtgggccctgccctgtgggccacagagctgcctgcccctggaacagctgtgtatgccctgccctag

SEQ ID NO: 306616 - DNA, 480 bp, Artificial Sequence
  derived and/or modified sequence
atgctgcgggtgctgctgagcgcccagaccagccccgcccggctgtctggcctgctgctaatcccacctgtacagccttgctgcctcgggccgtccaaatggggtgacagaccagtcgggggggggcctagcgcaggccccgtgcaaggccttcagcgcctgctggagcaggctaaatctcctggcgaattgttgcgctggctcggacagaacccaagtaaggtgagagcccaccactattctgtagctctgcggaggctagggcaacttctgggctcgcgaccccggccccctcctgtggaacaagtaactctccaggatctgtcccaattaattatccgcaactgtccgtccttcgatatccacacaatacacgtatgtctccacctggccgtcttactcggaggcacggaagtcggccccgctctgtgggccactgaacttcccgctcctggaacagccgtttatgctctcccctag

SEQ ID NO: 306617 - DNA, 480 bp, Artificial Sequence
  derived and/or modified sequence
atgctgagggtgctgctcagcgcacagacaagtcctgcgagactctccggtttattgctgattccgcctgtgcagccctgctgtttggggcctagcaaatggggcgaccgtcctgtggggggagggccaagcgcagggcctgtacagggcctgcagaggctcctggaacaagccaaaagccccggagaactgcttaggtggctcggacagaacccgtccaaggtgagagcccaccactactcagtcgcacttagacgcctgggacagctgctcggatcaaggcctcgcccaccaccagtcgagcaggtgactcttcaggacttatcccagctgataattcgcaactgtccgagtttcgacatccatacaattcatgtctgcctgcacctcgccgtactgcttggtgggacagaagtgggtcccgcactttgggcaaccgagctgcccgcacccggtactgctgtgtacgcactgccttag

SEQ ID NO: 306618 - DNA, 480 bp, Artificial Sequence
  derived and/or modified sequence
atgctgagagtgctgctgagcgcccagaccagccccgccagactgagcggcctgctgctgatcccccccgtgcagccctgctgcctgggccccagcaagtggggcgacagacccgtgggcggcggccccagcgccggccccgtgcagggcctgcagagactgctggagcaggccaagagccccggcgagctgctgagatggctgggccagaaccccagcaaggtgagagcccaccactacagcgtggccctgagaagactgggccagctgctgggcagcagacccagacccccccccgtggagcaggtgaccctgcaggacctgagccagctgatcatcagaaactgccccagcttcgacatccacaccatccacgtgtgcctgcacctggccgtgctgctgggcggcaccgaggtgggccccgccctgtgggccaccgagctgcccgcccccggcaccgccgtgtacgccctgccctag

SEQ ID NO: 306619 - protein, 466 aa, Artificial Sequence
  derived and/or modified sequence
MNNSTNSSNNSLALTSPYKTFEVVFIVLVAGSLSLVTIIGNILVMVSIKVNRHLQTVNNYFLFSLACADLIIGVFSMNLYTLYTVIGYWPLGPVVCDLWLALDYVVSNASVMNLLIISFDRYFCVTKPLTYPVKRTTKMAGMMIAAAWVLSFILWAPAILFWQFIVGVRTVEDGECYIQFFSNAAVTFGTAIAAFYLPVIIMTVLYWHISRASKSRIKKDKKEPVANQDPVSPSLVQGRIVKPNNNNMPSSDDGLEHNKIQNGKAPRDPVTENCVQGEEKESSNDSTSVSAVASNMRDDEITQDENTVSTSLGHSKDENSKQTCIRIGTKTPKSDSCTPTNTTVEVVGSSGQNGDEKQNIVARKIVKMTKQPAKKKPPPSREKKVTRTILAILLAFIITWAPYNVMVLINTFCAPCIPNTVWTIGYWLCYINSTINPACYALCNATFKKTFKHLLMCHYKNIGATR

SEQ ID NO: 306620 - DNA, 1401 bp, Artificial Sequence
  derived and/or modified sequence
atgaataactctactaactcatcaaataatagcttagcactgacaagcccctacaaaacatttgaggtcgtgtttatcgtgctggttgccgggtcccttagtctcgttacaattattgggaacatattagtgatggtgtctatcaaggttaataggcacttacagaccgttaataactacttcttattttctctcgcctgcgcagatctgatcataggagtgttctctatgaacctttacactctgtacacagttataggctattggccactgggcccagtggtatgtgatctctggctggctcttgactatgtcgtgtctaatgcttcggtcatgaacctccttattatatctttcgacaggtatttttgtgtgactaaaccgctcacttacccggttaaaaggactactaagatggccgggatgatgattgcggctgcctgggttctgagcttcattctctgggctcctgcaatactgttttggcagtttatcgtgggggtgaggactgtggaggatggcgagtgttatatccagttcttctcgaacgctgctgttaccttcggaaccgcaatagccgccttctatctgcctgtcattattatgaccgtcttatactggcatatctcgcgtgcgagcaagtcccggatcaagaaggacaagaaagagcctgtggcaaaccaagacccggtctccccgagccttgtgcaggggcggattgtcaagcccaataataacaacatgccctccagtgacgacggcttggaacataacaaaatacagaacggcaaagctccccgcgatcccgtcacagagaactgcgtccagggtgaagaaaaagagtcatctaacgattccacctcggtgtccgccgtcgcaagcaatatgcgcgacgacgagataacccaggacgagaacacggtctccactagcctgggtcacagcaaggacgagaattcaaagcagacttgtatccgcattgggacaaagacgcctaaatctgattcttgcaccccaaccaacactaccgtggaggtggtcggcagtagcggccagaatggcgacgagaaacagaatatcgtggcccgtaagatcgttaaaatgactaaacaacctgctaagaaaaaacctcctccttcaagggagaaaaaagtgactcgcactattttggccattctgctcgccttcattatcacatgggccccatacaacgtgatggttcttatcaacactttctgcgcaccctgtattcctaatactgtctggactattgggtattggctatgctatatcaacagcacaatcaacccagcatgttacgctttgtgcaacgctacctttaaaaaaacatttaagcacttgctgatgtgtcactacaaaaacatcggagcgactagatag

SEQ ID NO: 306621 - DNA, 1401 bp, Artificial Sequence
  derived and/or modified sequence
atgaataatagtaccaatagctctaacaattccctcgcgctcacctcaccttacaaaaccttcgaggttgtctttatcgtactggtcgcaggatcgctcagtctggtgacaatcatcggcaacattcttgttatggtgtcaatcaaggtgaatcgacacctccagaccgtgaataactacttcctgtttagccttgcatgcgccgacctgattattggggtcttttcaatgaacttatatactctgtatacggtgattggctactggccactgggtcccgtggtctgtgacctgtggctagcattggactatgtggtgagtaacgctagtgtgatgaatctgctgatcatttcgttcgatcggtatttctgcgtcactaaacccctaacctaccccgtgaagagaaccaccaaaatggcaggtatgatgattgccgcagcctgggtcctttcctttattctttgggccccagccatccttttttggcagttcatagtgggagtgcgcacagtcgaggacggcgagtgttacattcagttcttctccaatgctgccgtcacttttggtacagctattgccgcgttctacctccccgttatcattatgacggttctatactggcacatcagcagagcttccaagtctcgaattaagaaagacaaaaaggagcccgtagcaaaccaggacccagtctcaccgtccctggtgcagggacggatcgttaaaccaaataataataacatgccttcttctgacgatggattagaacataacaaaatacaaaatggaaaggctccacgcgacccagtgaccgaaaactgtgtgcagggagaagaaaaggaatcctcaaacgactcaacaagcgtctctgcagtggcatcaaatatgcgcgacgacgaaataactcaagacgagaacacagtgtctacgtctctgggccattccaaagatgaaaattctaagcagacctgcatccgtatcggcacaaaaacaccaaaaagtgactcctgtaccccaactaatacaactgtcgaggtagtgggttccagcggacagaacggcgacgagaaacagaatatcgtggcacgaaagatcgtaaaaatgaccaaacaaccagctaaaaaaaaaccgcctccttccagggaaaagaaggtgacacgaactattcttgctatcctcctggcctttattatcacttgggccccctacaatgtcatggtcctaataaacacattttgtgccccctgtatcccgaacacagtttggaccatcggttattggctctgttatattaattccacaattaacccagcatgctatgccctctgcaatgccacttttaaaaagactttcaaacacctgctgatgtgccactataagaatatcggagccacaagatag

SEQ ID NO: 306622 - DNA, 1401 bp, Artificial Sequence
  derived and/or modified sequence
atgaacaattccaccaacagttccaataattctttggcccttactagtccctataaaacattcgaagtggtgttcattgtacttgttgccggatctttgtccctggtcacaattattggcaatattctggtcatggtttcaatcaaggtaaatcgacacctgcagaccgtgaacaattacttcttgttttctctcgcctgcgccgatttaatcatcggagttttctccatgaacctttatactttgtatacggttatcggttactggccccttggtccggttgtgtgcgatctctggctcgccctggattacgtcgtgtccaacgccagcgttatgaacctcctgattatctcttttgatcgctatttttgcgtgaccaagccattgacctaccctgtgaagagaaccacaaagatggcagggatgatgattgcagccgcgtgggtcctgagttttattctttgggcacctgccatcctattctggcagttcatcgtgggggtgcggaccgtcgaggacggagagtgctacatccaatttttttccaatgccgctgtcacgttcggcacagcgatagctgccttctatctacctgtgatcatcatgacagtcctatactggcatatcagccgggcctcgaaatcacggattaagaaggataaaaaggagcctgtggccaatcaggaccccgtcagtcctagtctagtacagggtaggatcgtgaagcctaacaacaataatatgcccagtagtgatgacgggcttgaacacaacaaaatacagaacggaaaagctccacgcgacccagtaactgaaaattgtgtgcaaggagaggagaaggagagttcaaacgacagtacatccgtcagcgccgtagcctccaatatgagggacgatgaaatcactcaagacgagaacaccgtctctacaagtttgggacactctaaagatgaaaatagcaagcagacctgtattagaatcggtaccaagacccccaaatccgattcttgcacccctaccaatacaacagttgaggtggtgggctcatctggacagaacggggacgagaagcagaacatcgttgcgcggaaaatcgtaaaaatgactaaacagcccgctaaaaaaaagccgcctccatcaagggaaaaaaaggtcacgaggactattctcgccatcctcctcgcgttcatcatcacctgggcaccctacaacgttatggtactgataaacaccttctgtgcgccctgtattcccaatactgtctggaccatcgggtactggctatgttacataaatagtacgataaaccccgcctgctacgccctgtgtaatgccactttcaagaagacctttaagcacctcctgatgtgccactataaaaatattggcgccaccaggtag

SEQ ID NO: 306623 - DNA, 1401 bp, Artificial Sequence
  derived and/or modified sequence
atgaataactccaccaattcctctaataacagcctggctctgacctccccatacaagacattcgaagtggtcttcatcgtgctggtcgccggctccctctctctggtgaccattataggtaatatcttggtgatggtgagcatcaaggtgaatcgccacctgcaaacggtcaataactatttcctctttagcttggcatgcgcggatttgatcattggggtcttctccatgaatctctatacactgtacaccgttataggctactggcccctgggtccagtcgtgtgcgacttgtggcttgcccttgactacgttgtctctaacgccagtgtgatgaacctgctcatcatcagctttgaccgttacttttgtgtgacgaagccactgacgtacccagtgaagcggactaccaagatggccgggatgatgatcgcagccgcttgggtactgagctttatcctgtgggcaccagctattcttttttggcagttcatcgtgggcgtcagaacggtggaggatggcgagtgttatattcagtttttcagcaacgctgctgtaacatttggaaccgcgattgccgccttctacttacctgtcattattatgactgtactttattggcacattagtagggcctccaaaagccgcatcaagaaggacaagaaggaacctgtggccaatcaggacccagtgagtccaagcctagttcaagggcggatagtgaagccaaataataacaacatgccaagctctgacgacgggctggagcataacaagattcagaacggaaaggctccccgggatcccgttacggagaattgcgtccagggtgaggagaaggagagttcaaacgacagtacctctgtctcagccgttgccagcaatatgcgagacgacgaaatcactcaagatgaaaacaccgtttcgacctccctcgggcacagcaaggacgaaaacagcaagcagacctgcatcaggatcggaacaaagaccccaaagagtgactcatgcacccctactaacaccaccgttgaggtggttggctccagcgggcagaacggagacgaaaagcaaaacattgtggctcgaaaaattgtgaagatgacgaaacagccagctaaaaagaagcctcctccatctcgagagaaaaaagttactaggactatattggccatcttgcttgccttcattattacatgggcaccctataacgtaatggtcttaattaataccttttgcgccccttgtattccaaacacagtctggacaatcggctactggctatgctacattaatagtaccattaatcccgcatgttacgccctgtgtaatgccacatttaagaagacctttaagcacctactgatgtgccattataaaaacattggggctacacgctag

SEQ ID NO: 306624 - DNA, 1401 bp, Artificial Sequence
  derived and/or modified sequence
atgaacaacagtactaactcatcgaataatagcttggccctgacctccccctacaaaactttcgaagtggtcttcattgtgctcgtggctgggtcactcagcctggtgacgatcatcgggaacattctcgtgatggtgtctatcaaggtgaatcgccatttacagaccgtcaacaattactttttgttctccctggcttgcgcagatctgatcataggtgtcttttctatgaacttgtacacgctatacaccgtcatcggctactggcccctcggacctgtcgtgtgcgatctttggctagctctggattacgtcgtctccaatgccagtgtgatgaatctcttgataatctccttcgaccgttacttttgtgtaacaaagccccttacctatccagttaagagaactacaaaaatggcggggatgatgattgccgccgcgtgggtattgtcctttattttgtgggcccctgctattcttttttggcagttcatagtcggcgttcgcactgtggaggacggggagtgttatattcagttcttctcaaacgcagctgtaacctttgggacagcaatcgccgcattctatttgcctgtgattattatgaccgtcttatattggcatatcagcagggcctcaaagtcccgcatcaaaaaggataagaaagagccagtagccaatcaggatccggtgagtccttctctggtacagggcaggattgtgaagcccaataacaataacatgccgagctctgatgacggactggaacacaacaagatccagaatggcaaagcacctagagatccagttacagagaattgtgtacagggcgaggagaaggagtctagcaatgattcgactagcgtttctgctgtggccagtaacatgagagatgatgagatcactcaagatgagaatacagtgtcaacctcactggggcacagcaaggacgaaaatagtaagcagacctgtatccgcataggtaccaaaacaccaaaatccgattcttgtacacccaccaacactaccgtagaggtggtcggcagcagtggtcagaacggggatgagaagcagaacattgtagcaaggaaaattgtcaagatgaccaaacagccagcaaaaaagaaaccacctccttcacgagaaaagaaggtcaccagaactatcctcgccattctgctcgcattcatcatcacctgggcaccttacaacgtcatggtgctgataaatacattctgcgccccttgtattcccaacactgtgtggacaataggatactggctctgttacatcaattcgaccattaatccagcgtgctatgcgctgtgtaacgcgacatttaagaagacattcaagcatctgctgatgtgccactacaaaaatatcggggctacgaggtag

SEQ ID NO: 306625 - DNA, 1401 bp, Artificial Sequence
  derived and/or modified sequence
atgaataacagcacaaactcctctaataactccttggcactgacctccccatataagacatttgaggtggtgtttatcgtactcgtagcagggagtctgtcattggtgaccattattggcaacattctggttatggtgtcaattaaagtgaatagacatttgcagaccgtgaataattacttcctgttttctttagcttgtgcagacttgataattggcgtgttttctatgaacctctacacactttatacagtcattggctactggccactgggcccagttgtgtgcgatctgtggctggccctggactatgtcgtgagcaatgcctccgtcatgaatctcctcattatttccttcgatagatacttttgtgttaccaaaccccttacttatcccgtgaagagaaccaccaagatggctgggatgatgattgccgcagcttgggtcttatcatttatcctgtgggcacccgcgatactattctggcaatttattgtgggcgtgcgaaccgtggaagatggcgagtgttacatccagtttttttctaatgcggccgtgaccttcgggaccgccattgcggccttctatctcccggtgatcatcatgactgttctctattggcacatttcacgcgcctctaaaagtaggataaaaaaggataaaaaggagcctgtcgctaaccaggatcccgtatccccctccctcgtgcaaggccgcattgtgaagccaaataataacaatatgcccagtagtgatgacgggctcgaacacaacaaaatccagaacggaaaagcacctcgtgacccggtcaccgagaactgcgtccaaggggaggagaaggagagttcaaacgactccacatctgtcagcgctgtggcctctaacatgcgtgacgatgagatcacccaggacgagaacaccgtttcaacatccctgggacactcaaaggatgaaaacagcaagcaaacatgcatacgtatcggcacaaaaactcctaaatcagacagttgcacccccaccaataccactgtagaggttgtgggatcatctggccagaatggggacgagaagcagaacatcgtggcccgtaaaattgtgaaaatgacaaaacagccagcaaaaaaaaagccacctcccagtcgggagaaaaaggtcactaggactatactggcaatcctattggctttcattatcacgtgggccccttacaacgtcatggtgctgatcaacaccttctgtgccccctgcattcccaacactgtatggaccattggatattggctgtgctacatcaatagcactatcaacccggcctgctacgcattatgcaacgcgaccttcaaaaagaccttcaagcatttactaatgtgccactataagaacatcggtgcgacgcgctag

SEQ ID NO: 306626 - DNA, 1401 bp, Artificial Sequence
  derived and/or modified sequence
atgaacaacagcaccaacagcagcaacaacagcctggccctgaccagcccctacaagacctttgaggtggtgttcatcgtgctggtggccggcagcctgagcctggtgaccatcatcggcaacatcctggtgatggtgtccatcaaggtgaacagacacctgcagacagtgaacaactacttcctgttcagcctggcctgtgccgacctgatcatcggggtcttctccatgaacctgtacaccctgtacaccgtcatcggctactggcccctgggccctgtggtgtgtgacctgtggctggccctggactatgtggtgtccaatgcctctgtgatgaacctgctgatcatcagctttgaccgctacttctgtgtgaccaagcccctgacctaccctgtgaagaggaccaccaagatggccggcatgatgattgctgctgcctgggtgctgtccttcatcctgtgggccccagccatcctcttctggcagttcatcgtgggcgtgaggacagtggaggatggagagtgctacatccagttcttcagcaatgctgctgtgaccttcggcacagccatcgccgccttctacctgcccgtcatcatcatgacagtgctgtactggcacatcagccgggccagcaagagccgcatcaagaaggacaagaaggagcctgtggccaaccaggaccctgtgagccccagcctggtgcagggccgcatcgtgaagcccaacaacaacaacatgcccagcagtgatgatggcctggagcacaacaagatccagaatggcaaggccccccgggaccctgtgacagagaactgtgtgcagggcgaggagaaggagagcagcaatgacagcacctctgtgtctgctgtggccagcaacatgagagatgatgagatcacccaggatgaaaatacagtgtccaccagcctgggccacagcaaggatgagaacagcaagcagacctgcatcagaattggcaccaagacccccaagagtgacagctgcacccccaccaacaccaccgtggaggtggtgggcagcagcggccagaatggagatgagaagcagaacatcgtggccaggaagatcgtgaagatgaccaagcagcctgccaagaagaagcccccacccagccgggagaagaaggtgaccaggaccatcctggccatcctgctggccttcatcatcacctgggccccctacaacgtgatggtgctgatcaacaccttctgtgccccctgcatccccaacacagtgtggaccatcggctactggctgtgctacatcaacagcaccatcaacccagcctgctacgccctgtgcaatgccaccttcaagaagaccttcaagcacctgctgatgtgccactacaagaacatcggggccaccaggtag

SEQ ID NO: 306627 - DNA, 1401 bp, Artificial Sequence
  derived and/or modified sequence
atgaacaacagcaccaacagcagcaacaacagcctggccctgacctccccttataaaaccttcgaggtcgtcttcatcgtgctggttgctgggtctctgtcgctcgtgacaatcatcggcaacattctggtaatggtttccatcaaagttaacagacacctccagacggtgaacaattacttcttgttctctctggcatgtgccgaccttattataggagtgttttcaatgaatctgtacacactgtacacagtaataggctactggccactgggccctgtggtgtgtgatttatggttggctcttgattacgtggtctcaaacgctagcgttatgaatctacttataattagcttcgaccgttacttctgcgtaacaaaacctttaacttatccagtgaaaaggactacgaagatggcagggatgatgattgcagccgcctgggttctttcctttatcctgtgggcccccgcgatcctattctggcagttcattgtgggagtgagaaccgtggaagatggtgagtgttacatccagttttttagcaacgccgccgtcactttcggtaccgcgattgccgctttttacctacccgtcatcattatgacggttctgtactggcacatcagtcgagcctccaaatctaggattaagaaagacaagaaggaacctgtagctaaccaggatcctgtgagcccctcactggttcagggcaggatagtgaagcccaacaacaataatatgcccagtagcgacgacggcctggaacacaacaagatccagaacgggaaggctccccgggaccccgtgacagagaactgtgtgcagggcgaagagaaggagtcaagcaatgatagtacatccgtctcagctgtggcttctaatatgcgcgacgatgagataactcaagacgaaaacactgtgtcaacaagtctcgggcactctaaagacgagaacagtaagcagacctgcatccggataggcacgaagacacccaaatccgatagttgtacacccacaaacaccactgtggaggtggtggggtccagtgggcagaacggtgatgagaagcagaatatcgtggcaaggaaaattgtaaagatgaccaagcagccagctaagaagaaacccccaccatcacgtgaaaagaaagtcaccagaactatcctggccatcctgcttgcttttataattacttgggctccctataacgtcatggtgctgataaataccttctgcgctccttgtattccaaataccgtgtggactatcggctattggctgtgctacatcaactccaccatcaatcccgcctgctacgcactttgcaatgcaacattcaaaaaaacgttcaaacatctgctgatgtgtcactacaagaacattggcgccacacggtag

SEQ ID NO: 306628 - DNA, 1401 bp, Artificial Sequence
  derived and/or modified sequence
atgaacaacagcaccaacagcagcaacaacagcctggccctgacctctccgtacaagacattcgaggtggtgttcatcgtgctggtggcgggatcactgtcgctcgttaccataataggaaacatcctggtcatggtctcaatcaaggtgaatcgacacctccagacggtcaataactacttccttttttccctcgcctgcgccgatcttatcattggagtcttttcaatgaacctatacacgctctacaccgtgatcggatactggccacttgggcctgtcgtctgcgacctatggctggctttagactatgtggtatcgaatgccagcgtgatgaatctgcttattataagtttcgacaggtacttctgtgttactaagccactgacctacccagttaagagaaccacaaaaatggcaggtatgatgatcgccgcggcatgggttctctcttttatactctgggcacccgctattttattttggcagttcattgtgggagtccggacagtggaagatggagagtgctacatccagttcttcagtaacgccgccgttacatttggtacagcaattgccgctttttaccttcccgtgatcatcatgacggtcctgtattggcatatctctcgagcttccaagagtcgcatcaagaaagacaagaaggagcctgtggcgaaccaggacccggtcagtccctccttagtccagggccgcatcgttaaacccaacaacaataatatgcccagttctgatgatgggctagagcataacaagatccaaaacgggaaggccccccgggacccagtgactgagaactgcgtgcaaggggaagagaaggagtcttccaacgactccacctccgtgtccgcggtggcatctaacatgcgggatgacgagatcactcaagatgaaaatactgtttccacatcactgggacacagcaaggacgaaaatagtaagcaaacttgtatcagaatcgggaccaaaacccctaagtctgattcctgcacaccaacgaatacaaccgtcgaagtggtaggctcttctgggcagaatggtgacgaaaagcagaacattgttgcgcggaagatagtaaagatgacaaagcagccagctaagaagaagccccctcccagccgtgagaagaaggtaacgaggactattctggctatccttctagccttcatcatcacatgggccccttacaacgttatggtccttattaatactttttgtgctccgtgcatccctaatacggtttggacaatcggttactggttgtgctacattaattcgacaattaacccagcctgttatgcgctgtgcaatgccacctttaaaaagacatttaagcacctgttgatgtgtcactacaaaaacataggtgccacaaggtag

SEQ ID NO: 306629 - DNA, 1401 bp, Artificial Sequence
  derived and/or modified sequence
atgaacaacagcaccaacagcagcaacaacagcctggccctgacctcaccctacaaaacctttgaggtggtgttcatcgttctggtggccggatcacttagcttggtcacgattattggcaatattctcgtgatggtttcgattaaggttaaccggcacctgcagactgtgaacaactacttccttttcagccttgcctgtgccgacttgatcattggtgtgttttctatgaacctctacacgctttacactgttatcggatactggcccctgggaccggtcgtttgcgatttgtggctggccctggactacgtggttagcaatgcttctgtcatgaacctcctgataatctccttcgaccgctatttttgtgtgactaagccgcttacatatccggttaaacgcactacaaagatggcagggatgatgatcgctgctgcctgggtgctttcctttatcctgtgggctcctgctatactgttctggcagttcattgtcggtgtgcggactgtggaggatggcgagtgctacatccaattttttagcaacgccgctgtaacctttggaaccgctattgccgctttctacttaccagtgatcataatgacagtgctgtactggcatattagccgggccagcaagagcaggatcaagaaggacaaaaaagagcccgttgctaaccaggatccggtgagcccatctctcgttcagggacgtatcgtgaagcccaataacaacaacatgcccagcagtgatgatggcctcgaacataacaaaattcaaaatggtaaagcgccccgtgaccctgtgactgagaactgcgtccagggggaagaaaaagaaagttctaacgatagtacgagtgtgagcgcagttgcgtccaacatgcgagatgacgaaatcactcaggatgaaaatacagtgtcaacttcgttaggccacagtaaggatgagaacagcaagcagacgtgtattcggatcgggacgaagacgcctaagtccgactcgtgtaccccaaccaacactacagttgaagtcgtcggctcgagcgggcaaaacggtgatgagaaacagaatatcgtcgccaggaaaatcgtgaaaatgaccaagcaaccggccaaaaagaagccacctccatctagagagaagaaagtgacccggaccatcctcgctattttgctggcctttattattacatgggccccctacaacgttatggtgctgattaatactttttgcgccccctgtataccaaataccgtttggactattggatactggctgtgttacataaactccaccatcaatcctgcctgctatgccctgtgtaacgcaacgtttaagaaaaccttcaagcatctcttaatgtgtcactacaaaaacattggtgcaacgaggtag

SEQ ID NO: 306630 - DNA, 1401 bp, Artificial Sequence
  derived and/or modified sequence
atgaacaacagcaccaacagcagcaacaacagcctggccctgacctcaccctataaaacatttgaggtcgtgtttattgtgttagtagccgggtccctctccctggtgactattatcggtaatatacttgtaatggtgtccattaaagtgaatagacacctgcaaactgttaacaattacttcctctttagcttagcttgtgccgaccttatcatcggcgtcttcagtatgaacctctacactctgtacactgtaattggctattggcccttgggaccagtcgtttgcgatctctggctcgccctcgactacgtcgtgagcaacgcaagcgttatgaacctgctgatcatttctttcgacagatacttttgtgtaactaagcccctaacgtatccagtaaagaggaccaccaaaatggctgggatgatgattgctgccgcctgggttctgagctttatcctttgggcacctgccatcctgttttggcagttcatcgttggggtccgaaccgtagaagacggcgagtgctacatccaatttttctcaaatgcggcggtgaccttcggcacagctatcgccgcattctacttgcccgtgataatcatgacagtgctctattggcacatctccagagcatccaagagccgcatcaaaaaggacaagaaggagcccgtggccaaccaggaccccgtcagcccctctttagttcagggcaggatcgtcaagcccaataacaacaacatgccctcttcagacgatggccttgagcataacaaaatacagaacggcaaggctccccgtgaccccgtgacggaaaactgtgtgcagggggaagagaaagaaagctcgaacgacagcacctcagtttctgccgtcgcatccaatatgcgagacgacgagatcacccaggacgaaaacacagtgagcactagccttggccattcaaaggacgagaatagtaagcagacatgcattcggattggcactaagaccccaaagtcggattcctgcacgcctactaatacaaccgtcgaagtggtgggaagttccggccaaaatggggacgaaaagcagaacatcgtggcccgcaaaatcgtgaagatgacaaaacaacctgcaaaaaagaagccgcctccctctcgggagaagaaggtgacaagaactatcctggcgatcctgctagccttcatcatcacttgggccccttacaacgtcatggtgttgatcaatactttttgcgcaccgtgcatccccaacactgtttggaccataggctactggctgtgttatatcaactccaccataaacccagcgtgttatgccctgtgcaacgccacttttaagaagacctttaagcacctcctgatgtgccactataaaaacatcggagcaacacgctag

SEQ ID NO: 306631 - DNA, 1401 bp, Artificial Sequence
  derived and/or modified sequence
atgaacaacagcaccaacagcagcaacaacagcctggccctgaccagtccttacaaaacctttgaggttgtgttcattgtgctggtcgccgggagcttgagtctagtaaccatcatcggaaacatattagtgatggtttctatcaaggttaaccggcacctccaaaccgttaataactattttctcttctctctggcatgcgcagacctgatcattggagtgttctctatgaacttatatactctatacactgtcatcggctactggccgctagggcctgtagtttgcgacctctggttggctctcgactatgtcgtcagtaatgcgagcgttatgaaccttctgatcataagtttcgaccgctatttctgtgttacaaaaccactgacttaccccgtgaagcgaaccacaaaaatggcagggatgatgatcgccgcagcttgggtcctgtctttcatactgtgggcccccgcgattctgttctggcaattcatcgttggtgttcgcacagtggaagacggcgaatgctatatacagttcttctccaacgcggcagtgacctttggaaccgccattgccgccttttacttgcccgttatcattatgactgtcctgtattggcacatctcccgggctagtaagagccgcataaagaaggacaagaaagaaccggtggctaatcaagaccccgtgagcccatctctggtgcaaggtagaattgttaaacctaataacaacaacatgcctagtagcgacgatggcctcgaacacaacaaaattcagaatgggaaggcccccagagatccagtgaccgaaaactgcgttcagggggaggagaaagaatcttcaaatgattcaaccagtgtttcagccgtcgctagcaatatgagggacgatgagatcacccaggatgaaaacaccgtctccacgtcactcgggcactccaaagatgagaacagcaaacaaacttgcatccggattggcactaaaacccctaaatctgactcttgcaccccgacaaataccaccgtggaggtcgtcggaagtagcggccagaacggggatgagaagcaaaatatcgtagctaggaagatcgtgaaaatgactaagcagcctgcgaagaagaaaccacctccatcaagggaaaagaaagtaacacgaaccatcctggcgatcctgctggcttttatcattacttgggccccatacaacgttatggtgctaatcaatactttctgcgcaccttgcatccccaacaccgtctggacgatcgggtattggttgtgctacattaattcaaccataaaccctgcgtgttacgcactgtgcaatgccacgtttaagaagacctttaagcaccttctgatgtgccattataagaatataggggccacacggtag

SEQ ID NO: 306632 - DNA, 1401 bp, Artificial Sequence
  derived and/or modified sequence
atgaacaacagcaccaacagcagcaacaacagcctggccctgaccagtccatacaagactttcgaggtcgtgtttatagtgctcgtggctggttcattgtctctcgttaccatcatcggaaatatactggttatggtcagcattaaagtcaaccgccacctccaaacagtcaataattacttcctattcagcctggcctgtgcggacctgatcatcggcgtcttctccatgaacctgtatacactctataccgtaatcggatactggcctctgggaccagtggtttgtgacctgtggttggcccttgattacgttgtcagtaatgcatctgttatgaatctacttattatcagcttcgaccgctacttctgcgtaaccaagcctctaacatatcctgtgaaacgtaccactaagatggccggcatgatgattgcggccgcttgggtattaagtttcatcctttgggcaccggccatcctgttttggcagttcatcgtcggcgttagaaccgtagaggacggtgaatgctacattcagttcttcagcaatgcagctgtaaccttcggcactgctattgccgccttttatctgccagtgatcattatgactgtgctgtattggcacatcagtcgggcaagcaaatccaggatcaagaaagataagaaggaaccggtggccaaccaggaccccgtcagccctagtctagtgcaaggcagaatcgttaagccaaataacaataatatgcccagttctgatgacggcctggagcacaataaaatacagaacggaaaagcaccaagagatcctgtgaccgagaattgtgtccagggcgaagagaaggagtcatccaacgatagcacttctgtgagcgctgttgcatccaatatgagagacgatgagattactcaggacgaaaatactgtctctaccagcctcggacattccaaagatgaaaattcaaagcagacgtgtatcagaattggcactaagacacccaagtcggacagttgcacccctactaatactacagtcgaggtagtgggctcctccggccaaaacggcgatgaaaagcaaaatattgtcgcccggaagatagtgaagatgactaaacagcccgcaaaaaagaagccccctccatctcgggagaagaaggttacacgaaccatactcgccatcctcttagcctttatcattacttgggctccatacaacgtaatggtgctgatcaacacattctgcgcgccatgcatccctaataccgtgtggaccataggatactggctatgctacatcaacagtaccatcaatcctgcctgttatgcgctgtgcaacgccactttcaaaaagactttcaagcacctgttgatgtgtcattataagaatattggcgcgactcggtag

SEQ ID NO: 306633 - DNA, 1401 bp, Artificial Sequence
  derived and/or modified sequence
atgaacaattcaacgaacagctccaataattctcttgctctaacgtcaccatataagacctttgaagttgtattcattgtactagtggcagggtctttaagtttagttacaataatcggtaacatactggtgatggtgtccatcaaggtgaacagacatttgcaaaccgtgaacaattattttctgttttctctggcttgcgcagatctaatcatcggggtgttctcaatgaacctttacaccctttacaccgtgatcggttattggcccctggggccagtagtttgcgatttgtggctggcacttgattacgtggtgtccaacgcatctgtaatgaacctgttgattatatcctttgaccggtacttttgtgtgaccaagccactgacgtatccagtaaagaggacaaccaaaatggccggaatgatgattgcagcggcttgggtgttgtcatttatcctgtgggcgccagcaatattgttttggcaattcatagtcggggtacggactgtggaagatggagagtgttacattcaattcttttcgaatgccgctgtgaccttcggaacagcaatcgcagccttctatctgcctgttataattatgaccgtactgtactggcacatcagccgggcaagtaagtctcggattaaaaaggataagaaggagcctgtcgccaatcaggatcccgtctcccccagccttgtacagggccgaatcgtcaagccaaataacaacaacatgccttcgtctgatgatggcctcgaacataacaagatccagaacggcaaggctccgagagatcccgtgactgaaaattgcgttcagggggaagaaaaagaaagtagtaacgactcaacatcagtgtcagccgttgctagcaatatgagggatgacgagattacacaagacgagaacaccgtttcaacgtcacttggccattcaaaggatgaaaatagcaaacaaacttgcattaggattggaactaaaactcccaagtccgattcttgtacccctactaacaccacagtagaggtggtgggttcatccggacagaacggagacgagaagcagaacatcgtggctagaaaaattgttaagatgacaaaacagccagcaaaaaaaaagcctcctcctagtcgggaaaagaaggtcacaaggactatcctcgcaatactgttggcctttattatcacatgggcgccatacaacgttatggtgctgattaacaccttctgcgcaccctgtatccctaacacagtgtggaccattggctactggttatgttacataaacagcacgattaatcccgcttgttacgctctgtgcaacgcaacatttaagaagaccttcaagcatcttttaatgtgccactacaagaatatcggggctaccaggtag

SEQ ID NO: 306634 - DNA, 1401 bp, Artificial Sequence
  derived and/or modified sequence
atgaataatagcaccaactcctccaacaattccctcgcactgacttccccttataaaacttttgaggttgtctttatcgtgttggtcgcagggtccttgagtttggtgacgatcatcggcaacatcttagtcatggtgtcaatcaaagttaatcgccacctgcagacagtcaataactactttctatttagtctcgcctgcgccgatctgattattggcgtatttagcatgaacttgtacaccctgtataccgttatcggttactggcccttgggcccagttgtgtgcgacctctggctggccctggattatgtcgtgagtaatgccagtgtgatgaacctcctcattatcagttttgataggtacttctgtgttacgaaacccctgacctatcccgtaaagagaacaacgaagatggctggcatgatgatagcagccgcatgggtgctaagttttatcctgtgggccccagcaatcctgttctggcaattcattgtgggcgtccggaccgtcgaagatggagaatgttatatccagttcttttctaacgcggctgttacatttgggaccgcaattgctgccttctacttacctgtgattattatgaccgtgctttactggcacatttctagggcaagtaaatcccggattaagaaggataagaaagaacccgtggccaatcaagaccctgtaagcccctctttggtgcagggacgcatcgtgaagccaaacaacaacaacatgccctcatcagacgatggtttagagcataataagattcagaacggcaaggctcctcgggatcccgtcacagagaactgcgtccagggagaagagaaggagagcagcaacgatagtacaagcgtgtctgccgtggcctccaacatgcgagacgatgaaatcactcaggatgaaaatacagtgtccacctccctgggccattccaaagatgaaaacagcaagcagacatgtatacgaattgggacaaagacccccaaatctgattcttgtactcctactaacacaacggttgaggttgtcggcagcagcgggcaaaacggcgacgaaaagcagaacatagtagcacgcaagatcgtcaagatgactaaacagcccgcaaaaaaaaagcctccaccgtcacgggaaaagaaagtgacccgaaccattttagccatcttactggcttttataattacatgggccccatacaacgtgatggttctgattaatacattctgcgctccctgcatacccaatactgtgtggactattggatactggctctgttacatcaattcaacgatcaatcccgcatgctatgccttgtgcaatgccacattcaagaagacatttaaacatctgctaatgtgtcattataaaaacattggtgccactcgctag

SEQ ID NO: 306635 - DNA, 1401 bp, Artificial Sequence
  derived and/or modified sequence
atgaacaattccactaactcctccaacaattcccttgcattgacgtctccttacaagactttcgaggtggtgtttatcgtactggtggccggatccttatccctcgttactatcattggcaatattctcgtgatggtatctatcaaggtgaaccgccacctccagacagtgaacaactattttctcttttctctggcctgtgccgatctcatcatcggggtgttctcaatgaacttgtatactctgtacaccgttattgggtactggcccctgggacccgtggtgtgtgacttgtggctggcactggactacgtggtttctaacgcatccgtgatgaacctgctaattatatccttcgaccggtacttctgtgtcacaaagcctcttacatacccagtcaaacggacgacaaagatggcaggaatgatgatcgccgctgcatgggtgctgtccttcattctgtgggcccctgcgattctgttctggcagtttatagtgggcgttcggaccgtggaggatggcgagtgttacattcaatttttttcaaacgctgccgtcacattcggaaccgcaatcgccgcattctacctacctgttatcattatgaccgtgctgtactggcatatttcaagagccagtaaatcgcgcatcaagaaagacaaaaaagaaccagtagccaaccaggatcctgtctccccgtctctcgtgcaggggcgaatcgtgaagcctaacaacaacaacatgccgagtagcgatgatggtctggaacacaataagatccaaaatgggaaggccccaagagaccctgtcacagagaactgcgttcagggtgaggaaaaagaaagtagcaatgattccacctctgtttcagccgttgccagtaatatgagggatgatgagatcacacaggacgagaacactgtttcaacctcccttggacattcaaaagacgaaaacagcaagcagacctgcatcagaatcggcacaaaaacgcccaaaagcgatagctgcactcccaccaacacaacagtggaggtggttgggtcgtctggtcaaaacggggacgagaaacagaatattgttgcccgaaaaatcgtgaagatgacaaaacaacccgcaaagaagaaacctccaccgtcccgagaaaagaaggtcacccgcaccatcctagctatcttgttggctttcatcattacatgggctccatataacgtcatggtgctcattaacaccttctgcgccccttgcatcccgaacacagtctggactatcggatactggttatgttatattaactcgacaataaacccggcttgttacgctttgtgcaatgctacatttaaaaagacattcaaacatctgctcatgtgccactacaaaaatattggagcaacacgatag

SEQ ID NO: 306636 - DNA, 1401 bp, Artificial Sequence
  derived and/or modified sequence
atgaataacagcaccaattccagcaacaactcactggccctgacttcgccttacaagacatttgaagtcgtctttatcgttctggtggccggatctctgtcgctcgtgactatcataggaaatatccttgtgatggtctctataaaagttaaccggcatctgcagacggtgaataactattttcttttctcgctggcatgtgccgacctcattatcggagtgttttcaatgaatctgtacacactgtacaccgtcatagggtactggcccctgggacccgtggtatgtgacctgtggcttgcactggattacgttgtctctaatgcatcagtcatgaaccttctgatcatatcgttcgaccgctacttctgcgtcactaaacccttgacatacccagtgaagaggaccacaaagatggccggtatgatgattgccgcagcttgggtgctgagctttatcctctgggctccggctattctgttctggcagtttatcgtcggagtgcgtacagtcgaagatggcgaatgctacattcagttttttagcaatgcagccgtgacctttgggactgccatagcggcattctatctgccagtcatcatcatgacagtgctctattggcacatatctcgcgctagtaaatccagaattaagaaggataagaaggagcccgtcgccaaccaggatcctgttagcccaagtctcgttcaaggccgaattgtcaagcccaataacaacaatatgccatcatcagatgacggtttggagcacaacaaaattcaaaatgggaaagcgcctcgggatccagttacagagaattgcgtgcagggcgaggaaaaagagagctccaatgattctacctcagtgagcgctgtggctagcaacatgcgagatgatgaaatcacccaggacgaaaacaccgtgtctacatcattaggccattcaaaagacgaaaactccaagcaaacgtgcatacgcataggaaccaagactcctaagtcggactcctgcacaccaactaatacaaccgttgaggtggtcgggtcttcaggtcagaacggggatgagaaacagaatatcgtggctaggaagattgtcaagatgaccaagcagcctgcaaaaaaaaagccaccaccaagcagggagaagaaagtaacacgtacaatactcgcaattctgctggcttttataataacatgggcgccttacaacgtcatggtgctgataaataccttctgtgctccttgtatacctaacactgtctggaccattggttactggctgtgttatattaatagtaccattaatcctgcgtgttacgccctgtgcaacgctacttttaagaagacgtttaagcacctgctgatgtgccattacaagaatatcggtgccacgaggtag

SEQ ID NO: 306637 - DNA, 1401 bp, Artificial Sequence
  derived and/or modified sequence
atgaataattcaaccaattcctctaacaatagcctcgcactgacaagcccctacaagacgttcgaggttgtttttattgttctggtggctgggtccctgagcctggtcaccattataggtaacatcctggtgatggtatctattaaggtgaaccggcacctgcaaaccgtgaacaactatttcttgttctccctagcgtgcgcagacctcatcatcggcgtgttctccatgaatctctatacattgtacacagtgattggatattggccactcgggccagtcgtgtgtgatttatggttggctctcgactacgtggttagtaatgcgagcgtgatgaacctgctaattatcagctttgaccgctatttctgcgttaccaagcccctgacgtacccagtgaagagaacgacaaagatggcagggatgatgattgctgcagcttgggtgctcagctttatcctgtgggcaccagccatattattttggcaattcatcgtgggcgttcgcaccgtcgaggatggggaatgctacattcagttcttctccaatgccgctgtaactttcggcacagcaattgctgctttctatctgcccgtgatcataatgaccgtgctgtattggcatattagccgggcttccaaatcccgcataaagaaggataagaaggagccagtcgccaatcaagatcctgtctctccgagcttggttcagggccgaatcgttaaacccaacaataacaatatgccgagcagtgatgatggactggaacacaataagattcagaatgggaaggccccacgggacccagttactgagaattgcgtgcagggtgaggaaaaggagtcctccaatgacagcacttcggtaagcgcagtagcgagtaatatgagggacgatgaaattacgcaggacgaaaatactgtcagtacgagcctgggccactctaaagacgaaaatagcaagcagacctgtatccgcattggcacgaagacaccaaaatcggattcatgcacaccgaccaatacaaccgtggaggtggtaggctccagtggccaaaacggagatgagaaacagaacattgtggccagaaagatcgttaaaatgactaagcaacccgctaaaaaaaagccacccccaagcagagagaagaaagtcacacgcacaatcctggcaatattacttgccttcatcattacctgggcaccgtacaatgtgatggtactgattaacaccttctgcgctccctgcataccaaacacagtttggaccatagggtactggttgtgctatatcaattcaacaatcaatcctgcctgctacgcgctgtgtaacgctacttttaaaaaaacattcaaacacctgttaatgtgtcattacaagaacatcggagctactcggtag

SEQ ID NO: 306638 - DNA, 1401 bp, Artificial Sequence
  derived and/or modified sequence
atgaataactctaccaatagttctaacaatagcctcgcactcacatccccctacaaaacattcgaggtcgtgttcatcgtactggtcgctggctccctttctctggtcaccattatcggaaacattctggtgatggtcagcattaaagtgaaccgacacctccagaccgtcaacaactacttcctgttttccctcgcttgcgctgacttaatcatcggcgtgttcagcatgaatctgtatacgctgtacactgtgattggctattggccccttggacccgtggtgtgtgacctgtggctggcgcttgactacgttgtgtctaatgcaagcgtgatgaatctgttgatcatctccttcgatcggtacttttgcgttacgaagccgcttacatatcccgtcaagaggacaacaaagatggccggtatgatgatagcggctgcttgggtgcttagttttatcctgtgggctcccgctattttattctggcagttcattgtgggggttcggaccgtcgaagacggcgagtgttatatacaattttttagcaacgccgcagtgacatttggcactgcgattgccgcattctatcttcccgttatcattatgactgtcctttactggcacatttcgagagcatctaagagtcgtattaagaaggacaagaaagaaccagttgctaaccaagaccccgtgtctccaagtctggttcaaggacgcatagtgaagccaaataacaacaatatgccctctagtgacgacggtctggagcacaacaagatccagaacgggaaggccccaagggacccggtgaccgaaaactgcgtgcagggcgaagagaaagagtctagtaatgactccactagtgtgagcgcagtagcgtctaacatgcgcgatgatgagatcacgcaggacgaaaatacagtgagcactagcctgggacactccaaggatgaaaactcaaaacagacttgtatcaggatcggaaccaagacgccaaagtccgattcctgtactcccacgaacactactgttgaggtagttggctcctccggccagaatggggatgagaagcagaatatcgtagcgaggaagatcgtaaaaatgactaaacagcccgctaaaaagaagcctccaccgagccgcgaaaaaaaagtgacgaggaccattctggccatcctccttgccttcatcatcacctgggccccatacaacgtgatggtattgatcaacacattctgtgcgccatgcattcccaacaccgtgtggactatcggctattggctgtgttacatcaacagtacaattaacccggcatgttatgcattgtgtaacgccacattcaaaaagaccttcaagcatctcctgatgtgccactacaagaacataggggctacgaggtag

SEQ ID NO: 306639 - DNA, 1694 bp, Artificial Sequence
  derived and/or modified sequence
acagactagccaagtggctgagacgagtgtggggtgcgtgactctgcctgcgcgcgcgccagccccgcagctctcgccagagccttgggatcaagggagaaagagaaccggcagctggcctcggactctaagcggtgcgcagctccagcccgagcggatcggccctgaacccacaaaggactcctcgctccttcaagcctccaccacctcgcagccggggaggcaactggagcgaaaccagcgacaggtttaaatgtttatttgctacttggctactgattagagaacgcaaaatgaataactcaacaaactcctctaacaatagcctggctcttacaagtccttataagacatttgaagtggtgtttattgtcctggtggctggatccctcagtttggtgaccattatcgggaacatcctagtcatggtttccattaaagtcaaccgccacctccagaccgtcaacaattactttttattcagcttggcctgtgctgaccttatcataggtgttttctccatgaacttgtacaccctctacactgtgattggttactggcctttgggacctgtggtgtgtgacctttggctagccctggactatgtggtcagcaatgcctcagttatgaatctgctcatcatcagctttgacaggtacttctgtgtcacaaaacctctgacctacccagtcaagcggaccacaaaaatggcaggtatgatgattgcagctgcctgggtcctctctttcatcctctgggctccagccattctcttctggcagttcattgtaggggtgagaactgtggaggatggggagtgctacattcagtttttttccaatgctgctgtcacctttggtacggctattgcagccttctatttgccagtgatcatcatgactgtgctatattggcacatatcccgagccagcaagagcaggataaagaaggacaagaaggagcctgttgccaaccaagaccccgtttctccaagtctggtacaaggaaggatagtgaagccaaacaataacaacatgcccagcagtgacgatggcctggagcacaacaaaatccagaatggcaaagcccccagggatcctgtgactgaaaactgtgttcagggagaggagaaggagagctccaatgactccacctcagtcagtgctgttgcctctaatatgagagatgatgaaataacccaggatgaaaacacagtttccacttccctgggccattccaaagatgagaactctaagcaaacatgcatcagaattggcaccaagaccccaaaaagtgactcatgtaccccaactaataccaccgtggaggtagtggggtcttcaggtcagaatggagatgaaaagcagaatattgtagcccgcaagattgtgaagatgactaagcagcctgcaaaaaagaagcctcctccttcccgggaaaagaaagtcaccaggacaatcttggctattctgttggctttcatcatcacttgggccccatacaatgtcatggtgctcattaacaccttttgtgcaccttgcatccccaacactgtgtggacaattggttactggctttgttacatcaacagcactatcaaccctgcctgctatgcactttgcaatgccaccttcaagaagacctttaaacaccttctcatgtgtcattataagaacataggcgctacaaggtaa

SEQ ID NO: 306640 - DNA, 2530 bp, Artificial Sequence
  derived and/or modified sequence
acagactagccaagtggctgagacgagtgtggggtgcgtgactctgcctgcgcgcgcgccagccccgcagctctcgccagagccttgggatcaagggagaaagagaaccggcagctggcctcggactctaagcggtgcgcagctccagcccgagcggatcggccctgaacccacaaaggactcctcgctccttcaagcctccaccacctcgcagccggggaggcaactggagcgaaaccagcgacaggttgttagcgacatgagtacagggtctggatcttacccattcaagagtgtattctcagcacccaatgcctggcatatagtttaaatgtttatttgctacttggctactgattagagaacgcaaaatgaataactcaacaaactcctctaacaatagcctggctcttacaagtccttataagacatttgaagtggtgtttattgtcctggtggctggatccctcagtttggtgaccattatcgggaacatcctagtcatggtttccattaaagtcaaccgccacctccagaccgtcaacaattactttttattcagcttggcctgtgctgaccttatcataggtgttttctccatgaacttgtacaccctctacactgtgattggttactggcctttgggacctgtggtgtgtgacctttggctagccctggactatgtggtcagcaatgcctcagttatgaatctgctcatcatcagctttgacaggtacttctgtgtcacaaaacctctgacctacccagtcaagcggaccacaaaaatggcaggtatgatgattgcagctgcctgggtcctctctttcatcctctgggctccagccattctcttctggcagttcattgtaggggtgagaactgtggaggatggggagtgctacattcagtttttttccaatgctgctgtcacctttggtacggctattgcagccttctatttgccagtgatcatcatgactgtgctatattggcacatatcccgagccagcaagagcaggataaagaaggacaagaaggagcctgttgccaaccaagaccccgtttctccaagtctggtacaaggaaggatagtgaagccaaacaataacaacatgcccagcagtgacgatggcctggagcacaacaaaatccagaatggcaaagcccccagggatcctgtgactgaaaactgtgttcagggagaggagaaggagagctccaatgactccacctcagtcagtgctgttgcctctaatatgagagatgatgaaataacccaggatgaaaacacagtttccacttccctgggccattccaaagatgagaactctaagcaaacatgcatcagaattggcaccaagaccccaaaaagtgactcatgtaccccaactaataccaccgtggaggtagtggggtcttcaggtcagaatggagatgaaaagcagaatattgtagcccgcaagattgtgaagatgactaagcagcctgcaaaaaagaagcctcctccttcccgggaaaagaaagtcaccaggacaatcttggctattctgttggctttcatcatcacttgggccccatacaatgtcatggtgctcattaacaccttttgtgcaccttgcatccccaacactgtgtggacaattggttactggctttgttacatcaacagcactatcaaccctgcctgctatgcactttgcaatgccaccttcaagaagacctttaaacaccttctcatgtgtcattataagaacataggcgctacaaggtaaaatatctttgaaaaagatagaaggtgggcaaggggagcttgagaagaataaaagggataaacgagctcctagttttaaaatctctgccattgcactttatagtctgattacaaaacgtgcaattcaggagcccagcagtgacacacttatcacgcctaggctccagtttgcaaaaattgcaccttataaactgtcagtattaggagcaatgagacaatgaaagaaacatgttgggatcgtggatttaagaaactatacactgtttctcataatctcttgaagaagggcttctgattctacaattttatcagtctctgcacaagaggaataaccttgttccttttttgttacttttgttgttgttgttctcatgtgtccttaagagaaggaaatgccacagttacaaggtaaacatggagacttaaacataaagaaataggcactatacaatggggacataaaaaaagaaaatcaaagaaggatgcagaaattgtctccggagtgttaagcatattttattcttttgttacggtcctatttagaggattggaatgtaataaatgcttattttttgcctttctttttcccaccatgaagagaaagcaaacaaacagaaaccccaactaggtcacaccatttttcttcttgttatgccactattttgtacatccctgttctatattgtttatagggaaaacctacaggactttcactaaagctagccagagacagccatgaaaatggacgtttcacccctc

SEQ ID NO: 306641 - DNA, 2571 bp, Artificial Sequence
  derived and/or modified sequence
gtgactctgcctgcgcgcgcgccagccccgcagctctcgccagagccttgggatcaagggagaaagagaaccggcagctggcctcggactctaagcggtgcgcagctccagcccgagcggatcggccctgaacccacaaaggactcctcgctccttcaagcctccaccacctcgcagccggggaggcaactggagcgaaaccagcgacaggttgtccaggctgatcttatactcctggcctcaagtgatcctcctgcctcagtctccaaaagcactgggaatacataggttgttagcgacatgagtacagggtctggatcttacccattcaagagtgtattctcagcacccaatgcctggcatatagtttaaatgtttatttgctacttggctactgattagagaacgcaaaatgaataactcaacaaactcctctaacaatagcctggctcttacaagtccttataagacatttgaagtggtgtttattgtcctggtggctggatccctcagtttggtgaccattatcgggaacatcctagtcatggtttccattaaagtcaaccgccacctccagaccgtcaacaattactttttattcagcttggcctgtgctgaccttatcataggtgttttctccatgaacttgtacaccctctacactgtgattggttactggcctttgggacctgtggtgtgtgacctttggctagccctggactatgtggtcagcaatgcctcagttatgaatctgctcatcatcagctttgacaggtacttctgtgtcacaaaacctctgacctacccagtcaagcggaccacaaaaatggcaggtatgatgattgcagctgcctgggtcctctctttcatcctctgggctccagccattctcttctggcagttcattgtaggggtgagaactgtggaggatggggagtgctacattcagtttttttccaatgctgctgtcacctttggtacggctattgcagccttctatttgccagtgatcatcatgactgtgctatattggcacatatcccgagccagcaagagcaggataaagaaggacaagaaggagcctgttgccaaccaagaccccgtttctccaagtctggtacaaggaaggatagtgaagccaaacaataacaacatgcccagcagtgacgatggcctggagcacaacaaaatccagaatggcaaagcccccagggatcctgtgactgaaaactgtgttcagggagaggagaaggagagctccaatgactccacctcagtcagtgctgttgcctctaatatgagagatgatgaaataacccaggatgaaaacacagtttccacttccctgggccattccaaagatgagaactctaagcaaacatgcatcagaattggcaccaagaccccaaaaagtgactcatgtaccccaactaataccaccgtggaggtagtggggtcttcaggtcagaatggagatgaaaagcagaatattgtagcccgcaagattgtgaagatgactaagcagcctgcaaaaaagaagcctcctccttcccgggaaaagaaagtcaccaggacaatcttggctattctgttggctttcatcatcacttgggccccatacaatgtcatggtgctcattaacaccttttgtgcaccttgcatccccaacactgtgtggacaattggttactggctttgttacatcaacagcactatcaaccctgcctgctatgcactttgcaatgccaccttcaagaagacctttaaacaccttctcatgtgtcattataagaacataggcgctacaaggtaaaatatctttgaaaaagatagaaggtgggcaaggggagcttgagaagaataaaagggataaacgagctcctagttttaaaatctctgccattgcactttatagtctgattacaaaacgtgcaattcaggagcccagcagtgacacacttatcacgcctaggctccagtttgcaaaaattgcaccttataaactgtcagtattaggagcaatgagacaatgaaagaaacatgttgggatcgtggatttaagaaactatacactgtttctcataatctcttgaagaagggcttctgattctacaattttatcagtctctgcacaagaggaataaccttgttccttttttgttacttttgttgttgttgttctcatgtgtccttaagagaaggaaatgccacagttacaaggtaaacatggagacttaaacataaagaaataggcactatacaatggggacataaaaaaagaaaatcaaagaaggatgcagaaattgtctccggagtgttaagcatattttattcttttgttacggtcctatttagaggattggaatgtaataaatgcttattttttgcctttctttttcccaccatgaagagaaagcaaacaaacagaaaccccaactaggtcacaccatttttcttcttgttatgccactattttgtacatccctgttctatattgtttatagggaaaacctacaggactttcactaaagctagccagagacagccatgaaaatggacgtttcacccctc

SEQ ID NO: 306642 - DNA, 2474 bp, Artificial Sequence
  derived and/or modified sequence
acagactagccaagtggctgagacgagtgtgggatcaagggagaaagagaaccggcagctggcctcggactctaagcggtgcgcagctccagcccgagcggatcggccctgaacccacaaaggactcctcgctccttcaagcctccaccacctcgcagccggggaggcaactggagcgaaaccagcgacaggttgttagcgacatgagtacagggtctggatcttacccattcaagagtgtattctcagcacccaatgcctggcatatagtttaaatgtttatttgctacttggctactgattagagaacgcaaaatgaataactcaacaaactcctctaacaatagcctggctcttacaagtccttataagacatttgaagtggtgtttattgtcctggtggctggatccctcagtttggtgaccattatcgggaacatcctagtcatggtttccattaaagtcaaccgccacctccagaccgtcaacaattactttttattcagcttggcctgtgctgaccttatcataggtgttttctccatgaacttgtacaccctctacactgtgattggttactggcctttgggacctgtggtgtgtgacctttggctagccctggactatgtggtcagcaatgcctcagttatgaatctgctcatcatcagctttgacaggtacttctgtgtcacaaaacctctgacctacccagtcaagcggaccacaaaaatggcaggtatgatgattgcagctgcctgggtcctctctttcatcctctgggctccagccattctcttctggcagttcattgtaggggtgagaactgtggaggatggggagtgctacattcagtttttttccaatgctgctgtcacctttggtacggctattgcagccttctatttgccagtgatcatcatgactgtgctatattggcacatatcccgagccagcaagagcaggataaagaaggacaagaaggagcctgttgccaaccaagaccccgtttctccaagtctggtacaaggaaggatagtgaagccaaacaataacaacatgcccagcagtgacgatggcctggagcacaacaaaatccagaatggcaaagcccccagggatcctgtgactgaaaactgtgttcagggagaggagaaggagagctccaatgactccacctcagtcagtgctgttgcctctaatatgagagatgatgaaataacccaggatgaaaacacagtttccacttccctgggccattccaaagatgagaactctaagcaaacatgcatcagaattggcaccaagaccccaaaaagtgactcatgtaccccaactaataccaccgtggaggtagtggggtcttcaggtcagaatggagatgaaaagcagaatattgtagcccgcaagattgtgaagatgactaagcagcctgcaaaaaagaagcctcctccttcccgggaaaagaaagtcaccaggacaatcttggctattctgttggctttcatcatcacttgggccccatacaatgtcatggtgctcattaacaccttttgtgcaccttgcatccccaacactgtgtggacaattggttactggctttgttacatcaacagcactatcaaccctgcctgctatgcactttgcaatgccaccttcaagaagacctttaaacaccttctcatgtgtcattataagaacataggcgctacaaggtaaaatatctttgaaaaagatagaaggtgggcaaggggagcttgagaagaataaaagggataaacgagctcctagttttaaaatctctgccattgcactttatagtctgattacaaaacgtgcaattcaggagcccagcagtgacacacttatcacgcctaggctccagtttgcaaaaattgcaccttataaactgtcagtattaggagcaatgagacaatgaaagaaacatgttgggatcgtggatttaagaaactatacactgtttctcataatctcttgaagaagggcttctgattctacaattttatcagtctctgcacaagaggaataaccttgttccttttttgttacttttgttgttgttgttctcatgtgtccttaagagaaggaaatgccacagttacaaggtaaacatggagacttaaacataaagaaataggcactatacaatggggacataaaaaaagaaaatcaaagaaggatgcagaaattgtctccggagtgttaagcatattttattcttttgttacggtcctatttagaggattggaatgtaataaatgcttattttttgcctttctttttcccaccatgaagagaaagcaaacaaacagaaaccccaactaggtcacaccatttttcttcttgttatgccactattttgtacatccctgttctatattgtttatagggaaaacctacaggactttcactaaagctagccagagacagccatgaaaatggacgtttcacccctc

SEQ ID NO: 306643 - DNA, 5918 bp, Artificial Sequence
  derived and/or modified sequence
acacacgcacgaatacagacacgctctcctgctgtactaaaggcgccagggcgcaaagacctagggagcgcgcgcgggcacacacacacacacacacacacacacagacacacacacactcacacactccaggctgcgggttggccagagcctggaaatcgcagatttcaccaggaaatcgccgaggtacccgaataggtgttgcctcccaaaactaattcctacttccccaagcactttggtgaagaaatgaatccagcccagctcgccgaggcatccaggtctccattctattttggtctccaggctcttcgtgaaagccagatcaagggagaaagagaaccggcagctggcctcggactctaagcggtgcgcagctccagcccgagcggatcggccctgaacccacaaaggactcctcgctccttcaagcctccaccacctcgcagccggggaggcaactggagcgaaaccagcgacaggtttaaatgtttatttgctacttggctactgattagagaacgcaaaatgaataactcaacaaactcctctaacaatagcctggctcttacaagtccttataagacatttgaagtggtgtttattgtcctggtggctggatccctcagtttggtgaccattatcgggaacatcctagtcatggtttccattaaagtcaaccgccacctccagaccgtcaacaattactttttattcagcttggcctgtgctgaccttatcataggtgttttctccatgaacttgtacaccctctacactgtgattggttactggcctttgggacctgtggtgtgtgacctttggctagccctggactatgtggtcagcaatgcctcagttatgaatctgctcatcatcagctttgacaggtacttctgtgtcacaaaacctctgacctacccagtcaagcggaccacaaaaatggcaggtatgatgattgcagctgcctgggtcctctctttcatcctctgggctccagccattctcttctggcagttcattgtaggggtgagaactgtggaggatggggagtgctacattcagtttttttccaatgctgctgtcacctttggtacggctattgcagccttctatttgccagtgatcatcatgactgtgctatattggcacatatcccgagccagcaagagcaggataaagaaggacaagaaggagcctgttgccaaccaagaccccgtttctccaagtctggtacaaggaaggatagtgaagccaaacaataacaacatgcccagcagtgacgatggcctggagcacaacaaaatccagaatggcaaagcccccagggatcctgtgactgaaaactgtgttcagggagaggagaaggagagctccaatgactccacctcagtcagtgctgttgcctctaatatgagagatgatgaaataacccaggatgaaaacacagtttccacttccctgggccattccaaagatgagaactctaagcaaacatgcatcagaattggcaccaagaccccaaaaagtgactcatgtaccccaactaataccaccgtggaggtagtggggtcttcaggtcagaatggagatgaaaagcagaatattgtagcccgcaagattgtgaagatgactaagcagcctgcaaaaaagaagcctcctccttcccgggaaaagaaagtcaccaggacaatcttggctattctgttggctttcatcatcacttgggccccatacaatgtcatggtgctcattaacaccttttgtgcaccttgcatccccaacactgtgtggacaattggttactggctttgttacatcaacagcactatcaaccctgcctgctatgcactttgcaatgccaccttcaagaagacctttaaacaccttctcatgtgtcattataagaacataggcgctacaaggtaaaatatctttgaaaaagatagaaggtgggcaaggggagcttgagaagaataaaagggataaacgagctcctagttttaaaatctctgccattgcactttatagtctgattacaaaacgtgcaattcaggagcccagcagtgacacacttatcacgcctaggctccagtttgcaaaaattgcaccttataaactgtcagtattaggagcaatgagacaatgaaagaaacatgttgggatcgtggatttaagaaactatacactgtttctcataatctcttgaagaagggcttctgattctacaattttatcagtctctgcacaagaggaataaccttgttccttttttgttacttttgttgttgttgttctcatgtgtccttaagagaaggaaatgccacagttacaaggtaaacatggagacttaaacataaagaaataggcactatacaatggggacataaaaaaagaaaatcaaagaaggatgcagaaattgtctccggagtgttaagcatattttattcttttgttacggtcctatttagaggattggaatgtaataaatgcttattttttgcctttctttttcccaccatgaagagaaagcaaacaaacagaaaccccaactaggtcacaccatttttcttcttgttatgccactattttgtacatccctgttctatattgtttatagggaaaacctacaggactttcactaaagctagccagagacagccatgaaaatggacgtttcacccctcctcactgtgtcctttgcattcgttggggatatcaaggtctataaggatttagtgcacttataatcctatatgcgaaatgtttaaaccaatctgattttctcctaaatagccttttatatcaacagaatatcctacctaaaacataaacctgtttaagaaaccatcgtcactgtaaagttgaggtttcatcaaattaaataatggactatctagttggaccaagtttattaaagtcaggtgaattttaagattaaaaaatagaagtttaggactttctatttcaacctgaatttgcctgacccatgtatgaaatgttaacttatagaaaatgaactcctgactttctcagcagaaaggaatgctgttttatttatttggaatcctaaacaggattaacatactcacatagcaccagtgatttctgggccagtccctagagaatagaaccttctatccaatgcctgctaaaggatgatattcaaattataaccaagtgaggatgtctgcaattatcctatgaccccatgaaaggggaaaaaacgatattttaaaaactattactgaaacaattacatattccatattcctcaaattgtcaattctccctaacattatttaacttcaaaattctcttatcaatagaattatagtaatctttgtgacagaaatgtagtggctaactaaatagaggccaaacgagcttacagaatctgacagaaggaggtaggtggctgttgccatgccacatctcaccatctaattctagaccataataatcatgtcaggaactattatctaagtggtggcattatatagaatcttgccacgtagagattttttatttggtcgtctaaataaatataggattaggattatacggattcacatacaactagttatttttatcctttatatttttcttacagtatttgctgtagttttccaatgagattttctaaaaatggctcaatcaatggaaatcaaattataaacgcatttgcaaatttcatattttggattttagatttatgatatcttgttcagtaataataatgttagttacatggtaaatttatcaatattagaccccagcacttaaaagaattattttgtatgattagcctcatagatgccacctcaacattttggagagttaaggaggaaaaaaagcatgagggaaaaaaaaaaccaaaaaacttataagttagtaagaagcaaattgccagcagtatttatatttgacttatccttcgtaaaaacaatttcctgtttaaataacttcagtcattacccccccaaagtaatcttccatatttaaagcattcatttatagagattcccttacctacagttacttcaacatgcacttttacattttaaattcatatttattttcatattgtttcttcaaatgaaggaatcagttgaacggaaataacgtcaagccagtgggctcctcgagtttctgaaaaccagagaattgactagccaagtatttccctttttaatgtattgtattattattatgtagatttggcttcagttgggaagaaccctttggcatccaggattcaggattcagggtctttttttgtttgctctaataatccaacgcaccatgaatcaagcttttagtctctgctgccattgtatccttccttttcctccctctgttattgatccttgccacagccactgcaacctcattgaaagagaaactgtcactttaaagaaagaaattgaagataggctgacaccatggaaactacgtcaaacagataagaaaaatggaaggaatactgaaaatgatagatgattggagagatatggagattatattcaaggatttttattaaccactgctggatttgtctatttcagtggctctcaaacagagacaattcccctctccccgaaaggggacacttagcaatgcgtaaagacatttttggttgccacactgggaggaatgctattggtatctagtgcatagaggctgggaatgctgctaaatagcctataatgctcaggacattttcccccaacccctttaaacaaatattatttggctcaaaatgtcaatagttccaagattgagaaattcttgtctactttaagggatttctaaagcttgcctcttattagtgggaaaataaccctgcattatttttagaatatcaatgcaaattcctcacctgttagaaaaaggtaatactcaccaaccatgtatcagaaaaacttttctcctgagtctggtgtatgtgtcagtcacagattgggaactcaggccacatctacatatcaaaaatcaccagactatgcatatcgcacatcttttttccagcatcttaatgttcaattatgattgccacagatctagtcaattgaggttgcagtagttggccatcaaaatatttgcagttgatatgatcagtttctactggagctgcaatttttcctttcaaaaaatattaagagcctctttcagaaacaatatcatttatcttctttgcatttactggaaaggtgtatctgtaaggtctttgttttttctctcctcatagcaataatgtagctatcccagagtgatattataagaagaggagattaagaatatggaaaaagtctgttcatttcttcgaaacaagaaatgattttccttttaccagttcatcattaatttaacgccagctcccaagtattagggcagagtaatcaatatgagaagccacaacgggtaagctttctgatttgaaatgtacaagctggatgtccaacatactcctgctctttgttcatttgcttttttgatcctgaagatctgacattgggagagatgggaattcaaaatgatggcaacaattactcagcaatgcagtctgtttttattttctcctacttagttcattgacagtttcctcctcgccccagtttgataatatccctttcaacaaccatagtaccggtgttgcaaatagtttaggaaagcacccaaagctggatgaaattgtgcaaagtgtattctcagcatgtatattcaataccatgcctcttaaaaatgcttctcttaaagggtgcacgctgtagcatgaaatgtgtgcatatttaatgtatcttcctggaatatgctatgtgctaaatatatatatattctataaataaaataataaaatgtacaatagaaatacatatttctgtatgcaaataaatatattatacacaaactcttaa

SEQ ID NO: 306644 - DNA, 2014 bp, Artificial Sequence
  derived and/or modified sequence
acagactagccaagtggctgagacgagtgtgggatcaagggagaaagagaaccggcagctggcctcggactctaagcggtgcgcagctccagcccgagcggatcggccctgaacccacaaaggactcctcgctccttcaagcctccaccacctcgcagccggggaggcaactggagcgaaaccagcgacaggtttaaatgtttatttgctacttggctactgattagagaacgcaaaatgaataactcaacaaactcctctaacaatagcctggctcttacaagtccttataagacatttgaagtggtgtttattgtcctggtggctggatccctcagtttggtgaccattatcgggaacatcctagtcatggtttccattaaagtcaaccgccacctccagaccgtcaacaattactttttattcagcttggcctgtgctgaccttatcataggtgttttctccatgaacttgtacaccctctacactgtgattggttactggcctttgggacctgtggtgtgtgacctttggctagccctggactatgtggtcagcaatgcctcagttatgaatctgctcatcatcagctttgacaggtacttctgtgtcacaaaacctctgacctacccagtcaagcggaccacaaaaatggcaggtatgatgattgcagctgcctgggtcctctctttcatcctctgggctccagccattctcttctggcagttcattgtaggggtgagaactgtggaggatggggagtgctacattcagtttttttccaatgctgctgtcacctttggtacggctattgcagccttctatttgccagtgatcatcatgactgtgctatattggcacatatcccgagccagcaagagcaggataaagaaggacaagaaggagcctgttgccaaccaagaccccgtttctccaagtctggtacaaggaaggatagtgaagccaaacaataacaacatgcccagcagtgacgatggcctggagcacaacaaaatccagaatggcaaagcccccagggatcctgtgactgaaaactgtgttcagggagaggagaaggagagctccaatgactccacctcagtcagtgctgttgcctctaatatgagagatgatgaaataacccaggatgaaaacacagtttccacttccctgggccattccaaagatgagaactctaagcaaacatgcatcagaattggcaccaagaccccaaaaagtgactcatgtaccccaactaataccaccgtggaggtagtggggtcttcaggtcagaatggagatgaaaagcagaatattgtagcccgcaagattgtgaagatgactaagcagcctgcaaaaaagaagcctcctccttcccgggaaaagaaagtcaccaggacaatcttggctattctgttggctttcatcatcacttgggccccatacaatgtcatggtgctcattaacaccttttgtgcaccttgcatccccaacactgtgtggacaattggttactggctttgttacatcaacagcactatcaaccctgcctgctatgcactttgcaatgccaccttcaagaagacctttaaacaccttctcatgtgtcattataagaacataggcgctacaaggtaaaatatctttgaaaaagatagaaggtgggcaaggggagcttgagaagaataaaagggataaacgagctcctagttttaaaatctctgccattgcactttatagtctgattacaaaacgtgcaattcaggagcccagcagtgacacacttatcacgcctaggctccagtttgcaaaaattgcaccttataaactgtcagtattaggagcaatgagacaatgaaagaaacatgttgggatcgtggatttaagaaactatacactgtttctcataatctcttgaagaagggcttctgattctacaattttatcagtctctgcacaagaggaataaccttgttccttttttgttacttttgttgttgttgttctcatgtgt

SEQ ID NO: 306645 - DNA, 1401 bp, Artificial Sequence
  derived and/or modified sequence
atgaacaacagcaccaacagcagcaacaacagcctggccctgaccagcccctacaagaccttcgaggtggtgttcatcgtgctggtggccggcagcctgagcctggtgaccatcatcggcaacatcctggtgatggtgagcatcaaggtgaacagacacctgcagaccgtgaacaactacttcctgttcagcctggcctgcgccgacctgatcatcggcgtgttcagcatgaacctgtacaccctgtacaccgtgatcggctactggcccctgggccccgtggtgtgcgacctgtggctggccctggactacgtggtgagcaacgccagcgtgatgaacctgctgatcatcagcttcgacagatacttctgcgtgaccaagcccctgacctaccccgtgaagagaaccaccaagatggccggcatgatgatcgccgccgcctgggtgctgagcttcatcctgtgggcccccgccatcctgttctggcagttcatcgtgggcgtgagaaccgtggaggacggcgagtgctacatccagttcttcagcaacgccgccgtgaccttcggcaccgccatcgccgccttctacctgcccgtgatcatcatgaccgtgctgtactggcacatcagcagagccagcaagagcagaatcaagaaggacaagaaggagcccgtggccaaccaggaccccgtgagccccagcctggtgcagggcagaatcgtgaagcccaacaacaacaacatgcccagcagcgacgacggcctggagcacaacaagatccagaacggcaaggcccccagagaccccgtgaccgagaactgcgtgcagggcgaggagaaggagagcagcaacgacagcaccagcgtgagcgccgtggccagcaacatgagagacgacgagatcacccaggacgagaacaccgtgagcaccagcctgggccacagcaaggacgagaacagcaagcagacctgcatcagaatcggcaccaagacccccaagagcgacagctgcacccccaccaacaccaccgtggaggtggtgggcagcagcggccagaacggcgacgagaagcagaacatcgtggccagaaagatcgtgaagatgaccaagcagcccgccaagaagaagcccccccccagcagagagaagaaggtgaccagaaccatcctggccatcctgctggccttcatcatcacctgggccccctacaacgtgatggtgctgatcaacaccttctgcgccccctgcatccccaacaccgtgtggaccatcggctactggctgtgctacatcaacagcaccatcaaccccgcctgctacgccctgtgcaacgccaccttcaagaagaccttcaagcacctgctgatgtgccactacaagaacatcggcgccaccagatag

SEQ ID NO: 306646 - protein, 140 aa, Artificial Sequence
  derived and/or modified sequence
MAMAPSPSLVQVYTSPAAVAVWEWQDGLGTWHPYSATVCSFIEQQFVQQKGQRFGLGSLAHSIPLGQADPSLAPYIIDLPSWTQFRQDTGTMRAVRRHLFPQHSAPGRGVVWEWLSDDGSWTAYEASVCDYLEQQVARGN

SEQ ID NO: 306647 - protein, 65 aa, Artificial Sequence
  derived and/or modified sequence
MAMAPSPSLVQVYTSPAAVAVWEWQDGLGTWHPYSATVCSFIEQQFVQQKGQRFGLGSLAHSIPL

SEQ ID NO: 306648 - protein, 108 aa, Artificial Sequence
  derived and/or modified sequence
MAMAPSPSLVQVYTSPAAVAVWEWQDGLGTWHPYSATVCSFIEQQFVQQKGQRFGLGSLAHSIPLGQADPSLAPYIIDLPSWTQFRQDTGTMRAVRRHLFPQHSAPGR

SEQ ID NO: 306649 - DNA, 225 bp, Artificial Sequence
  derived and/or modified sequence
atggccatggcccccagccccagcctggtgcaggtgtacaccagccccgccgccgtggccgtgtgggagtggcaggacggcctgggcacctggcacccctacagcgccaccgtgtgcagcttcatcgagcagcagttcgtgcagcagaagggccagagattcggcctgggcagcctggcccacagcatccccctgggccaggccgaccccagcctggccccctag

SEQ ID NO: 306650 - DNA, 423 bp, Artificial Sequence
  derived and/or modified sequence
atggccatggcccccagccccagcctggtgcaggtgtacaccagccccgccgccgtggccgtgtgggagtggcaggacggcctgggcacctggcacccctacagcgccaccgtgtgcagcttcatcgagcagcagttcgtgcagcagaagggccagagattcggcctgggcagcctggcccacagcatccccctgggccaggccgaccccagcctggccccctacatcatcgacctgcccagctggacccagttcagacaggacaccggcaccatgagagccgtgagaagacacctgttcccccagcacagcgcccccggcagaggcgtggtgtgggagtggctgagcgacgacggcagctggaccgcctacgaggccagcgtgtgcgactacctggagcagcaggtggccagaggcaactag

SEQ ID NO: 306651 - DNA, 198 bp, Artificial Sequence
  derived and/or modified sequence
atggccatggcccccagccccagcctggtgcaggtgtacaccagccccgccgccgtggccgtgtgggagtggcaggacggcctgggcacctggcacccctacagcgccaccgtgtgcagcttcatcgagcagcagttcgtgcagcagaagggccagagattcggcctgggcagcctggcccacagcatccccctgtag

SEQ ID NO: 306652 - DNA, 327 bp, Artificial Sequence
  derived and/or modified sequence
atggccatggcccccagccccagcctggtgcaggtgtacaccagccccgccgccgtggccgtgtgggagtggcaggacggcctgggcacctggcacccctacagcgccaccgtgtgcagcttcatcgagcagcagttcgtgcagcagaagggccagagattcggcctgggcagcctggcccacagcatccccctgggccaggccgaccccagcctggccccctacatcatcgacctgcccagctggacccagttcagacaggacaccggcaccatgagagccgtgagaagacacctgttcccccagcacagcgcccccggcagatag

SEQ ID NO: 306653 - DNA, 273 bp, Artificial Sequence
  derived and/or modified sequence
atggccatggcccccagccccagcctggtgcaggtgtacaccagccccgccgccgtggccgtgtgggagtggcaggacggcctgggcacctggcacccctacagcgccaccgtgtgcagcttcatcgagcagcagttcgtgcagcagaagggccagagattcggcctgggcagcctggcccacagcatccccctgggccaggccgaccccagcctggccccctacatcatcgacctgcccagctggacccagttcagacaggacaccggctag

SEQ ID NO: 306654 - DNA, 189 bp, Artificial Sequence
  derived and/or modified sequence
atggccatggcccccagccccagcctggtgcaggtgtacaccagccccgccgccgtggccgtgtgggagtggcaggacggcctgggcacctggcacccctacagcgccaccgtgtgcagcttcatcgagcagcagttcgtgcagcagaagggccagagattcggcctgggcagcctggcccacagctag

SEQ ID NO: 306655 - DNA, 225 bp, Artificial Sequence
  derived and/or modified sequence
atggccatggctcccagtccctcattagtacaggtgtacacatcccctgctgccgtggcagtttgggaatggcaggacggtctgggcacctggcacccatacagtgcaaccgtatgctcctttattgaacagcagttcgtgcaacagaaagggcaacgctttggcctgggaagcctggcacactccattccacttgggcaagcagatccaagtctcgccccctag

SEQ ID NO: 306656 - DNA, 423 bp, Artificial Sequence
  derived and/or modified sequence
atggccatggcacctagccctagcctggtgcaggtctatacatcacctgcagccgtggccgtgtgggagtggcaggacggattgggcacctggcacccctatagtgccacagtatgcagctttatcgagcagcagttcgttcagcaaaagggccagcggttcggactaggctctttagcgcatagcataccattggggcaggcagatcccagtctcgcaccttatattattgatctgccctcctggacccagttcagacaggacaccgggacaatgagggccgtgcggagacacctctttccccagcatagcgcacctggccgtggcgtggtgtgggagtggctttccgatgatggaagttggactgcctacgaagccagcgtctgcgactatctagagcagcaagttgcaaggggcaattag

SEQ ID NO: 306657 - DNA, 198 bp, Artificial Sequence
  derived and/or modified sequence
atggccatggccccctctcctagcctcgtccaggtctatacaagtccagccgctgtggcggtgtgggagtggcaagacggtctgggcacttggcatccgtacagtgcaaccgtgtgcagttttatcgagcagcaattcgtccagcagaagggtcagagatttgggctagggagtctggcacactcaatcccactgtag

SEQ ID NO: 306658 - DNA, 327 bp, Artificial Sequence
  derived and/or modified sequence
atggctatggccccgagcccttcgctggtgcaggtctacacctcgcctgccgctgtggccgtctgggaatggcaggacggtctgggcacctggcacccttatagcgccacagtctgctcttttatagagcaacagttcgtccagcagaaaggccagagattcggtcttggcagtcttgcacattctattccattggggcaggcagaccctagcttagccccttatataattgatctccccagctggacccagttcagacaagataccggcaccatgagagctgtgcgccgccatctcttcccccaacatagcgctccgggtcgatag

SEQ ID NO: 306659 - DNA, 273 bp, Artificial Sequence
  derived and/or modified sequence
atggcaatggccccttcccctagcctagtgcaggtgtacaccagcccagctgctgtggctgtgtgggaatggcaggacggactgggtacttggcatccatactcagcaactgtctgtagtttcatcgagcagcagttcgttcagcaaaagggacaacgttttggactgggaagtctggcccattccatacccttagggcaagccgacccctctctagctccttatataattgacctcccctcctggacccagttccgccaggacactggctag

SEQ ID NO: 306660 - DNA, 273 bp, Artificial Sequence
  derived and/or modified sequence
atggccatggcaccctctcccagtctggtccaagtttatacatcacccgcagctgttgctgtttgggaatggcaagacggcctcggaacctggcatccttacagcgctactgtttgtagttttatcgagcagcagttcgtgcagcagaaagggcaacgatttggacttgggagtctggctcatagtataccactgggtcaggccgatccctcactggccccgtatataatcgaccttccatcctggactcagttccgacaggatactgggtag

SEQ ID NO: 306661 - DNA, 189 bp, Artificial Sequence
  derived and/or modified sequence
atggcaatggctccgtccccgtcacttgtgcaggtgtatacatctcccgccgctgtggctgtgtgggagtggcaggacggcctgggtacttggcacccttatagtgcaactgtttgttcttttatcgagcagcagtttgttcagcagaaaggccagaggtttgggcttgggtctctggcacacagctag

SEQ ID NO: 306662 - DNA, 225 bp, Artificial Sequence
  derived and/or modified sequence
atggccatggcccccagccccagcctggtgcaggtgtacaccagccctgctgctgtggccgtgtgggagtggcaggacggcctgggcacctggcacccctacagcgccaccgtgtgcagcttcatcgagcagcagtttgtgcagcagaagggccagcgcttcggcctgggcagcctggcccacagcatccccctgggccaggccgaccccagcctggccccctag

SEQ ID NO: 306663 - DNA, 423 bp, Artificial Sequence
  derived and/or modified sequence
atggccatggcccccagccccagcctggtgcaggtgtacaccagccctgctgctgtggccgtgtgggagtggcaggacggcctgggcacctggcacccctacagcgccaccgtgtgcagcttcatcgagcagcagtttgtgcagcagaagggccagcgcttcggcctgggcagcctggcccacagcatccccctgggccaggccgaccccagcctggccccctacatcatcgacctgcccagctggacccagttccggcaggacaccggcaccatgagagctgtgcggcggcacctgttcccccagcacagcgcccctggccggggcgtggtgtgggagtggctgagtgatgatggctcctggacagcctatgaggcctctgtgtgtgactacctggagcagcaggtggcccggggcaactag

SEQ ID NO: 306664 - DNA, 198 bp, Artificial Sequence
  derived and/or modified sequence
atggccatggcccccagccccagcctggtgcaggtgtacaccagccctgctgctgtggccgtgtgggagtggcaggacggcctgggcacctggcacccctacagcgccaccgtgtgcagcttcatcgagcagcagtttgtgcagcagaagggccagcgcttcggcctgggcagcctggcccacagcatccccctgtag

SEQ ID NO: 306665 - DNA, 327 bp, Artificial Sequence
  derived and/or modified sequence
atggccatggcccccagccccagcctggtgcaggtgtacaccagccctgctgctgtggccgtgtgggagtggcaggacggcctgggcacctggcacccctacagcgccaccgtgtgcagcttcatcgagcagcagtttgtgcagcagaagggccagcgcttcggcctgggcagcctggcccacagcatccccctgggccaggccgaccccagcctggccccctacatcatcgacctgcccagctggacccagttccggcaggacaccggcaccatgagagctgtgcggcggcacctgttcccccagcacagcgcccctggccgctag

SEQ ID NO: 306666 - DNA, 273 bp, Artificial Sequence
  derived and/or modified sequence
atggccatggcccccagccccagcctggtgcaggtgtacaccagccctgctgctgtggccgtgtgggagtggcaggacggcctgggcacctggcacccctacagcgccaccgtgtgcagcttcatcgagcagcagtttgtgcagcagaagggccagcgcttcggcctgggcagcctggcccacagcatccccctgggccaggccgaccccagcctggccccctacatcatcgacctgcccagctggacccagttccggcaggacacaggatag

SEQ ID NO: 306667 - DNA, 189 bp, Artificial Sequence
  derived and/or modified sequence
atggccatggcccccagccccagcctggtgcaggtgtacaccagccctgctgctgtggccgtgtgggagtggcaggacggcctgggcacctggcacccctacagcgccaccgtgtgcagcttcatcgagcagcagtttgtgcagcagaagggccagcgcttcggcctgggcagcctggcccacagctag

SEQ ID NO: 306668 - DNA, 225 bp, Artificial Sequence
  derived and/or modified sequence
atggccatggcccccagccccagcctggtgcaggtgtacaccagcccggccgcagtcgcagtgtgggagtggcaagacggtctgggaacttggcatccctactcagccactgtctgcagtttcattgagcagcagtttgtgcagcagaaaggccagcggtttggactaggaagtctggctcacagtattcccctggggcaagccgatcccagtctcgctccgtag

SEQ ID NO: 306669 - DNA, 423 bp, Artificial Sequence
  derived and/or modified sequence
atggccatggcccccagccccagcctggtgcaggtgtacaccagccccgcagcagtggccgtgtgggagtggcaagatgggcttggtacgtggcatccgtattcagctacagtctgctcctttattgagcagcagtttgtgcagcaaaagggccagcgctttggcctgggatctctggcccattccatccccctgggccaggccgatcctagcttagccccatacataatcgatctgcccagctggacccagtttaggcaggacaccggcacaatgcgcgctgtcaggagacacttatttcctcagcatagcgccccggggcggggcgttgtgtgggagtggctttccgacgacggaagctggactgcttatgaagcttccgtctgtgactatctcgaacagcaggtcgccagaggcaattag

SEQ ID NO: 306670 - DNA, 198 bp, Artificial Sequence
  derived and/or modified sequence
atggccatggcccccagccccagcctggtgcaggtgtacaccagcccagctgcagtggccgtgtgggaatggcaggacggcttgggcacctggcacccctactctgctacggtctgcagcttcatagagcagcagttcgttcagcaaaagggccagagattcgggttgggatcccttgcacactcgattccactgtag

SEQ ID NO: 306671 - DNA, 327 bp, Artificial Sequence
  derived and/or modified sequence
atggccatggcccccagccccagcctggtgcaggtgtacaccagcccggcggcggtagccgtttgggaatggcaggatggtctcgggacctggcacccctacagtgcaacagtgtgctctttcatcgaacagcagttcgtgcagcagaaaggtcaaagattcggactgggctctctggcccacagtatacccctcggccaggcagacccttctctggctccctacattattgatcttccatcctggacacaattcaggcaggatactgggactatgcgggcggtccggagacacctgttcccacagcacagtgcccctgggcgatag

SEQ ID NO: 306672 - DNA, 273 bp, Artificial Sequence
  derived and/or modified sequence
atggccatggcccccagccccagcctggtgcaggtgtacaccagccctgctgctgttgccgtgtgggagtggcaggacggactagggacatggcacccatactccgctactgtgtgcagctttattgaacaacagtttgtgcagcagaagggccaacgttttggcctgggaagcctggcccattctattcccctgggccaagccgacccaagtctggcaccgtacataatcgacctgccaagctggacgcagttcaggcaagatacggggtag

SEQ ID NO: 306673 - DNA, 273 bp, Artificial Sequence
  derived and/or modified sequence
atggccatggcccccagccccagcctggtgcaggtgtacaccagcccagcggccgtagcagtgtgggaatggcaagacgggctgggcacgtggcacccctatagcgccaccgtatgcagcttcattgagcagcaattcgttcaacagaagggacaaagatttggtcttggttccttggcccacagcatacccctgggccaagccgatccatcgttggcaccatatataatcgacctgccaagttggacacagttccgccaagacacagggtag

SEQ ID NO: 306674 - DNA, 189 bp, Artificial Sequence
  derived and/or modified sequence
atggccatggcccccagccccagcctggtgcaggtgtacaccagccctgctgctgtggccgtgtgggagtggcaggatgggcttggcacatggcacccttacagcgcaactgtgtgttccttcattgagcagcaattcgtacagcagaaaggacagaggttcggactaggatcactagctcactcatag

SEQ ID NO: 306675 - DNA, 572 bp, Artificial Sequence
  derived and/or modified sequence
tgaaccaccagccagctgcatttgttgtcctggaagtcattgccaactctgccagtcacactggggtccccagagaagtcaagagcctctgggatattgggcacctgaagagctgcagccccagctctgccctcagggagtttctgttttggtggggagaaggccactgaaaccagggagtgcggttgtgtttgcaaacttccaattgaagacactgagctgaaccattccgcccgcccgcccgcccgagggcactccagatctgccggaggcgctgggcaatgaccccgggactccaggccagaggggtctgaagctgtttgggaaagcagcgggactccttgggaagatggccatggccccaagcccttccctggtgcaggtgtacaccagccccgcggctgtggccgtgtgggaatggcaggacgggctgggcacctggcacccctacagtgccaccgtctgcagcttcatcgagcagcagtttgtccagcagaagggccaacgttttgggcttgggagcctggcccacagcatccccttgggccaggcagacccctcgctggcccctt

SEQ ID NO: 306676 - DNA, 859 bp, Artificial Sequence
  derived and/or modified sequence
ctctggctgccttctcctgagagtcggagccacagccagagccctgcccaggccgagccggagctgcagcccgagcgcggtggtgccctcagccccgtcctcttgtcctcctcagcctcggtgccttggaatttgtgtcgctgagtcagcaagcctttcagatttgcccggtttttgttgtttgtggtttgtatcaagatgggaactcaaacaagtcattcctcctaaggagctggtgtcttcatccagaagggacagtttgtgccagctctccagagagaaaagaaacttccaattgaagacactgagctgaaccattccgcccgcccgcccgcccgagggcactccagatctgccggaggcgctgggcaatgaccccgggactccaggccagaggggtctgaagctgtttgggaaagcagcgggactccttgggaagatggccatggccccaagcccttccctggtgcaggtgtacaccagccccgcggctgtggccgtgtgggaatggcaggacgggctgggcacctggcacccctacagtgccaccgtctgcagcttcatcgagcagcagtttgtccagcagaagggccaacgttttgggcttgggagcctggcccacagcatccccttgggccaggcagacccctcgctggccccttacattattgacctccccagctggacccagttccgccaggacaccggcaccatgcgggctgtgcggagacacctgttcccccagcactcagcccctggccgaggtgtcgtctgggagtggctgagcgacgatggctcctggactgcctatgaagccagcgtctgtgactatctggagcagcaggtggccaggggcaac

SEQ ID NO: 306677 - DNA, 225 bp, Artificial Sequence
  derived and/or modified sequence
atggccatggcaccctcccccagcctcgttcaggtgtacacaagtcctgcggcagtcgcagtatgggagtggcaggacggactcggtacgtggcatccttacagtgctactgtgtgcagcttcattgagcagcagttcgtgcagcagaagggtcagcggtttggcttgggatcactagcacacagcattcccctcggtcaggccgacccatccctggcaccatag

SEQ ID NO: 306678 - DNA, 566 bp, Artificial Sequence
  derived and/or modified sequence
atgcgcagcggctcgctcggaagctgcgacgccgagtttcactctggctgccttctcctgagagtcggagccacagccagagccctgcccaggccgagccggagctgcagcccgagcgcggtggtgccctcagccccgtcctcttgtcctcctcagcctcggagctggtgtcttcatccagaagggacagtttgtgccagctctccagagagaaaagaaacttccaattgaagacactgagctgaaccattccgcccgcccgcccgcccgagggcactccagatctgccggaggcgctgggcaatgaccccgggactccaggccagaggggtctgaagctgtttgggaaagcagcgggactccttgggaagatggccatggccccaagcccttccctggtgcaggtgtacaccagccccgcggctgtggccgtgtgggaatggcaggacgggctgggcacctggcacccctacagtgccaccgtctgcagcttcatcgagcagcagtttgtccagcagaagggccaacgttttgggcttgggagcctggcccacagcatccccttg

SEQ ID NO: 306679 - DNA, 423 bp, Artificial Sequence
  derived and/or modified sequence
atggccatggctccatccccttctttggtacaggtgtacactagtcccgctgctgtggcggtgtgggagtggcaagacggtctcggtacctggcatccctacagcgccaccgtatgctcctttatagagcagcagttcgttcagcagaaaggccaaaggtttggcctgggtagcttagcacattctatccccttgggtcaggcggatccaagtcttgcaccttacattattgaccttccatcatggacccaattccgacaggacacggggacgatgcgggcagtgaggagacacttgtttcctcagcattccgcgcctggacgcggagttgtttgggagtggttgagtgacgacggatcctggactgcttatgaggcttccgtgtgcgactacctcgagcagcaggtcgctcggggaaattag

SEQ ID NO: 306680 - DNA, 198 bp, Artificial Sequence
  derived and/or modified sequence
atggctatggccccaagccctagcctagtgcaggtgtatacttctccggcagccgtcgcggtttgggaatggcaggatgggttggggacgtggcacccatatagtgcgacagtatgtagtttcattgaacagcagttcgtgcagcagaagggtcagaggtttgggctagggagccttgcccacagcattccactgtag

SEQ ID NO: 306681 - DNA, 327 bp, Artificial Sequence
  derived and/or modified sequence
atggcgatggccccttctcctagtttagtgcaagtatatacaagtcctgccgcagtggctgtctgggaatggcaggacgggctcggaacttggcatccctacagtgccactgtgtgttcttttatagaacagcagtttgtacagcagaaaggtcaacgtttcggactcggtagtctggctcactcgattccactcggacaggctgatcctagtcttgctccctatattattgacctacccagctggacccaatttagacaggacactgggacaatgcgggctgtccggaggcacctgtttccgcagcattcagcgcctgggaggtag

SEQ ID NO: 306682 - DNA, 273 bp, Artificial Sequence
  derived and/or modified sequence
atggccatggccccatctcccagtttggtgcaggtgtatacttctccagcggctgtcgccgtgtgggagtggcaggacggactcggcacctggcacccatactcagcgaccgtctgctcgttcatagagcagcaatttgtacaacagaagggccagaggtttgggctgggttcattggcacacagcattccgctcggccaggcagatccgtctttggccccttatatcatagacctgccaagctggacccagttcaggcaggatactgggtag

SEQ ID NO: 306683 - DNA, 273 bp, Artificial Sequence
  derived and/or modified sequence
atggccatggctcctagcccatctctcgtccaggtttatacttcccccgctgccgtggctgtctgggaatggcaggatggtttgggaacttggcatccatacagcgccacagtctgtagtttcatcgagcagcagttcgtacagcagaaaggccagaggtttggcctgggatcactggctcactccattcctctcggccaggcggacccttccttggccccttacataatcgacctacctagctggactcaatttcggcaggacaccggatag

SEQ ID NO: 306684 - DNA, 539 bp, Artificial Sequence
  derived and/or modified sequence
cttttcaagcaaagccccatctcgccgtgctcacaggactactgtcataggaacatggatgaaacttccaattgaagacactgagctgaaccattccgcccgcccgcccgcccgagggcactccagatctgccggaggcgctgggcaatgaccccgggactccaggccagaggggtctgaagctgtttgggaaagcagcgggactccttgggaagatggccatggccccaagcccttccctggtgcaggtgtacaccagccccgcggctgtggccgtgtgggaatggcaggacgggctgggcacctggcacccctacagtgccaccgtctgcagcttcatcgagcagcagtttgtccagcagaagggccaacgttttgggcttgggagcctggcccacagcatccccttgggccaggcagacccctcgctggccccttacattattgacctccccagctggacccagttccgccaggacaccggcaccatgcgggctgtgcggagacacctgttcccccagcactcagcccctggccga

SEQ ID NO: 306685 - DNA, 189 bp, Artificial Sequence
  derived and/or modified sequence
atggccatggccccatctccctctctggttcaagtgtataccagcccagctgccgtggccgtgtgggagtggcaggatggtcttggaacctggcacccttattcagccacagtgtgtagtttcattgagcaacaattcgttcagcaaaaaggtcagcgcttcggccttggaagtttagctcatagctag

SEQ ID NO: 306686 - DNA, 434 bp, Artificial Sequence
  derived and/or modified sequence
tgatacaatctggtgattcccgagcatacacatcatattttatccccattttgccaatgaggaaactgagacccagatctgccggaggcgctgggcaatgaccccgggactccaggccagaggggtctgaagctgtttgggaaagcagcgggactccttgggaagatggccatggccccaagcccttccctggtgcaggtgtacaccagccccgcggctgtggccgtgtgggaatggcaggacgggctgggcacctggcacccctacagtgccaccgtctgcagcttcatcgagcagcagtttgtccagcagaagggccaacgttttgggcttgggagcctggcccacagcatccccttgggccaggcagacccctcgctggccccttacattattgacctccccagctggacccagttccgccaggacaccgg

SEQ ID NO: 306687 - DNA, 540 bp, Artificial Sequence
  derived and/or modified sequence
tggctgccttctcctgagagtcggagccacagccagagccctgcccaggccgagccggagctgcagcccgagcgcggtggtgccctcagccccgtcctcttgtcctcctcagcctcgaaacttccaattgaagacactgagctgaaccattccgcccgcccgcccgcccgagggcactccagatctgccggaggcgctgggcaatgaccccgggactccaggccagaggggtctgaagctgtttgggaaagcagcgggactccttgggaagatggccatggccccaagcccttccctggtgcaggtgtacaccagccccgcggctgtggccgtgtgggaatggcaggacgggctgggcacctggcacccctacagtgccaccgtctgcagcttcatcgagcagcagtttgtccagcagaagggccaacgttttgggcttgggagcctggcccacagcatccccttgggccaggcagacccctcgctggccccttacattattgacctccccagctggacccagttccgccaggacaccgg

SEQ ID NO: 306688 - DNA, 550 bp, Artificial Sequence
  derived and/or modified sequence
agctgcgacgccgagtttcactctggctgccttctcctgagagtcggagccacagccagagccctgcccaggccgagccggagctgcagcccgagcgcggtggtgccctcagccccgtcctcttgtcctcctcagcctcggctgtttttgcagagttgtgagagttggttcatccgggccatgaggacatgttgggacataccccgtgtgccgatgatggaggcggccgtggctgcccgagagatgcgtgacacccaggagtaattggcttggaaggcagtcctctgatttgtacctcattgtggttacagaaacttccaattgaagacactgagctgaaccattccgcccgcccgcccgcccgagggcactccagatctgccggaggcgctgggcaatgaccccgggactccaggccagaggggtctgaagctgtttgggaaagcagcgggactccttgggaagatggccatggccccaagcccttccctggtgcaggtgtacaccagccccgcggctgtggccgtgtgggaatggcaggacgggctgg

SEQ ID NO: 306689 - DNA, 569 bp, Artificial Sequence
  derived and/or modified sequence
agctgcgacgccgagtttcactctggctgccttctcctgagagtcggagccacagccagagccctgcccaggccgagccggagctgcagcccgagcgcggtggtgccctcagccccgtcctcttgtcctcctcagcctcgtccccaggcacagcacacggatccaacatctgtacctttgtttttactaactgctgtttcttaatttaaaacctgatcatcttcttcctcgttggcaaaggtgccttggaatttgtgtcgctgagtcagcaagcctttcagatttgcccggtttttgttgtttgtggtttgtatcaagatgggaactcaaacaagtcattcctcctaaggagctggtgtcttcatccagaagggacagtttgtgccagctctccagagagaaaagatctgccggaggcgctgggcaatgaccccgggactccaggccagaggggtctgaagctgtttgggaaagcagcgggactccttgggaagatggccatggccccaagcccttccctggtgcaggtgtacaccagccccgcggctgtggccgtgtgggaatggcag

SEQ ID NO: 306690 - DNA, 633 bp, Artificial Sequence
  derived and/or modified sequence
gagtttcactctggctgccttctcctgagagtcggagccacagccagagccctgcccaggccgagccggagctgcagcccgagcgcggtggtgccctcagccccgtcctcttgtcctcctcagcctcggtgccttggaatttgtgtcgctgagtcagcaagcctttcagatttgcccggtttttgttgtttgtggtttgtatcaagatgggaactcaaacaagtcattcctcctaaggagctggtgtcttcatccagaagggacagtttgtgccagctctccagagagaaaagaaacttccaattgaagacactgagctgaaccattccgcccgcccgcccgcccgagggcactccagatctgccggaggcgctgggcaatgaccccgggactccaggccagaggggtctgaagctgtttgggaaagcagcgggactccttgggaagatggccatggccccaagcccttccctggtgcaggtgtacaccagccccgcggctgtggccgtgtgggaatggcaggacgggctgggcacctggcacccctacagtgccaccgtctgcagcttcatcgagcagcagtttgtccagcagaagggccaacgttttgggcttgggagcctggcccacagc

SEQ ID NO: 306691 - DNA, 372 bp, Artificial Sequence
  derived and/or modified sequence
atggccgacccccagagctgcttcatgaccagacagaagcccggcaacaccttcgccagcgagggcagcctgaacaccgccggcagacccggcgtgggcaagagacaggtggcccccgtggccggcgtggccagaaagggcagaagaatctggggcagcagaatgatcgacatccagaccagaatggccggcagagccctggagctgctgtacctgcccgagaacaagccctgctacctgctggacatcggctgcggcaccggcctgagcggcagctacctgagcgacgagggccactactgggtgggcctggacatcagccccgccatgctgggccccggcatccccagctgccccgccgccgtgccctag

SEQ ID NO: 306692 - DNA, 372 bp, Artificial Sequence
  derived and/or modified sequence
atggcagaccctcaaagctgctttatgactcgtcaaaagcctggtaatacctttgccagcgaagggtccttgaacacagctggtaggcccggggtgggcaaaaggcaggtggcacctgtggcaggtgttgctcgcaagggacggcgcatttggggatcacggatgatagacattcagacacggatggccggtcgggctcttgaacttttatatctccctgagaataaaccttgttatctgttagatatcggatgtggtaccggtctgtctggatcctacctctcagatgaggggcattactgggtgggcctagatatctcaccagctatgctaggacccggtattccaagctgtccagccgctgtgccatag

SEQ ID NO: 306693 - DNA, 372 bp, Artificial Sequence
  derived and/or modified sequence
atggctgacccccagagctgcttcatgacccggcagaagccaggcaacacctttgccagcgagggcagcctgaacacagctggccggcctggggtgggcaagaggcaggtggcccctgtggccggcgtggccaggaagggccgccgcatctggggcagcaggatgattgacatccagaccaggatggccggccgggccctggagctgctgtacctgcctgagaacaagccctgctacctgctggacatcggctgcggcaccggcctgagcggcagctacctgagtgatgagggccactactgggtgggcctggacatcagccctgccatgctgggccctggcatccccagctgcccagctgctgtgccctag

SEQ ID NO: 306694 - DNA, 372 bp, Artificial Sequence
  derived and/or modified sequence
atggccgacccccagagctgcttcatgacccggcagaagcccggcaacacatttgcaagcgaaggcagtctgaataccgccggccgccctggagtgggaaaaagacaagttgctcctgtagcaggtgtagcccggaaaggacggaggatttggggcagcaggatgattgacatccagacgagaatggcgggccgagctttggaactactctatctgccagaaaataagccatgttatctgctcgacatcggttgcggaactggtctatccgggagctacctcagtgacgagggacattattgggtcggtctcgacatatccccagctatgttaggtcccggaattccaagctgccctgctgcagttccctag

SEQ ID NO: 306695 - DNA, 372 bp, Artificial Sequence
  derived and/or modified sequence
atggctgaccctcaatcttgttttatgacaaggcagaagcccggaaacacatttgccagcgagggctcactgaacactgcgggacgccctggggtcggaaagagacaggtggcaccagtagctggggttgccagaaaagggaggcgcatctgggggtcgaggatgattgacatccaaacccggatggcgggaagggctctcgagcttctctacctgcctgagaataagccctgctacctgttggacatcggctgcggaaccggattgtccgggtcatatctgtccgatgagggacactattgggtcggactagatatctccccggcaatgcttggccctgggattccttcctgcccggcagccgtaccatag

SEQ ID NO: 306696 - DNA, 2496 bp, Artificial Sequence
  derived and/or modified sequence
gtgctgctgaggcgtgagaatggcgtcccgcggccggcgtccggagcatggcggacccccagagctgttttatgacgagacagaagcccggaaatacgttcgcaagtgaggggagcctgaatactgcggggcgtccgggggtcgggaagcggcaagttgcccctgttgctggcgttgcccggaaaggccgtagaatttggggctcacggatgattgatatccagaccaggatggctgggcgagcattggagcttctttatctgccagagaataagccctgttacctgctggatattggctgtggcactgggctgagtggaagttatctgtcagatgaagggcactattgggtgggcctggatatcagccctgccatgctgggtccggggatcccgagctgtcctgcagctgtaccctgagaactcagagcagttggagctgatcacaacccaggccacaaaggcaggcttctccggtggcatggtggtagactaccctaacagtgccaaagcaaagaaattctacctctgcttgttttctgggccttcgacctttataccagaggggctgagtgaaaatcaggatgaagttgaacccagggagtctgtgttcaccaatgagaggttcccattaaggatgtcgaggcggggaatggtgaggaagagtcgggcatgggtgctggagaagaaggagcggcacaggcgccagggcagccccaagcctgcctcgaacacctgtgtgccacatccttcagggagcacccctgcccggcttcacgtgaacacagaaatggccaaatgtcctccaggagaggaaaagggcccacggataagaggaggagccgctggccgccggcgaaagtgagtccaactgggaggcatcaggagacaggggtcttgagtccacctttgccgctgacatttatgtgacctcagcctggtgttttcccctctctgggactcttccttccctaaaacctgccttacaaggggtctgtgtccaaatactgtccagacccagcactaggggtcatggacgtagggaacatggtgagggggtcatggcaggagggatggggcctacactcaccccagaggcaaagatggcggggttcccactctccagcatgtcctccagctcctcactggtcgtggtcctgccggctgcaagcgagtggggtcacactgagcccagccctcttcggggagttcagcagcagcattgggccccgccccctccgtcccaggcccgggctccccccagccccgagctcagcggcagcctcaggccccgcccccccggcccttaacacagcagccgcctcaggcccccgcccctccagccccaaactcagcagctgcctcgggccacccgcctcgggcccctaactaagcagcagccttgagccacgcactcagcagcagactcgggccccgcccctccaggctccaggccccgccccaggccccacccccagctcactgatctccagctgcctctggatgcggcctttgcagcgctcgcggtagtcggactgcgtggcgttgtactccgacatgacctccacaaactttctggacagcgtggagtgctgggggcccgagatggaggtgcaggggtcaggccctgcggggaccgacccagagactcaggtgcccgcccatcctagactccgtggccgcacctgtgtcttccggatcctcaggtcagcggaggagcggttcaggccttcctcttgctcgatggactgctcgatgcctgggggcacaggtggctgctaagtcataaccaggccccttcaaccccgtcccctacccgcacacccagcatctatccaccttcccacatcccctagggtatgtgtgtggcctgtggctggtgggatcagtgccaggcaccgatggaggaggggcctacagaagcccttccagctgtgacgctgtgtggtgtgtgcatgtgtgtaaatgcacacccactccaagctctgcgtgtgtgtgaggtctggtagctccggccaccctatgcctgggtaccactccttttctgctcagaaaggctgtgtacgagggaccatgcccacagcggggagagccaggtggcccctcctgcagggcatgtggccccgaggccttggcactcatggggtgcacgtgtctgttcacccagaataccgggcttctgcaagagaccaggaagtactggccacttcttcaaccctctttagcagaggtgaggggcagtgcccatccagagtggagccctccctcgccaaagccttaggtgggtgtgtccctgggcccagcccagagtctggcaccaacgggccttgccaagtagctgctgagtgaatgggcacatgacgccaccctcagaaaggaaagcaagatccggcgcaccccctcagggcgagcaaaaccccatgggctccgcagaggaagcaggcctagaatgccccccacccacccccagacaagcctgactcactctttaacttgg

SEQ ID NO: 306697 - protein, 574 aa, Artificial Sequence
  derived and/or modified sequence
MEPTENPCQGPLGQKAGEKPLAAGPGEEELLRGSAPHAQDTQSEELPPSCTISGEKKPPAVSGEATGADAGRLCPPPRSRAPHKDRTLARSRPQTQGEDCSLPVGEVKIGKRSYSPAPGKQKKPNAMGLAPTSSPGAPNSARATHNPVPCGSGRGPCHLANLLSTLAQSNQNRDHKQGPPEVTCQIRKKTRTLYRSDQLEELEKIFQEDHYPDSDKRREIAQTVGVTPQRIMVWFQNRRAKWRKMEKLNGKESKDNPAAPGPASSQCSSAAEILPAVPMEPKPDPFPQESPLDTFPEPPMLLTSDQTLAPTQPSEGAQRVVTPPLFSPPPVRRADLPFPLGPVHTPQLMPLLMDVAGSDSSHKDGPCGSWGTSITLPPPCSYLEELEPQDYQQSNQPGPFQFSQAPQPPLFQSPQPKLPYLPTFPFSMPSSLTLPPPEDSLFMFPCGPSGGTSQGYCPGASSGQILMQPPAGNIGTASWSDPCLPELPFPGPFCPQALGHPPGGDGYFPDLFPTPCPQALGRQPSSALSWMPEGARPGTGPLLSKAKEEPPAASLDQPSALEEARGDDKNSHVP

SEQ ID NO: 306698 - DNA, 1725 bp, Artificial Sequence
  derived and/or modified sequence
atggagcccacagaaaacccttgccagggtccactgggccagaaggccggtgaaaagccgctcgctgcaggacctggcgaagaggagctgcttagagggtccgctccccacgcccaagatacacaatccgaagagctgccgccgtcatgtacaatcagcggggaaaagaaaccaccggccgtgtcaggcgaagccaccggtgcagacgcaggacgtctttgtcctcccccgcggtctcgtgccccacacaaagataggacgctcgcaaggtcacgcccacagacccaaggcgaggactgttccctgcccgtcggagaggtcaaaatcgggaagcgctcctactcccctgcgcccggcaagcagaagaagcccaacgctatgggactcgcccctacaagctctccgggggcccctaacagcgcaagagccacacacaaccccgtcccctgtggatccgggagaggaccatgccacttagccaatctcctgtcaactctggcacagagcaatcagaatagagaccacaaacaaggcccccccgaggtgacctgtcagattcggaaaaagactagaacgttgtataggtctgaccagctggaagagctggagaaaatctttcaggaggatcattatcccgactcagacaaaaggagggaaattgctcagaccgtcggcgtaacaccacagaggataatggtgtggtttcagaataggagagccaagtggaggaagatggaaaaattgaatggtaaagagagtaaagacaacccagcagcaccgggaccagcctcatcacagtgcagttcagccgctgaaatcctcccagccgtgcccatggagccaaagccggacccgtttccccaggaaagcccattggacaccttcccggaacctcctatgcttttgacctccgatcagactcttgctcctacacagcccagcgaaggcgctcaaagagtggtgactccccccctgttcagcccaccaccagttagaagagcagatctgccgttcccattagggcccgtgcatacccctcaactgatgccactgctgatggacgtagcaggatctgattcctcacataaagatggcccatgtgggagctgggggacaagtattaccctgcctccaccatgtagctaccttgaagagctggagccacaggattaccaacagtccaatcagccaggacctttccagtttagccaggcccctcagcccccgctgttccagtctccccagcccaaactcccttatctgccaacattccctttttccatgccatcctctctcaccttgcccccacccgaagactcacttttcatgtttccctgtgggccctccggcggcacttcccagggctattgtcctggcgccagctcaggccagattctcatgcagccccccgccggaaatataggcactgcaagctggtccgacccttgtcttccagaattgccatttccaggcccattttgccctcaggcactcggccatcctcccggaggtgacggttattttccagacctgtttcctaccccctgtccccaggcactgggcaggcagccgagttcagctctgagctggatgcccgaaggagctcgccccggcaccggcccactcctgtccaaagcaaaggaagaacccccggccgcttcactggatcagcctagcgcactagaagaggctcggggcgacgataagaattctcacgttccgtag

SEQ ID NO: 306699 - DNA, 1725 bp, Artificial Sequence
  derived and/or modified sequence
atggagcccacagagaacccctgccagggccccctgggccagaaggccggggagaagcccctggccgccggccctggagaggaggagctgctgcggggcagcgcccctcatgcccaggacacccagagcgaggagctgccccccagctgcaccatctctggagagaagaagcccccagctgtgtctggagaggccaccggggctgatgctggccgcctgtgccccccacccaggagccgggccccccacaaggacaggaccctggcccggagccggccccagacccagggcgaggactgcagcctgcctgtgggggaggtgaagattggcaagaggagctacagccctgcccctgggaagcagaagaagcccaatgccatgggcctggcccccaccagcagccctggggcccccaacagcgcccgggccacccacaaccctgtgccctgtggcagcggccggggcccctgccacctggccaacctgctgagcaccctggcccagagcaaccagaacagagaccacaagcagggccccccagaggtgacctgccagatcaggaagaagaccaggaccctgtacagaagtgaccagctggaggagctggagaagatcttccaggaggaccactacccagacagcgacaagagaagagagatcgcccagacagtgggcgtgaccccccagaggatcatggtgtggttccagaacagaagagccaagtggaggaagatggagaagctgaatggcaaggagagcaaggacaacccagctgcccctggccctgccagcagccagtgcagcagcgctgctgagatcctgcctgctgtgcccatggagcccaagccagaccccttcccccaggagagccccctggacaccttccctgagccccccatgctgctgaccagtgaccagaccctggcccccacccagcccagcgagggcgcccagagggtggtgaccccacccctcttcagccccccacctgtgcggcgggctgacctgcccttccccctgggccctgtgcacaccccccagctgatgcccctgctgatggatgtggccggcagtgacagcagccacaaggatggcccctgtggctcctggggcaccagcatcaccctgcccccaccctgcagctacctggaggagctggagccccaggactaccagcagagcaaccagcccggccccttccagttcagccaggccccccagcccccactcttccagagcccccagcccaagctgccctacctgcccaccttccccttctccatgcccagcagcctgaccctgcccccacctgaggacagcctcttcatgttcccctgtggccccagcggcggcaccagccagggctactgccctggggccagcagcggccagatcctgatgcagcccccagctggcaacatcggcacagcctcctggagcgacccctgcctgcctgagctgcccttccctggccccttctgcccccaggccctgggccaccccccaggaggagatggctacttcccagacctcttccccaccccctgcccccaggccctgggccggcagcccagcagcgccctgtcctggatgcctgagggcgcccggcccggcaccggccccctgctgagcaaggccaaggaggagcccccagctgccagcctggaccagcccagcgccctggaggaggcccggggagatgacaagaacagccacgtgccctag

SEQ ID NO: 306700 - DNA, 1725 bp, Artificial Sequence
  derived and/or modified sequence
atggagcccaccgagaacccctgccagggccccctgggccagaaggcgggagagaagccgctggccgccggaccgggcgaagaagaactgctcagagggagcgcccctcacgcccaggatacgcagtccgaggagctcccccccagctgtactatttcaggcgaaaagaaaccccccgcggttagtggagaagctaccggcgcggacgcaggaagactgtgtcctcctccaagatctcgtgcccctcataaggatagaacactcgccaggtctagaccccagactcagggggaggactgtagtcttccagtgggggaagtgaagataggaaagaggtcctatagtcctgctcctggaaagcaaaaaaaacctaatgctatgggcctggctccaacttcgtcccctggtgccccgaactctgcacgggctacacacaatcccgttccctgtggctcgggccgtggcccctgccacctggctaacctattgagcacactcgctcaatccaaccagaacagagatcacaagcagggtccccccgaggtgacctgccagattcgcaagaagacccgcaccttgtatagaagcgaccagctagaagaattggagaaaatcttccaagaggatcactatcctgattcggataaacgcagagagattgctcagacagtcggcgtgacacctcagaggatcatggtgtggtttcaaaatagaagagccaagtggcgaaaaatggagaagctgaacggaaaggaaagcaaagacaacccggctgccccgggaccagcctcttctcagtgtagcagtgccgctgaaatcctcccagcagttccgatggaacctaaacccgatcctttcccccaggagagccccttggacacattcccagagccccccatgctgttgacctccgatcagaccctagctccaacccagccatcagagggcgctcaaagggtggtgaccccccccttgttttctccaccccccgtgcggcgggctgacctcccctttccactgggcccggtgcacaccccacaactgatgccactgctgatggacgtcgccggctccgactcttcccacaaagacggcccctgcgggagctggggaacatcgatcactctcccaccaccttgttcatatctcgaggaacttgagccacaggattatcagcagagcaaccagccaggtccatttcagttcagccaagcacctcaacctcccctgtttcagtcaccacagccaaagctgccctacctccctaccttcccattttcaatgccatcctcccttactcttccccctcctgaagattccctgtttatgtttccttgtgggcccagcggaggcaccagccagggttactgtccaggtgcctcctctgggcagatcctcatgcagccccctgctggcaacataggtacagcgtcctggtcagacccttgcctgcctgagcttccattccccggacccttttgcccccaggcacttggacatccgcctggcggggacggctacttcccagacctgttcccaactccatgccctcaggctctgggtcggcagccgtccagcgctttgagctggatgccagagggcgcacggcctggaacaggcccgctgctctcaaaggcaaaggaggagccccctgcagcttcactggatcagccctcggcactcgaggaggcaaggggtgacgacaagaacagccacgtcccctag

SEQ ID NO: 306701 - DNA, 1725 bp, Artificial Sequence
  derived and/or modified sequence
atggaacccacagagaatccctgccagggaccgctgggccagaaagctggagagaagcccctggctgcaggacccggggaggaggaactgctccggggctcagcccctcatgctcaggacactcagagtgaggaactgccaccctcctgcaccatctcaggagagaagaagccgccagcagtctctggagaagccaccggggctgatgctgggagactgtgcccgcccccccgctccagggctccccacaaagacagaactctagcccgctccaggccccagactcagggggaagattgttccctcccagtgggagaggtgaagataggaaagaggtcctattctccagcccccgggaagcagaaaaagcctaatgccatgggtctggccccaacatcatctccgggtgcccctaactcagcccgtgccacacacaacccagtgccctgtgggtcaggccgggggccctgccacctggccaatctcctcagtacattggcgcagagcaaccaaaacagagaccacaagcaggggcccccggaagtgacctgccaaattaggaaaaagacacgaaccctataccgctcagatcagctggaggagctagagaagatattccaagaagaccactatcctgacagtgataaacgccgagagattgcccagacggtgggggtgaccccccagcgcatcatggtgtggttccagaatcgccgggccaagtggcgaaaaatggagaaactgaatgggaaagaaagcaaggacaatcctgcagcccctggccctgccagcagtcaatgcagctctgcagctgagatcctacctgctgtgcccatggagccaaagcctgaccctttccctcaggagtcccctctggatacctttccagagccccccatgctgctgacttctgaccagactttggcccccacccaacccagtgagggtgctcagagggtggtgacccccccactcttcagccccccacctgtgcgaagggccgatcttcctttcccccttggccctgtccacaccccccaactgatgccactgctgatggatgttgctggcagtgacagcagccacaaggacggcccctgtgggtcctgggggacaagcatcaccctgccacccccctgttcatatttggaggagctggagccccaggattaccaacagagcaaccagccaggacccttccagttctcccaggctccacagcccccgcttttccagtcccctcagcccaagttgccctacctccccactttccccttctccatgcccagttcactgacgcttccaccgcccgaagactctctctttatgtttccctgtggccccagcgggggcacatcgcagggctattgcccaggtgcctcctcaggacagatcctgatgcaaccacctgctgggaatataggtacagcctcctggagtgacccctgtttgccagagctgcccttccctggtccgttctgcccacaagctctggggcatcccccaggaggggatggctactttcctgatctatttccaactccctgcccccaggctctgggcaggcagccttcgtcagctctctcatggatgcctgaaggggccagaccagggactgggcccttactcagcaaggcaaaagaggaaccaccagctgcttccctggatcagccctcagcactggaggaggccagaggggatgacaagaatagccatgtcccctag

SEQ ID NO: 306702 - DNA, 1725 bp, Artificial Sequence
  derived and/or modified sequence
atggagccaaccgaaaatccctgccagggcccattggggcagaaggctggagagaagcccttagcagctggacctggtgaagaagaactgctccgcggatcggcgcctcacgctcaagacactcagagcgaggaactgcccccttcttgcaccattagtggtgaaaaaaaacctcccgcagtgagtggtgaagccaccggagcagatgctggaagactgtgccccccaccaagatccagggctccgcataaggataggacactggccagatcacgaccccaaacccagggggaagactgcagtttaccagttggcgaggtgaagattggtaagaggtcttactccccagccccaggcaagcagaaaaaacccaatgcaatggggctggccccaactagcagtccaggtgcccctaacagcgcaagggctacacacaaccccgtcccttgtggctctgggcgaggcccttgccacctggccaacttactgtcgactctggcccaatccaaccagaatagagaccataaacaggggcctcctgaggtgacgtgtcagatccgaaagaaaactcgcaccttgtatcgatccgaccagctggaggagctggagaagatatttcaagaggaccactaccccgattcagacaagcgaagggaaatagcacaaactgtgggcgttacgccccaaagaattatggtgtggtttcagaatcgcagggcaaagtggcggaagatggagaaacttaatggcaaggagtccaaggacaacccagccgcacctggacctgctagttcccagtgcagcagcgccgctgaaattctgccggcagtccccatggaaccaaagcccgatccattcccccaggagtccccactggatacatttcctgaacctccaatgctgctgacttcagatcagaccttggcacccacccagccgtctgagggtgctcagcgtgtggttactcctccccttttttcccctccgccagtcagacgagcagatctgccctttcctctggggccagtccatactccccaactcatgcctctgctgatggacgtggccggatctgatagcagccataaggatggaccctgtggatcatggggtacctccattactctcccaccgccatgctcgtatctggaagaacttgaaccccaggattaccagcagagtaaccagcctggaccctttcagtttagtcaggcacctcagccccctctcttccagtcaccacagccaaagctgccgtacctccctaccttccccttcagcatgcctagttcactgaccttgcctcccccagaagatagcctgttcatgttcccatgtgggccatctggaggcacatctcagggctactgcccaggtgcatcttccggacagatactgatgcaaccaccagcagggaatatcggcacagcctcctggagtgacccttgcctgccagagctcccattcccgggtcccttctgtcctcaggctctgggccacccccctgggggagatggctattttcccgaccttttcccaactccgtgccctcaggcccttggccgacagccatcaagtgcattatcttggatgcctgaaggcgcaaggcccggtaccggccctttactgtctaaagctaaggaagaacccccagccgcttcacttgaccagccatctgcgttggaggaagccagaggggatgataagaatagccatgtaccgtag

SEQ ID NO: 306703 - DNA, 1725 bp, Artificial Sequence
  derived and/or modified sequence
atggagcccaccgagaacccctgccagggccccctgggccagaaggccggcgagaagcccctggccgccggccccggcgaggaggagctgctgagaggcagcgccccccacgcccaggacacccagagcgaggagctgccccccagctgcaccatcagcggcgagaagaagccccccgccgtgagcggcgaggccaccggcgccgacgccggcagactgtgccccccccccagaagcagagccccccacaaggacagaaccctggccagaagcagaccccagacccagggcgaggactgcagcctgcccgtgggcgaggtgaagatcggcaagagaagctacagccccgcccccggcaagcagaagaagcccaacgccatgggcctggcccccaccagcagccccggcgcccccaacagcgccagagccacccacaaccccgtgccctgcggcagcggcagaggcccctgccacctggccaacctgctgagcaccctggcccagagcaaccagaacagagaccacaagcagggcccccccgaggtgacctgccagatcagaaagaagaccagaaccctgtacagaagcgaccagctggaggagctggagaagatcttccaggaggaccactaccccgacagcgacaagagaagagagatcgcccagaccgtgggcgtgaccccccagagaatcatggtgtggttccagaacagaagagccaagtggagaaagatggagaagctgaacggcaaggagagcaaggacaaccccgccgcccccggccccgccagcagccagtgcagcagcgccgccgagatcctgcccgccgtgcccatggagcccaagcccgaccccttcccccaggagagccccctggacaccttccccgagccccccatgctgctgaccagcgaccagaccctggcccccacccagcccagcgagggcgcccagagagtggtgaccccccccctgttcagccccccccccgtgagaagagccgacctgcccttccccctgggccccgtgcacaccccccagctgatgcccctgctgatggacgtggccggcagcgacagcagccacaaggacggcccctgcggcagctggggcaccagcatcaccctgccccccccctgcagctacctggaggagctggagccccaggactaccagcagagcaaccagcccggccccttccagttcagccaggccccccagccccccctgttccagagcccccagcccaagctgccctacctgcccaccttccccttcagcatgcccagcagcctgaccctgcccccccccgaggacagcctgttcatgttcccctgcggccccagcggcggcaccagccagggctactgccccggcgccagcagcggccagatcctgatgcagccccccgccggcaacatcggcaccgccagctggagcgacccctgcctgcccgagctgcccttccccggccccttctgcccccaggccctgggccacccccccggcggcgacggctacttccccgacctgttccccaccccctgcccccaggccctgggcagacagcccagcagcgccctgagctggatgcccgagggcgccagacccggcaccggccccctgctgagcaaggccaaggaggagccccccgccgccagcctggaccagcccagcgccctggaggaggccagaggcgacgacaagaacagccacgtgccctag

SEQ ID NO: 306704 - protein, 241 aa, Artificial Sequence
  derived and/or modified sequence
MDTNDDPDEDHLTSYDIQLSIQESIEASKTALCPERFVPLSAQNRKLVEAIKQGHIPELQEYVKYKYAMDEADEKGWFPLHEAVVQPIQQILEIVLDASYKTLWEFKTCDGETPLTLAVKAGLVENVRTLLEKGVWPNTKNDKGETPLLIAVKKGSYDMVSTLIKHNTSLDQPCVKRWSAMHEAAKQGRKDIVALLLKHGGNVHLRDGFGVTPLGVAAEYGHCDVLEHLIHKGGDVLALAD

SEQ ID NO: 306705 - protein, 249 aa, Artificial Sequence
  derived and/or modified sequence
MKQPSKAEYGHCDVLEHLIHKGGDVLALADDGASVLFEAAGGGNPDCISLLLEYGGSGNVPNRAGHLPIHRAAYEGHYLALKYLIPVTSKNAIRKSGLTPIHSAADGQNAQCLELLIENGFDVNTLLADHISQSYDDERKTALYFGVSNNDVHCTEVLLAAGADPNLDPLNCLLVAVRANNYEIVRLLLSHGANVNCYFMHVNDTRFPSVIQYALNDEVMLRLLLNNGYQVEMCFDCMHGDIFGNSFVC

SEQ ID NO: 306706 - DNA, 2706 bp, Artificial Sequence
  derived and/or modified sequence
gtagattagctcaacactcgagaatcattgcagcttcaaggaatggatactaatgatgaccctgatgaagaccatcttacaagttatgatattcagctaagtattcaagaatccattgaagccagcaagactgcactttgtcctgaaagatttgtacccctaagtgctcaaaacagaaaacttgtggaggccataaaacaaggtcacattcctgagctccaggagtatgtaaaatataaatatgcaatggatgaagctgatgaaaaaggatggtttccattgcatgaagctgttgttcaacccattcaacaaatacttgagattgttctggatgcatcctataagacactctgggaattcaagacctgtgatggagaaacacccttgactttggcagtcaaagctggtctggtggaaaatgtaagaactttattagaaaagggagtgtggcccaacacaaaaaatgataaaggagagaccccccttctgattgctgtgaaaaagggctcctatgacatggtgtcgactctgatcaaacataacactagcctagaccagccctgtgtcaagcgatggtcagcaatgcatgaagcagccaagcaaggccgaaaagatatcgtagctctgctgctgaaacatggaggcaatgtccacctgagagatggatttggagtcacaccactaggcgtcgctgccgagtatggtcactgtgacgtgttagaacatctaatccacaaaggtggtgatgtgcttgctttggcggatgatggggcgtcggtgctgtttgaggcagcaggaggtggcaatcccgactgcatttccctcctgctggaatatggaggaagcggaaatgtacctaaccgagcaggacatcttcctatacaccgagctgcctatgaggggcattatcttgcactgaaatatcttatcccagtaacatctaaaaatgcaattcggaaaagtgggctaacaccaattcactcagcagcagatggacaaaatgcacagtgtctagaactgctcattgaaaatggttttgatgtcaacactctacttgctgaccacatttcccagagctatgacgatgagaggaagactgcgctgtattttggcgtttctaataatgacgttcattgcacagaagtccttctggctgcaggtgcagacccaaacttagatcccctcaactgtctacttgttgcagtgagggccaataattatgaaattgtcaggctgcttctctcccatggagctaatgtcaattgttattttatgcatgtgaatgacactcgtttccccagtgtcattcaatatgctctaaacgacgaggtaatgctgaggctattgctgaataatggctatcaagtggagatgtgctttgactgcatgcatggtgacatctttggaaattcatttgtgtggtcagagatacaggaagaggtgctgccaggatggacatcttgtgtaataaaagataacccgttctgtgagtttattacagttccttggatgaagcacttggtaggcagagttactcgtgtactaatagattacatggattatgttcctctgtgtgctaaactgaagtctgcactagaagtacagagagaatggccagaaatccgccaaatactagagaatccttgttcattgaagcatttgtgtcggttaaaaattcgaaggcttatgggtctccagaaactctgccagccagcctcagtggagaagcttcctctaccaccagctattcaaagatacatattatttaaagagtatgatctctatggacaagagctaaaattgacataacttaatattttaaaatgtgatttaaaaaaaatgttgaaatgtgattccctcagataatttcttgtaaccattttacatccttaattgtaaagtgtatttaaattcattgacagttttataggttatcatgtgttcttatgggaacaccatgatttatgtctttaaagacatttgcattttttaaagatagtattttgaacttagatttgtatctttgtttgctacaagtcatcaaactctccctatcaagtggctcctacaatatccacaatcaagtctctatgtttaaaaaacagataaccactttctcaaacccacatctgccagttgctggccagattctcctgtctttcacggtcttgctgtgtaaaagagctcctcctgcctgtaagttcacagactgtgatctggcatctgaccctccactgcttttctcaaggtccctgacaatctctttgttggtaaattcagtgaacattcttcagtccctcttccaatcgattcctacagcatctaacattgttgcctgttccttgcttgaaatgatatctctttccttgtttctcgcaaaacctgttctcttgggtgtcctcccacctccctggacactctgtctctggcttctttctgcctagctcatctctagccaatcttacagttatatatcttaagccctcttctctttgttctttaagttatatatcctaagccctctttgctttgttctctgggatattttatccacatccatggtcttaatcattttgctagagactacaaaatttccatccaaagctcagctctttctctcatgttctcctgacctatgtagacaattggcctcatgaacatttgaacacaaagacacctcaaattcaacatgtccccagatgaact

SEQ ID NO: 306707 - DNA, 2817 bp, Artificial Sequence
  derived and/or modified sequence
cttcctctgatttaggaaggcaagtccctggataagaatgacaagatgatcattccaaaaggataaatcctgatgattctctcagggacctctagtagattagctcaacactcgagaatcattgcagcttcaagaacttgtctcgttcaaaattatatgcaggaatggatactaatgatgaccctgatgaagaccatcttacaagttatgatattcagctaagtattcaagaatccattgaagccagcaagactgcactttgtcctgaaagatttgtacccctaagtgctcaaaacagaaaacttgtggaggccataaaacaaggtcacattcctgagctccaggagtatgtaaaatataaatatgcaatggatgaagctgatgaaaaaggatggtttccattgcatgaagctgttgttcaacccattcaacaaatacttgagattgttctggatgcatcctataagacactctgggaattcaagacctgtgatggagaaacacccttgactttggcagtcaaagctggtctggtggaaaatgtaagaactttattagaaaagggagtgtggcccaacacaaaaaatgataaaggagagaccccccttctgattgctgtgaaaaagggctcctatgacatggtgtcgactctgatcaaacataacactagcctagaccagccctgtgtcaagcgatggtcagcaatgcatgaagcagccaagcaaggccgaaaagatatcgtagctctgctgctgaaacatggaggcaatgtccacctgagagatggatttggagtcacaccactaggcgtcgctgccgagtatggtcactgtgacgtgttagaacatctaatccacaaaggtggtgatgtgcttgctttggcggatgatggggcgtcggtgctgtttgaggcagcaggaggtggcaatcccgactgcatttccctcctgctggaatatggaggaagcggaaatgtacctaaccgagcaggacatcttcctatacaccgagctgcctatgaggggcattatcttgcactgaaatatcttatcccagtaacatctaaaaatgcaattcggaaaagtgggctaacaccaattcactcagcagcagatggacaaaatgcacagtgtctagaactgctcattgaaaatggttttgatgtcaacactctacttgctgaccacatttcccagagctatgacgatgagaggaagactgcgctgtattttggcgtttctaataatgacgttcattgcacagaagtccttctggctgcaggtgcagacccaaacttagatcccctcaactgtctacttgttgcagtgagggccaataattatgaaattgtcaggctgcttctctcccatggagctaatgtcaattgttattttatgcatgtgaatgacactcgtttccccagtgtcattcaatatgctctaaacgacgaggtaatgctgaggctattgctgaataatggctatcaagtggagatgtgctttgactgcatgcatggtgacatctttggaaattcatttgtgtggtcagagatacaggaagaggtgctgccaggatggacatcttgtgtaataaaagataacccgttctgtgagtttattacagttccttggatgaagcacttggtaggcagagttactcgtgtactaatagattacatggattatgttcctctgtgtgctaaactgaagtctgcactagaagtacagagagaatggccagaaatccgccaaatactagagaatccttgttcattgaagcatttgtgtcggttaaaaattcgaaggcttatgggtctccagaaactctgccagccagcctcagtggagaagcttcctctaccaccagctattcaaagatacatattatttaaagagtatgatctctatggacaagagctaaaattgacataacttaatattttaaaatgtgatttaaaaaaaatgttgaaatgtgattccctcagataatttcttgtaaccattttacatccttaattgtaaagtgtatttaaattcattgacagttttataggttatcatgtgttcttatgggaacaccatgatttatgtctttaaagacatttgcattttttaaagatagtattttgaacttagatttgtatctttgtttgctacaagtcatcaaactctccctatcaagtggctcctacaatatccacaatcaagtctctatgtttaaaaaacagataaccactttctcaaacccacatctgccagttgctggccagattctcctgtctttcacggtcttgctgtgtaaaagagctcctcctgcctgtaagttcacagactgtgatctggcatctgaccctccactgcttttctcaaggtccctgacaatctctttgttggtaaattcagtgaacattcttcagtccctcttccaatcgattcctacagcatctaacattgttgcctgttccttgcttgaaatgatatctctttccttgtttctcgcaaaacctgttctcttgggtgtcctcccacctccctggacactctgtctctggcttctttctgcctagctcatctctagccaatcttacagttatatatcttaagccctcttctctttgttctttaagttatatatcctaagccctctttgctttgttctctgggatattttatccacatccatggtcttaatcattttgctagagactacaaaatttccatccaaagctcagctctttctctcatgttctcctgacctatgtagacaattggcctcatgaacatttgaacacaaagacacctcaaattcaacatgtcc

SEQ ID NO: 306708 - DNA, 765 bp, Artificial Sequence
  derived and/or modified sequence
gtagattagctcaacactcgagaatcattgcagcttcaaggaatggatactaatgatgaccctgatgaagaccatcttacaagttatgatattcagctaagtattcaagaatccattgaagccagcaagactgcactttgtcctgaaagatttgtacccctaagtgctcaaaacagaaaacttgtggaggccataaaacaaggtcacattcctgagctccaggagtatgtaaaatataaatatgcaatggatgaagctgatgaaaaaggatggtttccattgcatgaagctgttgttcaacccattcaacaaatacttgagattgttctggatgcatcctataagacactctgggaattcaagacctgtgatggagaaacacccttgactttggcagtcaaagctggtctggtggaaaatgtaagaactttattagaaaagggagtgtggcccaacacaaaaaatgataaaggagagaccccccttctgattgctgtgaaaaagggctcctatgacatggtgtcgactctgatcaaacataacactagcctagaccagccctgtgtcaagcgatggtcagcaatgcatgaagcagccaagcaaggccgaaaagatatcgtagctctgctgctgaaacatggaggcaatgtccacctgagagatggatttggagtcacaccactaggcgtcgctgccgagtatggtcactgtgacgtgttagaacatctaatccacaaaggtggtgatgtgcttgctttggcggat

SEQ ID NO: 306709 - DNA, 1651 bp, Artificial Sequence
  derived and/or modified sequence
aggataaatcctgatgattctctcagggacctctagtagattagctcaacactcgagaatcattgcagcttcaaggaatggatactaatgatgaccctgatgaagaccatcttacaagttatgatattcagctaagtattcaagaatccattgaagccagcaagactgcactttgtcctgaaagatttgtacccctaagtgctcaaaacagaaaacttgtggaggccataaaacaaggtcacattcctgagctccaggagtatgtaaaatataaatatgcaatggatgaagctgatgaaaaaggatggtttccattgcatgaagctgttgttcaacccattcaacaaatacttgagattgttctggatgcatcctataagacactctgggaattcaagacctgtgatggagaaacacccttgactttggcagtcaaagctggtctggtggaaaatgtaagaactttattagaaaagggagtgtggcccaacacaaaaaatgataaaggagagaccccccttctgattgctgtgaaaaagggctcctatgacatggtgtcgactctgatcaaacataacactagcctagaccagccctgtgtcaagcgatggtcagcaatgcatgaagcagccaagcaaggccgaatatggtcactgtgacgtgttagaacatctaatccacaaaggtggtgatgtgcttgctttggcggatgatggggcgtcggtgctgtttgaggcagcaggaggtggcaatcccgactgcatttccctcctgctggaatatggaggaagcggaaatgtacctaaccgagcaggacatcttcctatacaccgagctgcctatgaggggcattatcttgcactgaaatatcttatcccagtaacatctaaaaatgcaattcggaaaagtgggctaacaccaattcactcagcagcagatggacaaaatgcacagtgtctagaactgctcattgaaaatggttttgatgtcaacactctacttgctgaccacatttcccagagctatgacgatgagaggaagactgcgctgtattttggcgtttctaataatgacgttcattgcacagaagtccttctggctgcaggtgcagacccaaacttagatcccctcaactgtctacttgttgcagtgagggccaataattatgaaattgtcaggctgcttctctcccatggagctaatgtcaattgttattttatgcatgtgaatgacactcgtttccccagtgtcattcaatatgctctaaacgacgaggtaatgctgaggctattgctgaataatggctatcaagtggagatgtgctttgactgcatgcatggtgacatctttggaaattcatttgtgtgctaaactgaagtctgcactagaagtacagagagaatggccagaaatccgccaaatactagagaatccttgttcattgaagcatttgtgtcggttaaaaattcgaaggcttatgggtctccagaaactctgccagccagcctcagtggagaagcttcctctaccaccagctattcaaagatacatattatttaaagagtatgatctctatggacaagagctaaaattgacataacttaatattttaaaatgtgatttaaaaaaaatgttgaaatgtgattccctc

SEQ ID NO: 306710 - DNA, 294 bp, Artificial Sequence
  derived and/or modified sequence
atggacaccaacgacgaccccgacgaggaccacctgaccagctacgacatccagctgagcatccaggagagcatcgaggccagcaagaccgccctgtgccccgagagattcgtgcccctgagcgcccagaacagaaagctggtggaggccatcaagcagggccacatccccgagctgcaggagtacgtgaagtacaagtacgccatggacgaggccgacgagaagggctggttccccctgcacgaggccgtggtgcagcccatccagcagatcctggagatcgtgctggactag

SEQ ID NO: 306711 - DNA, 294 bp, Artificial Sequence
  derived and/or modified sequence
atggacacaaacgacgatcccgacgaggatcacttgacctcctatgacattcagctgagtattcaggaatccatcgaggcctccaagacggcgttatgtcccgaaaggttcgtccctctgtccgcccagaatcgaaagctcgtggaggccatcaaacagggccacattcctgagctccaggagtacgtgaagtacaagtatgccatggatgaagctgatgagaagggttggttcccgctccacgaagccgtggtgcagccgatccagcaaattctcgagatcgtgcttgactag

SEQ ID NO: 306712 - DNA, 531 bp, Artificial Sequence
  derived and/or modified sequence
tctgatttaggaaggcaagtccctggataagaatgacaagatgatcattccaaaaggaaagcagtcaagacagtgcaggaggtgaggccatcttataggaagagcagttgtccagcctctggaagaaaaagctcagtggagatctgacagccttcctgggggatattaacagggctcctgtgttgcagaggaacactactttctcagtgtagctctgagaaagagaaccagaaaaaggaatggatactaatgatgaccctgatgaagaccatcttacaagttatgatattcagctaagtattcaagaatccattgaagccagcaagactgcactttgtcctgaaagatttgtacccctaagtgctcaaaacagaaaacttgtggaggccataaaacaaggtcacattcctgagctccaggagtatgtaaaatataaatatgcaatggatgaagctgatgaaaaaggatggtttccattgcatgaagctgttgttcaacccattcaacaaatacttgagattgttctggatg

SEQ ID NO: 306713 - DNA, 294 bp, Artificial Sequence
  derived and/or modified sequence
atggacaccaatgatgatcctgatgaggaccacctgaccagctatgacatccagctgagcatccaggagagcattgaggccagcaagacagccctgtgcccagagagatttgtgcccctgagcgcccagaacaggaagctggtggaggccatcaagcagggccacatccctgagctgcaggagtatgtgaagtacaagtatgccatggatgaagcagatgagaagggctggttccccctgcatgaagctgtggtgcagcccatccagcagatcctggagatcgtgctggactag

SEQ ID NO: 306714 - DNA, 294 bp, Artificial Sequence
  derived and/or modified sequence
atggacaccaacgacgaccccgacgaggaccacctgaccagctacgatatccaattaagcattcaagagagcatcgaggcgagcaagacagcgctctgtccggaacgctttgtgcccctgtcggcacaaaaccgcaagctggtggaagccatcaagcaggggcacattccagaactccaggaatacgtcaaatacaaatacgccatggatgaagccgacgaaaaaggctggttcccgctgcacgaggctgtggtgcagcctattcagcagatattggagatagtccttgattag

SEQ ID NO: 306715 - DNA, 294 bp, Artificial Sequence
  derived and/or modified sequence
atggatacgaacgatgaccccgacgaagaccacctgacatcctacgacattcagctgagcatccaggagagcatcgaagcttcaaagactgcactctgtcctgaaaggtttgttccactaagtgcgcagaaccgcaagttagttgaggcaataaagcagggtcacatcccagagttgcaagagtatgtaaagtacaagtatgcgatggatgaggccgatgagaagggttggtttcctctgcacgaggccgttgtgcaacctatacagcagatcttggaaattgtactggactag

SEQ ID NO: 306716 - DNA, 750 bp, Artificial Sequence
  derived and/or modified sequence
atgaagcagcccagcaaggccgagtacggccactgcgacgtgctggagcacctgatccacaagggcggcgacgtgctggccctggccgacgacggcgccagcgtgctgttcgaggccgccggcggcggcaaccccgactgcatcagcctgctgctggagtacggcggcagcggcaacgtgcccaacagagccggccacctgcccatccacagagccgcctacgagggccactacctggccctgaagtacctgatccccgtgaccagcaagaacgccatcagaaagagcggcctgacccccatccacagcgccgccgacggccagaacgcccagtgcctggagctgctgatcgagaacggcttcgacgtgaacaccctgctggccgaccacatcagccagagctacgacgacgagagaaagaccgccctgtacttcggcgtgagcaacaacgacgtgcactgcaccgaggtgctgctggccgccggcgccgaccccaacctggaccccctgaactgcctgctggtggccgtgagagccaacaactacgagatcgtgagactgctgctgagccacggcgccaacgtgaactgctacttcatgcacgtgaacgacaccagattccccagcgtgatccagtacgccctgaacgacgaggtgatgctgagactgctgctgaacaacggctaccaggtggagatgtgcttcgactgcatgcacggcgacatcttcggcaacagcttcgtgtgctag

SEQ ID NO: 306717 - DNA, 750 bp, Artificial Sequence
  derived and/or modified sequence
atgaaacagccatcaaaggccgaatatggacactgtgatgtgctggagcacctgattcacaagggaggagacgtgctcgccctggctgacgatggggcctccgtcctcttcgaggccgctggcgggggcaaccccgactgtatatctctgctcctcgaatatggtggttccgggaacgttcctaacagagcaggccatctcccgatccatagagcagcctatgaggggcactacctggccctcaaatacctgatccctgtgacatctaaaaatgccatccgtaagagtgggttgaccccaatccattcagccgcagatggccagaatgctcagtgtctggaactgctgatcgagaacggcttcgacgttaacacccttctggccgaccatatttcccagagctacgacgatgagcggaagaccgctctgtattttggcgtatccaacaacgacgtgcactgcacagaggttttactggccgccggggctgatcccaatctggatccacttaactgtctgctggtggctgtgcgagccaacaattatgaaattgtgagactcctcctgtctcatggcgccaatgttaactgttatttcatgcatgttaatgatacccggttccctagcgtcatacagtacgctcttaatgacgaagtcatgctgcgattgttgctgaacaacggctaccaggtggagatgtgctttgattgtatgcacggtgatatctttggaaacagcttcgtgtgttag

SEQ ID NO: 306718 - DNA, 750 bp, Artificial Sequence
  derived and/or modified sequence
atgaagcagcccagcaaggccgagtatggccactgtgatgtgctggagcacctgatccacaagggaggagatgtgctggccctggctgatgatggagcctctgtgctgtttgaagctgctgggggcggcaacccagactgcatcagcctgctgctggagtatggaggcagcggaaatgtgcccaacagagctggccacctgcccatccaccgggccgcctatgagggccactacctggccctgaagtacctgatccctgtgaccagcaagaatgccatcaggaagagcggcctgacccccatccacagcgctgctgatggccagaatgcccagtgcctggagctgctgattgaaaatggatttgatgtgaacaccctgctggccgaccacatcagccagagctatgatgatgagaggaagacagccctgtactttggagtgagcaacaatgatgtgcactgcacagaggtgctgctggccgccggggctgaccccaacctggaccccctgaactgcctgctggtggccgtgcgggccaacaactatgagatcgtgcggctgctgctgagccatggagccaacgtgaactgctacttcatgcacgtgaatgacacccgcttccccagcgtcatccagtatgccctgaatgatgaggtgatgctgcggctgctgctgaacaacggctaccaggtggagatgtgctttgactgcatgcatggagacatctttggaaacagctttgtgtgctag

SEQ ID NO: 306719 - DNA, 750 bp, Artificial Sequence
  derived and/or modified sequence
atgaagcagcccagcaaggccgagtacggccactgcgacgtgctggaacatctgatccacaaggggggcgacgtgttagccttggctgatgacggtgcgagcgttctcttcgaggcggcagggggcggaaaccccgattgtatttcactgttgctggaatacggagggagcggcaatgtgccgaaccgtgccggacatctccccattcaccgagcagcatacgagggccactatctcgcactgaagtatctgatccctgttacatcaaagaacgctatacggaaatcaggactgacgccaatccactccgcagctgacggtcagaatgcacagtgcttggagttactgatcgagaacggatttgatgtcaataccctccttgcagatcacattagccagagttatgacgacgaacgcaagaccgccctctattttggcgtgtccaataatgatgtgcactgtactgaggtgctactggcagccggcgcggatcctaacctcgaccccctgaattgtctcctcgtggctgtccgagccaacaattacgagattgttaggttgctgctgagtcacggtgcaaacgtcaattgctatttcatgcacgtcaacgatactcgcttccctagcgtaattcagtatgcactgaacgatgaggtgatgctgaggttgctcctgaacaacggatatcaggtggagatgtgcttcgattgtatgcacggggacatttttggcaattcgttcgtttgctag

SEQ ID NO: 306720 - DNA, 750 bp, Artificial Sequence
  derived and/or modified sequence
atgaagcaaccttctaaggctgagtacggccattgcgacgtcctggaacacttgatacacaaaggtggagatgtgctcgccctcgccgatgacggggcaagtgtcctgttcgaggcagcagggggagggaatcccgattgtatatccttgctgctcgagtacggtggctcgggaaatgtgccaaatcgtgccggtcatttacccattcaccgcgcagcctatgaaggccattatctcgccctgaagtacctcattccagtcacttccaagaacgctatccgtaaatccggccttacaccaattcacagcgcagccgacgggcagaatgcacagtgtctggaactgctgattgagaatgggttcgacgtgaacacccttttggccgaccacatctctcagagttatgacgatgagcgcaagactgccctttactttggtgtgtcaaacaacgacgtgcactgcaccgaggtgcttctggccgctggcgcagatcccaatttagacccacttaactgtttgctcgtggccgttcgggcaaacaattacgagatagtccggcttttactttcccacggggctaacgttaattgttattttatgcatgtgaatgacactaggtttccatcagtaatccagtacgccctgaatgacgaagtcatgctgagactgctactaaacaatggctaccaggtcgagatgtgctttgactgtatgcatggggatatcttcggaaacagtttcgtatgctag

SEQ ID NO: 306721 - protein, 1403 aa, Artificial Sequence
  derived and/or modified sequence
MLCVAGARLKRELDATATVLANRQDESEQSRKRLIEQSREFKKNTPEDLRKQVAPLLKSFQGEIDALSKRSKEAEAAFLNVYKRLIDVPDPVPALDLGQQLQLKVQRLHDIETENQKLRETLEEYNKEFAEVKNQEVTIKALKEKIREYEQTLKNQAETIALEKEQKLQNDFAEKERKLQETQMSTTSKLEEAEHKVQSLQTALEKTRTELFDLKTKYDEETTAKADEIEMIMTDLERANQRAEVAQREAETLREQLSSANHSLQLASQIQKAPDVEQAIEVLTRSSLEVELAAKEREIAQLVEDVQRLQASLTKLRENSASQISQLEQQLSAKNSTLKQLEEKLKGQADYEEVKKELNILKSMEFAPSEGAGTQDAAKPLEVLLLEKNRSLQSENAALRISNSDLSGPYSTNSISSQSPLQQSPDVNGMAPSPSQSESAGSVSEGEEMDTAEIARQVKEQLIKHNIGQRIFGHYVLGLSQGSVSEILARPKPWNKLTVRGKEPFHKMKQFLSDEQNILALRSIQGRQRENPGQSLNRLFQEVPKRRNGSEGNITTRIRASETGSDEAIKSILEQAKRELQVQKTAEPAQPSSASGSGNSDDAIRSILQQARREMEAQQAALDPALKQAPLSQSDITILTPKLLSTSPMPTVSSYPPLAISLKKPSAAPEAGASALPNPPALKKEAQDAPGLDPQGAADCAQGVLRQVKNEVGRSGAWKDHWWSAVQPERRNAASSEEAKAEETGGGKEKGSGGSGGGSQPRAERSQLQGPSSSEYWKEWPSAESPYSQSSELSLTGASRSETPQNSPLPSSPIVPMSKPTKPSVPPLTPEQYEVYMYQEVDTIELTRQVKEKLAKNGICQRIFGEKVLGLSQGSVSDMLSRPKPWSKLTQKGREPFIRMQLWLNGELGQGVLPVQGQQQGPVLHSVTSLQDPLQQGCVSSESTPKTSASCSPAPESPMSSSESVKSLTELVQQPCPPIEASKDSKPPEPSDPPASDSQPTTPLPLSGHSALSIQELVAMSPELDTYGITKRVKEVLTDNNLGQRLFGETILGLTQGSVSDLLARPKPWHKLSLKGREPFVRMQLWLNDPNNVEKLMDMKRMEKKAYMKRRHSSVSDSQPCEPPSVGTEYSQGASPQPQHQLKKPRVVLAPEEKEALKRAYQQKPYPSPKTIEDLATQLNLKTSTVINWFHNYRSRIRRELFIEEIQAGSQGQAGASDSPSARSGRAAPSSEGDSCDGVEATEGPGSADTEEPKSQGEAEREEVPRPAEQTEPPPSGTPGPDDARDDDHEGGPVEGPGPLPSPASATATAAPAAPEDAATSAAAAPGEGPAAPSSAPPPSNSSSSSAPRRPSSLQSLFGLPEAAGARDSRDNPLRKKKAANLNSIIHRLEKAASREEPIEWEF

SEQ ID NO: 306722 - protein, 1347 aa, Artificial Sequence
  derived and/or modified sequence
MLCVAGARLKRELDATATVLANRQDESEQSRKRLIEQSREFKKNTPEDLRKQVAPLLKSFQGEIDALSKRSKEAEAAFLNVYKRLIDVPDPVPALDLGQQLQLKVQRLHDIETENQKLRETLEEYNKEFAEVKNQEVTIKALKEKIREYEQTLKNQAETIALEKEQKLQNDFAEKERKLQETQMSTTSKLEEAEHKVQSLQTALEKTRTELFDLKTKYDEETTAKADEIEMIMTDLERANQRAEVAQREAETLREQLSSANHSLQLASQIQKAPDVEQAIEVLTRSSLEVELAAKEREIAQLVEDVQRLQASLTKLRENSASQISQLEQQLSAKNSTLKQLEEKLKGQADYEEVKKELNILKSMEFAPSEGAGTQDAAKPLEVLLLEKNRSLQSENAALRISNSDLSGPYSTNSISSQSPLQQSPDVNGMAPSPSQSESAGSVSEGEEMDTAEIARQVKEQLIKHNIGQRIFGHYVLGLSQGSVSEILARPKPWNKLTVRGKEPFHKMKQFLSDEQNILALRSIQGRQRAEPAQPSSASGSGNSDDAIRSILQQARREMEAQQAALDPALKQAPLSQSDITILTPKLLSTSPMPTVSSYPPLAISLKKPSAAPEAGASALPNPPALKKEAQDAPGLDPQGAADCAQGVLRQVKNEVGRSGAWKDHWWSAVQPERRNAASSEEAKAEETGGGKEKGSGGSGGGSQPRAERSQLQGPSSSEYWKEWPSAESPYSQSSELSLTGASRSETPQNSPLPSSPIVPMSKPTKPSVPPLTPEQYEVYMYQEVDTIELTRQVKEKLAKNGICQRIFGEKVLGLSQGSVSDMLSRPKPWSKLTQKGREPFIRMQLWLNGELGQGVLPVQGQQQGPVLHSVTSLQDPLQQGCVSSESTPKTSASCSPAPESPMSSSESVKSLTELVQQPCPPIEASKDSKPPEPSDPPASDSQPTTPLPLSGHSALSIQELVAMSPELDTYGITKRVKEVLTDNNLGQRLFGETILGLTQGSVSDLLARPKPWHKLSLKGREPFVRMQLWLNDPNNVEKLMDMKRMEKKAYMKRRHSSVSDSQPCEPPSVGTEYSQGASPQPQHQLKKPRVVLAPEEKEALKRAYQQKPYPSPKTIEDLATQLNLKTSTVINWFHNYRSRIRRELFIEEIQAGSQGQAGASDSPSARSGRAAPSSEGDSCDGVEATEGPGSADTEEPKSQGEAEREEVPRPAEQTEPPPSGTPGPDDARDDDHEGGPVEGPGPLPSPASATATAAPAAPEDAATSAAAAPGEGPAAPSSAPPPSNSSSSSAPRRPSSLQSLFGLPEAAGARDSRDNPLRKKKAANLNSIIHRLEKAASREEPIEWEF

SEQ ID NO: 306723 - DNA, 4212 bp, Artificial Sequence
  derived and/or modified sequence
atgttgtgcgtagccggagccaggttgaagagagaactcgatgccaccgcaacggtattggcgaaccggcaggatgaaagtgagcagtccagaaagcggcttatcgaacagagccgggagttcaagaagaacactccagaggatttgcgcaagcaggtagcgccgctgctgaagagtttccaaggagagattgatgcactgagtaaaagaagcaaggaagctgaagcagctttcttgaatgtctacaaaagattgattgacgtcccagatcccgtaccagctttggatctcggacagcaactccagctcaaagtgcagcgcctgcacgatattgaaacagagaaccagaaacttagggaaactctggaagaatacaacaaggaatttgctgaagtgaaaaatcaagaggttacgataaaagcacttaaagagaaaatccgagaatatgaacagacactgaagaaccaagccgaaaccatagctcttgagaaggaacagaagttacagaatgactttgcagaaaaggagagaaagctgcaggagacacagatgtccaccacctcaaagctggaggaagctgagcataaggttcagagcctacaaacagccctggaaaaaactcgaacagaattatttgacctgaaaaccaaatacgatgaagaaactactgcaaaggccgacgagattgaaatgatcatgacggaccttgaaagggcaaaccagagggcagaggtggctcagagagaggcggagaccttaagggaacagctctcatcggccaatcactccctccagctggcctcacagatccagaaggcaccagacgtggagcaggccatagaggtgctgacccgctccagcctagaagttgagttggccgccaaggagcgggagatcgcacagctggtggaggacgtgcagagactccaggccagcctcaccaagctgcgggagaattcggccagccagatctcacagcttgagcagcagctgagcgccaaaaacagcacactcaaacaactggaagaaaaactcaaaggccaggctgactatgaagaggtgaagaaagagctgaacattctgaagtccatggagtttgcaccgtccgagggcgctgggacacaggatgcggccaagcccctggaggtgctgttgctggagaagaaccgctcgctgcagtccgagaacgccgcgctgcgcatctccaacagcgacctgagcggtccatacagcacaaactccatatcttcccaaagtccattacaacaaagcccagatgtcaatggcatggccccatcccccagccagtcagaaagtgctgggagcgtctccgagggcgaggagatggacactgcagaaatcgcccggcaggtcaaagagcagctgattaagcacaatatcggacaacgtattttcggacattatgtgttgggactgtctcaagggtccgtgagcgagattctggcccggcccaagccatggaataaactgactgttcgtggcaaggagccatttcacaagatgaaacagttcctctccgatgagcagaacatcctggccctccgtagcatccaaggcagacaaagagagaatccaggccagagcctgaacagactatttcaggaagtaccgaaacgaagaaatgggtctgaaggtaacatcaccacccggatccgagcctcggagactggctctgatgaagccatcaagtccatcctagagcaagccaagagggagctccaagtgcagaaaactgcagagccggcccagccttcctccgcatccggcagcgggaactctgatgacgccatccgctccatcctgcagcaagcccgccgggagatggaggcccagcaggctgccctcgaccctgccttaaagcaggcaccactgtcccagagtgacatcaccatcctcacccccaagcttctgtccacctcgcccatgcccaccgtgtccagctacccacctctcgccatctccctgaagaagccctccgcagctcctgaggccggtgcctctgctctgccgaaccccccggccctcaaaaaggaggcccaggacgcccccgggctggacccccagggagcagccgattgtgcacaaggggtcctgagacaggtgaaaaatgaggtgggccgcagcggtgcctggaaggaccactggtggagcgcggtgcagccggagagaagaaatgccgcctcctccgaggaggccaaggccgaagaaacgggcggcgggaaagagaagggcagcggtggcagcggaggtggcagccagcctcgggccgagcgcagtcagctccagggaccctcgtcgtcagagtactggaaggagtggcccagcgctgagtccccatactcccagagctcagagctgagtctgaccggggccagccgcagcgagacaccacagaacagccccctgccatcctccccgatcgtgcccatgtccaagcccaccaagccctcggtccccccgctgacccccgagcagtacgaggtctacatgtaccaggaggtggacaccatcgagctcacccggcaggttaaggaaaagctggccaagaacggcatctgccagagaatcttcggggagaaggtgctgggcctgtcccagggcagcgtcagcgacatgctgtcccgaccgaagccatggagcaagctgacgcagaaaggccgagaacccttcatccggatgcagctctggctgaacggcgagctaggccagggtgttctacccgtccagggccagcagcaagggccagtcctccactccgtgacatcgctccaggacccgctgcagcagggctgtgtgagctcagaaagcactccaaagacctccgccagctgcagccctgcccctgagtccccgatgagttccagtgagtcggtgaagagcctgaccgagctggtccagcagccctgtccccccatcgaggcgagcaaggacagcaagccaccagagcccagtgacccgccagcatccgactcccagcccacaaccccgctgcctctctccggacactcggccctcagcatccaagaattagtagccatgtccccggagctggacacctacggcataaccaagcgggtgaaggaggtgctgacggacaacaacctcggccagcgcttatttggggagaccatcttagggctcacccaaggctctgtctctgacctccttgcccgccccaaaccctggcataagctcagtctgaaaggacgagagcccttcgtccggatgcagctgtggctgaacgaccccaacaatgtggagaagctgatggacatgaaacggatggagaagaaagcctacatgaagcggcggcacagctcagtcagtgacagccagccctgcgaaccgccctctgtcggcaccgagtacagccagggcgccagcccccagccccagcaccagctgaagaaaccccgggtggtgctggctccggaggagaaggaggcgctgaaacgagcgtatcagcaaaagccatacccgtcaccaaaaaccatcgaagacctcgccacccagctcaacctgaaaaccagcaccgtcatcaactggttccacaactacaggtctcggatccgcagagaactgttcattgaggaaattcaggccgggagtcagggccaggcgggcgccagcgactcaccctcggcccgcagcggccgggcggcgcccagctcggagggcgacagctgcgacggcgtggaggccactgagggcccaggcagcgccgacaccgaggagcccaagtctcagggagaggccgagcgggaggaggtgccgcggccggcggagcagacggagccgccgccctcggggaccccgggcccggacgacgcccgcgacgacgaccacgagggaggccccgtggaaggcccggggcccctgcccagccccgcctccgcgaccgccaccgccgcgcccgcggcccccgaggacgccgctacctcagccgccgccgcgccgggggagggccccgcggccccgagctccgcgccgccgcccagcaacagcagcagcagcagcgccccccgcaggcccagctcgctgcagagccttttcggcctccccgaggccgcgggcgcccgggactcgcgcgacaaccccctgcgcaagaagaaggccgcgaacttgaacagcatcatccaccgcctggagaaggccgccagccgggaggaacctatcgaatgggagttctga

SEQ ID NO: 306724 - DNA, 4044 bp, Artificial Sequence
  derived and/or modified sequence
atgttgtgcgtagccggagccaggttgaagagagaactcgatgccaccgcaacggtattggcgaaccggcaggatgaaagtgagcagtccagaaagcggcttatcgaacagagccgggagttcaagaagaacactccagaggatttgcgcaagcaggtagcgccgctgctgaagagtttccaaggagagattgatgcactgagtaaaagaagcaaggaagctgaagcagctttcttgaatgtctacaaaagattgattgacgtcccagatcccgtaccagctttggatctcggacagcaactccagctcaaagtgcagcgcctgcacgatattgaaacagagaaccagaaacttagggaaactctggaagaatacaacaaggaatttgctgaagtgaaaaatcaagaggttacgataaaagcacttaaagagaaaatccgagaatatgaacagacactgaagaaccaagccgaaaccatagctcttgagaaggaacagaagttacagaatgactttgcagaaaaggagagaaagctgcaggagacacagatgtccaccacctcaaagctggaggaagctgagcataaggttcagagcctacaaacagccctggaaaaaactcgaacagaattatttgacctgaaaaccaaatacgatgaagaaactactgcaaaggccgacgagattgaaatgatcatgacggaccttgaaagggcaaaccagagggcagaggtggctcagagagaggcggagaccttaagggaacagctctcatcggccaatcactccctccagctggcctcacagatccagaaggcaccagacgtggagcaggccatagaggtgctgacccgctccagcctagaagttgagttggccgccaaggagcgggagatcgcacagctggtggaggacgtgcagagactccaggccagcctcaccaagctgcgggagaattcggccagccagatctcacagcttgagcagcagctgagcgccaaaaacagcacactcaaacaactggaagaaaaactcaaaggccaggctgactatgaagaggtgaagaaagagctgaacattctgaagtccatggagtttgcaccgtccgagggcgctgggacacaggatgcggccaagcccctggaggtgctgttgctggagaagaaccgctcgctgcagtccgagaacgccgcgctgcgcatctccaacagcgacctgagcggtccatacagcacaaactccatatcttcccaaagtccattacaacaaagcccagatgtcaatggcatggccccatcccccagccagtcagaaagtgctgggagcgtctccgagggcgaggagatggacactgcagaaatcgcccggcaggtcaaagagcagctgattaagcacaatatcggacaacgtattttcggacattatgtgttgggactgtctcaagggtccgtgagcgagattctggcccggcccaagccatggaataaactgactgttcgtggcaaggagccatttcacaagatgaaacagttcctctccgatgagcagaacatcctggccctccgtagcatccaaggcagacaaagagcagagccggcccagccttcctccgcatccggcagcgggaactctgatgacgccatccgctccatcctgcagcaagcccgccgggagatggaggcccagcaggctgccctcgaccctgccttaaagcaggcaccactgtcccagagtgacatcaccatcctcacccccaagcttctgtccacctcgcccatgcccaccgtgtccagctacccacctctcgccatctccctgaagaagccctccgcagctcctgaggccggtgcctctgctctgccgaaccccccggccctcaaaaaggaggcccaggacgcccccgggctggacccccagggagcagccgattgtgcacaaggggtcctgagacaggtgaaaaatgaggtgggccgcagcggtgcctggaaggaccactggtggagcgcggtgcagccggagagaagaaatgccgcctcctccgaggaggccaaggccgaagaaacgggcggcgggaaagagaagggcagcggtggcagcggaggtggcagccagcctcgggccgagcgcagtcagctccagggaccctcgtcgtcagagtactggaaggagtggcccagcgctgagtccccatactcccagagctcagagctgagtctgaccggggccagccgcagcgagacaccacagaacagccccctgccatcctccccgatcgtgcccatgtccaagcccaccaagccctcggtccccccgctgacccccgagcagtacgaggtctacatgtaccaggaggtggacaccatcgagctcacccggcaggttaaggaaaagctggccaagaacggcatctgccagagaatcttcggggagaaggtgctgggcctgtcccagggcagcgtcagcgacatgctgtcccgaccgaagccatggagcaagctgacgcagaaaggccgagaacccttcatccggatgcagctctggctgaacggcgagctaggccagggtgttctacccgtccagggccagcagcaagggccagtcctccactccgtgacatcgctccaggacccgctgcagcagggctgtgtgagctcagaaagcactccaaagacctccgccagctgcagccctgcccctgagtccccgatgagttccagtgagtcggtgaagagcctgaccgagctggtccagcagccctgtccccccatcgaggcgagcaaggacagcaagccaccagagcccagtgacccgccagcatccgactcccagcccacaaccccgctgcctctctccggacactcggccctcagcatccaagaattagtagccatgtccccggagctggacacctacggcataaccaagcgggtgaaggaggtgctgacggacaacaacctcggccagcgcttatttggggagaccatcttagggctcacccaaggctctgtctctgacctccttgcccgccccaaaccctggcataagctcagtctgaaaggacgagagcccttcgtccggatgcagctgtggctgaacgaccccaacaatgtggagaagctgatggacatgaaacggatggagaagaaagcctacatgaagcggcggcacagctcagtcagtgacagccagccctgcgaaccgccctctgtcggcaccgagtacagccagggcgccagcccccagccccagcaccagctgaagaaaccccgggtggtgctggctccggaggagaaggaggcgctgaaacgagcgtatcagcaaaagccatacccgtcaccaaaaaccatcgaagacctcgccacccagctcaacctgaaaaccagcaccgtcatcaactggttccacaactacaggtctcggatccgcagagaactgttcattgaggaaattcaggccgggagtcagggccaggcgggcgccagcgactcaccctcggcccgcagcggccgggcggcgcccagctcggagggcgacagctgcgacggcgtggaggccactgagggcccaggcagcgccgacaccgaggagcccaagtctcagggagaggccgagcgggaggaggtgccgcggccggcggagcagacggagccgccgccctcggggaccccgggcccggacgacgcccgcgacgacgaccacgagggaggccccgtggaaggcccggggcccctgcccagccccgcctccgcgaccgccaccgccgcgcccgcggcccccgaggacgccgctacctcagccgccgccgcgccgggggagggccccgcggccccgagctccgcgccgccgcccagcaacagcagcagcagcagcgccccccgcaggcccagctcgctgcagagccttttcggcctccccgaggccgcgggcgcccgggactcgcgcgacaaccccctgcgcaagaagaaggccgcgaacttgaacagcatcatccaccgcctggagaaggccgccagccgggaggaacctatcgaatgggagttctga

SEQ ID NO: 306725 - DNA, 4212 bp, Artificial Sequence
  derived and/or modified sequence
atgctgtgcgtggccggcgccagactgaagagagagctggacgccaccgccaccgtgctggccaacagacaggacgagagcgagcagagcagaaagagactgatcgagcagagcagagagttcaagaagaacacccccgaggacctgagaaagcaggtggcccccctgctgaagagcttccagggcgagatcgacgccctgagcaagagaagcaaggaggccgaggccgccttcctgaacgtgtacaagagactgatcgacgtgcccgaccccgtgcccgccctggacctgggccagcagctgcagctgaaggtgcagagactgcacgacatcgagaccgagaaccagaagctgagagagaccctggaggagtacaacaaggagttcgccgaggtgaagaaccaggaggtgaccatcaaggccctgaaggagaagatcagagagtacgagcagaccctgaagaaccaggccgagaccatcgccctggagaaggagcagaagctgcagaacgacttcgccgagaaggagagaaagctgcaggagacccagatgagcaccaccagcaagctggaggaggccgagcacaaggtgcagagcctgcagaccgccctggagaagaccagaaccgagctgttcgacctgaagaccaagtacgacgaggagaccaccgccaaggccgacgagatcgagatgatcatgaccgacctggagagagccaaccagagagccgaggtggcccagagagaggccgagaccctgagagagcagctgagcagcgccaaccacagcctgcagctggccagccagatccagaaggcccccgacgtggagcaggccatcgaggtgctgaccagaagcagcctggaggtggagctggccgccaaggagagagagatcgcccagctggtggaggacgtgcagagactgcaggccagcctgaccaagctgagagagaacagcgccagccagatcagccagctggagcagcagctgagcgccaagaacagcaccctgaagcagctggaggagaagctgaagggccaggccgactacgaggaggtgaagaaggagctgaacatcctgaagagcatggagttcgcccccagcgagggcgccggcacccaggacgccgccaagcccctggaggtgctgctgctggagaagaacagaagcctgcagagcgagaacgccgccctgagaatcagcaacagcgacctgagcggcccctacagcaccaacagcatcagcagccagagccccctgcagcagagccccgacgtgaacggcatggcccccagccccagccagagcgagagcgccggcagcgtgagcgagggcgaggagatggacaccgccgagatcgccagacaggtgaaggagcagctgatcaagcacaacatcggccagagaatcttcggccactacgtgctgggcctgagccagggcagcgtgagcgagatcctggccagacccaagccctggaacaagctgaccgtgagaggcaaggagcccttccacaagatgaagcagttcctgagcgacgagcagaacatcctggccctgagaagcatccagggcagacagagagagaaccccggccagagcctgaacagactgttccaggaggtgcccaagagaagaaacggcagcgagggcaacatcaccaccagaatcagagccagcgagaccggcagcgacgaggccatcaagagcatcctggagcaggccaagagagagctgcaggtgcagaagaccgccgagcccgcccagcccagcagcgccagcggcagcggcaacagcgacgacgccatcagaagcatcctgcagcaggccagaagagagatggaggcccagcaggccgccctggaccccgccctgaagcaggcccccctgagccagagcgacatcaccatcctgacccccaagctgctgagcaccagccccatgcccaccgtgagcagctacccccccctggccatcagcctgaagaagcccagcgccgcccccgaggccggcgccagcgccctgcccaacccccccgccctgaagaaggaggcccaggacgcccccggcctggacccccagggcgccgccgactgcgcccagggcgtgctgagacaggtgaagaacgaggtgggcagaagcggcgcctggaaggaccactggtggagcgccgtgcagcccgagagaagaaacgccgccagcagcgaggaggccaaggccgaggagaccggcggcggcaaggagaagggcagcggcggcagcggcggcggcagccagcccagagccgagagaagccagctgcagggccccagcagcagcgagtactggaaggagtggcccagcgccgagagcccctacagccagagcagcgagctgagcctgaccggcgccagcagaagcgagaccccccagaacagccccctgcccagcagccccatcgtgcccatgagcaagcccaccaagcccagcgtgccccccctgacccccgagcagtacgaggtgtacatgtaccaggaggtggacaccatcgagctgaccagacaggtgaaggagaagctggccaagaacggcatctgccagagaatcttcggcgagaaggtgctgggcctgagccagggcagcgtgagcgacatgctgagcagacccaagccctggagcaagctgacccagaagggcagagagcccttcatcagaatgcagctgtggctgaacggcgagctgggccagggcgtgctgcccgtgcagggccagcagcagggccccgtgctgcacagcgtgaccagcctgcaggaccccctgcagcagggctgcgtgagcagcgagagcacccccaagaccagcgccagctgcagccccgcccccgagagccccatgagcagcagcgagagcgtgaagagcctgaccgagctggtgcagcagccctgcccccccatcgaggccagcaaggacagcaagccccccgagcccagcgacccccccgccagcgacagccagcccaccacccccctgcccctgagcggccacagcgccctgagcatccaggagctggtggccatgagccccgagctggacacctacggcatcaccaagagagtgaaggaggtgctgaccgacaacaacctgggccagagactgttcggcgagaccatcctgggcctgacccagggcagcgtgagcgacctgctggccagacccaagccctggcacaagctgagcctgaagggcagagagcccttcgtgagaatgcagctgtggctgaacgaccccaacaacgtggagaagctgatggacatgaagagaatggagaagaaggcctacatgaagagaagacacagcagcgtgagcgacagccagccctgcgagccccccagcgtgggcaccgagtacagccagggcgccagcccccagccccagcaccagctgaagaagcccagagtggtgctggcccccgaggagaaggaggccctgaagagagcctaccagcagaagccctaccccagccccaagaccatcgaggacctggccacccagctgaacctgaagaccagcaccgtgatcaactggttccacaactacagaagcagaatcagaagagagctgttcatcgaggagatccaggccggcagccagggccaggccggcgccagcgacagccccagcgccagaagcggcagagccgcccccagcagcgagggcgacagctgcgacggcgtggaggccaccgagggccccggcagcgccgacaccgaggagcccaagagccagggcgaggccgagagagaggaggtgcccagacccgccgagcagaccgagcccccccccagcggcacccccggccccgacgacgccagagacgacgaccacgagggcggccccgtggagggccccggccccctgcccagccccgccagcgccaccgccaccgccgcccccgccgcccccgaggacgccgccaccagcgccgccgccgcccccggcgagggccccgccgcccccagcagcgcccccccccccagcaacagcagcagcagcagcgcccccagaagacccagcagcctgcagagcctgttcggcctgcccgaggccgccggcgccagagacagcagagacaaccccctgagaaagaagaaggccgccaacctgaacagcatcatccacagactggagaaggccgccagcagagaggagcccatcgagtgggagttctag

SEQ ID NO: 306726 - DNA, 4044 bp, Artificial Sequence
  derived and/or modified sequence
atgctgtgcgtggccggcgccagactgaagagagagctggacgccaccgccaccgtgctggccaacagacaggacgagagcgagcagagcagaaagagactgatcgagcagagcagagagttcaagaagaacacccccgaggacctgagaaagcaggtggcccccctgctgaagagcttccagggcgagatcgacgccctgagcaagagaagcaaggaggccgaggccgccttcctgaacgtgtacaagagactgatcgacgtgcccgaccccgtgcccgccctggacctgggccagcagctgcagctgaaggtgcagagactgcacgacatcgagaccgagaaccagaagctgagagagaccctggaggagtacaacaaggagttcgccgaggtgaagaaccaggaggtgaccatcaaggccctgaaggagaagatcagagagtacgagcagaccctgaagaaccaggccgagaccatcgccctggagaaggagcagaagctgcagaacgacttcgccgagaaggagagaaagctgcaggagacccagatgagcaccaccagcaagctggaggaggccgagcacaaggtgcagagcctgcagaccgccctggagaagaccagaaccgagctgttcgacctgaagaccaagtacgacgaggagaccaccgccaaggccgacgagatcgagatgatcatgaccgacctggagagagccaaccagagagccgaggtggcccagagagaggccgagaccctgagagagcagctgagcagcgccaaccacagcctgcagctggccagccagatccagaaggcccccgacgtggagcaggccatcgaggtgctgaccagaagcagcctggaggtggagctggccgccaaggagagagagatcgcccagctggtggaggacgtgcagagactgcaggccagcctgaccaagctgagagagaacagcgccagccagatcagccagctggagcagcagctgagcgccaagaacagcaccctgaagcagctggaggagaagctgaagggccaggccgactacgaggaggtgaagaaggagctgaacatcctgaagagcatggagttcgcccccagcgagggcgccggcacccaggacgccgccaagcccctggaggtgctgctgctggagaagaacagaagcctgcagagcgagaacgccgccctgagaatcagcaacagcgacctgagcggcccctacagcaccaacagcatcagcagccagagccccctgcagcagagccccgacgtgaacggcatggcccccagccccagccagagcgagagcgccggcagcgtgagcgagggcgaggagatggacaccgccgagatcgccagacaggtgaaggagcagctgatcaagcacaacatcggccagagaatcttcggccactacgtgctgggcctgagccagggcagcgtgagcgagatcctggccagacccaagccctggaacaagctgaccgtgagaggcaaggagcccttccacaagatgaagcagttcctgagcgacgagcagaacatcctggccctgagaagcatccagggcagacagagagccgagcccgcccagcccagcagcgccagcggcagcggcaacagcgacgacgccatcagaagcatcctgcagcaggccagaagagagatggaggcccagcaggccgccctggaccccgccctgaagcaggcccccctgagccagagcgacatcaccatcctgacccccaagctgctgagcaccagccccatgcccaccgtgagcagctacccccccctggccatcagcctgaagaagcccagcgccgcccccgaggccggcgccagcgccctgcccaacccccccgccctgaagaaggaggcccaggacgcccccggcctggacccccagggcgccgccgactgcgcccagggcgtgctgagacaggtgaagaacgaggtgggcagaagcggcgcctggaaggaccactggtggagcgccgtgcagcccgagagaagaaacgccgccagcagcgaggaggccaaggccgaggagaccggcggcggcaaggagaagggcagcggcggcagcggcggcggcagccagcccagagccgagagaagccagctgcagggccccagcagcagcgagtactggaaggagtggcccagcgccgagagcccctacagccagagcagcgagctgagcctgaccggcgccagcagaagcgagaccccccagaacagccccctgcccagcagccccatcgtgcccatgagcaagcccaccaagcccagcgtgccccccctgacccccgagcagtacgaggtgtacatgtaccaggaggtggacaccatcgagctgaccagacaggtgaaggagaagctggccaagaacggcatctgccagagaatcttcggcgagaaggtgctgggcctgagccagggcagcgtgagcgacatgctgagcagacccaagccctggagcaagctgacccagaagggcagagagcccttcatcagaatgcagctgtggctgaacggcgagctgggccagggcgtgctgcccgtgcagggccagcagcagggccccgtgctgcacagcgtgaccagcctgcaggaccccctgcagcagggctgcgtgagcagcgagagcacccccaagaccagcgccagctgcagccccgcccccgagagccccatgagcagcagcgagagcgtgaagagcctgaccgagctggtgcagcagccctgcccccccatcgaggccagcaaggacagcaagccccccgagcccagcgacccccccgccagcgacagccagcccaccacccccctgcccctgagcggccacagcgccctgagcatccaggagctggtggccatgagccccgagctggacacctacggcatcaccaagagagtgaaggaggtgctgaccgacaacaacctgggccagagactgttcggcgagaccatcctgggcctgacccagggcagcgtgagcgacctgctggccagacccaagccctggcacaagctgagcctgaagggcagagagcccttcgtgagaatgcagctgtggctgaacgaccccaacaacgtggagaagctgatggacatgaagagaatggagaagaaggcctacatgaagagaagacacagcagcgtgagcgacagccagccctgcgagccccccagcgtgggcaccgagtacagccagggcgccagcccccagccccagcaccagctgaagaagcccagagtggtgctggcccccgaggagaaggaggccctgaagagagcctaccagcagaagccctaccccagccccaagaccatcgaggacctggccacccagctgaacctgaagaccagcaccgtgatcaactggttccacaactacagaagcagaatcagaagagagctgttcatcgaggagatccaggccggcagccagggccaggccggcgccagcgacagccccagcgccagaagcggcagagccgcccccagcagcgagggcgacagctgcgacggcgtggaggccaccgagggccccggcagcgccgacaccgaggagcccaagagccagggcgaggccgagagagaggaggtgcccagacccgccgagcagaccgagcccccccccagcggcacccccggccccgacgacgccagagacgacgaccacgagggcggccccgtggagggccccggccccctgcccagccccgccagcgccaccgccaccgccgcccccgccgcccccgaggacgccgccaccagcgccgccgccgcccccggcgagggccccgccgcccccagcagcgcccccccccccagcaacagcagcagcagcagcgcccccagaagacccagcagcctgcagagcctgttcggcctgcccgaggccgccggcgccagagacagcagagacaaccccctgagaaagaagaaggccgccaacctgaacagcatcatccacagactggagaaggccgccagcagagaggagcccatcgagtgggagttctag

SEQ ID NO: 306727 - DNA, 4212 bp, Artificial Sequence
  derived and/or modified sequence
atgctttgcgtggctggggcgagattgaagcgtgaactcgatgccactgccactgttctggccaaccgtcaggatgagagcgaacagagccggaaacggttgatcgagcagagtcgtgaatttaaaaaaaatacccccgaagacctgcgaaaacaggtggcccctctcttaaaatccttccagggggaaattgacgccctgagtaagcgatcgaaagaggccgaggccgcattcctgaatgtctacaaacgtctgatagacgtccccgaccccgttccggccttggacctcgggcaacagcttcagttgaaagtgcaaagacttcatgacatagaaaccgaaaatcagaagttacgtgagactctggaagagtacaacaaggagttcgccgaagtgaagaaccaagaagtaacaatcaaagcccttaaggagaagatacgcgaatatgagcagactctgaaaaatcaggccgagaccattgccctggagaaagagcagaagttgcaaaatgatttcgcggaaaaggagcgtaagttgcaggaaacccagatgtcgaccacctccaagctggaggaggccgaacacaaggttcagtctctgcagacagctctcgagaaaactagaacagaactgtttgatctaaaaacgaagtacgacgaggagaccacggcaaaagcagatgagatcgagatgattatgaccgacttagagagggcaaatcagcgggccgaagtggcgcagcgcgaggccgagacgttacgcgagcagttgagcagcgccaatcactcccttcaactggctagccaaatccaaaaagccccagacgtcgaacaagcaattgaggttctgacaaggagcagcctcgaagtagagctcgcagcgaaagaacgcgaaatcgcacagctggtggaggacgtgcaacggctccaggccagcctgacgaagctccgagagaatagcgcatctcaaattagccaactggaacaacagctgtcggccaagaatagcacactgaagcagcttgaagagaagttgaaaggccaggcggattacgaagaagtgaagaaagaattaaacattctgaaatctatggagtttgctccttctgagggagctggaacacaggacgctgccaagccactggaagtcctactgctcgaaaagaatcgcagtttgcagtctgagaacgctgccttgagaattagcaactcagacctctccgggccatactcaaccaattccattagcagtcagtcacccctccaacagtcccccgacgtgaatggcatggcgccatccccaagccaatccgagagtgctggatcggtctctgagggggaagaaatggacaccgccgaaatcgcgcgacaagttaaggaacagctaatcaagcacaatatcgggcaaagaatctttggccactacgtgctgggcttgtcccaggggtccgtgtccgagatcctggctcgccccaaaccttggaataaactgacagtgaggggcaaagagccgtttcataaaatgaaacaattcctgtccgatgaacagaacattctggctctaaggagcattcaggggaggcagcgcgaaaatcctggtcaatcactgaacaggctattccaggaggtcccaaaaaggcgaaacggctctgaagggaacattacgacccgcatacgtgccagtgaaacaggatcggacgaagccattaaaagtattctggagcaggccaaacgagaactacaggtgcagaagaccgccgaacccgcgcaaccaagtagcgcctctggttctggaaactctgacgatgccatccgcagtatactacagcaggccagaagggagatggaagctcagcaggctgccttggaccccgcactcaaacaagctccacttagccaatccgacataacaatcttgactcctaagctactcagcacttcccctatgccaaccgtatcttcttacccacccctggccatatcattaaaaaaaccatctgccgctcccgaggccggtgcttccgcactgcccaatccaccagctctcaaaaaggaagcgcaggatgctcctggactggacccccagggcgccgctgattgcgctcagggggtgctgagacaggtgaagaatgaggtgggcaggtctggtgcctggaaggaccactggtggtcagccgtgcaaccagagcgaagaaatgcagccagttcagaggaagccaaggccgaggaaaccgggggaggcaaagaaaaaggcagtggtggttctggaggcgggagccagccgagggccgagcgctcccagctgcagggccccagctcatctgagtactggaaggagtggccatccgcagaatcgccttattctcagtccagtgaattgtccctgacgggcgcatcccgttctgaaacacctcagaatagtccgcttccaagcagtcctattgtgcccatgtctaagccgactaaaccttctgtgccacctctaaccccagaacagtacgaggtctatatgtaccaagaggtggacaccattgaacttacacggcaggtgaaggaaaagcttgcaaaaaacgggatctgccaaagaatcttcggagagaaagtgctcggcctttcacaggggtcagtgagcgatatgctttctaggcccaaaccctggagtaaactgacacagaaaggacgcgagcccttcataagaatgcaactgtggctcaatggagagctcggacaaggagtgctcccggtccaaggacaacaacaagggcccgtgttacactccgttacctccctacaggaccccctccagcaggggtgtgtctcctcagagagcactccaaagacctctgcttcctgttcgcccgctccagaatcccctatgagcagtagcgaatctgtgaagtctctcaccgaactagtgcagcagccatgtccacccattgaggcatctaaagatagcaaaccccctgaacctagtgacccccccgcgtccgactctcaacctacgactccactgccattgagcggccacagcgctcttagcatccaggaactcgtcgccatgtcgccagaactcgatacctacggaatcaccaaacgcgtcaaagaagtgctgacagataacaatctcgggcagcgccttttcggcgagacaattctaggactcactcaggggtctgtgagcgatctgctggcccgccccaaaccatggcacaaactcagccttaaaggacgagagccctttgttagaatgcagctatggctcaacgacccgaacaacgtggagaagctgatggatatgaaaaggatggaaaagaaagcctacatgaagaggcgtcacagctctgtcagtgacagccagccatgtgagcccccctccgtaggaacggaatattcccagggagcctcccctcagccccagcaccagcttaagaaaccccgggtcgtgcttgctccagaagaaaaagaagccctgaagcgcgcatatcagcagaagccatatccttccccaaagacgatcgaggacctggccactcagcttaatcttaagactagcacagtgattaattggtttcataattaccggagcaggatccggcgggagttatttatcgaggaaatacaggcgggctctcagggccaggctggagcttccgactccccttctgctagatccggcagggcagcaccaagtagtgagggcgactcatgcgacggcgtagaagctaccgagggccctggaagcgccgataccgaagaacccaagtcacagggagaggcagagagggaggaggtacccagaccggcagaacagacggagccccccccctccggaactccggggcccgatgatgctagagacgacgatcacgaaggagggcctgtagaaggacccggccctttaccttctcctgcctcggccactgccaccgcggccccagccgcacccgaggacgcagctactagtgccgcggcagcgcccggcgaaggtccggctgcccccagctccgctcctcccccatcaaattctagctccagctctgctccccgaagaccttcttcgttgcaaagtctgttcggtttaccagaagcggctggtgccagagactcccgtgacaacccactcagaaaaaaaaaggcggcaaatcttaatagtattatccacagactggagaaggccgcatccagggaggagcccatcgaatgggaattctag

SEQ ID NO: 306728 - DNA, 4044 bp, Artificial Sequence
  derived and/or modified sequence
atgttatgcgtcgccggggcccgccttaagagggaactcgatgccacagcgacggtgctggcaaacaggcaggacgaaagcgagcaatcccggaaaagactcatcgagcagtccagggagttcaaaaagaacacaccagaggacctcaggaaacaggtggcaccactcttgaaatcttttcaaggggagattgacgccctctcgaagcggtcaaaagaagccgaagctgcgtttcttaacgtgtataaaaggttaatagacgtgcctgatccagttcccgccctggacctgggacagcagctacaactcaaggtccagcgccttcatgatatcgagacggagaaccaaaagctacgggagacactcgaagagtacaataaagagttcgctgaggttaagaatcaggaggtgacaataaaagcccttaaggaaaaaattcgtgaatacgagcagaccctcaagaatcaggccgagactatagcactggaaaaagagcaaaagttgcaaaacgatttcgcagagaaggaaagaaagttacaggaaacgcaaatgagcaccacttccaagctagaagaggctgagcataaagtgcagtcccttcaaaccgcactggagaaaacccgcaccgagctgttcgacctcaaaaccaagtacgacgaggagaccactgcaaaggccgatgagatcgagatgatcatgacagacctggaaagagcaaatcaaagggccgaagtcgctcagcgggaagcagaaactctgcgggagcagttgtctagcgctaaccattccttacagttagcctctcagatccaaaaggctcccgacgtggaacaggcgatcgaggtgctgactcggagctcactggaagtggagctggcagccaaagagagagaaatagcacagctcgttgaagatgtccagcggctgcaagccagcctgacaaagctccgcgaaaatagtgcttcccagatctcgcagcttgagcaacagctttcagcaaagaattctactttgaagcagctggaagaaaagctcaaaggccaggcagactatgaggaggtgaagaaagaactgaatattttgaaatctatggagtttgccccttccgagggggccggcactcaggatgccgcgaagccattagaggtactgttgctcgagaagaatcgatcacttcagtctgaaaatgccgcccttcggatcagtaactccgacctgagcggtccatacagcacgaattccatcagtagccagagcccactgcagcagtcacccgacgtgaacgggatggccccttcacctagccaaagtgagtctgccggctccgtatcagagggagaagaaatggacacagctgaaatagcccgtcaggttaaggagcagcttattaagcataacatcggacaaaggatttttgggcactacgtgcttggcctgagccaaggaagtgtgtcggagattctggctcgtcctaaaccatggaacaagttaactgtgcgaggtaaagaaccttttcacaagatgaagcagtttttatcagacgaacagaatatccttgcactgaggtctatccaggggagacagcgagctgagccggctcagccaagctcagcaagcggaagcgggaattctgacgatgcaatccgttctatattgcaacaggcgaggcgtgagatggaagcccaacaggcagccctggacccagctctcaaacaagccccgctgtctcaaagcgacatcacaatcctgaccccaaaactgctcagtacttcaccgatgccgaccgtcagcagctacccacccctggctatctctctcaagaagccaagcgccgcccccgaagcgggggcctcagccctgcctaatcccccagccttgaagaaagaggcacaagacgcaccgggattggacccacagggagcggccgattgtgcacagggggttctgaggcaggtgaaaaacgaagtggggagaagcggtgcctggaaagatcactggtggtcagcggttcaaccagagaggcgcaacgccgcatcatccgaagaggcaaaagcagaggagaccgggggcggcaaagaaaaagggagtggcggctccgggggcggatcccagccacgggcggagcggagccagctccagggaccatctagttcagagtactggaaagagtggccaagtgccgaaagtccttactcacagtccagcgaactcagtttaactggggctagcagaagcgaaaccccccagaacagccctctgccttccagccctattgtaccaatgtccaagcctaccaagccctcagtcccgcctttgaccccagaacaatacgaagtgtatatgtatcaggaggtcgacactatcgagttaacaaggcaggtcaaggaaaaactggccaagaacgggatctgccagagaattttcggagaaaaggtcttgggactcagtcagggcagtgtgagcgatatgttgtcccgtccaaagccctggtctaaactgacccagaaggggcgggaacccttcatcaggatgcagctgtggctaaacggagagctagggcagggcgtgctgcctgtgcaggggcagcagcaaggcccagtcctccactcagtgacgtccttgcaggatcctctgcagcagggttgtgtctcctctgaatcaacacctaaaacttcagcctcttgttcaccagctcccgaatctccaatgtcttcatccgagagcgtcaagtctctgaccgagttagtccagcagccttgtccgcctattgaggcttccaaggatagtaagcctcccgagcccagcgatcctcccgcatcagactcgcagcctacaacaccacttcccctgagtggacattccgctctcagtattcaagagctcgttgcaatgtctcccgagctagacacctatgggattacaaaacgagtcaaagaggttctcacggataacaatttgggtcagcgtttatttggtgaaaccatcctgggattaactcaaggatctgtctccgatctcttggcacggcctaaaccttggcacaagctctcactcaaagggagggaaccatttgtgaggatgcagctctggctcaatgaccccaataacgtggaaaagcttatggacatgaagaggatggaaaaaaaagcctacatgaagcggcggcatagttccgtgagcgactctcaaccatgcgagccccctagcgtggggactgaatactcccagggagcttccccacagccccagcaccagctgaaaaaacctagggtggtactcgcccctgaagagaaagaggccctgaaacgagcctaccaacaaaaaccataccctagtcccaagacaattgaggacctagctacccagctgaacttgaaaacatccacggtaattaattggttccataactatcgcagccggattcgaagagaactatttattgaggagatacaggcaggttcccagggccaggctggggcctccgactctcctagcgcccggtctgggcgggctgctcctagctccgagggtgactcatgcgacggtgtggaggccaccgagggcccagggagcgctgatacagaggaaccaaagagccagggcgaggctgaacgcgaagaggtacctaggcccgcggaacaaactgagccaccaccctccgggacccctggccccgacgacgccagggatgatgaccatgaaggcgggcccgtggaaggccctggtcccttgccgagtcccgcatcagctacggctactgcggctccagctgcacccgaggacgccgcaacgtctgccgcagccgctcctggggagggtcccgcggctccaagcagtgctccaccaccctcaaattcgtcctcttcctctgcgccccggcggccctcctccttgcagtccctgtttggattacccgaagcggctggggcccgggactcaagagacaacccactccggaaaaagaaggccgcgaatttgaacagtatcatccacaggctggagaaggcagccagcagagaagagcccatcgagtgggagttctag

SEQ ID NO: 306729 - DNA, 4212 bp, Artificial Sequence
  derived and/or modified sequence
atgctgtgtgtggccggggcccggctgaagcgggagctggatgccacagccaccgtgctggccaaccggcaggatgaaagtgagcagagcaggaagaggctgattgagcagagccgggagttcaagaagaacaccccagaggacctgaggaagcaggtggcccccctgctgaagagcttccagggcgagattgatgccctgagcaagaggagcaaggaggccgaggccgccttcctgaatgtgtacaagaggctgattgatgtgcctgaccctgtgcctgccctggacctgggccagcagctgcagctgaaggtgcagaggctgcatgacattgaaacagagaaccagaagctgcgggagaccctggaggagtacaacaaggagtttgctgaggtgaagaaccaggaggtgaccatcaaggccctgaaggagaagatccgggagtatgagcagaccctgaagaaccaggccgagaccatcgccctggagaaggagcagaagctgcagaatgactttgctgagaaggagaggaagctgcaggagacccagatgagcaccaccagcaagctggaggaggccgagcacaaggtgcagagcctgcagacagccctggagaagaccaggacagagctgtttgacctgaagaccaagtatgatgaggagaccacagccaaggcagatgaaattgagatgatcatgacagacctggagcgggccaaccagagagctgaggtggcccagcgggaggccgagaccctgcgggagcagctgagcagcgccaaccacagcctgcagctggccagccagatccagaaggccccagatgtggagcaggccatcgaggtgctgaccaggagcagcctggaggtggagctggccgccaaggagcgggagatcgcccagctggtggaggatgtgcagaggctgcaggccagcctgaccaagctgcgggagaacagcgccagccagatcagccagctggagcagcagctgagcgccaagaacagcaccctgaagcagctggaggagaagctgaagggccaggccgactatgaggaggtgaagaaggagctgaacatcctgaagtccatggagtttgcccccagcgagggcgccggcacccaggatgctgccaagcccctggaggtgctgctgctggagaagaacagaagcctgcagagtgaaaatgctgccctgcgcatcagcaacagcgacctgagcggcccctacagcaccaacagcatcagcagccagagccccctgcagcagagcccagatgtgaatggcatggcccccagccccagccagagcgagagcgctggctctgtgtctgagggggaggagatggacacagctgagatcgcccggcaggtgaaggagcagctgatcaagcacaacatcggccagaggatcttcggccactacgtgctgggcctgagccagggctctgtgtctgagatcctggcccggcccaagccctggaacaagctgactgtgcggggcaaggagcccttccacaagatgaagcagttcctgagtgatgagcagaacatcctggccctgcggagcatccagggccggcagcgggagaaccctggccagagcctgaacagactcttccaggaggtgcccaagagaagaaatggcagcgagggcaacatcaccacccgcatccgggccagcgagactggaagtgatgaggccatcaagagcatcctggagcaggccaagcgggagctgcaggtgcagaagacagctgagcccgcccagcccagcagcgccagcggcagcggcaacagtgatgatgccatccgcagcatcctgcagcaggcccggcgggagatggaggcccagcaggccgccctggaccctgccctgaagcaggcccccctgagccagagcgacatcaccatcctgacccccaagctgctgagcaccagccccatgcccaccgtgagcagctacccacccctggccatcagcctgaagaagcccagcgctgcccctgaggccggggccagcgccctgcccaaccccccagccctgaagaaggaggcccaggatgcccctggcctggacccccagggcgctgctgactgtgcccagggcgtgctgcggcaggtgaagaatgaggtgggccgcagcggggcctggaaggaccactggtggagcgctgtgcagcctgagaggagaaatgctgccagcagcgaggaggccaaggccgaggagaccggcggcggcaaggagaagggcagcggcggcagcggcggcggcagccagcccagggctgagaggagccagctgcagggccccagcagcagcgagtactggaaggagtggcccagcgctgagagcccctacagccagagcagcgagctgagcctgaccggggccagccgctctgagaccccccagaacagccccctgcccagcagccccatcgtgcccatgagcaagcccaccaagcccagcgtgccccccctgaccccagagcagtatgaggtgtacatgtaccaggaggtggacaccatcgagctgacccggcaggtgaaggagaagctggccaagaatggcatctgccagaggatctttggagagaaggtgctgggcctgagccagggctctgtgtctgacatgctgagccggcccaagccctggagcaagctgacccagaagggccgggagcccttcatccgcatgcagctgtggctgaatggagagctgggccagggcgtgctgcctgtgcagggccagcagcagggccctgtgctgcacagcgtgaccagcctgcaggaccccctgcagcagggctgtgtgtcctctgagagcacccccaagaccagcgccagctgcagccctgcccctgagagccccatgagcagcagcgagagcgtgaagagcctgacagagctggtgcagcagccctgcccccccatcgaggccagcaaggacagcaagcccccagagcccagcgaccccccagccagtgacagccagcccaccacccccctgcccctgagcggccacagcgccctgagcatccaggagctggtggccatgagccctgagctggacacctacggcatcaccaagagggtgaaggaggtgctgacagacaacaacctgggccagaggctgtttggagagaccatcctgggcctgacccagggctctgtgtctgacctgctggcccggcccaagccctggcacaagctgagcctgaagggccgggagccctttgtgaggatgcagctgtggctgaatgaccccaacaacgtggagaagctgatggacatgaagaggatggagaagaaggcctacatgaagaggaggcacagctctgtgtctgacagccagccctgtgagcccccatctgtgggcacagagtacagccagggcgccagcccccagccccagcaccagctgaagaagccccgggtggtgctggcccctgaggagaaggaggccctgaagagggcctaccagcagaagccctaccccagccccaagaccatcgaggacctggccacccagctgaacctgaagaccagcaccgtcatcaactggttccacaactaccgcagccgcatccggcgggagctgttcatcgaggagatccaggccggcagccagggccaggccggggccagtgacagccccagcgcccggagcggccgggccgcccccagcagcgagggggacagctgtgatggagtggaggccacagagggccctggcagcgctgacacagaggagcccaagagccagggcgaggccgagcgggaggaggtgcccaggcctgctgagcagacagagcccccacccagcggcaccccaggcccagatgatgccagagatgatgaccatgaaggaggccctgtggagggccctggccccctgcccagccctgccagcgccacagccacagctgccccagctgccccagaagatgctgccaccagcgctgctgctgcccctggagagggccctgctgcccccagcagcgcccccccacccagcaacagcagcagcagcagcgccccccggcggcccagcagcctgcagagcctgtttggcctgcctgaggccgccggggcccgggacagccgggacaaccccctgaggaagaagaaggccgccaacctgaacagcatcatccaccggctggagaaggccgccagccgggaggagcccatcgagtgggagttctag

SEQ ID NO: 306730 - DNA, 4044 bp, Artificial Sequence
  derived and/or modified sequence
atgctgtgtgtggccggggcccggctgaagcgggagctggatgccacagccaccgtgctggccaaccggcaggatgaaagtgagcagagcaggaagaggctgattgagcagagccgggagttcaagaagaacaccccagaggacctgaggaagcaggtggcccccctgctgaagagcttccagggcgagattgatgccctgagcaagaggagcaaggaggccgaggccgccttcctgaatgtgtacaagaggctgattgatgtgcctgaccctgtgcctgccctggacctgggccagcagctgcagctgaaggtgcagaggctgcatgacattgaaacagagaaccagaagctgcgggagaccctggaggagtacaacaaggagtttgctgaggtgaagaaccaggaggtgaccatcaaggccctgaaggagaagatccgggagtatgagcagaccctgaagaaccaggccgagaccatcgccctggagaaggagcagaagctgcagaatgactttgctgagaaggagaggaagctgcaggagacccagatgagcaccaccagcaagctggaggaggccgagcacaaggtgcagagcctgcagacagccctggagaagaccaggacagagctgtttgacctgaagaccaagtatgatgaggagaccacagccaaggcagatgaaattgagatgatcatgacagacctggagcgggccaaccagagagctgaggtggcccagcgggaggccgagaccctgcgggagcagctgagcagcgccaaccacagcctgcagctggccagccagatccagaaggccccagatgtggagcaggccatcgaggtgctgaccaggagcagcctggaggtggagctggccgccaaggagcgggagatcgcccagctggtggaggatgtgcagaggctgcaggccagcctgaccaagctgcgggagaacagcgccagccagatcagccagctggagcagcagctgagcgccaagaacagcaccctgaagcagctggaggagaagctgaagggccaggccgactatgaggaggtgaagaaggagctgaacatcctgaagtccatggagtttgcccccagcgagggcgccggcacccaggatgctgccaagcccctggaggtgctgctgctggagaagaacagaagcctgcagagtgaaaatgctgccctgcgcatcagcaacagcgacctgagcggcccctacagcaccaacagcatcagcagccagagccccctgcagcagagcccagatgtgaatggcatggcccccagccccagccagagcgagagcgctggctctgtgtctgagggggaggagatggacacagctgagatcgcccggcaggtgaaggagcagctgatcaagcacaacatcggccagaggatcttcggccactacgtgctgggcctgagccagggctctgtgtctgagatcctggcccggcccaagccctggaacaagctgactgtgcggggcaaggagcccttccacaagatgaagcagttcctgagtgatgagcagaacatcctggccctgcggagcatccagggccggcagagagctgagcccgcccagcccagcagcgccagcggcagcggcaacagtgatgatgccatccgcagcatcctgcagcaggcccggcgggagatggaggcccagcaggccgccctggaccctgccctgaagcaggcccccctgagccagagcgacatcaccatcctgacccccaagctgctgagcaccagccccatgcccaccgtgagcagctacccacccctggccatcagcctgaagaagcccagcgctgcccctgaggccggggccagcgccctgcccaaccccccagccctgaagaaggaggcccaggatgcccctggcctggacccccagggcgctgctgactgtgcccagggcgtgctgcggcaggtgaagaatgaggtgggccgcagcggggcctggaaggaccactggtggagcgctgtgcagcctgagaggagaaatgctgccagcagcgaggaggccaaggccgaggagaccggcggcggcaaggagaagggcagcggcggcagcggcggcggcagccagcccagggctgagaggagccagctgcagggccccagcagcagcgagtactggaaggagtggcccagcgctgagagcccctacagccagagcagcgagctgagcctgaccggggccagccgctctgagaccccccagaacagccccctgcccagcagccccatcgtgcccatgagcaagcccaccaagcccagcgtgccccccctgaccccagagcagtatgaggtgtacatgtaccaggaggtggacaccatcgagctgacccggcaggtgaaggagaagctggccaagaatggcatctgccagaggatctttggagagaaggtgctgggcctgagccagggctctgtgtctgacatgctgagccggcccaagccctggagcaagctgacccagaagggccgggagcccttcatccgcatgcagctgtggctgaatggagagctgggccagggcgtgctgcctgtgcagggccagcagcagggccctgtgctgcacagcgtgaccagcctgcaggaccccctgcagcagggctgtgtgtcctctgagagcacccccaagaccagcgccagctgcagccctgcccctgagagccccatgagcagcagcgagagcgtgaagagcctgacagagctggtgcagcagccctgcccccccatcgaggccagcaaggacagcaagcccccagagcccagcgaccccccagccagtgacagccagcccaccacccccctgcccctgagcggccacagcgccctgagcatccaggagctggtggccatgagccctgagctggacacctacggcatcaccaagagggtgaaggaggtgctgacagacaacaacctgggccagaggctgtttggagagaccatcctgggcctgacccagggctctgtgtctgacctgctggcccggcccaagccctggcacaagctgagcctgaagggccgggagccctttgtgaggatgcagctgtggctgaatgaccccaacaacgtggagaagctgatggacatgaagaggatggagaagaaggcctacatgaagaggaggcacagctctgtgtctgacagccagccctgtgagcccccatctgtgggcacagagtacagccagggcgccagcccccagccccagcaccagctgaagaagccccgggtggtgctggcccctgaggagaaggaggccctgaagagggcctaccagcagaagccctaccccagccccaagaccatcgaggacctggccacccagctgaacctgaagaccagcaccgtcatcaactggttccacaactaccgcagccgcatccggcgggagctgttcatcgaggagatccaggccggcagccagggccaggccggggccagtgacagccccagcgcccggagcggccgggccgcccccagcagcgagggggacagctgtgatggagtggaggccacagagggccctggcagcgctgacacagaggagcccaagagccagggcgaggccgagcgggaggaggtgcccaggcctgctgagcagacagagcccccacccagcggcaccccaggcccagatgatgccagagatgatgaccatgaaggaggccctgtggagggccctggccccctgcccagccctgccagcgccacagccacagctgccccagctgccccagaagatgctgccaccagcgctgctgctgcccctggagagggccctgctgcccccagcagcgcccccccacccagcaacagcagcagcagcagcgccccccggcggcccagcagcctgcagagcctgtttggcctgcctgaggccgccggggcccgggacagccgggacaaccccctgaggaagaagaaggccgccaacctgaacagcatcatccaccggctggagaaggccgccagccgggaggagcccatcgagtgggagttctag

SEQ ID NO: 306731 - DNA, 4212 bp, Artificial Sequence
  derived and/or modified sequence
atgctgtgcgtggccggcgcccggctgaagcgggagctggacgccaccgccaccgtcctggctaaccgacaggacgagtcagagcagagccgaaaaagacttatcgaacagtcccgggagttcaagaagaacacccctgaagacctgagaaaacaggtggcacccctcctgaagagctttcagggagagatcgatgctctgtctaagcggtccaaagaagccgaggcggcgtttttaaatgtctataagcgtttaatagatgtcccagaccccgtgcctgctcttgatctgggccagcaacttcaactgaaagtgcagagactccacgatatcgagaccgagaatcagaaactcagagaaacacttgaggagtacaacaaagagttcgccgaggtaaagaaccaagaggttactatcaaggcactcaaggagaagattagagaatacgaacagacactgaagaatcaagccgaaacaatcgccctcgagaaggagcaaaaactgcagaacgattttgcggagaaagaacgtaagctgcaagagacccagatgtctacaacgtctaagctagaggaggccgaacataaggtgcagagcctgcagacagccctggagaagactagaaccgagctgtttgaccttaaaactaagtacgacgaagagacaaccgctaaagcggacgaaatcgagatgattatgacagatctggaacgagctaatcagcgtgcagaagtcgctcagagggaggctgaaacgctgagagagcagctgagcagtgcgaatcactccctgcaactggcttctcagatccagaaggcaccggatgtagagcaagccatcgaggtgctgacccggtcgtctctggaagtggagcttgccgccaaagagcgcgagatcgcccagctggtggaggacgttcaacggcttcaggcgtccctaacaaagttgcgcgaaaattctgcttcccaaatatcgcagctggagcagcagctgtctgccaaaaactctaccctaaaacagctggaagaaaaacttaagggccaagcagactatgaggaagtcaagaaagaattgaatatactaaagtcaatggagttcgcccccagcgagggggcaggtactcaggatgcagccaaacctctggaggtgttgctcctggagaagaatcggtctctacaaagcgagaacgccgcccttaggatctccaacagtgacctcagtggtccttattccacgaactctatttccagccagtctcctctgcaacaatctccggatgtgaacggcatggctccatcaccaagtcaaagtgagtcagccgggtctgtctccgagggggaggaaatggatactgctgaaatcgcccgccaggttaaggaacagttgatcaaacataacattggtcagaggatctttggccattatgtgttaggcctatcacagggaagcgtttcagagatcctggcgcgaccgaagccttggaacaagctcacagtcaggggcaaggaaccatttcacaaaatgaagcagtttctgtcagatgagcagaatattctagccctgagaagtatacaggggcggcagcgggagaaccctggacagtcattaaatcggctttttcaggaggtcccaaaacgtagaaatggatccgaaggtaatatcacaacccggattcgcgcgagtgagaccggttccgacgaagccatcaaatccattctggaacaagcgaaaagagaactgcaagtccagaaaacagcagaaccggcccagccatcatctgccagcgggtccggaaatagcgatgacgccattagatccatcctgcagcaggctaggcgggagatggaagcccagcaggcagctctggatccagccctgaagcaggcccctttgtctcagtccgatattactatattgacgcccaagcttctcagcacgagtcccatgcccaccgtctcatcctatcctccactcgctatttcactgaagaagccctctgcagccccagaggcgggcgcaagtgctcttccaaacccacccgctctcaagaaagaagctcaagacgcgcccggcttggacccccagggagccgccgactgtgcacagggagtactccgacaggtcaaaaatgaggtcgggcggagcggcgcgtggaaggaccactggtggagtgccgtgcagcccgagaggcgaaacgctgccagcagtgaggaggccaaagccgaggagaccggtgggggcaaagagaaggggagtggcgggagtggcggcggatcacagccacgggcagaaagaagtcagctacagggaccaagctcttcggaatattggaaagagtggccttcggccgagtccccctactcccagtcctccgagctgtctcttaccggcgcgtctcgctccgaaaccccacagaattcccctctcccatcaagtcctattgtgccaatgagcaaaccaacaaagccatctgtccccccacttacccctgaacagtacgaagtttatatgtaccaagaggtggatactatagaactgaccaggcaggtgaaggaaaagctcgctaaaaacggtatctgccaacggatttttggcgaaaaggtgcttggcctcagtcaagggtccgtttctgacatgttgtcccggcccaagccctggagcaagctgacccagaaagggagggagccatttataaggatgcagctgtggctgaacggcgagctcggccagggggtcctgccagtccagggccaacagcagggaccagtgcttcattcagtgacatcccttcaggatccgctgcagcaaggctgcgtaagttccgagtctacccctaagacaagcgccagctgtagcccagctccggagagcccaatgagttcctcagaatccgtcaagagcctcactgaactggttcagcagccctgccctcctattgaagcaagcaaagattctaaacctcctgaaccttccgacccccctgcctcggacagtcagcccactaccccactgccgctctcgggacacagcgccctcagtatacaagaactcgtggcaatgagccccgagctggatacttacggcatcacaaaaagagtgaaggaggtgttaactgacaacaacctgggccagcggcttttcggggagaccatccttggcttgacacagggcagcgtttccgatctcctggccaggccgaagccgtggcataaactatctctcaagggacgcgagccgttcgttagaatgcagctctggctgaacgatccaaataacgtcgagaagctcatggacatgaagcggatggagaaaaaagcttatatgaaaagacgccactcgtcagtatccgactctcagccatgtgaaccgccgagcgtgggaaccgaatacagccagggcgcctcaccccagccgcagcaccagctaaagaaaccacgcgtggtgcttgctcccgaagagaaggaagctctgaagagggcctaccagcaaaagccctacccctctcccaagaccatcgaggatttggcaacccaattaaacctcaagacaagtaccgtgattaattggttccacaactacaggtcccgtattagaagagaactgtttatagaggaaattcaggctggtagccagggtcaggcgggcgcatccgatagcccatcagctagaagcgggagggcagccccctcatccgagggcgactcatgtgacggcgtcgaggcaactgagggccctggatcagccgatactgaggagcccaaaagccaaggcgaggcagaaagagaggaggttcctagacctgctgagcagaccgagcctccaccatctggaactccgggtcctgacgacgccagagacgacgaccacgaaggaggacctgtggaagggcctggtccgttgccctccccagcttccgcaacggctacagctgcaccagcagccccggaagatgcggccacgtcagcagcagccgctccgggtgagggacccgcagccccatcatcagctccacccccctcaaattcatccagtagctccgccccgcgcaggccaagcagcctgcagtccctctttgggctccccgaggctgccggcgctcgggatagccgtgataaccccttgaggaaaaagaaggccgccaacctcaactccatcattcatagactggagaaggctgcgtcccgtgaagaaccaattgaatgggagttctag

SEQ ID NO: 306732 - DNA, 4044 bp, Artificial Sequence
  derived and/or modified sequence
atgctgtgcgtggccggcgcccggctgaagcgggagctggacgccaccgccaccgtattagcaaaccgccaagatgaatcagagcagagtagaaagcgcctgattgaacaatccagagagttcaaaaaaaacaccccggaggaccttaggaaacaggtcgcacccctcctaaaatcatttcagggcgagattgacgccctgagtaaaaggtccaaggaggccgaggcagctttcctcaatgtttacaaacggctgatcgacgtacctgaccccgtgccagcactcgacctgggccaacaactgcagctcaaggttcagaggcttcacgacatagaaaccgagaaccagaagctgcgagagacattagaagagtacaacaaagagtttgctgaagtgaaaaaccaggaagtcacgattaaggccctgaaggagaagattagagagtatgaacagacgctcaagaaccaagctgaaacaatcgctttggaaaaagagcaaaaactacagaacgactttgccgaaaaagaacggaagctccaggaaacccagatgtcaaccacatctaagctcgaagaggccgagcacaaggtgcagtccctgcaaactgccttagaaaagactaggacagagctgttcgatttgaagacaaaatacgacgaagagacaacagcaaaggcggatgagattgagatgattatgacagatcttgaacgcgccaaccagcgggcggaggtcgcccagcgagaggccgaaacactgcgtgaacagctgtcttcggcgaaccattccctgcagttggcctctcagattcagaaggcacccgatgtagagcaggctattgaagtgctgaccagatcatcccttgaagttgaattggctgctaaagaacgggagatagcccaattagtggaagatgtgcaaaggctgcaggcctctctgaccaagctcagagagaacagcgccagccagatctcacagttggaacagcagctttctgctaagaactccacgctcaagcagttggaggaaaagctaaagggacaggctgactacgaagaggttaaaaaagagctcaacatattgaaaagtatggaatttgctccttcggagggggctgggacccaggatgcggctaagccactcgaggtgctcctgttagagaaaaatcgcagcttacaatctgaaaacgctgccctccgaatctctaactcagacctttcaggaccatactctaccaactcaatttcttctcagagccccctacagcaatccccagatgtcaatggcatggccccctcccccagccagagcgagtctgcagggtctgtgagcgagggcgaagagatggatacggccgagatcgccaggcaggtaaaagaacagctaatcaagcacaacatcggccagagaatcttcgggcattatgtgttaggcttgtcccaaggatcagtgtccgagatcttggcaagaccaaaaccctggaataaactcaccgtgagaggcaaggagcctttccacaagatgaaacagttcctttccgatgagcagaatatcctcgccctgcggtctatacagggtaggcagagggccgagccagctcaacccagtagcgcctccgggtccgggaacagtgacgacgccatacgctccatcctccagcaggcccgtcgcgagatggaggcccagcaggctgccctcgacccggccctcaaacaggctcccctgagccagagcgacataacaatcctgactcctaaattactttctaccagtcctatgccaactgtttcctcctatcctcctctggcaatctctctgaagaagccatctgctgcaccagaagcaggggcgagtgcgttgcctaatccccctgccctaaaaaaagaggctcaagacgcaccaggcctcgatccacagggggctgccgactgtgcccagggtgtactccgacaggtgaaaaatgaagtgggcaggagcggtgcctggaaagaccactggtggagcgccgttcagcccgagcgtcgcaatgccgccagtagtgaagaggccaaagcagaggaaaccggaggcgggaaggaaaaaggctccgggggttccgggggcggttcacaaccgcgcgccgagaggtctcaactgcaaggcccaagttcctctgaatactggaaggagtggcctagtgcagaaagtccctattcccagtccagcgagctttctctgacaggcgcgtcccgctctgaaaccccacagaacagccccctgccctcgtcccctatagtgccaatgtctaaaccgacaaagccctcagtacccccactaactccagaacagtacgaggtgtatatgtaccaggaggtggatacaattgagctgacccgacaggtgaaggaaaagctggccaaaaatgggatctgccagaggatttttggggaaaaggttctcgggctgtctcaagggagtgtgtctgatatgctcagccggccaaagccctggtccaaactgacacaaaaaggtagggaaccatttattagaatgcaactgtggttgaacggcgagctgggccaaggggtgcttcccgtgcaagggcaacagcaaggaccagtcctccacagcgttacaagcctgcaggatcctctgcagcagggttgcgtgagtagcgaatctactccaaaaacaagtgccagttgcagccccgcccccgagagccctatgtctagtagtgagtctgtgaagtcactgactgagcttgtgcagcagccatgccctcccatcgaggcaagcaaagattcaaagccgccagagcccagtgacccacctgcttccgatagccagcccacaaccccgttgcccctgagcgggcactccgccctcagtattcaggaactcgtggcaatgtctccagagctggacacgtacggtattacaaagcgggtgaaggaggtattaacagataacaacctggggcagcggttatttggtgaaaccattctgggactgacacaaggcagtgtctctgatctgctggccaggccgaagccctggcacaagttatccctgaagggtcgcgagcccttcgttagaatgcagctgtggctcaatgaccccaacaacgtcgaaaagctcatggacatgaagaggatggaaaaaaaggcttatatgaagcggaggcactcctcagtgtctgatagccagccctgtgagcccccgtctgtgggcaccgaatattcgcaaggtgcatctccacagccccaacaccaactgaaaaagcctagggtcgtgcttgctcccgaagagaaggaggccctgaagcgagcctatcaacagaagccctatccaagtcccaaaactattgaggatcttgcaacacagctgaatctgaaaacatctaccgtaatcaactggttccacaactaccggagccgtattcggagggaactgttcatcgaggaaattcaggcaggcagtcaaggtcaggcaggtgccagcgactccccctctgcccggtctggacgtgctgctccaagcagtgagggcgacagctgcgacggggttgaagcaacggaagggccaggtagtgccgataccgaggagccaaagagccagggtgaggccgaacgggaggaggtcccccggcctgcagaacagaccgagccaccaccctctggtacccctggccccgatgacgcgagggatgatgaccatgaaggcgggcctgttgagggtccagggccactccctagtccagcctccgcgacggctacagccgcccctgctgctcccgaggacgcggccacctcagccgccgcagcaccaggtgaagggcctgccgcacctagttctgctcctccaccatctaatagtagctcaagtagtgccccgagaagacctagttctctgcaatcactgttcgggctacccgaggctgcaggcgcccgagacagtcgggataatcccctgcgcaaaaagaaggctgccaatctgaactctataatacatcgactcgagaaagcagcttcacgcgaggaacctatcgaatgggagttctag

SEQ ID NO: 306733 - DNA, 4212 bp, Artificial Sequence
  derived and/or modified sequence
atgctctgtgtggccggagcgaggctaaagagagagctcgacgcgactgcaactgtcctcgccaacaggcaggacgagtctgaacaatcacgaaagcggcttattgaacaatcccgtgagttcaagaagaacaccccagaggatttgcgcaagcaagtggctcctttattgaaatctttccagggtgagattgacgctctgagcaaaaggtccaaagaggcagaagccgctttcttgaatgtgtataagaggctaatcgatgtgcctgatcctgtcccagctttggatctggggcagcagctgcagcttaaagtgcagcgtctgcacgatatcgagaccgagaaccagaaactgcgcgagacactggaggagtacaacaaggagtttgctgaggttaaaaatcaagaggtgacaatcaaggcactcaaagagaagatccgcgaatacgaacagaccctcaaaaaccaagctgagaccattgctctcgagaaggagcagaagctgcaaaacgacttcgccgagaaggagaggaaactccaggagacacagatgagtactactagtaagctggaagaggctgaacataaagtccagtccctccaaaccgccctcgagaaaacacgaacagagctcttcgatcttaagacgaaatacgatgaggagacaactgcgaaagccgatgagatcgagatgattatgacagaccttgagagagctaatcagcgcgctgaagtagctcagagagaagctgaaacattaagggaacagttgagctctgcaaaccattcactccagctggccagtcagattcagaaggctccagatgtcgagcaagcaatcgaagtcctgaccaggagcagtctggaagtggaactcgccgcaaaggaaagggagattgcccaactagtagaggacgtgcaaaggctccaggccagcctgacaaagctcagagagaacagtgcgtcacagatttctcagttggaacagcagctctctgccaagaattctacattaaaacagctagaagagaagctcaagggccaggcagattacgaggaggttaaaaaggaactaaacatcctgaagtctatggagtttgctcccagtgagggggctggtactcaggatgctgccaaacccttagaagtgttgttgctggagaagaatcgtagcttgcagagcgagaatgctgcccttagaatcagcaacagcgacctgagcggtccatattccaccaacagcatctcctcgcaatccccactgcagcagagccccgatgttaacgggatggccccaagtccttcccagagtgagtccgctgggagcgtttctgaaggggaggaaatggacacagctgagattgcaaggcaggttaaagagcagctgatcaagcacaacattggacagcgcatatttggtcactacgtgctgggtctgagtcagggatctgtctccgagatactggcgagaccgaaaccgtggaataaactcactgtcagaggcaaggagcctttccataagatgaaacagtttttgagcgatgaacaaaacatactggctttgagaagcatacaaggtaggcagagggaaaaccctggtcagtcattaaatcgcctgttccaggaggtgcccaaacgccgtaacgggtccgaaggcaacattactacacggatccgggcttctgagactgggtccgatgaggctatcaaaagtatcctagaacaagcgaagcgggagttgcaggtccagaaaaccgcagagcctgcacaaccttcttctgctagtggatctggaaactcggatgatgcgatccgtagcattcttcagcaggcacgcagagagatggaagctcagcaagcggctcttgatccagctctgaaacaggctccattgagtcagtcagacataacaattctgacccccaaactgcttagtacttcaccaatgcctacagtatcttcttaccccccactcgcaatatcactcaagaagccttccgctgccccagaagccggagcttcagcacttccaaatccacctgctcttaagaaagaagcccaggacgcacctggtttggacccccagggggctgcggactgtgcccagggggtgcttcgccaggtgaagaacgaggtgggacggagtggcgcatggaaagaccactggtggagcgccgtgcagccagagcggagaaatgccgcaagctccgaagaagctaaggctgaagagacagggggaggcaaggagaaaggctcgggtggaagtggcggagggtcccagccgagggccgagcggagccagctgcaaggaccatcatcctcagagtactggaaggagtggccatctgccgaatctccttattcacagtcatcggaactcagcctgacaggggctagccgctcagagacaccccagaatagtcccctgccaagctcacccatagttcccatgagcaaaccaaccaagccctcagtccccccactgacccccgaacagtacgaggtgtatatgtaccaggaggtggataccatcgaacttactaggcaggttaaggagaaactggcaaagaacgggatctgccagagaatcttcggagagaaggtcctgggtctgagtcaaggtagtgtttctgacatgttgagcaggcctaaaccatggtcgaaactgacacaaaagggtagggagccgttcattaggatgcagctgtggctaaatggcgaactgggccaaggtgttctgcctgtccagggccagcagcagggccctgtattacacagcgttaccagcctgcaagacccacttcagcagggctgtgtgtcctctgagtccacccccaaaacttcagcatcctgcagtcccgcacctgagagtcctatgagcagctctgaatcagtgaagtcgctgaccgagctcgtgcagcaaccttgtccccctatagaggctagcaaggattcaaaaccaccagagccctcagatcccccagcaagtgactctcaacccaccacaccattgcctcttagcgggcatagtgcgttgagcatacaggaactggttgcaatgtccccagaattggatacctacgggatcaccaaacgcgtgaaggaagtactgacagataataacttgggtcagaggttgttcggggagaccatattgggactaacccagggctccgtgtctgacctgctggccaggcctaaaccatggcacaagctctccttgaagggtcgggagcccttcgtccgtatgcaactttggctaaacgaccccaataatgttgaaaaactgatggacatgaaacgcatggaaaagaaagcatatatgaagaggagacattcaagcgttagcgatagtcagccttgcgagcccccttctgtcggcacggagtactcccagggtgcaagtccccaaccccagcaccagctaaagaaaccccgagttgtgctagcgccagaagagaaggaagccttgaaaagggcatatcagcaaaaaccataccccagtcccaagacgatcgaagatctcgctactcagcttaacctaaagacatccacggtaattaactggttccacaattatcggagccggattcgtagagaactttttatagaagaaatccaggcaggtagtcagggccaggccggtgcatccgatagtcccagcgcacgctcaggcagagccgctccctccagcgagggggattcttgcgacggagtggaggcaacggaggggcctggttccgcagataccgaggaaccaaaatctcaaggtgaggccgaaagagaagaggtgccgagaccagcagagcaaacagaaccaccgccatctggaaccccaggcccagatgacgcccgagatgatgatcatgaaggcggaccagtggaggggcctggaccactcccctcgccagcatccgcaaccgcaaccgccgcaccagcagccccagaagatgctgccacctcggccgcagctgcgcctggggagggtcccgctgctccttcaagcgctcctcctccatcaaactcaagttccagctccgccccacgtcgccctagttccctgcaaagccttttcggcctaccagaggctgccggtgctcgcgactccagagacaaccccctcaggaagaaaaaagctgccaacctaaatagcataattcacaggctagaaaaagcggcatctagagaggagcctatcgaatgggagttttag

SEQ ID NO: 306734 - DNA, 4044 bp, Artificial Sequence
  derived and/or modified sequence
atgctttgtgtagccggtgccaggctcaaacgagagctcgatgcgactgctaccgttttggccaaccgacaagatgaatcggaacaatcgcggaaacggctgattgagcaatcacgcgaatttaagaagaacactcccgaggatttgcggaagcaggtcgcccctctattgaaatcctttcagggagagattgatgccctcagcaagcgatcaaaagaggctgaggctgcctttctcaacgtttacaagcggcttatagatgtcccagatcctgttcccgctctcgatcttggacagcagctccaattgaaagtgcagagactgcacgatattgaaaccgaaaatcagaagttgagagagacactagaagagtataataaggagtttgccgaggtaaaaaatcaagaggtgaccataaaggctttaaaggagaagataagagagtacgaacagaccctcaaaaaccaggctgaaactatcgctctggaaaaggagcagaaattgcagaacgattttgcagagaaggaacgcaaattgcaagagacgcagatgtccacgacaagtaagctggaagaggctgaacataaagtccaatcactacaaaccgctctggaaaagaccaggactgaattgtttgatctcaagaccaaatatgatgaggaaactactgcgaaagctgatgagattgagatgatcatgaccgatctggaaagagccaaccaacgtgcagaagtcgcccagagggaagcagaaaccctccgagaacaattgtccagcgctaaccattctttacagttggcttcgcaaattcagaaggctcccgatgttgagcaggccattgaagttctgacacgttcgtccttggaagtggagttggcagcgaaggaacgcgaaatagcacagctcgtggaagacgtgcagcggctccaagcatcattaactaaactccgggaaaactccgcaagccagatctctcagctggagcagcaactgtctgcgaagaattctactctgaaacagcttgaagaaaagctgaaggggcaggctgactacgaggaggtgaaaaaagaattgaatattctcaaaagtatggaatttgctcccagtgaaggggctggcactcaagacgctgcaaagcccctggaagtactgctattagagaagaaccgatccctgcaaagcgagaacgccgctctgcggatcagcaacagcgacttgtccggaccgtactcaacaaatagcattagcagtcagtcacccctacagcaatctccagatgtcaatggcatggctccatcgcctagccagtcagaaagtgccggttccgtgtcggagggcgaggaaatggatacagccgaaatcgctcgccaggtgaaggaacaattgatcaaacataacataggtcagcggatctttggacactacgtgctgggcctgtcccagggaagcgtgagtgagatattggctaggcccaaaccatggaacaaactgacagtgcgcggaaaggagccttttcataaaatgaagcagttcctgagcgatgaacagaacatcctggcattacgcagtattcaggggaggcaaagagccgagccggcacagcccagcagcgcctccgggagtggcaactcagacgacgccatcaggtctattctacaacaggcgagacgcgagatggaagcacagcaggcagcattagaccctgctctcaagcaggctcccctgtcacaatctgatattacaatattaactcccaagcttctgtctacatctcctatgccgacagtgtcaagttatcctccactggcaatttctctcaaaaaacccagcgccgcacccgaagcaggagcctccgccctgcccaacccccctgcactgaagaaagaggcacaggacgctcccggtttggacccgcaaggcgctgcggattgcgcccagggtgtgctacggcaggtgaaaaatgaagtaggcaggagcggggcatggaaggaccattggtggagcgccgtgcaaccagagagacgtaacgcagctagctctgaagaagcaaaggcggaagaaactggtggaggcaaggagaaggggagtggtgggtcggggggtggtagtcagcctagggcagagaggtctcagctccagggaccttcttctagtgaatactggaaagaatggcccagcgccgagtccccctattctcaatcttccgagctgtcactaacaggcgctagcaggagtgagacgccacagaacagtcccctgcccagctcacccattgtaccaatgtctaaacccactaagccaagcgttcccccattgacaccagagcagtatgaggtgtatatgtaccaggaggtggacacaatcgagctcacccggcaagtgaaagagaagctggcgaaaaacggcatatgtcagagaattttcggagaaaaagtgctcggtctcagccaaggttctgtgagcgatatgctttcacggcctaagccatggagcaaattgacccaaaaagggcgagagccattcattagaatgcaactgtggttgaacggagagctcgggcagggggttctgcctgtgcagggccaacagcaggggcctgtattacacagtgtaacatcattgcaggacccactccagcaggggtgtgtttcctccgagtccaccccgaaaacctctgcgtcatgcagccctgctcccgagtcccccatgagctcatctgagtcagtgaagagcctgactgagctggtccagcagccgtgcccccctattgaggcaagtaaggactccaagccgcctgagccaagcgaccccccagccagtgatagccagcctactacacccctgcctttgtcggggcattctgcgctgtccatccaggaacttgtggcaatgagtcctgagctggatacctacggcattaccaaaagggtcaaagaggtcttgactgataataatctgggccagcgactgttcggggaaaccattcttggactcacacaggggtcagtctccgatcttttagctcgaccaaagccctggcataaactgtccctgaaaggccgagaacccttcgtccgcatgcagctttggttgaacgatccaaacaatgtggaaaagctgatggacatgaaaagaatggaaaagaaagcctacatgaaacggagacatagtagtgtttccgactctcagccttgcgagccgccatctgttgggactgagtacagtcagggcgcttcccctcagccccagcaccagctgaagaagcctcgggttgtgctggcccctgaggaaaaagaggctcttaagagggcctatcagcaaaagccctacccctcccccaaaacaatcgaagacttggctacacaacttaatctgaaaacttccactgtgataaattggtttcataactacagatcccgaattcgtcgcgaactattcatcgaagaaattcaggccggaagccagggacaagccggagcctctgactccccatctgccagaagtggtcgcgctgcaccttcttctgaaggagatagctgtgacggggtggaagctacagagggcccagggagcgctgacactgaggagccgaagtcacagggggaagccgaacgagaggaggtcccacgacctgcggagcagactgagccaccaccaagtggcacaccaggaccagatgatgcgcgtgacgatgatcacgaaggcggaccagtcgagggccctggacccctgcccagccccgcaagtgccacggctacagcggcaccagctgcacccgaggacgcagccacttccgcagcggctgctccaggtgagggccctgccgcaccttcctctgcccctccccctagcaacagttcatcctcctctgccccacgacgcccatctagcctccagagcctgtttggactccccgaggccgctggggcacgagatagccgagataatccgttacggaaaaaaaaggcagccaacctcaactccatcatccatcgcctggagaaggctgcaagcagagaggagcccatcgaatgggaattttag

SEQ ID NO: 306735 - DNA, 408 bp, Artificial Sequence
  derived and/or modified sequence
atggtgcctgccccgcctttcctgggcgtgctggagaatcccgtgccacagtgggacctgagtattctgggatccatccggataagggtctcccataccgaggttcaggggtccggcagttcgcgctctcccgaggcgctgagaaaggaaagtctcgaggtggagtggactctggtgctgctggcaattccccctagaattcaaccctcccagcaggacggcgggcctcccaaatgctgtgatcttctcagggccgctttacttgggcggcattgccccctctgtgtcccagcaggagaggtgttctctcagaaaagagataacgagcaggaccgaagtgagttcataggacagaccttgaaactgctcgttaagagaaatgtctctctagagctttcctgccgttag

SEQ ID NO: 306736 - DNA, 98 bp, Artificial Sequence
  derived and/or modified sequence
aacacgactttgagaagagtaagtgattgttaattaaagcaagagaattattgatgtatcacagtcatgagaaatattggaaggaatatggtccatac

SEQ ID NO: 306737 - protein, 79 aa, Artificial Sequence
  derived and/or modified sequence
MVPIIAQYGDVLVRNLRREAETGKPVTLKDVFGAYSMDVITSTSFGVNIDSLNNPQDPFVENTKKLLRFDFLDPFFLSI

SEQ ID NO: 306738 - DNA, 3320 bp, Artificial Sequence
  derived and/or modified sequence
ctgctgtgcagggcagggaagctccaggcaaacagcccagcaaacagcagcactcagctaaaaggaagactcacagaacacagttgaagaaggaaagtggcgatggacctcatcccaaatttggcggtggaaacctggcttctcctggctgtcagcctggtgctcctctatctgatgagagtccccaaatcagcgaagagtccacttactaaacagacataaggaaatgaagtgtcctggaagaattcctgcctgaacctctcaggagcatttgaggacatttatcaagtattcactccaggattgggactatgaagacttcagctgctttcagctaatcattgagacttttcaggggtctcagaatagtcaggaaaggacctgatgagtgaatgcaattactgatgttggagttgctgttattatttatcgtgtacatattacctccctctcttgaccattccagttcctgagtaactcaccagccctctgatctataaagtcacaatccctgtgacctgatttctgtttcactttgtagatatgggacccgtacacatggactttttaagagactgggaattccagggcccacacctctgcctttgttgggaaatgttttgtcctatcgtcagggtctctggaaatttgacacagagtgctataaaaagtatggaaaaatgtggggtatctcttccctgtttggaccacattacccttcatcatatgaagccttgggtggctcctgtgtgagactcttgctgtgtgtcacaccctaatgaactagaacctaaggttgctgtgtgtcgtacaactagggctccgttgtccccacacagaacgtatgaaggtcaactccctgtgctggccatcacagatcccgacgtgatcagaacagtgctagtgaaagaatgttattctgtcttcacaaatcgaaggtctttaggcccagtgggatttatgaaaagtgccatctctttagctgaggatgaagaatggaagagaatacggtcattgctgtctccaaccttcaccagcggaaaactcaaggagatgttccccatcattgcccagtatggagatgtattggtgagaaacttgaggcgggaagcagagaaaggcaagcctgtcaccttgaaagacatctttggggcctacagcatggatgtgattactggcacatcatttggagtgaacatcgactctctcaacaatccacaagacccctttgtggagagcactaagaagttcctaaaatttggtttcttagatccattatttctctcaataatactctttccattccttaccccagtttttgaagcattaaatgtctctctgtttccaaaagataccataaattttttaagtaaatctgtaaacagaatgaagaaaagtcgcctcaacgacaaacaaaaggtaaaatctgatggtggttaaatgacgatgtttaggttttgataaatttagattttatacacatgatagagcatgtatctgtatttttaaaaataaagacagagaacttatgtttagaacaagagaagccatttggtagaaataaagaaggagattggggaaggagatgagaatgagtcagagagatagcatttaaaacttgaaatcaggcacaacaattagtatgtcatgatataaacagtattgagataaaattttaccacttctcttccctttaataaattgtcaaaggataaagtttcctgtttgaaaatatattttactggtattgtgctttcctcatatcacagattggtaaagaatcattttaagtccaagactcttattttacatattctgcaattaaaggtcctatgaggctacctgccgactgctgacatgtagtgtgtggtaaatgtgagtgtttcacagcctggagtgaacaggggtcttctctgagaattgaggttgcaaggctggctaactcagctttgccttcacgagccctagaggccagccgaaggatgtctgcaggtcagggagacaggaccaggtaacccagctgtcactgaagattatatagagtttgagaatgttggaatatttgaaaatgctcccccaaaaaagctgctgatgagttctggaaatgtcaggagattaatctatacggacactgctgaagaaaaaggtagaagaataaaagatccagtacttcttcctgggtaagcagttatgaccagagatggaaccggcaactctttggccagaaagctgtatccaaaagacagagaagatgagaaacagggagggcaaaggcgaaaaagcaattggacatgatagctagatttgtttcaggaaaacatcctgctttccaaggatttagatgaatgtttttgttcactggtgactcaggtaacacgtcttcaagaagccatagggaggttgagggagggaagtcaagaagggaggttgaggactgcacttttgatttacttctgacttcacgagtcactttctgccaaagaaatctctccttttgcttctagcaccgactagatttccttcagctgatgattgactcccagaattcgaaagaaactgagtcccacaaagctctgtctgatctggagctcgcagcccagtcaataatcttcatttttgctggctatgaaaccaccagcagtgttctttccttcactttatatgaactggccactcaccctgatgtccagcagaaactgcaaaaggagattgatgcagttttgcccaataaggcaccacctacctatgatgccgtggtacagatggagtaccttgacatggtggtgaatgaaacactcagattattcccagttgctattagacttgagaggacttgcaagaaagatgttgaaatcaatggggtattcattcccaaagggtcaatggtggtgattccaacttatgctcttcaccatgacccaaagtactggacagagcctgaggagttccgccctgaaaggttcagtaagaagaaggacagcatagatccttacatatacacaccctttggaactggacccagaaactgcattggcatgaggtttgctctcatgaacatgaaacttgctctaatcagagtccttcagaacttctccttcaaaccttgtaaagaaacacagatccccttgaaattagacacgcaaggacttcttcaaccagaaaaacccattgttctaaaggtggattcaagagatggaaccctaagtggagaatgagttattctaaggatttctactttggtcttcaagaaagctgtgccccagaacaccagagatttcaacttagtcaataaaaccttgaaataaagatgggcttaatct

SEQ ID NO: 306739 - protein, 664 aa, Artificial Sequence
  derived and/or modified sequence
MPLRDKYCQTDHHHHGCCEPVYILEPGDPPLLQQPLQTSKSGIQQIIECFRSGTKQLKHILLKDVDTIFECKLCRSLFRGLPNLITHKKFYCPPSLQMDDNLPDVNDKQSQAINDLLEAIYPSVDKREYIIKLEPIETNQNAVFQYISRTDNPIEVTESSSTPEQTEVQIQETSTEQSKTVPVTDTEVETVEPPPVEIVTDEVAPTSDEQPQESQADLETSDNSDFGHQLICCLCRKEFNSRRGVRRHIRKVHKKKMEELKKYIETRKNPNQSSKGRSKNVLVPLSRSCPVCCKSFATKANVRRHFDEVHRGLRRDSITPDIATKPGQPLFLDSISPKKSFKTRKQKSSSKAEYNLTACKCLLCKRKYSSQIMLKRHMQIVHKITLSGTNSKREKGPNNTANSSEIKVKVEPADSVESSPPSITHSPQNELKGTNHSNEKKNTPAAQKNKVKQDSESPKSTSPSAAGGQQKTRKPKLSAGFDFKQLYCKLCKRQFTSKQNLTKHIELHTDGNNIYVKFYKCPLCTYETRRKRDVIRHITVVHKKSSRYLGKITASLEIRAIKKPIDFVLNKVAKRGPSRDEAKHSDSKHDGTSNSPSKKYEVADVGIEVKVTKNFSLHRCNKCGKAFAKKTYLEHHKKTHKANASNSPEGNKTKGRSTRSKALV

SEQ ID NO: 306740 - protein, 242 aa, Artificial Sequence
  derived and/or modified sequence
MPLRDKYCQTDHHHHGCCEPVYILEPGDPPLLQQPLQTSKSGIQQIIECFRSGTKQLKHILLKDVDTIFECKLCRSLFRGLPNLITHKKFYCPPSLQMDDNLPDVNDKQSQAINDLLEAIYPSVDKREYIIKLEPIETNQNAVFQYISRTDNPIEVTESSSTPEQTEVQIQETSTEQSKTVPVTDTEVETVEPPPVEIVTDEVAPTSDEQPQESQADLETSDNSDFGHQLICCLCRKEFNSR

SEQ ID NO: 306741 - protein, 130 aa, Artificial Sequence
  derived and/or modified sequence
MPLRDKYCQTDHHHHGCCEPVYILEPGDPPLLQQPLQTSKSGIQQIIECFRSGTKQLKHILLKDVDTIFECKLCRSLFRGLPNLITHKKFYCPPSLQMDDNLPDVNDKQSQAINDLLEAIYPSVDKREYI

SEQ ID NO: 306742 - protein, 98 aa, Artificial Sequence
  derived and/or modified sequence
MPLRDKYCQTDHHHHGCCEPVYILEPGDPPLLQQPLQTSKSGIQQIIECFRSGTKQLKHILLKDVDTIFECKLCRSLFRGLPNLITHKKFYCPPSLQM

SEQ ID NO: 306743 - protein, 645 aa, Artificial Sequence
  derived and/or modified sequence
MSDKSDLKAELERKKQRLAQIREEKKRKEEERKKKEADMQQKKEPVQDDSDLDRKRRETEALLQSIGISPEPPLVQPLHFLTWDTCYFHYLVPTPMSPSSKSVSTPSEAGSQDSGDLGPLTRTLQWDTDPSVLQLQSDSELGRRLHKLGVSKVTQVDFLPREVVSYSKETQTPLATHQSEEDEEDEEMVESKVGQDSELENQDKKQEVKEAPPRELTEEEKQQILHSEEFLIFFDRTIRVIERALAEDSDIFFDYSGRELEEKDGDVQAGANLSFNRQFYDEHWSKHRVVTCMDWSLQYPELMVASYNNNEDAPHEPDGVALVWNMKFKKTTPEYVFHCQSSVMSVCFARFHPNLVVGGTYSGQIVLWDNRSHRRTPVQRTPLSAAAHTHPVYCVNVVGTQNAHNLITVSTDGKMCSWSLDMLSTPQESMELVYNKSKPVAVTGMAFPTGDVNNFVVGSEEGTVYTACRHGSKAGIGEVFEGHQGPVTGINCHMAVGPIDFSHLFVTSSFDWTVKLWTTKHNKPLYSFEDNADYVYDVMWSPVHPALFACVDGMGRLDLWNLNNDTEVPTASVAIEGASALNRVRWAQAGKEVAVGDSEGRIWVYDVGELAVPHNDEWTRFARTLVEIRANRADSEEEGTVELSA

SEQ ID NO: 306744 - DNA, 1938 bp, Artificial Sequence
  derived and/or modified sequence
atgagcgacaagagcgatctgaaggctgaattagagcgcaagaagcagcggctggcacagatccgggaggaaaagaagcggaaagaagaagagaggaagaaaaaagaggctgatatgcagcagaaaaaggaacctgtgcaggatgactcagatctcgataggaagagacgggagactgaggccctgcttcagtcaatcggtatctctccggagccaccgctcgtgcagccgctgcacttcctgacgtgggatacctgttacttccactacctggtccccacgccaatgtctccatcgagcaagagtgtcagtactccctccgaagctggcagccaggattctggcgatctggggcccctgacaagaaccctgcagtgggacacagacccttctgtcctgcaactgcagtcggatagcgagctgggccggagactgcacaaactgggggtttccaaggttacccaggtggactttctgccacgagaggtggtctcctactctaaagaaacccagacgcccttagccacacatcagtccgaagaggacgaggaggacgaggagatggtggagtctaaggtcggccaggatagcgagcttgagaaccaggacaagaaacaggaagtgaaggaggcacccccgagggagttaactgaagaggagaaacaacagatcctgcatagcgaagagttccttattttttttgatcgaaccatcagggtgatagagagggctttggccgaggacagcgatattttttttgattatagcggcagagaactcgaagagaaagacggagatgtccaagcaggagccaaccttagtttcaatagacagttctatgatgaacattggagcaagcaccgagtggtcacatgcatggactggtcactccagtatccagaactcatggtggcaagttacaacaacaacgaagacgcaccacatgagccagacggagtcgccctcgtatggaacatgaagtttaaaaaaacaactcccgagtacgtttttcactgtcagtcttccgtgatgtctgtgtgttttgcacggttccacccaaacttagttgtgggaggcacatacagcggccaaattgttctgtgggataaccgttctcatcggaggactccagtgcaaaggacaccattatcagccgcagcccacactcatccagtatactgtgtgaacgttgttggaacacagaatgctcacaatctaattacagtttctacggacggcaagatgtgcagttggtccctagatatgctcagcacaccacaggaatctatggaactggtgtataacaagagcaagcccgtggcggtgactgggatggcgttccctaccggagatgtgaacaattttgttgtgggaagcgaggagggtacagtgtacacagcttgcaggcatggctctaaagctggcattggagaggttttcgagggacaccagggccctgttacagggatcaactgtcacatggcagtcggcccgatcgatttctctcacctttttgtgacctcctctttcgattggacagtgaagttgtggacaaccaaacataataagccactttactcttttgaggacaacgcagattacgtctacgatgtgatgtggagtccggttcatccagcactattcgcttgtgtggacgggatgggtcggctggatctgtggaatctgaataatgacaccgaggtgcccactgctagtgtggccatcgagggagcctccgcccttaatagggtaagatgggcccaagccgggaaggaggtggccgtaggcgactctgagggccgcatctgggtttacgacgtgggcgaacttgctgtaccacacaatgacgagtggaccagattcgccaggaccctcgttgagattcgggccaatagggccgactccgaagaagaaggaacggtggaactgtccgcttag

SEQ ID NO: 306745 - DNA, 1938 bp, Artificial Sequence
  derived and/or modified sequence
atgtctgacaagagtgacctgaaggccgagctggagaggaagaagcagaggctggcccagatccgggaggagaagaagaggaaggaggaggagaggaagaagaaggaggccgacatgcagcagaagaaggagcctgtgcaggatgacagcgacctggacaggaagaggcgggagacagaggccctgctgcagagcatcggcatcagccctgagccccccctggtgcagcccctgcacttcctgacctgggacacctgctacttccactacctggtgcccacccccatgagccccagcagcaagtctgtgtccaccccatctgaggccggcagccaggacagcggggacctgggccccctgaccaggaccctgcagtgggacacagaccccagcgtgctgcagctgcagagcgacagcgagctgggccgccgcctgcacaagctgggcgtgtccaaggtgacccaggtggacttcctgccccgggaggtggtgtcctacagcaaggagacccagacccccctggccacccaccagagtgaagaagatgaggaggatgaggagatggtggagagcaaggtgggccaggacagcgagctggagaaccaggacaagaagcaggaggtgaaggaggccccaccccgggagctgacagaggaggagaagcagcagatcctgcacagcgaggagttcctgatcttctttgacaggaccatccgggtgattgagcgggccctggctgaagattctgacatcttctttgactacagcggccgggagctggaggagaaggatggagatgtgcaggccggggccaacctgtccttcaaccggcagttctatgatgagcactggagcaagcaccgggtggtgacctgcatggactggagcctgcagtacccagagctgatggtggccagctacaacaacaatgaagatgcccctcatgagccagatggagtggccctggtgtggaacatgaagttcaagaagaccaccccagaatatgtgttccactgccagagctctgtgatgtctgtgtgctttgcccgcttccaccccaacctggtggtgggcggcacctacagcggccagatcgtgctgtgggacaacagaagccacaggaggacccctgtgcagaggacccccctgtctgctgctgcccacacccaccctgtgtactgtgtgaatgtggtgggcacccagaatgcccacaacctgatcaccgtgtccacagatggcaagatgtgctcctggagcctggacatgctgagcaccccccaggagagcatggagctggtgtacaacaagagcaagcctgtggccgtgacaggcatggccttccccactggagatgtgaacaactttgtggtgggcagcgaggagggcaccgtgtacacagcctgccgccacggcagcaaggccggcatcggggaggtgtttgagggccaccagggccctgtgacaggcatcaactgccacatggctgtgggccccatcgacttcagccacctgtttgtgaccagcagctttgactggacagtgaagctgtggaccaccaagcacaacaagcccctgtacagctttgaagataatgctgactatgtgtatgatgtgatgtggagccctgtgcacccagccctgtttgcctgtgtggatggcatgggccgcctggacctgtggaacctgaacaatgacacagaggtgcccacagcctctgtggccattgaaggagccagcgccctgaacagagtgcgctgggcccaggccggcaaggaggtggccgtgggggacagcgagggccgcatctgggtgtatgatgtgggggagctggccgtgccccacaatgatgagtggaccaggtttgcccggaccctggtggagatccgggccaacagagctgacagcgaggaggagggcaccgtggagctgagcgcctag

SEQ ID NO: 306746 - DNA, 1938 bp, Artificial Sequence
  derived and/or modified sequence
atgagcgacaagagcgacctgaaggccgagctggagcggaagaagcaacgccttgcccagatccgcgaagagaagaaaagaaaggaagaagaacggaagaagaaggaggccgatatgcagcagaagaaagagccagtacaggatgactcagacctcgaccggaaaagacgggaaacagaagctctgttgcagtccatcggcatctccccagagccaccactcgttcagcccctccacttcttgacatgggacacatgttactttcactacctggtgccaacacccatgagcccaagctcaaagagcgtgtcaaccccctctgaagccgggtcccaggactctggagatcttgggccgctcactaggacacttcagtgggacaccgatccttctgttttacagttacagtccgattcagagctcggaaggcgcctacataagctgggggtctcgaaagtaacacaagtggactttctccctagggaagtcgtcagctactccaaagaaacacaaactcctctggcaacacaccaatccgaggaggatgaggaggatgaagagatggtcgagagcaaggtagggcaagacagcgagcttgagaaccaggacaaaaaacaagaagtcaaggaagcaccccctagggaactgactgaagaggagaagcaacagatcctgcactcagaggaattcctcatctttttcgatcggaccatcagggttatagagcgagcacttgctgaggactcagatattttctttgattattcaggacgagagctggaggaaaaggatggagacgtgcaagccggggctaatttgtccttcaatcggcaattttatgacgaacattggtcgaaacacagagttgtgacatgcatggattggtctttgcaatacccagagcttatggttgcaagctacaataataatgaggatgccccccatgagcctgacggcgtggccctcgtgtggaacatgaagttcaaaaagacaaccccagaatatgtcttccactgtcagtcatctgtgatgagtgtctgctttgctcgatttcacccgaacttggttgtcggcggaacgtacagcggccaaatcgtcctgtgggacaaccgaagccacagaagaacaccagttcagaggacacccttgtctgctgcagcacacacgcatcctgtgtactgtgtcaacgtggttggcacccagaatgcccataacttgatcacagttagcaccgacgggaaaatgtgcagctggagcctcgatatgctgtctaccccgcaggagtcaatggaactcgtgtacaacaagtctaagccagtagccgtgactgggatggcgtttcctacaggagacgtgaacaacttcgtggtgggctccgaagagggaactgtgtataccgcctgtagacacggatccaaagctggcattggcgaggtgttcgaagggcatcagggtcccgtaacgggaatcaactgccatatggccgttgggcctatagacttctcccacctgttcgtgaccagctcttttgattggacagtgaagctgtggacaaccaaacacaacaagccgctgtatagttttgaagacaacgcggactacgtgtacgatgttatgtggagccctgtgcacccagctctgttcgcgtgcgttgacggaatgggccgcctggatctttggaacttgaacaatgacacagaggtgccaactgctagcgttgctattgaaggcgcgtcagcattaaacagggtgaggtgggcccaagctggcaaagaagtagcggtgggcgactctgaggggcgcatttgggtgtatgacgtgggcgagttagccgtgccccacaacgatgagtggaccagatttgctaggactcttgtggagattagagccaatcgcgccgacagcgaagaagagggaaccgttgaactctccgcttag

SEQ ID NO: 306747 - DNA, 1938 bp, Artificial Sequence
  derived and/or modified sequence
atgagtgataagtcagatctgaaagcagaactagagagaaaaaaacagaggttggctcagatccgtgaagaaaaaaaaagaaaggaggaggagaggaagaagaaggaggcagatatgcagcagaagaaggagcctgtacaggacgactccgatttagatcgaaaacgcagagaaactgaggctcttctgcagtctatcggcatttctcccgaacctccactggttcagcctcttcacttcctgacttgggacacgtgctactttcactacctggtccctacacccatgtcaccatcaagtaaatctgtctccactcccagcgaggccggttctcaagacagcggggaccttgggcctctgacaaggactcttcagtgggacacagatccatctgtcctgcaattgcagtccgatagtgaattgggtagacggctacataaactgggggtgtccaaagtgacccaggtggattttctaccgagagaggtcgtttcttattccaaagagacccaaacccctcttgccacccatcagagcgaggaagacgaagaagacgaagagatggtcgaatctaaagtggggcaggattccgagctggaaaaccaagacaaaaaacaagaggtgaaagaggcccctcccagagaactgaccgaggaggaaaaacaacaaatactgcattctgaggagtttttgatttttttcgatcgaactatcagagtcattgagcgagcacttgccgaggactcagatatcttttttgactatagcggaagggagctggaggagaaggatggggacgtacaggcgggtgctaatctcagcttcaaccgacagttttacgatgagcactggagtaaacaccgcgtggtgacgtgcatggactggagtttgcagtaccccgagctgatggtggcttcctataataataacgaagacgcaccccatgagcccgatggggtcgccctggtgtggaatatgaagtttaagaagacaacgccagagtatgtgtttcattgccagtcatccgtgatgtctgtgtgtttcgctaggttccaccctaatctagtagtggggggaacttacagcgggcagatcgtactgtgggataaccggtcccataggcgcactccagtgcagagaactccactgagtgccgcagcccacacacaccctgtctactgcgtcaatgtagtgggaactcagaatgcccacaatttgattaccgtatctacagacggcaaaatgtgcagttggagccttgatatgctttcaacgccacaggaaagtatggagctggtttacaacaagtcaaaacccgttgcggttacgggtatggctttccccactggggacgtgaataactttgttgtggggagtgaggaggggactgtgtacaccgcctgcaggcatggcagtaaggctggcattggagaggtatttgagggccaccaaggcccagtaacaggcattaattgtcatatggcagtaggcccaatagatttttcgcacctgttcgtcactagcagctttgactggaccgtcaagctgtggactaccaagcataacaagcccctctactctttcgaggataatgctgattacgtatatgacgtgatgtggagtccagtgcacccagcgctgtttgcttgtgtggatgggatgggacgattggatctctggaacttgaataacgacactgaggtgcccactgcgtcagtggccatagaaggagcctcagcactcaacagagttcgctgggcccaggcaggtaaagaagtcgcagtcggggattcagaaggcaggatatgggtctatgatgtaggagaactggcggttccccataatgatgaatggactaggtttgctcgcaccctcgtggagatcagggcaaacagagcagattcggaggaagaagggactgtcgaattgtctgcctag

SEQ ID NO: 306748 - DNA, 2950 bp, Artificial Sequence
  derived and/or modified sequence
ctgggagagaggaagtgatcgctcccggaggagcgcgagccgagcggccggcgcagcgtgagacagcacatcctgcccgcgccggccccgccaccttcgggagccgcctgcaccaacgctgccgccgcccaggagccgccgccggctcggggagcccagttccgccgctgccgagcgcgtccaggaaaccaacatgtctgacaaaagtgacttaaaagctgagctagagcgcaaaaagcagcgcttagcacagataagagaagagaagaaacggaaggaagaggagaggaaaaagaaagaggctgatatgcagcagaagaaagaacccgttcaggacgactctgatctggatcgcaaacgacgagagacagaggctttgctgcaaagcattggtatctcaccggagccgcctctagtgcagccgctgcattttttaacatgggatacctgttattttcattatttagtcccaacccctatgtctccctcctcgaaatcagtgagcactcccagtgaagctggaagccaagactcaggcgatctggggccattaacaaggaccctgcagtgggacacagacccctcagtgctccagctgcagtcagactcagaacttggaagaagactgcataaactgggcgtgtcaaaggtcacccaagtggatttcctgccaagggaagtagtgtcctactcaaaggagacccagactcctcttgccacgcatcagtctgaagaggatgaggaagatgaggaaatggtggaatctaaagttggccaggactcagaactggaaaatcaggacaaaaaacaggaagtgaaggaagcccctccaagagagttgacagaggaagaaaaacagcagatccttcattcagaggaatttctcatcttttttgaccggacaatacgggtaattgaaagagccctggctgaagattccgacatcttttttgactacagcggccgagagttagaggaaaaagatggggatgttcaggctggagccaatctttctttcaatcgtcagttctatgatgaacattggtccaagcatcgagtggtcacttgtatggactggtccctccagtaccctgagctgatggtggcttcttacaacaacaatgaagatgctccccatgaaccagatggagtggccttggtttggaacatgaagtttaagaaaaccacaccagaatacgtcttccactgtcagtcctctgtgatgtcggtctgcttcgcccgtttccatcctaacttggtggttggtgggacttactcgggccagattgtcctctgggacaatcgcagtcatcgaaggactccagtgcagcggacacccttatcagctgctgcacacacgcatcccgtgtactgtgtaaatgttgttgggacccagaatgctcataacctcatcactgtctccactgatggcaaaatgtgttcctggagcctggacatgctctcaactccacaggagagcatggagctggtgtacaataagtccaagcctgtcgctgttaccggaatggctttcccaacgggagacgtcaataacttcgtggttggcagtgaggaaggtacagtctacacggcttgtcgtcatggaagcaaagcaggtattggtgaggtctttgaaggtcaccaagggccagtgacaggaattaactgccacatggcagtgggcccaatcgacttttctcacctgtttgtcacatcatcatttgactggactgtcaaactgtggaccaccaagcacaacaagccgctctactcctttgaagacaatgcagactatgtgtacgatgtcatgtggtcccccgtgcatcctgcgctttttgcctgcgtggacgggatggggcgcttggacctctggaacctcaacaatgacaccgaggttccaacagcaagtgtggccattgagggggcatccgccctaaaccgtgttcgttgggcccaagctggcaaagaagttgctgttggggactcggaaggccgtatttgggtctatgacgttggagagcttgcagttccccacaatgatgaatggacccgatttgccaggacccttgtggaaattcgtgctaacagagctgatagcgaggaggaaggcactgttgagttatctgcctagtggaaatgagccacccccactgcagcccccacctttgtgtcctagagctcagcgtctgcagtcaagtctcttgtattcggtgtccattcagtatcagtattgctgtgatattttgggtgccatattgtgccagctttgctccaagtattctaaatgtgtcccatcatgctttccactgacccaaaattcaccacagcatttctatctttatatttctgtctcaaaaatgaagagaagggggttatgggttaagttgctgccttttaactactttgtagctgtatttaatagctggaaacctctggttaaatttgtgcttacatgcactcctggcatagtcctattaaatccatatgaagccagatatgattgggtgcagatgtggtgttcctcatattatggtacagggccaaagacttgagacgtggtgttttacatggtgactcacattatgaatggatttactagaagaacattgctgctccttatttattgtagtgtgctgcatggaacgtatttatttgaaagcattaaaataaatgatcctagagcatgtgcataatgagaggactgtattctctctgctgctgttgaggttatattaagttccacatagcaattacagtatgccagttccactgaagacatgaaatctttagaggtttcttgcagtgaacgaaatgaattttaatgcctattatttctgggtactttaacaatatttcaaatatcattgaccactaatacttctcactgaagctaacacagtctgacaaaagtctatggttcctaaatatgacatcagtgttgccaataaaa

SEQ ID NO: 306749 - DNA, 1938 bp, Artificial Sequence
  derived and/or modified sequence
atgagcgacaagagcgacctgaaggccgagctggagagaaagaagcagagactggcccagatcagagaggagaagaagagaaaggaggaggagagaaagaagaaggaggccgacatgcagcagaagaaggagcccgtgcaggacgacagcgacctggacagaaagagaagagagaccgaggccctgctgcagagcatcggcatcagccccgagccccccctggtgcagcccctgcacttcctgacctgggacacctgctacttccactacctggtgcccacccccatgagccccagcagcaagagcgtgagcacccccagcgaggccggcagccaggacagcggcgacctgggccccctgaccagaaccctgcagtgggacaccgaccccagcgtgctgcagctgcagagcgacagcgagctgggcagaagactgcacaagctgggcgtgagcaaggtgacccaggtggacttcctgcccagagaggtggtgagctacagcaaggagacccagacccccctggccacccaccagagcgaggaggacgaggaggacgaggagatggtggagagcaaggtgggccaggacagcgagctggagaaccaggacaagaagcaggaggtgaaggaggccccccccagagagctgaccgaggaggagaagcagcagatcctgcacagcgaggagttcctgatcttcttcgacagaaccatcagagtgatcgagagagccctggccgaggacagcgacatcttcttcgactacagcggcagagagctggaggagaaggacggcgacgtgcaggccggcgccaacctgagcttcaacagacagttctacgacgagcactggagcaagcacagagtggtgacctgcatggactggagcctgcagtaccccgagctgatggtggccagctacaacaacaacgaggacgccccccacgagcccgacggcgtggccctggtgtggaacatgaagttcaagaagaccacccccgagtacgtgttccactgccagagcagcgtgatgagcgtgtgcttcgccagattccaccccaacctggtggtgggcggcacctacagcggccagatcgtgctgtgggacaacagaagccacagaagaacccccgtgcagagaacccccctgagcgccgccgcccacacccaccccgtgtactgcgtgaacgtggtgggcacccagaacgcccacaacctgatcaccgtgagcaccgacggcaagatgtgcagctggagcctggacatgctgagcaccccccaggagagcatggagctggtgtacaacaagagcaagcccgtggccgtgaccggcatggccttccccaccggcgacgtgaacaacttcgtggtgggcagcgaggagggcaccgtgtacaccgcctgcagacacggcagcaaggccggcatcggcgaggtgttcgagggccaccagggccccgtgaccggcatcaactgccacatggccgtgggccccatcgacttcagccacctgttcgtgaccagcagcttcgactggaccgtgaagctgtggaccaccaagcacaacaagcccctgtacagcttcgaggacaacgccgactacgtgtacgacgtgatgtggagccccgtgcaccccgccctgttcgcctgcgtggacggcatgggcagactggacctgtggaacctgaacaacgacaccgaggtgcccaccgccagcgtggccatcgagggcgccagcgccctgaacagagtgagatgggcccaggccggcaaggaggtggccgtgggcgacagcgagggcagaatctgggtgtacgacgtgggcgagctggccgtgccccacaacgacgagtggaccagattcgccagaaccctggtggagatcagagccaacagagccgacagcgaggaggagggcaccgtggagctgagcgcctag

SEQ ID NO: 306750 - protein, 628 aa, Artificial Sequence
  derived and/or modified sequence
MSDKSDLKAELERKKQRLAQIREEKKRKEEERKKKEADMQQKKEPVQDDSDLDRKRRETEALLQSIGISPEPPLVPTPMSPSSKSVSTPSEAGSQDSGDLGPLTRTLQWDTDPSVLQLQSDSELGRRLHKLGVSKVTQVDFLPREVVSYSKETQTPLATHQSEEDEEDEEMVESKVGQDSELENQDKKQEVKEAPPRELTEEEKQQILHSEEFLIFFDRTIRVIERALAEDSDIFFDYSGRELEEKDGDVQAGANLSFNRQFYDEHWSKHRVVTCMDWSLQYPELMVASYNNNEDAPHEPDGVALVWNMKFKKTTPEYVFHCQSSVMSVCFARFHPNLVVGGTYSGQIVLWDNRSHRRTPVQRTPLSAAAHTHPVYCVNVVGTQNAHNLITVSTDGKMCSWSLDMLSTPQESMELVYNKSKPVAVTGMAFPTGDVNNFVVGSEEGTVYTACRHGSKAGIGEVFEGHQGPVTGINCHMAVGPIDFSHLFVTSSFDWTVKLWTTKHNKPLYSFEDNADYVYDVMWSPVHPALFACVDGMGRLDLWNLNNDTEVPTASVAIEGASALNRVRWAQAGKEVAVGDSEGRIWVYDVGELAVPHNDEWTRFARTLVEIRANRADSEEEGTVELSA

SEQ ID NO: 306751 - protein, 129 aa, Artificial Sequence [sequence omitted]

SEQ ID NO: 306752 - DNA, 1887 bp, Artificial Sequence
  derived and/or modified sequence
atgagcgacaagagcgacctgaaggccgagctggagagaaagaagcagagactggcccagatcagagaggagaagaagagaaaggaggaggagagaaagaagaaggaggccgacatgcagcagaagaaggagcccgtgcaggacgacagcgacctggacagaaagagaagagagaccgaggccctgctgcagagcatcggcatcagccccgagccccccctggtgcccacccccatgagccccagcagcaagagcgtgagcacccccagcgaggccggcagccaggacagcggcgacctgggccccctgaccagaaccctgcagtgggacaccgaccccagcgtgctgcagctgcagagcgacagcgagctgggcagaagactgcacaagctgggcgtgagcaaggtgacccaggtggacttcctgcccagagaggtggtgagctacagcaaggagacccagacccccctggccacccaccagagcgaggaggacgaggaggacgaggagatggtggagagcaaggtgggccaggacagcgagctggagaaccaggacaagaagcaggaggtgaaggaggccccccccagagagctgaccgaggaggagaagcagcagatcctgcacagcgaggagttcctgatcttcttcgacagaaccatcagagtgatcgagagagccctggccgaggacagcgacatcttcttcgactacagcggcagagagctggaggagaaggacggcgacgtgcaggccggcgccaacctgagcttcaacagacagttctacgacgagcactggagcaagcacagagtggtgacctgcatggactggagcctgcagtaccccgagctgatggtggccagctacaacaacaacgaggacgccccccacgagcccgacggcgtggccctggtgtggaacatgaagttcaagaagaccacccccgagtacgtgttccactgccagagcagcgtgatgagcgtgtgcttcgccagattccaccccaacctggtggtgggcggcacctacagcggccagatcgtgctgtgggacaacagaagccacagaagaacccccgtgcagagaacccccctgagcgccgccgcccacacccaccccgtgtactgcgtgaacgtggtgggcacccagaacgcccacaacctgatcaccgtgagcaccgacggcaagatgtgcagctggagcctggacatgctgagcaccccccaggagagcatggagctggtgtacaacaagagcaagcccgtggccgtgaccggcatggccttccccaccggcgacgtgaacaacttcgtggtgggcagcgaggagggcaccgtgtacaccgcctgcagacacggcagcaaggccggcatcggcgaggtgttcgagggccaccagggccccgtgaccggcatcaactgccacatggccgtgggccccatcgacttcagccacctgttcgtgaccagcagcttcgactggaccgtgaagctgtggaccaccaagcacaacaagcccctgtacagcttcgaggacaacgccgactacgtgtacgacgtgatgtggagccccgtgcaccccgccctgttcgcctgcgtggacggcatgggcagactggacctgtggaacctgaacaacgacaccgaggtgcccaccgccagcgtggccatcgagggcgccagcgccctgaacagagtgagatgggcccaggccggcaaggaggtggccgtgggcgacagcgagggcagaatctgggtgtacgacgtgggcgagctggccgtgccccacaacgacgagtggaccagattcgccagaaccctggtggagatcagagccaacagagccgacagcgaggaggagggcaccgtggagctgagcgcctag

SEQ ID NO: 306753 - DNA, 390 bp, Artificial Sequence
  derived and/or modified sequence
atgagcgacaagagcgacctgaaggccgagctggagagaaagaagcagagactggcccagatcagagaggagaagaagagaaaggaggaggagagaaagaagaaggaggccgacatgcagcagaagaaggagcccgtgcaggacgacagcgacctggacagaaagagaagagagaccgaggccctgctgcagagcatcggcatcagccccgagccccccctggtgcccacccccatgagccccagcagcaagagcgtgagcacccccagcgaggccggcagccaggacagcggcgacctgggccccctgaccagaaccctgcagtgggacaccgaccccagcgtgctgcagctgcagagcgacagcgagctgggctacatgagcgcctag

SEQ ID NO: 306754 - DNA, 1887 bp, Artificial Sequence
  derived and/or modified sequence
atgagcgacaaatctgatcttaaggcggagctggagagaaaaaaacagagactggctcagatccgtgaagagaagaagcgcaaagaggaggaacgcaagaagaaagaagctgacatgcagcaaaaaaaggagcccgtacaagacgacagtgacctggatcgcaagcgtagggaaaccgaagctctcctgcaatcgataggaatctcccccgaaccgcccttagttcccacccctatgtccccttcttctaaaagcgtctctacacccagtgaggcagggagtcaggattccggcgatctcggtcccctcacccggaccctgcagtgggacaccgatccctctgtgctgcaacttcagtccgacagtgaactgggccgacggctccacaaacttggagtcagtaaggtgacgcaggtggacttcctgccacgtgaagtcgtcagttattccaaggaaactcagacccctctggcaacgcatcagtcggaggaagacgaggaagatgaagaaatggtcgaaagtaaagttggccaagattcagagctggaaaaccaagataaaaaacaggaggtgaaggaagcgccccctagggaactcaccgaggaagagaaacaacagatccttcatagcgaggaatttctgatcttcttcgataggacaatcagagtgatcgagagagcactggcagaggattcagacatcttttttgattactcgggacgggaattagaggagaaggacggtgacgttcaggctggggcaaacctatctttcaatcgtcagttttatgacgagcactggtccaaacaccgagtcgttacatgtatggactggtctctgcaataccctgagctgatggtcgcctcctacaataataatgaggatgcaccacacgagcccgatggggtcgctctagtatggaacatgaagtttaagaagactacaccagaatatgtgttccattgccagagcagcgtaatgtctgtgtgcttcgcgcggtttcatccaaatctcgtcgttgggggtacatatagtggccagatcgttttatgggacaaccgcagtcaccggaggactcctgtccagaggacacctctgtcagccgcagcacacacacatccggtgtattgcgtcaatgttgtgggcacccagaatgctcacaacctgattacggtctcaaccgatggcaagatgtgtagctggtccctggacatgctgagtactccccaggaaagcatggaactggtgtataacaagtcgaagcctgttgcagttaccggcatggccttcccaacgggcgacgtcaataacttcgttgtagggagtgaggaaggaactgtctacaccgcctgtcgccacgggtcaaaagcagggataggagaagtcttcgagggacaccagggaccagtgacaggaatcaattgccacatggccgtgggccctatcgacttcagccatctgttcgtgacctccagttttgattggacagttaaactctggacaacgaaacacaacaaaccattgtactcattcgaggacaatgctgactatgtctatgacgtcatgtggtctcctgtgcatcctgccctatttgcttgcgttgacgggatgggccgacttgatttgtggaacctgaataatgacaccgaagtaccaacagctagtgtggctattgaaggtgctagtgcactcaatagggtacggtgggcacaagccggtaaggaggtggccgttggtgactccgagggacgaatttgggtctacgatgttggcgagcttgcagtccctcacaatgacgagtggacacggtttgctcgtacccttgttgaaattcgcgccaatagagctgacagcgaagaagagggcacagtagagctatccgcctag

SEQ ID NO: 306755 - DNA, 1887 bp, Artificial Sequence
  derived and/or modified sequence
atgagcgacaaatcagacctgaaagctgagttagaaagaaaaaaacagcggctggctcagataagggaggagaagaagcgaaaggaggaagagagaaaaaaaaaggaagctgacatgcagcagaagaaggagcctgtccaggatgacagcgacctggatcggaaaaggagggaaaccgaggctctgctccagagcattggcatctcccccgagccacctttggtccctacacctatgtctccaagttccaaaagcgtgagcacaccgagtgaggccggctctcaggacagcggtgatcttggccctctgacacgcacccttcagtgggacacagacccatcggttcttcagctgcagagtgactcggagctaggcagacgcctccataagttgggcgtgagtaaagtgacccaggtggacttcctgcctagagaagtcgtgtcctactctaaggaaacacagacgccacttgcaactcatcagagtgaagaagacgaggaagatgaggaaatggtggaaagcaaggtcggacaagattccgagctggagaatcaagacaaaaaacaggaagttaaagaagctcctcccagagaactgacagaggaggagaagcagcagattctacactctgaggaattcctgattttctttgacaggaccattcgcgtgatcgaacgcgccttagctgaagactcggacattttctttgattacagtggccgagaactggaagagaaggatggtgatgtgcaggctggagcgaatctgagcttcaatcggcagttctatgatgagcactggagtaaacacagagtggtgacctgcatggattggagcctgcagtaccctgaactaatggtcgccagctataacaacaatgaggacgccccccatgagcccgatggcgtggcactcgtttggaacatgaagtttaagaagacgacccctgagtacgtctttcactgccaatctagtgtgatgtctgtgtgttttgctcggtttcatcccaatctcgtggtgggggggacctacagcggccagatcgtcctgtgggacaataggagtcacagaaggaccccagtgcagaggacaccactgagcgccgccgcccatacccaccccgtctactgtgtgaacgtggtgggaactcagaatgcccacaatctgattaccgtgtccaccgacggaaagatgtgtagctggagtctggatatgctgagtacaccccaggagtccatggagctggtgtacaataagagcaaacccgtggccgtaacgggcatggcctttcccaccggagacgtaaacaatttcgtcgtcggctccgaggaggggactgtatatacggcttgtaggcatgggtcaaaagctggaatcggagaagtcttcgagggtcaccagggccccgtgacaggcatcaattgccacatggcagtggggcctatagatttctcccatctgttcgttactagttccttcgactggacagtaaagttgtggacaaccaaacacaataagcctctgtacagcttcgaggataatgccgattacgtctatgacgtgatgtggagccccgtgcaccccgccctcttcgcatgtgtcgacggtatgggcaggctggacctctggaacctgaacaacgacaccgaagtgccaaccgccagcgtggcaattgagggcgcttcagcattaaaccgagtccgctgggcgcaggcgggcaaggaagtggcagtaggagatagtgagggacgtatctgggtatacgatgttggagagttggctgtccctcataacgacgagtggacccggttcgccagaaccttagtggagatccgtgcgaatagagcagatagcgaggaggaaggcactgtggagctatccgcttag

SEQ ID NO: 306756 - DNA, 390 bp, Artificial Sequence
  derived and/or modified sequence
atgtccgacaaaagtgatctaaaagccgagctggagaggaaaaaacagagactcgctcagatcagagaggagaagaagaggaaagaggaggagaggaaaaaaaaagaggcagatatgcagcagaaaaaggaacctgtgcaggacgacagcgatttagaccgcaagaggcgcgagaccgaagcacttctgcagagcatcggcataagcccagagcctcccctcgtccctacccctatgtccccttcgtctaagtccgtcagtaccccgtccgaagccggaagccaggactccggcgatctgggaccccttactcggactctgcagtgggacacggatccatcggtgctgcagctccaatccgattccgagctcggatacatgagtgcttag

SEQ ID NO: 306757 - DNA, 1887 bp, Artificial Sequence
  derived and/or modified sequence
atgtctgacaagagtgacctgaaggccgagctggagaggaagaagcagaggctggcccagatccgggaggagaagaagaggaaggaggaggagaggaagaagaaggaggccgacatgcagcagaagaaggagcctgtgcaggatgacagcgacctggacaggaagaggcgggagacagaggccctgctgcagagcatcggcatcagccctgagccccccctggtgcccacccccatgagccccagcagcaagtctgtgtccacccccagcgaggccggcagccaggacagcggggacctgggccccctgaccaggaccctgcagtgggacacagaccccagcgtgctgcagctgcagagcgacagcgagctgggccggcggctgcacaagctgggcgtgtccaaggtgacccaggtggacttcctgccccgggaggtggtgtcctacagcaaggagacccagacccccctggccacccaccagagcgaggaggatgaagaagatgaggagatggtggagagcaaggtgggccaggacagcgagctggagaaccaggacaagaagcaggaggtgaaggaggccccaccccgggagctgacagaggaggagaagcagcagatcctgcacagcgaggagttcctgatcttctttgacaggaccatccgggtcatcgagcgggccctggccgaggacagcgacatcttctttgactacagcggccgggagctggaggagaaggatggagatgtgcaggccggggccaacctgtccttcaaccggcagttctatgatgagcactggagcaagcaccgggtggtgacctgcatggactggagcctgcagtacccagagctgatggtggccagctacaacaacaatgaagatgcccctcatgagccagatggagtggccctggtgtggaacatgaagttcaagaagaccaccccagaatatgtgttccactgccagagctctgtgatgtctgtgtgctttgcccgcttccaccccaacctggtggtgggcggcacctacagcggccagatcgtgctgtgggacaacagaagccacaggaggacccctgtgcagaggacccccctgtctgctgctgcccacacccaccctgtgtactgtgtgaatgtggtgggcacccagaatgcccacaacctgatcaccgtgtccacagatggcaagatgtgctcctggagcctggacatgctgagcaccccccaggagagcatggagctggtgtacaacaagagcaagcctgtggccgtgacaggcatggccttccccactggagatgtgaacaactttgtggtgggcagcgaggagggcaccgtgtacacagcctgcagacatggcagcaaggccggcattggagaggtgtttgagggccaccagggccctgtgacaggcatcaactgccacatggctgtgggccccatcgacttcagccacctgtttgtgaccagcagctttgactggacagtgaagctgtggaccaccaagcacaacaagcccctgtacagctttgaggacaatgctgactatgtgtatgatgtgatgtggagccctgtgcacccagccctgtttgcctgtgtggatggcatgggccgcctggacctgtggaacctgaacaatgacacagaggtgcccacagcctctgtggccatcgagggcgccagcgccctgaacagagtgcgctgggcccaggccggcaaggaggtggccgtgggggacagcgagggccgcatctgggtgtatgatgtgggggagctggccgtgccccacaatgatgagtggaccaggtttgcccggaccctggtggagatccgggccaacagagctgacagcgaggaggagggcaccgtggagctgagcgcctag

SEQ ID NO: 306758 - DNA, 390 bp, Artificial Sequence
  derived and/or modified sequence
atgtctgacaagagtgacctgaaggccgagctggagaggaagaagcagaggctggcccagatccgggaggagaagaagaggaaggaggaggagaggaagaagaaggaggccgacatgcagcagaagaaggagcctgtgcaggatgacagcgacctggacaggaagaggcgggagacagaggccctgctgcagagcatcggcatcagccctgagccccccctggtgcccacccccatgagccccagcagcaagtctgtgtccacccccagcgaggccggcagccaggacagcggggacctgggccccctgaccaggaccctgcagtgggacacagaccccagcgtgctgcagctgcagagcgacagcgagctgggctacatgtctgcctag

SEQ ID NO: 306759 - DNA, 1887 bp, Artificial Sequence
  derived and/or modified sequence
atgagcgacaagagcgacctgaaggccgagctggagcggaagaagcaaaggctggcccaaatacgcgaagagaagaaacgcaaggaagaggagcgcaagaagaaggaagccgacatgcagcagaaaaaggaacccgtgcaagacgacagtgatttagatcgcaaacgccgggagacagaggcactgttgcagtctatcggcatcagccctgaacctcctctggttcccacgcctatgagcccttcgagtaagagcgtaagcaccccctcagaggccggatcgcaagacagcggagatttgggacccttgacgcggacattgcagtgggataccgatccttcagttcttcagcttcagagcgattccgagcttggccgccgattgcataagctgggcgttagcaaggtcacacaagtcgacttccttccccgcgaggtggtgtcctatagcaaggagacccagactcccttggccactcaccagagtgaagaggacgaagaagatgaggagatggtcgagtcaaaggtcgggcaggactccgagctggagaaccaagataaaaagcaggaggtcaaggaggctcccccgcgcgaactgactgaggaggaaaaacagcaaattctgcactctgaggaattccttatttttttcgataggaccatacgggtcattgagcgagccctggccgaggacagcgacatcttctttgactattccggacgcgagctagaggagaaagatggagatgtgcaggctggcgctaatctgtcttttaaccgacagttctatgacgagcactggtcaaaacatcgcgttgtcacttgcatggattggtcgctgcagtaccctgagcttatggtggccagctacaataataatgaggatgctcctcacgaaccggatggggtggccttagtatggaatatgaaattcaaaaagaccacacctgagtacgtcttccattgtcagagcagcgtgatgtctgtctgctttgctaggtttcatcccaacctggtggtcgggggcacttactctggacaaattgtgctgtgggataatcgttctcacaggcggacccctgtgcagcgtacacccctgtcagcagctgcgcatacccaccctgtttattgcgtgaacgttgtgggaacacagaatgcccataatctcatcactgtcagcaccgatggcaagatgtgtagttggtccttggatatgctcagcacaccccaggagagcatggaattggtctataacaagtcaaagccagttgcggtgacagggatggcgtttcctacgggagatgtgaataactttgtggttggaagtgaagagggcacggtgtataccgcatgcaggcatggctccaaggccggtatcggcgaggtgttcgagggccatcagggacctgttacgggtattaactgccacatggcagtgggtccgattgacttttcgcacttgttcgtaaccagcagcttcgactggaccgttaagctgtggactactaaacacaacaagccattatatagctttgaagataacgctgactacgtatacgacgtgatgtggtcacccgtgcatccagccctgtttgcctgcgtcgacggtatgggcaggctcgatctgtggaacctgaacaatgataccgaggtccccaccgcatccgttgccattgagggagcctccgccctcaaccgagtccgctgggctcaggccgggaaagaggtggctgtaggtgatagtgaggggagaatttgggtgtatgacgtcggtgaactcgcagtaccacacaacgatgaatggaccagattcgccagaactctggttgaaataagagcaaatcgcgccgactccgaagaagaagggacagtggagctgtccgcttag

SEQ ID NO: 306760 - DNA, 1887 bp, Artificial Sequence
  derived and/or modified sequence
atgagcgacaagagcgacctgaaggccgagctggagcggaagaagcagcggctcgcacagattcgggaggagaagaagagaaaggaagaagagcgtaaaaaaaaagaagcagatatgcagcaaaagaaggaacctgttcaggacgactccgatttggaccgaaaacgaagggaaaccgaagctctgctgcagagcatcggtattagcccagagccccccctggtgcctaccccaatgtccccctccagcaaaagtgtaagtaccccatctgaagctggctcccaagattccggtgatttgggacctctgacgagaaccctgcagtgggatacagacccttctgttctgcagctgcagtccgactcggaactgggccgacgcttgcataagctcggcgtgagtaaagtcacccaggttgacttcctgccgcgcgaggtagtctcctacagcaaggagacgcagactcctttggcaactcaccagtctgaagaagacgaggaggatgaagaaatggtcgagtcaaaagtcggccaagacagtgagcttgagaaccaggataagaaacaggaagttaaagaagctccaccccgtgagctcacagaagaggaaaaacagcaaatccttcacagcgaggaatttttgatatttttcgataggaccatccgcgtcatagagagagcactggctgaggactccgacatattctttgactactctggcagggaattggaggaaaaggatggcgatgtgcaggcaggcgccaacctgagcttcaaccgacagttttacgatgagcactggagtaagcacagggtcgttacatgtatggactggtctctccagtaccccgaattaatggtggcctcttacaataacaatgaagatgctccccacgaacctgacggagtcgccctcgtatggaatatgaaattcaaaaaaactactcctgagtacgtgtttcattgccagagcagcgtgatgagcgtgtgctttgccagatttcaccctaacctggtcgtggggggtacatactccgggcagatcgtgctttgggataaccgatcccatcggcgtaccccagtacagcgcacccccctatctgccgctgctcatacccaccctgtgtattgcgttaatgttgttggtacccagaatgcacacaatctaattactgtgagcactgacgggaaaatgtgctcctggtctctggacatgttgagcactccgcaggaatccatggagctcgtctacaacaaatccaaaccagttgcagttaccggaatggctttccccacaggagacgtgaacaatttcgtggtaggatccgaggaggggactgtttacaccgcctgccgacatggctccaaagctggcataggcgaggtgtttgaaggccatcaggggccagtcacaggcatcaattgtcacatggccgtgggtcctattgatttttctcatcttttcgtaacatcatcgttcgattggacagtgaaactgtggaccaccaagcacaacaaacctttatactcttttgaagacaacgcagactacgtgtatgatgtgatgtggagccccgtccaccctgctctattcgcttgcgtggacggcatggggaggctggatctgtggaacctgaacaatgacaccgaagtgccaaccgcatcggttgccatcgagggagccagtgcgttaaatcgtgtgaggtgggcacaagccggcaaagaggtggccgtgggcgacagtgaaggcagaatttgggtgtacgatgtcggggagctggccgtgccacacaacgacgagtggaccagattcgcccgcacactggtggagattagggcaaaccgggctgactcagaggaggaagggacagtagagctgtccgcgtag

SEQ ID NO: 306761 - DNA, 390 bp, Artificial Sequence
  derived and/or modified sequence
atgagcgacaagagcgacctgaaggccgagctggagcggaagaagcagcggttggcgcagatacgtgaggaaaagaagaggaaagaggaggaacggaagaaaaaagaggccgacatgcagcaaaaaaaagaacctgtgcaagatgactctgatcttgaccgcaaacggcgcgagacggaagcgctgttgcaaagcattggcatcagccccgagccacctctggtgccaacccccatgtcgccgtcgtcgaagtctgtgtcaacgccctcggaagccgggagtcaagacagcggcgatctcggtcctctgaccagaaccctgcagtgggacaccgatccttcagtgctgcagctgcaaagcgattcagagctcggctacatgtccgcctag

SEQ ID NO: 306762 - DNA, 1887 bp, Artificial Sequence
  derived and/or modified sequence
atgtccgataagtccgatctgaaagccgaactggaaagaaaaaaacagcggctggcacagatccgtgaggagaagaagcgcaaggaggaagagaggaagaaaaaggaagcggatatgcagcaaaagaaggaacccgtgcaggacgatagcgacttagatcgtaagcggagagagacagaagctttgctgcagagtattggaatttcacccgaaccccctctcgtgcccacccctatgagcccaagcagcaaaagtgtctccacaccttccgaggccggttcacaggattccggggatctgggtcctttgactcgcactctacagtgggacacggacccctccgttcttcaactccagtccgatagtgagttaggaagaaggctccacaaattgggagttagtaaggtcacccaggtggattttctgccaagggaagtggtgtcctacagtaaagaaacgcagacccccctcgcgacacaccagagcgaagaagacgaagaagatgaagagatggtcgaatccaaagtgggccaagatagtgagttggagaaccaggacaagaaacaggaggttaaagaggccccacccagagagttgactgaggaagagaaacagcagattctgcactcggaggaattcctcatattctttgatcgcactatacgggtcatagagcgcgcactggcagaggattctgacatattttttgattactccgggcgagaactagaggagaaggatggagacgtgcaagcaggcgctaatctgtcgttcaataggcagttttatgacgagcattggagcaagcaccgcgtggtgacttgtatggactggagcctgcaatatcctgaactcatggtggcctcttataacaacaatgaagacgccccacacgaacctgacggtgtggcactcgtgtggaatatgaagttcaaaaagacgacacccgaatacgtcttccactgtcaatcttcggtcatgtctgtgtgcttcgctcgattccacccaaatcttgtcgtcggagggacctactctggccaaattgtgctgtgggacaaccggagccaccgacgcaccccagtgcagcggacaccgctctcagccgctgctcatacgcaccctgtctactgtgtaaacgtcgtcgggacacaaaacgctcacaatttgattaccgtgagcactgatggcaagatgtgttcctggagcctcgacatgttgtctaccccacaggaaagtatggaactggtttacaacaaaagcaagccagttgccgttacaggaatggcctttcccaccggggacgtgaataactttgtggtcggttctgaagaggggactgtctacactgcctgcagacatggatctaaagcgggtatcggggaggtgttcgagggacaccaaggacctgtaactgggatcaactgccacatggccgtggggcctatcgacttctctcatttgttcgtcacttcctctttcgactggacagtgaagctctggaccactaagcacaacaaaccgctttatagctttgaagacaacgcagattacgtgtatgacgtgatgtggagcccagtccaccctgccctattcgcctgcgtggatggaatgggacgcctcgacctgtggaatctaaataatgacactgaggtcccaaccgcaagtgtggccatagagggagcaagcgccctcaatcgagtgagatgggcccaggccggtaaagaggtagcagtgggagactctgaaggacggatttgggtgtacgacgtgggagagctggcagtcccacacaacgacgagtggaccagatttgcaaggacactcgtggaaatcagggccaatcgcgcagatagcgaagaggagggcacagtggagctgtccgcctag

SEQ ID NO: 306763 - DNA, 1887 bp, Artificial Sequence
  derived and/or modified sequence
atgagcgataagagtgacctaaaagctgaattggagagaaagaaacagaggttggcacagataagagaggaaaaaaagcggaaagaagaggaacgtaagaaaaaagaagccgacatgcagcaaaaaaaggagccagtgcaggacgatagtgacctggatcgaaaaaggagggaaacagaagcactgttacagagcatcggtatcagccccgagccccctctggtccctactccaatgagcccaagctccaaatctgtgagtacacccagcgaagctggctcacaggatagtggcgatctgggccctctcactcgcacacttcaatgggacaccgatccttccgtgctgcaactgcagtctgattccgagctcggcagacggctccacaagctgggggtctcaaaggtgacgcaagttgattttctcccgcgtgaagtcgtaagttactcaaaagaaacgcagacacctctggctacccatcagtccgaggaagatgaggaggacgaggaaatggttgagtcaaaagttgggcaggactctgagttggagaatcaggataagaagcaggaggtgaaggaggcccctccacgcgaattgaccgaggaggaaaagcagcagattctacatagtgaagagtttctgatattctttgatcgtacgatacgggtgattgagagagccctcgccgaggacagcgacatatttttcgactatagtgggagggaactggaggaaaaggatggggacgtacaggcaggcgctaatttgagtttcaacagacagttttacgacgaacactggtccaaacatcgtgtcgtgacgtgcatggattggtccctgcagtatccagagctgatggtggcctcttacaacaataatgaggatgctcctcacgagcccgacggcgtcgcccttgtgtggaacatgaagtttaaaaagacaactccagaatacgtgtttcattgtcaaagtagtgtgatgtctgtttgttttgcgagattccaccccaacctcgtggtaggcggtacgtacagcggccagattgtgttatgggataatagatcacatagaagaaccccagtccaaagaacaccactgagcgctgctgctcatactcaccccgtatattgcgtaaacgtggtgggaacccagaacgcccacaacttgattacggtgtcaactgatggcaaaatgtgcagctggtctctcgacatgttgagtacaccccaggaaagtatggagcttgtgtacaacaagagcaagcccgtagctgtcactggcatggctttccccaccggagacgtgaacaacttcgttgtggggtccgaggagggcaccgtgtacactgcttgtcgtcacggcagtaaagcagggattggggaagtgttcgaggggcatcagggcccagtaaccggaataaattgccacatggctgtgggaccaattgatttctcacacttatttgttacatcttcttttgactggactgtgaaactttggactaccaaacacaataagccgttgtactctttcgaagataacgccgactacgtttatgatgtgatgtggtcacctgtgcacccggctttgttcgcctgcgtggatggcatggggcgtctcgatctttggaacctgaacaacgacactgaggtgccaacggcatctgttgcaatcgagggagcttccgcgcttaaccgcgtcagatgggctcaagccggaaaggaggttgcagtgggtgattctgagggaagaatttgggtgtatgacgtgggcgagcttgcagtaccccataatgacgagtggacacgtttcgcacgaaccctggtcgagattagggctaaccgcgcagacagcgaagaggaaggaaccgtcgagctgtctgcttag

SEQ ID NO: 306764 - DNA, 390 bp, Artificial Sequence
  derived and/or modified sequence
atgtctgataagtctgacctcaaagcggagctcgaacggaagaagcagagacttgctcagattcgggaagaaaaaaagcggaaagaagaggaaaggaagaaaaaggaggctgacatgcagcagaaaaaagaaccggtgcaggatgattcggacctcgatcgcaaacgcagggagaccgaggcccttctgcagagcatcgggatttcgccagagccacctcttgtccctacacccatgtcaccctcttctaaaagcgtcagcaccccaagcgaggcgggatcacaggattctggtgatctcggccctttgacacgtacgctacagtgggacaccgacccatcagtcctgcaattgcagtctgactcagaacttggatatatgagtgcctag

SEQ ID NO: 306765 - DNA, 2947 bp, Artificial Sequence
  derived and/or modified sequence
agactgagtgctccggggagctgtcagtgtcaggctctgggagagaggaagtgatcgctcccggaggagcgcgagccgagcggccggcgcagcgtgagacagcacatcctgcccgcgccggccccgccaccttcgggagccgcctgcaccaacgctgccgccgcccaggagccgccgccggctcggggagcccagttccgccgctgccgagcgcgtccaggaaaccaacatgtctgacaaaagtgacttaaaagctgagctagagcgcaaaaagcagcgcttagcacagataagagaagagaagaaacggaaggaagaggagaggaaaaagaaagaggctgatatgcagcagaagaaagaacccgttcaggacgactctgatctggatcgcaaacgacgagagacagaggctttgctgcaaagcattggtatctcaccggagccgcctctagtcccaacccctatgtctccctcctcgaaatcagtgagcactcccagtgaagctggaagccaagactcaggcgatctggggccattaacaaggaccctgcagtgggacacagacccctcagtgctccagctgcagtcagactcagaacttggaagaagactgcataaactgggcgtgtcaaaggtcacccaagtggatttcctgccaagggaagtagtgtcctactcaaaggagacccagactcctcttgccacgcatcagtctgaagaggatgaggaagatgaggaaatggtggaatctaaagttggccaggactcagaactggaaaatcaggacaaaaaacaggaagtgaaggaagcccctccaagagagttgacagaggaagaaaaacagcagatccttcattcagaggaatttctcatcttttttgaccggacaatacgggtaattgaaagagccctggctgaagattccgacatcttttttgactacagcggccgagagttagaggaaaaagatggggatgttcaggctggagccaatctttctttcaatcgtcagttctatgatgaacattggtccaagcatcgagtggtcacttgtatggactggtccctccagtaccctgagctgatggtggcttcttacaacaacaatgaagatgctccccatgaaccagatggagtggccttggtttggaacatgaagtttaagaaaaccacaccagaatacgtcttccactgtcagtcctctgtgatgtcggtctgcttcgcccgtttccatcctaacttggtggttggtgggacttactcgggccagattgtcctctgggacaatcgcagtcatcgaaggactccagtgcagcggacacccttatcagctgctgcacacacgcatcccgtgtactgtgtaaatgttgttgggacccagaatgctcataacctcatcactgtctccactgatggcaaaatgtgttcctggagcctggacatgctctcaactccacaggagagcatggagctggtgtacaataagtccaagcctgtcgctgttaccggaatggctttcccaacgggagacgtcaataacttcgtggttggcagtgaggaaggtacagtctacacggcttgtcgtcatggaagcaaagcaggtattggtgaggtctttgaaggtcaccaagggccagtgacaggaattaactgccacatggcagtgggcccaatcgacttttctcacctgtttgtcacatcatcatttgactggactgtcaaactgtggaccaccaagcacaacaagccgctctactcctttgaagacaatgcagactatgtgtacgatgtcatgtggtcccccgtgcatcctgcgctttttgcctgcgtggacgggatggggcgcttggacctctggaacctcaacaatgacaccgaggttccaacagcaagtgtggccattgagggggcatccgccctaaaccgtgttcgttgggcccaagctggcaaagaagttgctgttggggactcggaaggccgtatttgggtctatgacgttggagagcttgcagttccccacaatgatgaatggacccgatttgccaggacccttgtggaaattcgtgctaacagagctgatagcgaggaggaaggcactgttgagttatctgcctagtggaaatgagccacccccactgcagcccccacctttgtgtcctagagctcagcgtctgcagtcaagtctcttgtattcggtgtccattcagtatcagtattgctgtgatattttgggtgccatattgtgccagctttgctccaagtattctaaatgtgtcccatcatgctttccactgacccaaaattcaccacagcatttctatctttatatttctgtctcaaaaatgaagagaagggggttatgggttaagttgctgccttttaactactttgtagctgtatttaatagctggaaacctctggttaaatttgtgcttacatgcactcctggcatagtcctattaaatccatatgaagccagatatgattgggtgcagatgtggtgttcctcatattatggtacagggccaaagacttgagacgtggtgttttacatggtgactcacattatgaatggatttactagaagaacattgctgctccttatttattgtagtgtgctgcatggaacgtatttatttgaaagcattaaaataaatgatcctagagcatgtgcataatgagaggactgtattctctctgctgctgttgaggttatattaagttccacatagcaattacagtatgccagttccactgaagacatgaaatctttagaggtttcttgcagtgaacgaaatgaattttaatgcctattatttctgggtactttaacaatatttcaaatatcattgaccactaatacttctcactgaagctaacacagtctgacaaaagtctatggttcctaaatatgacatcagtgttgccaataaaatgtttcaaacca

SEQ ID NO: 306766 - DNA, 2393 bp, Artificial Sequence
  derived and/or modified sequence
atatctctaggggtttatgacaggctgttttcttttctcagtgtggggatgaattgctccattatcatctaaattggaagtcatgatgatggaaaccaacatgtctgacaaaagtgacttaaaagctgagctagagcgcaaaaagcagcgcttagcacagataagagaagagaagaaacggaaggaagaggagaggaaaaagaaagaggctgatatgcagcagaagaaagaacccgttcaggacgactctgatctggatcgcaaacgacgagagacagaggctttgctgcaaagcattggtatctcaccggagccgcctctagtcccaacccctatgtctccctcctcgaaatcagtgagcactcccagtgaagctggaagccaagactcaggcgatctggggccattaacaaggaccctgcagtgggacacagacccctcagtgctccagctgcagtcagactcagaacttggaagaagactgcataaactgggcgtgtcaaaggtcacccaagtggatttcctgccaagggaagtagtgtcctactcaaaggagacccagactcctcttgccacgcatcagtctgaagaggatgaggaagatgaggaaatggtggaatctaaagttggccaggactcagaactggaaaatcaggacaaaaaacaggaagtgaaggaagcccctccaagagagttgacagaggaagaaaaacagcagatccttcattcagaggaatttctcatcttttttgaccggacaatacgggtaattgaaagagccctggctgaagattccgacatcttttttgactacagcggccgagagttagaggaaaaagatggggatgttcaggctggagccaatctttctttcaatcgtcagttctatgatgaacattggtccaagcatcgagtggtcacttgtatggactggtccctccagtaccctgagctgatggtggcttcttacaacaacaatgaagatgctccccatgaaccagatggagtggccttggtttggaacatgaagtttaagaaaaccacaccagaatacgtcttccactgtcagtcctctgtgatgtcggtctgcttcgcccgtttccatcctaacttggtggttggtgggacttactcgggccagattgtcctctgggacaatcgcagtcatcgaaggactccagtgcagcggacacccttatcagctgctgcacacacgcatcccgtgtactgtgtaaatgttgttgggacccagaatgctcataacctcatcactgtctccactgatggcaaaatgtgttcctggagcctggacatgctctcaactccacaggagagcatggagctggtgtacaataagtccaagcctgtcgctgttaccggaatggctttcccaacgggagacgtcaataacttcgtggttggcagtgaggaaggtacagtctacacggcttgtcgtcatggaagcaaagcaggtattggtgaggtctttgaaggtcaccaagggccagtgacaggaattaactgccacatggcagtgggcccaatcgacttttctcacctgtttgtcacatcatcatttgactggactgtcaaactgtggaccaccaagcacaacaagccgctctactcctttgaagacaatgcagactatgtgtacgatgtcatgtggtcccccgtgcatcctgcgctttttgcctgcgtggacgggatggggcgcttggacctctggaacctcaacaatgacaccgaggttccaacagcaagtgtggccattgagggggcatccgccctaaaccgtgttcgttgggcccaagctggcaaagaagttgctgttggggactcggaaggccgtatttgggtctatgacgttggagagcttgcagttccccacaatgatgaatggacccgatttgccaggacccttgtggaaattcgtgctaacagagctgatagcgaggaggaaggcactgttgagttatctgcctagtggaaatgagccacccccactgcagcccccacctttgtgtcctagagctcagcgtctgcagtcaagtctcttgtattcggtgtccattcagtatcagtattgctgtgatattttgggtgccatattgtgccagctttgctccaagtattctaaatgtgtcccatcatgctttccactgacccaaaattcaccacagcatttctatctttatatttctgtctcaaaaatgaagagaagggggttatgggttaagttgctgccttttaactactttgtagctgtatttaatagctggaaacctctggttaaatttgtgcttacatgcactcctggcatagtcctattaaatccatatgaagccagatatgattgggtgcagatgtggtgttcctcatattatggtaca

SEQ ID NO: 306767 - DNA, 540 bp, Artificial Sequence
  derived and/or modified sequence
gaaatctccatgcatccgagctcagtggaggaatgtttattgagtccatagaaatttgagcagggcatatctctaggggtttatgacaggctgttttcttttctcagtgtggggatgaattgctccattatcatctaaattggaagaaaccaacatgtctgacaaaagtgacttaaaagctgagctagagcgcaaaaagcagcgcttagcacagataagagaagagaagaaacggaaggaagaggagaggaaaaagaaagaggctgatatgcagcagaagaaagaacccgttcaggacgactctgatctggatcgcaaacgacgagagacagaggctttgctgcaaagcattggtatctcaccggagccgcctctagtcccaacccctatgtctccctcctcgaaatcagtgagcactcccagtgaagctggaagccaagactcaggcgatctggggccattaacaaggaccctgcagtgggacacagacccctcagtgctccagctgcagtcagactcagaacttgggtatatgtctgc

SEQ ID NO: 306768 - protein, 764 aa, Artificial Sequence
  derived and/or modified sequence
MIEPFGNQYIVARPVYSTNAFEENHKKTGRHHKTFLDHLKVCCSCSPQKAKRIVLSLFPIASWLPAYRLKEWLLSDIVSGISTGIVAVLQGLAFALLVDIPPVYGLYASFFPAIIYLFFGTSRHISVGPFPILSMMVGLAVSGAVSKAVPDRNATTLGLPNNSNNSSLLDDERVRVAAAASVTVLSGIIQLAFGILRIGFVVIYLSESLISGFTTAAAVHVLVSQLKFIFQLTVPSHTDPVSIFKVLYSVFSQIEKTNIADLVTALIVLLVVSIVKEINQRFKDKLPVPIPIEFIMTVIAAGVSYGCDFKNRFKVAVVGDMNPGFQPPITPDVETFQNTVGDCFGIAMVAFAVAFSVASVYSLKYDYPLDGNQELIALGLGNIVCGVFRGFAGSTALSRSAVQESTGGKTQIAGLIGAIIVLIVVLAIGFLLAPLQKSVLAALALGNLKGMLMQFAEIGRLWRKDKYDCLIWIMTFIFTIVLGLGLGLAASVAFQLLTIVFRTQFPKCSTLANIGRTNIYKNKKDYYDMYEPEGVKIFRCPSPIYFANIGFFRRKLIDAVGFSPLRILRKRNKALRKIRKLQKQGLLQVTPKGFICTVDTIKDSDEELDNNQIEVLDQPINTTDLPFHIDWNDDLPLNIEVPKISLHSLILDFSAVSFLDVSSVRGLKSILQEFIRIKVDVYIVGTDDDFIEKLNRYEFFDGEVKSSIFFLTIHDAVLHILMKKDYSTSKFNPSQEKDGKIDFTINTNGGLRNRVYEVPVETKF

SEQ ID NO: 306769 - protein, 651 aa, Artificial Sequence
  derived and/or modified sequence
MLLRKIIKRQEDIIRHFWIISKCVVASWLPAYRLKEWLLSDIVSGISTGIVAVLQGLAFALLVDIPPVYGLYASFFPAIIYLFFGTSRHISVGPFPILSMMVGLAVSGAVSKAVPDRNATTLGLPNNSNNSSLLDDERVRVAAAASVTVLSGIIQLAFGILRIGFVVIYLSESLISGFTTAAAVHVLVSQLKFIFQLTVPSHTDPVSIFKVLYSVFSQIEKTNIADLVTALIVLLVVSIVKEINQRFKDKLPVPIPIEFIMTVIAAGVSYGCDFKNRFKVAVVGDMNPGFQPPITPDVETFQNTVGDCFGIAMVAFAVAFSVASVYSLKYDYPLDGNQELIALGLGNIVCGVFRGFAGSTALSRSAVQESTGGKTQIAGLIGAIIVLIVVLAIGFLLAPLQKSVLAALALGNLKGMLMQFAEIGRLWRKDKYDCLIWIMTFIFTIVLGLGLGLAASVAFQLLTIVFRTQFPKCSTLANIGRTNIYKNKKDYYDMYEPEGVKIFRCPSPIYFANIGFFRRKLIDAVGFSPLRILRKRNKALRKIRKLQKQGLLQVTPILQEFIRIKVDVYIVGTDDDFIEKLNRYEFFDGEVKSSIFFLTIHDAVLHILMKKDYSTSKFNPSQEKDGKIDFTINTNGGLRNRVYEVPVETKF

SEQ ID NO: 306770 - protein, 120 aa, Artificial Sequence
  derived and/or modified sequence
MIEPFGNQYIVARPVYSTNAFEENHKKTGRHHKTFLDHLKVCCSCSPQKAKRIVLSLFPIASWLPAYRLKEWLLSDIVSGISTGIVAVLQGLAFALLVDIPPVYGLYASFFPAIIYLFFG

SEQ ID NO: 306771 - DNA, 2295 bp, Artificial Sequence
  derived and/or modified sequence
atgattgaaccttttggcaatcaatacattgtcgctcgacccgtgtattccacaaatgcttttgaagagaaccataaaaagacaggaaggcatcataaaaccttcttagaccatctgaaagtctgttgttcatgcagtccacagaaagctaagagaatcgttttatcattatttcccatcgcttcatggctgcccgcctaccggctcaaggaatggctgctgtcagatattgtgagtggcatttccaccgggattgttgcagttctgcagggcctggcctttgccctgctggttgacattccacccgtgtatggtctgtacgcttcatttttccccgcaattatttacctcttctttggcacctccagacacatttcagtgggcccgtttccaatcctgtccatgatggtgggcctggccgtctccggagctgtgtctaaggcggtgcctgaccgtaacgccaccacgctgggtctgcccaataattctaacaattcttcactacttgacgatgagcgcgtccgggtcgctgccgccgcatccgttacagttttgagcgggataattcagctggccttcgggattctgaggattggatttgtcgtaatttatctcagcgaatctttaattagcgggttcacaaccgccgctgcggtgcatgtgttagtatcacagttgaagtttatcttccagctgaccgtgcccagccacaccgatccggtgtccatatttaaagtcctgtattcagtgtttagccagattgagaaaactaatatcgcagacctggtgacagctctcatcgtcctgcttgtcgtgtccatcgtcaaggagatcaatcaaagatttaaggacaagctgcctgtgcccatccccatcgaatttattatgactgtgattgccgctggtgtgtcttacggctgcgatttcaagaatagatttaaagtcgctgtcgttggcgacatgaatccaggcttccagccccccattacacccgacgtagagactttccaaaacaccgtcggagattgttttggcattgcgatggtggccttcgcagtagctttcagcgtggcctctgtgtactctttgaaatacgactaccctctggacgggaaccaggagctcatcgccctcggcttagggaatatcgtgtgcggagtttttcgaggattcgctggtagtaccgcactgagtcgtagtgccgtgcaggagtcgaccggcggcaagactcaaatcgccggtctgatcggtgctatcattgtactaatcgtggtgttggcaatagggttcctactcgctccactccagaaaagtgtgctcgctgcactagctctgggaaacttgaagggtatgctgatgcagtttgccgaaataggtcggctgtggcggaaagataagtatgactgtttaatatggatcatgacgttcattttcacaatcgtgttggggttggggctcggcctagccgcttcagttgcctttcagcttcttacaatagtgttccgtacacaatttccaaaatgttccaccctggctaacattggcaggactaatatctacaaaaacaagaaagattattatgatatgtacgagcctgagggcgttaagatcttccgctgcccttccccgatctacttcgctaacataggcttctttaggagaaaactgatcgacgcggtgggcttctcgccactaagaattctccgcaaacgcaacaaggccctcagaaagataagaaagcttcagaagcagggactcttgcaggtgacacctaaagggttcatatgcaccgtcgacacaattaaagactcagacgaagagctcgacaacaatcagatcgaggtgctcgatcagcccataaatacaaccgaccttccattccacatcgactggaacgatgacctcccacttaacatcgaagttcctaaaatttctcttcatagcctgatcctcgattttagcgccgtgagcttcctcgatgtgtcgtcagttcgtggtctgaaatccattctgcaggaattcatccggatcaaagttgatgtttatatcgtaggaacagacgacgatttcatagagaaactcaataggtatgaattcttcgacggggaggttaagagcagcatctttttcctgactatccacgatgctgtactgcacatcctcatgaagaaggattattccacaagcaaatttaatccttcccaagagaaagacggtaaaattgatttcaccatcaacacaaacgggggcttgagaaaccgtgtctacgaggtgccagtcgagactaagttttag

SEQ ID NO: 306772 - DNA, 1956 bp, Artificial Sequence
  derived and/or modified sequence
atgttattgaggaaaatcatcaaacggcaggaagatattattcgacacttctggataatttccaaatgcgtcgttgcttcatggctgccagcctaccggctcaaggaatggctactcagcgacattgtctcgggcatttcgaccggtatagttgcggtgctccagggcctggcctttgcactgctcgtcgacattccacctgtatacggactgtatgcatcgttcttcccagctattatctatctcttttttggaacatcccggcacatttcagttggaccatttcccattctgagcatgatggttggcctcgccgtttctggcgccgtcagcaaggcagtccccgacaggaacgctacgacactcggcctccccaacaacagtaataattcatctcttctggacgacgaacgggtgcgagtcgctgccgctgcctcggttacagtgctctctggcatcatccagctcgccttcggcatcctaagaatcggcttcgtggtgatatatttatctgagagcttgatttcggggttcacaaccgccgccgccgtgcacgtgttggtatctcaactcaagttcatcttccagttgacagtgccttctcatacagacccagtctccatctttaaagtgctgtactcagttttctcccagattgagaagaccaatatcgccgacctggtgacggccctcattgtcctgctggttgtgagtattgtaaaggagatcaatcagcgatttaaggataagctgccagtgcctattcccatcgaattcatcatgaccgtcatcgccgccggcgtctcgtacggctgtgacttcaagaatcgcttcaaagtggcagtggtcggggacatgaaccccggctttcagccaccaataacccctgacgtggaaactttccagaataccgtcggagattgtttcggaattgccatggttgcctttgctgtcgcgttctccgtggccagcgtgtactcactaaagtacgattatccgctggacggaaatcaggaacttatagcgctggggctcgggaacatcgtgtgcggggtgttccgaggattcgcgggttctaccgctctctctagaagcgccgtgcaagaatctaccggggggaagacacagattgcaggactcatcggggcaattattgtgctgatcgtggtcctcgccatcggattcctccttgcgccccttcagaaatcagtgttggccgcgctggctttgggaaacctgaagggcatgcttatgcagtttgccgagatcgggagactgtggcgaaaagataagtatgattgtctgatctggataatgacatttatctttactatcgtgctgggactaggtctaggacttgcagcctccgtcgcttttcaacttctcacaattgtgttcaggacccagttccctaagtgctctaccctagccaatatcggacgcacaaatatttacaagaacaagaaggactattatgatatgtatgaacctgagggggtgaagatctttaggtgcccttctccaatctatttcgctaacataggcttcttccggaggaagctcatcgacgctgtcggttttagccccctcagaatcttgcggaaaaggaacaaggccctcaggaagattcgaaagctgcagaaacaagggctgctccaggtgactcctatccttcaggagttcatccggattaaggtagacgtgtacattgtggggaccgacgacgattttattgaaaagctgaacaggtatgagttttttgacggggaggtcaagagctccatcttctttctgactatccacgacgcggtactgcacattctcatgaagaaggattactcaacttcgaagtttaacccaagtcaggaaaaagacggcaagatcgatttcacaatcaacactaatgggggtcttagaaacagggtctacgaggtgccagtggaaacgaagttctag

SEQ ID NO: 306773 - DNA, 363 bp, Artificial Sequence
  derived and/or modified sequence
atgattgagccttttggaaatcagtacattgtcgcaaggccagtgtactccactaacgctttcgaggagaatcataaaaaaacaggccggcaccacaaaacctttctggaccatctgaaagtctgttgtagctgttctccccaaaaggctaagcgcatcgttttgagtctgtttccgattgcatcctggctgcccgcctatagactgaaagaatggctgctcagcgacattgtttcaggcatatctacagggattgtcgctgtgttgcagggcctcgcgttcgctttacttgtggacatcccgccagtgtatggcctatacgccagcttttttcccgccatcatctacctgtttttcggatag

SEQ ID NO: 306774 - DNA, 2295 bp, Artificial Sequence
  derived and/or modified sequence
atgattgagccctttggaaaccagtacatcgtggcccggcctgtgtacagcaccaatgcctttgaggagaaccacaagaagacaggccgccaccacaagaccttcctggaccacctgaaggtgtgctgcagctgcagcccccagaaggccaagagaattgtgctgagcctcttccccatcgcctcctggctgcctgcctaccgcctgaaggagtggctgctgagtgacatcgtgtctggcatcagcactggaattgtggccgtgctgcagggcctggcctttgccctgctggtggacatcccccctgtgtatggcctgtatgccagcttcttccctgccatcatctacctgttcttcggcaccagccgccacatctctgtgggccccttccccatcctgtccatgatggtgggcctggccgtgtctggagctgtgtccaaggctgtgcctgacagaaatgccaccaccctgggcctgcccaacaacagcaacaacagcagcctgctggatgatgagcgggtgcgggtggccgctgctgcctctgtgacagtgctgagcggcatcatccagctggccttcggcatcctgcgcatcggctttgtggtgatctacctgtctgagagcctcatcagcggcttcaccacagctgctgctgtgcacgtgctggtgtcccagctgaagttcatcttccagctgactgtgcccagccacacagatcctgtgtccatcttcaaggtgctgtacagcgtcttcagccagatcgagaagaccaacattgctgacctggtgacagccctgattgtgctgctggtggtgtccatcgtgaaggagatcaaccagcgcttcaaggacaagctgcctgtgcccatccccatcgagttcatcatgacagtgattgctgctggggtgtcctatggctgtgacttcaagaaccgcttcaaggtggccgtggtgggggacatgaaccctggcttccagccccccatcaccccagatgtggagaccttccagaacacagtgggggactgcttcggcatcgccatggtggcctttgctgtggccttctctgtggcctctgtgtacagcctgaagtatgactaccccctggatggcaaccaggagctgattgccctgggcctgggcaacatcgtgtgtggggtcttccggggctttgctggcagcacagccctgagccgctctgctgtgcaggagagcactggaggcaagacccagattgctggcctcatcggggccatcatcgtgctgattgtggtgctggccatcggcttcctgctggcccccctgcagaagtctgtgctggccgccctggccctgggcaacctgaagggcatgctgatgcagtttgctgagatcggccgcctgtggaggaaggacaagtatgactgcctgatctggatcatgaccttcatcttcaccatcgtgctgggcctgggcctgggcctggccgcctctgtggccttccagctgctgaccatcgtgttccgcacccagttccccaagtgcagcaccctggccaacatcggccgcaccaacatctacaagaacaagaaggactactatgacatgtatgagcctgagggcgtgaagatcttccgctgccccagccccatctactttgccaacatcggcttcttccggaggaagctgattgatgctgtgggcttcagccccctgcgcatcctgaggaagaggaacaaggccctgaggaagatcaggaagctgcagaagcagggcctgctgcaggtgacccccaagggcttcatctgcaccgtggacaccatcaaggacagtgatgaggagctggacaacaaccagatcgaggtgctggaccagcccatcaacaccacagacctgcccttccacatcgactggaatgatgacctgcccctgaacatcgaggtgcccaagatcagcctgcacagcctcatcctggacttctctgctgtgtccttcctggatgtgtcctctgtgcggggcctgaagagcatcctgcaggagttcatccgcatcaaggtggatgtgtacatcgtgggcacagatgatgacttcatcgagaagctgaacagatatgagttctttgatggagaggtgaagagcagcatcttcttcctgaccatccatgatgctgtgctgcacatcctgatgaagaaggactacagcaccagcaagttcaaccccagccaggagaaggatggcaagattgacttcaccatcaacaccaacggcggcctgaggaacagagtgtatgaggtgcctgtggagaccaagttctag

SEQ ID NO: 306775 - DNA, 1956 bp, Artificial Sequence
  derived and/or modified sequence
atgctgctgaggaagatcatcaagaggcaggaggacatcatccgccacttctggatcatcagcaaatgtgtggtggcctcctggctgcctgcctaccgcctgaaggagtggctgctgagtgacatcgtgtctggcatcagcacaggcatcgtggccgtgctgcagggcctggcctttgccctgctggtggacatcccccctgtgtatggcctgtatgccagcttcttccctgccatcatctacctgttcttcggcaccagccgccacatctctgtgggccccttccccatcctgtccatgatggtgggcctggccgtgtctggagctgtgtccaaggctgtgcctgacagaaatgccaccaccctgggcctgcccaacaacagcaacaacagcagcctgctggatgatgagcgggtgcgggtggccgccgccgcctctgtgacagtgctgagcggcatcatccagctggccttcggcatcctgagaattggatttgtggtgatctacctgtctgagagcctcatcagcggcttcaccacagctgctgctgtgcacgtgctggtgtcccagctgaagttcatcttccagctgactgtgcccagccacacagatcctgtgtccatcttcaaggtgctgtacagcgtcttcagccagatcgagaagaccaacattgctgacctggtgacagccctgattgtgctgctggtggtgtccatcgtgaaggagatcaaccagcgcttcaaggacaagctgcctgtgcccatccccatcgagttcatcatgacagtgattgctgctggggtgtcctatggctgtgacttcaagaaccgcttcaaggtggccgtggtgggggacatgaaccctggcttccagccccccatcaccccagatgtggagaccttccagaacacagtgggggactgctttggaattgccatggtggcctttgctgtggccttctctgtggcctctgtgtacagcctgaagtatgactaccccctggatggcaaccaggagctgattgccctgggcctgggcaacatcgtgtgtggggtcttccggggctttgctggcagcacagccctgagccgctctgctgtgcaggagagcactggaggcaagacccagattgctggcctgattggagccatcatcgtgctgattgtggtgctggccatcggcttcctgctggcccccctgcagaagtctgtgctggccgccctggccctgggcaacctgaagggcatgctgatgcagtttgctgagatcggccgcctgtggaggaaggacaagtatgactgcctgatctggatcatgaccttcatcttcaccatcgtgctgggcctgggcctgggcctggccgcctctgtggccttccagctgctgaccatcgtgttccgcacccagttccccaagtgcagcaccctggccaacattggaagaaccaacatctacaagaacaagaaggactactatgacatgtatgagcctgagggcgtgaagatcttccgctgccccagccccatctactttgccaacatcggcttcttccggaggaagctgattgatgctgtgggcttcagccccctgcgcatcctgaggaagaggaacaaggccctgaggaagatcaggaagctgcagaagcagggcctgctgcaggtgacccccatcctgcaggagttcatccgcatcaaggtggatgtgtacatcgtgggcacagatgatgacttcatcgagaagctgaacagatatgagttctttgatggagaggtgaagagcagcatcttcttcctgaccatccatgatgctgtgctgcacatcctgatgaagaaggactacagcaccagcaagttcaaccccagccaggagaaggatggcaagattgacttcaccatcaacaccaatggaggcctgaggaacagagtgtatgaggtgcctgtggagaccaagttctag

SEQ ID NO: 306776 - DNA, 363 bp, Artificial Sequence
  derived and/or modified sequence
atgattgagccctttggaaaccagtacatcgtggcccggcctgtgtacagcaccaatgcctttgaggagaaccacaagaagacaggccgccaccacaagaccttcctggaccacctgaaggtgtgctgcagctgcagcccccagaaggccaagagaattgtgctgagcctcttccccatcgcctcctggctgcctgcctaccgcctgaaggagtggctgctgagtgacatcgtgtctggcatcagcactggaattgtggccgtgctgcagggcctggcctttgccctgctggtggacatcccccctgtgtatggcctgtatgccagcttcttccctgccatcatctacctgttctttggatag

SEQ ID NO: 306777 - DNA, 2295 bp, Artificial Sequence
  derived and/or modified sequence
atgatcgagcccttcggcaaccagtacatcgtggcccggcccgtgtacagtactaatgcgttcgaagagaaccataaaaagactggcaggcatcacaagaccttcctggatcacctgaaagtgtgttgcagttgctctcctcaaaaagcaaagcgcattgttctgtccttattccccattgccagctggttgcctgcttacagattaaaagagtggctcctgagcgatatcgtctctggtatttccactggaatcgtggctgtcctgcaggggctggctttcgccttactcgtcgacatacccccagtttatggcctttatgcatctttctttcccgcaattatctacctcttcttcgggacatctaggcacatctccgtgggtccgtttccaatcctgtctatgatggttggattggctgtgagcggcgccgtgtcaaaagcagttcctgaccgcaacgctaccacacttggtctccctaataactccaacaactcctctttgcttgatgacgagcgcgtgcgggtggcagctgccgccagtgtgacagtcctgtccggaatcatccagttagcattcggcattcttaggattgggttcgtggtaatctacctgagcgaatcactaattagcgggttcacaacggccgccgcagtgcacgtgctggtgtcacagctgaagttcatctttcaactgacagtgccatcccacactgacccagtgagtatcttcaaggtcctttattccgtgttttcacagattgagaagactaacatagctgacctggtcacagctctaatagtgttgttagtggtgagcatagtgaaagagatcaaccagcgctttaaggacaaactcccagtgcccatcccaatagagtttatcatgactgtgattgctgctggcgtctcctatggctgcgattttaagaacagattcaaggtggccgttgtgggggacatgaacccagggtttcaaccaccgatcacacctgatgtggaaactttccaaaacaccgttggcgactgtttcggaatcgccatggtggctttcgcagttgcctttagcgttgccagtgtgtactcactcaaatatgattatcccctggatgggaatcaggagctgatcgcccttggcttggggaatattgtttgcggtgtttttcgaggattcgctgggagtactgccctttctcggtctgccgttcaggagagcacaggtggaaagactcagatcgctgggttgataggcgccataatagtcctgatcgttgtgctggctatcggctttctgctagcacccttgcagaagtccgtcctggctgccttagcactggggaacctgaagggcatgctaatgcaattcgccgagatcggccgtctctggcggaaggacaaatatgactgtcttatttggattatgactttcatctttaccatcgtgctggggttgggtttaggcctcgccgcgtccgttgctttccaattgctcactatcgtgttcagaacccagttcccaaagtgctctacattggccaacatcggaaggacaaacatatataagaacaagaaggactactacgacatgtacgagcccgagggagtgaagattttccgctgtccttcaccaatttattttgctaatattggcttcttcaggaggaaactaatcgacgctgtgggcttcagcccactgagaattcttcgcaagcgcaacaaggcactgcggaagattcggaaactgcagaagcaggggctgctgcaggtgactcccaaaggatttatctgcactgtggatacaattaaagactcagatgaagagctggacaataaccaaatcgaggtgctggaccagccgatcaatacaaccgatctgccattccacattgattggaacgacgatctcccgttgaacatcgaggtccccaagatctctttacatagtctaatcctggacttttctgcagtgtccttcctcgacgtgtccagtgtgagagggttgaagagcattttacaggaatttattcggattaaagtggatgtgtatattgtcgggaccgacgacgatttcatcgaaaagctgaaccgatacgagttctttgatggagaggtcaagagtagcatattttttctgacaatacatgacgctgtattgcatattctgatgaagaaggactattctactagcaaatttaacccttctcaggagaaagatgggaagatcgactttacgatcaacacaaacggcggccttcgaaatagggtgtacgaggtacctgtggaaaccaagttctag

SEQ ID NO: 306778 - DNA, 1956 bp, Artificial Sequence
  derived and/or modified sequence
atgctgctgcggaagatcatcaagcggcaggaggacatcatccggcacttctggatcatttcaaagtgcgtggtagcctcttggcttccggcctatagactcaaggagtggctactttctgacatcgtcagtggaatttccacaggcatcgtcgcagtcctgcaaggtctggctttcgcccttttggtcgacatccctccagtctacgggctctacgcttcatttttccccgctataatttacctcttcttcggaaccagcagacatattagtgtgggtccgtttcccattctcagcatgatggttggattagcagtttccggtgctgtctcgaaagccgtgccagataggaatgctacaacgctcggcctgcctaataatagcaataactccagcctgctggacgatgaacgggtgcgggttgcagccgctgccagtgttacagtgctcagcggtatcatccagctcgccttcggaatcctgaggatcgggttcgtggtgatttacctgtccgaatctctgatttccgggtttaccaccgctgcggctgtgcacgtactcgtatcccagttaaagtttatcttccagctgaccgtgccgagccacaccgatccagtgtccatcttcaaggtcttgtattctgtgttttcacagattgagaagacaaacatagcggatctggtgacagccctcatcgtcctcctcgtcgtgagcattgtgaaggaaatcaatcagagattcaaggataaactgcctgtcccaattccgatcgagttcattatgaccgtcatagccgctggtgtatcgtacggctgtgatttcaagaataggtttaaggtggcagtcgtcggggatatgaatcctgggttccagcctcccattactcctgacgtggaaacttttcagaatactgtaggggattgttttggcatcgcaatggttgcttttgccgtggccttcagcgttgcctccgtgtactcgttgaagtacgactatcctctggatgggaaccaggagttaatagctctaggcctggggaacatagtctgcggagtgtttcgtgggtttgctggctctaccgctctgtccagaagcgccgtgcaggagagcactggagggaaaacgcagattgccggcctgatcggcgccatcatcgtcctgatcgtggtccttgctattggattcctattagctcctctgcagaagtccgtgctggctgcactggctctgggaaatctcaaaggcatgcttatgcaattcgcagagatagggcgtctctggcgcaaagacaaatacgactgtctgatttggattatgactttcatattcaccatcgtgcttggtcttggtcttggcctggccgcaagcgttgcttttcagcttcttaccatcgtgtttagaacacagtttccaaaatgctctacgctcgcgaacatcgggaggaccaacatctacaaaaacaaaaaagactactacgatatgtatgaaccagagggggttaagatatttcggtgtccctctccaatctacttcgcgaacattggttttttccgccgcaagctgattgatgccgtgggcttcagcccgcttcgcatccttaggaaacgcaataaggctctgcggaagattcggaagctgcagaagcagggcctgcttcaagtgacacctattttgcaggagtttatcagaatcaaagtggacgtatatatcgttggaactgacgacgactttattgaaaagttgaataggtacgagttttttgacggagaggtaaagagttctatcttctttctgaccattcacgatgccgtgctgcatatcctcatgaagaaggactatagcaccagcaaatttaaccctagccaggaaaaggacggcaaaatcgacttcacgattaacacaaacggtggtctaaggaaccgcgtgtacgaagttcccgtagaaactaagttttag

SEQ ID NO: 306779 - DNA, 363 bp, Artificial Sequence
  derived and/or modified sequence
atgatcgagcccttcggcaaccagtacatcgtggcccggcccgtgtattcaaccaatgcctttgaggaaaaccataagaagacgggcaggcaccacaagactttcctggaccatctcaaagtgtgctgcagttgctcaccccagaaggcgaaaagaatcgtcctgtcgctatttccaatcgcgagctggctcccagcttaccgtctgaaagagtggcttctgtccgatatcgtctcgggaatatccaccgggatagtggcagttctgcagggactggcctttgcactgcttgtggacatcccaccggtgtacggtctgtacgcttcattcttccccgcgatcatatacttattctttggttag

SEQ ID NO: 306780 - DNA, 2295 bp, Artificial Sequence
  derived and/or modified sequence
atgatcgagccctttggcaatcagtatatcgtagctagacctgtctattccactaatgcctttgaagagaaccacaaaaagaccggaaggcaccacaagactttcctggatcatctaaaagtgtgttgtagctgttcaccccagaaagccaaacgcatcgtcttgtccctgttcccgatagcttcctggctgccggcttacagactgaaggagtggttgttgtctgacattgtttcaggcatttcgactggcattgtcgcagtccttcaaggcctggcttttgctctgttggtcgatattccaccggtatacggattatatgcaagcttcttccctgccattatctacctgttctttggcactagtcgccatatttcagtaggaccatttccaatcctgagtatgatggtcggtctcgcagtgtccggcgctgtgagcaaggctgtgccggaccgcaacgctaccactcttggtctgcccaacaacagcaataacagttccctcctcgatgacgagcgggtacgcgtcgccgcagccgcatccgtgaccgtcctgtcagggatcatacagctggcctttggaatactcagaatcgggttcgtggtcatttacttgtctgagtcactgataagtggctttactacggccgcagctgtccacgttcttgtgtcccaactgaaattcattttccagctgaccgtaccatcgcacactgaccctgtgtctattttcaaagttctctactctgtgtttagccagatcgagaaaaccaacatcgctgatcttgtgacggctctgatcgtactcctcgtggtctctattgttaaggagattaaccaacgatttaaagataaactccccgtgccgatccccatagaattcatcatgacagtgatcgctgctggagtctcatacggttgcgacttcaaaaatcgctttaaggtggcagtggtgggcgatatgaaccctggcttccagcccccaataactccggacgtggagactttccagaatactgtaggagattgtttcggaatagctatggtggcgttcgccgttgccttctccgttgctagcgtgtactctctgaagtatgactaccctctagacggaaatcaggaattaatagccctgggcctaggcaacattgtttgcggcgtttttaggggattcgcaggctcgaccgccctctccagatccgcggtgcaggagagtaccggcggaaagactcagatcgcaggcctgataggagcaataattgtgttgatcgtggttctagctatcggcttcctcttagctccattacagaagtccgttctggctgctctggcattaggtaatctgaaaggcatgctcatgcaattcgccgaaattgggagattatggcgaaaagacaagtacgactgccttatttggattatgaccttcatttttactattgtgctgggtcttggcttggggctcgcagcctccgttgcatttcagttattgacaatagtgtttagaactcagtttcccaagtgctctactctggccaacatcggacgcaccaatatctataagaataaaaaggattattacgacatgtatgagcctgagggcgttaaaatctttcgatgtccctcccctatctacttcgccaacattggattctttagaaggaaactcatcgatgcggtgggcttctctccacttagaatccttcgcaaacgcaataaggccttgcgtaaaattcgtaaactgcaaaaacagggcctgctccaggtgacccctaagggctttatctgtaccgtagatacaattaaagactcggatgaggagctcgacaacaaccagattgaggttctggaccagcctattaacacgactgacctcccattccatattgattggaatgacgatctgcctctcaacattgaagttcctaaaatctccctgcactccctgatacttgacttctcagctgtttctttcctggatgtctccagcgttcgcggacttaaaagtattctacaagaatttatccggataaaggtggatgtgtacatagtaggcacggacgatgactttatcgagaagctcaaccgctatgaatttttcgatggcgaggttaagtcaagtatcttttttctcactattcatgacgccgttctccacatcctgatgaagaaggattatagtacatcaaagttcaacccaagtcaggaaaaagatggtaaaattgactttaccatcaatactaacggcggtctgcgcaatagagtgtatgaggttcctgtggaaaccaaattttag

SEQ ID NO: 306781 - DNA, 1956 bp, Artificial Sequence
  derived and/or modified sequence
atgctcctgcgcaaaattataaagagacaggaggatatcattaggcatttctggatcatatctaagtgcgtggtggcgtcctggttacccgcttataggctgaaggaatggttactgtccgatatcgttagtgggatctctactgggatcgtagccgtgttgcagggccttgctttcgccctgctcgttgacatacctccagtgtacggtctgtacgcctccttcttcccagctatcatctacctcttttttggtacaagtaggcacataagcgtcggcccttttcccattctctccatgatggttggcctcgcagtctctggggctgtttctaaggcagtgcctgatcgcaatgccaccaccctggggctacctaacaacagtaacaacagctccttgttggacgacgagcgagtgcgcgtagccgctgctgccagcgtaaccgtcttaagtggtatcatccagctggcctttggaattttacggatcggctttgttgtgatctatctctccgagagccttatttctgggtttaccactgccgcagctgtgcatgtgctggtgtctcagctgaagtttatttttcagctgacagtcccatcccatacagaccccgtaagcattttcaaagtcctgtattctgtgtttagtcagattgaaaaaacaaacatcgcggacctcgtgaccgcactgatcgtactactggtcgtgtcaatcgtgaaggaaatcaaccaaagatttaaggataagctgcccgtgcctatcccgattgagtttataatgacagtgatagccgctggcgtgagctacgggtgtgactttaaaaacagatttaaggtggcagtggtcggcgacatgaacccgggtttccagccacctattacaccagacgttgaaacctttcagaacacggtcggtgactgctttggaattgcaatggtggccttcgccgttgcctttagtgtggccagcgtgtattctctcaaatacgactaccccctagatggaaatcaggagctgattgctcttgggctcggaaacattgtttgcggcgttttccgcggattcgccggatccactgccctgagcaggtcagccgtccaagaatccaccggcggaaagacccagatcgcagggcttattggtgccatcattgtgcttatagtcgttttggcaatcggcttccttctcgctccactacaaaagagtgttctagcagccctcgcgcttggcaatctgaaaggaatgctgatgcagtttgcggagatcggacgcctatggcgaaaagacaaatacgactgcctcatctggatcatgacattcatatttaccattgttttaggtttaggactcggcctggccgcttccgtcgcctttcagttgttgaccattgtcttccgaactcaattccctaaatgttccaccctggctaacattggcaggaccaacatatataagaataagaaggactactatgacatgtatgagcccgaaggcgtgaagatttttagatgcccttctcctatatactttgccaatattgggtttttcaggcggaaactgattgacgcagttggttttagcccgctacgaatcctgcgtaagaggaacaaagctctgaggaagatccgtaaactgcagaagcagggactccttcaggtgaccccaatcctgcaggagtttattaggattaaagtggatgtgtatatcgttggcactgatgatgactttatagagaaattgaataggtacgaattcttcgatggcgaggttaagagttccatctttttcctaactatacacgatgcagtcttacacatccttatgaagaaggactattccactagtaaatttaatcctagtcaggagaaagacggtaaaatcgactttaccatcaacactaatgggggtttaaggaatcgtgtttatgaagtccccgtggagactaagttttag

SEQ ID NO: 306782 - DNA, 363 bp, Artificial Sequence
  derived and/or modified sequence
atgattgaaccctttggcaatcaatatattgtcgcccgacccgtatactcgacaaatgcattcgaagaaaatcataagaaaacaggaagacaccacaaaacatttttggaccatctgaaagtgtgttgcagttgttcaccacagaaggccaaaagaatcgtcctgtctctttttccaattgccagttggctacctgcctaccgcctaaaggaatggctgttgtccgatatagtttccggaatctccactggcatcgtggcggtgcttcagggcctggcttttgcactgctggttgatatccctccagtctacggtctgtacgccagtttctttccagccatcatttacctgttttttggctag

SEQ ID NO: 306783 - DNA, 2863 bp, Artificial Sequence
  derived and/or modified sequence
cctgagtggatggacactgcctcttagaactagaacttagaactttatcttgaaaatgtaccactgttgcagaagctcctcacagagtatgtgtcaggcatttttaacctgctaaaggcaagaagaagtgttcaccacatagttgcaaaggtcttcaacttgccacagccaacagaaaaatcaaaatgattgaaccctttgggaatcagtatattgtggccaggccagtgtattctacaaatgcttttgaggaaaatcataaaaagacaggaagacatcataagacatttctggatcatctcaaagtgtgttgtagctgttccccacaaaaggccaagagaattgtcctctctttgttccccatagcatcttggttgccagcataccggcttaaagaatggttgctcagtgatattgtttctggtatcagcacagggattgtggccgtactacaaggtttagcatttgctctgctggtcgacattcccccagtctatgggttgtatgcatcctttttcccagccataatctaccttttcttcggcacttccagacacatatccgtgggtccgtttccgattctgagtatgatggtgggactagcagtttcaggagcagtttcaaaagcagtcccagatcgcaatgcaactactttgggattgcctaacaactcgaataattcttcactactggatgacgagagggtgagggtggcggcggcggcatcagtcacagtgctttctggaatcatccagttggcttttgggattctgcggattggatttgtagtgatatacctgtctgagtccctcatcagtggcttcactactgctgctgctgttcatgttttggtttcccaactcaaattcatttttcagttgacagtcccgtcacacactgatccagtttcaattttcaaagtactatactctgtattctcacaaatagagaagactaatattgcagacctggtgacagctctgattgtccttttggttgtatccattgttaaagaaataaatcagcgcttcaaagacaaacttccagtgcccattccaatcgaattcattatgaccgtgattgcagcaggtgtatcctacggctgtgactttaaaaacaggtttaaagtggctgtggttggggacatgaatcctggatttcagccccctattacacctgacgtggagactttccaaaacaccgtaggagattgcttcggcatcgcaatggttgcatttgcagtggccttttcagttgccagcgtctattccctcaaatacgattatccacttgatggcaatcaggagttaatagccttgggactgggtaacatagtctgtggagtattcagaggatttgctgggagtactgccctctccagatcagcagttcaggagagcacaggaggcaaaacacagattgctgggcttattggtgccatcatcgtgctgattgtcgttctagccattggatttctcctggcgcctctacaaaagtccgtcctggcagctttagcattgggaaacttaaagggaatgctgatgcagtttgctgaaataggcagattgtggcgaaaggacaaatatgattgtttaatttggatcatgaccttcatcttcaccattgtcctgggactcgggttaggcctggcagctagtgtggcatttcaactgctaaccatcgtgttcaggacccaatttccaaaatgcagcacgctggctaatattggaagaaccaacatctataagaataaaaaagattattatgatatgtatgagccagaaggagtgaaaattttcagatgtccatctcctatctactttgcaaacattggtttctttaggcggaaacttatcgatgctgttggctttagtccacttcgaattctacgcaagcgcaacaaagctttgaggaaaatccgaaaactgcagaagcaaggcttgctacaagtgacaccaaaaggatttatatgtactgttgacaccataaaagattctgacgaagagctggacaacaatcagatagaagtactggaccagccaatcaataccacagacctgcctttccacattgactggaatgatgatcttcctctcaacattgaggtccccaaaatcagcctccacagcctcattcttgacttttcagcagtgtcctttcttgatgtttcttcagtgaggggccttaaatcgattttgcaagaatttatcaggatcaaggtagatgtgtatatcgttggaactgatgatgacttcattgagaagcttaaccggtatgaattttttgatggtgaagtgaaaagctcaatatttttcttaacaatccatgatgctgttttgcatattttgatgaagaaagattacagtacttcaaagtttaatcccagtcaggaaaaagatggaaaaattgattttaccataaatacaaatggaggattacgtaatcgggtatatgaggtgccagttgaaacaaaattctaatcaacatataattcagaaggatcttcatctgactatgacataaaaacaactttatacccagaaagttattgataagttcatacattgtacgaagagtatttttgacagaatatgtttcaaactttggaacaagatggttctagcatggcatatttttcacatatctagtatgaaattatataagtattctaaattttatatcttgtagctttatcaaagggtgaaaattattttgttcatacatatttttgtagcactgacagatttccatcctagtcactaccttcatgcataggtttagcagtatagtggcgccactgttttgaatctcataatttatacaggtcatattaatatatttccattaaaaaatcagttgtaca

SEQ ID NO: 306784 - DNA, 2601 bp, Artificial Sequence
  derived and/or modified sequence
gcacacagagcctgtagacctgagtggatggacactgcctcttagaactagaacttagaactttatcttgaaaatgtaccactgttgcagaagctcctcacagagtatgtgtcaggcatttttaacctgctaaaggcaagaagaagtgttcaccacatagttgcaaaggtcttcaacttgccacagccaacagaaaaatcaaaatgattgaaccctttgggaatcagtatattgtggccaggccagtgtattctacaaatgcttttgaggaaaatcataaaaagacaggaagacatcataagacatttctggatcatctcaaagtgtgttgtagcatcttggttgccagcataccggcttaaagaatggttgctcagtgatattgtttctggtatcagcacagggattgtggccgtactacaaggtttagcatttgctctgctggtcgacattcccccagtctatgggttgtatgcatcctttttcccagccataatctaccttttcttcggcacttccagacacatatccgtgggtccgtttccgattctgagtatgatggtgggactagcagtttcaggagcagtttcaaaagcagtcccagatcgcaatgcaactactttgggattgcctaacaactcgaataattcttcactactggatgacgagagggtgagggtggcggcggcggcatcagtcacagtgctttctggaatcatccagttggcttttgggattctgcggattggatttgtagtgatatacctgtctgagtccctcatcagtggcttcactactgctgctgctgttcatgttttggtttcccaactcaaattcatttttcagttgacagtcccgtcacacactgatccagtttcaattttcaaagtactatactctgtattctcacaaatagagaagactaatattgcagacctggtgacagctctgattgtccttttggttgtatccattgttaaagaaataaatcagcgcttcaaagacaaacttccagtgcccattccaatcgaattcattatgaccgtgattgcagcaggtgtatcctacggctgtgactttaaaaacaggtttaaagtggctgtggttggggacatgaatcctggatttcagccccctattacacctgacgtggagactttccaaaacaccgtaggagattgcttcggcatcgcaatggttgcatttgcagtggccttttcagttgccagcgtctattccctcaaatacgattatccacttgatggcaatcaggagttaatagccttgggactgggtaacatagtctgtggagtattcagaggatttgctgggagtactgccctctccagatcagcagttcaggagagcacaggaggcaaaacacagattgctgggcttattggtgccatcatcgtgctgattgtcgttctagccattggatttctcctggcgcctctacaaaagtccgtcctggcagctttagcattgggaaacttaaagggaatgctgatgcagtttgctgaaataggcagattgtggcgaaaggacaaatatgattgtttaatttggatcatgaccttcatcttcaccattgtcctgggactcgggttaggcctggcagctagtgtggcatttcaactgctaaccatcgtgttcaggacccaatttccaaaatgcagcacgctggctaatattggaagaaccaacatctataagaataaaaaagattattatgatatgtatgagccagaaggagtgaaaattttcagatgtccatctcctatctactttgcaaacattggtttctttaggcggaaacttatcgatgctgttggctttagtccacttcgaattctacgcaagcgcaacaaagctttgaggaaaatccgaaaactgcagaagcaaggcttgctacaagtgacaccaattttgcaagaatttatcaggatcaaggtagatgtgtatatcgttggaactgatgatgacttcattgagaagcttaaccggtatgaattttttgatggtgaagtgaaaagctcaatatttttcttaacaatccatgatgctgttttgcatattttgatgaagaaagattacagtacttcaaagtttaatcccagtcaggaaaaagatggaaaaattgattttaccataaatacaaatggaggattacgtaatcgggtatatgaggtgccagttgaaacaaaattctaatcaacatataattcagaaggatcttcatctgactatgacataaaaacaactttatacccagaaagttattgataagttcatacattgtacgaagagtatttttgacagaatatgtttcaaactttggaacaagatggttctagcatggcatatttttcacatatctagtatgaaattatataagtattctaaattttatatcttgtagctttatcaaagggtgaaaattattttgttcatacatatttttgtagcactgacagatttccatcctagtcactaccttcatgcataggtttagcagtatagtggcgccactgttttgaatctcataatttatacaggtcatattaatatatttccattaaaaaatcagttgtacagtgg

SEQ ID NO: 306785 - DNA, 552 bp, Artificial Sequence
  derived and/or modified sequence
gcacacagagcctgtagacctgagtggatggacactgcctcttagaactagaacttagaactttatcttgaaaatgtaccactgttgcagaagctcctcacagagcatttttaacctgctaaaggcaagaagaagtgttcaccacatagttgcaaaggtcttcaacttgccacagccaacagaaaaatcaaaatgattgaaccctttgggaatcagtatattgtggccaggccagtgtattctacaaatgcttttgaggaaaatcataaaaagacaggaagacatcataagacatttctggatcatctcaaagtgtgttgtagctgttccccacaaaaggccaagagaattgtcctctctttgttccccatagcatcttggttgccagcataccggcttaaagaatggttgctcagtgatattgtttctggtatcagcacagggattgtggccgtactacaaggtttagcatttgctctgctggtcgacattcccccagtctatgggttgtatgcatcctttttcccagccataatctaccttttcttcggc

SEQ ID NO: 306786 - DNA, 2295 bp, Artificial Sequence
  derived and/or modified sequence
atgatcgagcccttcggcaaccagtacatcgtggccagacccgtgtacagcaccaacgccttcgaggagaaccacaagaagaccggcagacaccacaagaccttcctggaccacctgaaggtgtgctgcagctgcagcccccagaaggccaagagaatcgtgctgagcctgttccccatcgccagctggctgcccgcctacagactgaaggagtggctgctgagcgacatcgtgagcggcatcagcaccggcatcgtggccgtgctgcagggcctggccttcgccctgctggtggacatcccccccgtgtacggcctgtacgccagcttcttccccgccatcatctacctgttcttcggcaccagcagacacatcagcgtgggccccttccccatcctgagcatgatggtgggcctggccgtgagcggcgccgtgagcaaggccgtgcccgacagaaacgccaccaccctgggcctgcccaacaacagcaacaacagcagcctgctggacgacgagagagtgagagtggccgccgccgccagcgtgaccgtgctgagcggcatcatccagctggccttcggcatcctgagaatcggcttcgtggtgatctacctgagcgagagcctgatcagcggcttcaccaccgccgccgccgtgcacgtgctggtgagccagctgaagttcatcttccagctgaccgtgcccagccacaccgaccccgtgagcatcttcaaggtgctgtacagcgtgttcagccagatcgagaagaccaacatcgccgacctggtgaccgccctgatcgtgctgctggtggtgagcatcgtgaaggagatcaaccagagattcaaggacaagctgcccgtgcccatccccatcgagttcatcatgaccgtgatcgccgccggcgtgagctacggctgcgacttcaagaacagattcaaggtggccgtggtgggcgacatgaaccccggcttccagccccccatcacccccgacgtggagaccttccagaacaccgtgggcgactgcttcggcatcgccatggtggccttcgccgtggccttcagcgtggccagcgtgtacagcctgaagtacgactaccccctggacggcaaccaggagctgatcgccctgggcctgggcaacatcgtgtgcggcgtgttcagaggcttcgccggcagcaccgccctgagcagaagcgccgtgcaggagagcaccggcggcaagacccagatcgccggcctgatcggcgccatcatcgtgctgatcgtggtgctggccatcggcttcctgctggcccccctgcagaagagcgtgctggccgccctggccctgggcaacctgaagggcatgctgatgcagttcgccgagatcggcagactgtggagaaaggacaagtacgactgcctgatctggatcatgaccttcatcttcaccatcgtgctgggcctgggcctgggcctggccgccagcgtggccttccagctgctgaccatcgtgttcagaacccagttccccaagtgcagcaccctggccaacatcggcagaaccaacatctacaagaacaagaaggactactacgacatgtacgagcccgagggcgtgaagatcttcagatgccccagccccatctacttcgccaacatcggcttcttcagaagaaagctgatcgacgccgtgggcttcagccccctgagaatcctgagaaagagaaacaaggccctgagaaagatcagaaagctgcagaagcagggcctgctgcaggtgacccccaagggcttcatctgcaccgtggacaccatcaaggacagcgacgaggagctggacaacaaccagatcgaggtgctggaccagcccatcaacaccaccgacctgcccttccacatcgactggaacgacgacctgcccctgaacatcgaggtgcccaagatcagcctgcacagcctgatcctggacttcagcgccgtgagcttcctggacgtgagcagcgtgagaggcctgaagagcatcctgcaggagttcatcagaatcaaggtggacgtgtacatcgtgggcaccgacgacgacttcatcgagaagctgaacagatacgagttcttcgacggcgaggtgaagagcagcatcttcttcctgaccatccacgacgccgtgctgcacatcctgatgaagaaggactacagcaccagcaagttcaaccccagccaggagaaggacggcaagatcgacttcaccatcaacaccaacggcggcctgagaaacagagtgtacgaggtgcccgtggagaccaagttctag

SEQ ID NO: 306787 - DNA, 1956 bp, Artificial Sequence
  derived and/or modified sequence
atgctgctgagaaagatcatcaagagacaggaggacatcatcagacacttctggatcatcagcaagtgcgtggtggccagctggctgcccgcctacagactgaaggagtggctgctgagcgacatcgtgagcggcatcagcaccggcatcgtggccgtgctgcagggcctggccttcgccctgctggtggacatcccccccgtgtacggcctgtacgccagcttcttccccgccatcatctacctgttcttcggcaccagcagacacatcagcgtgggccccttccccatcctgagcatgatggtgggcctggccgtgagcggcgccgtgagcaaggccgtgcccgacagaaacgccaccaccctgggcctgcccaacaacagcaacaacagcagcctgctggacgacgagagagtgagagtggccgccgccgccagcgtgaccgtgctgagcggcatcatccagctggccttcggcatcctgagaatcggcttcgtggtgatctacctgagcgagagcctgatcagcggcttcaccaccgccgccgccgtgcacgtgctggtgagccagctgaagttcatcttccagctgaccgtgcccagccacaccgaccccgtgagcatcttcaaggtgctgtacagcgtgttcagccagatcgagaagaccaacatcgccgacctggtgaccgccctgatcgtgctgctggtggtgagcatcgtgaaggagatcaaccagagattcaaggacaagctgcccgtgcccatccccatcgagttcatcatgaccgtgatcgccgccggcgtgagctacggctgcgacttcaagaacagattcaaggtggccgtggtgggcgacatgaaccccggcttccagccccccatcacccccgacgtggagaccttccagaacaccgtgggcgactgcttcggcatcgccatggtggccttcgccgtggccttcagcgtggccagcgtgtacagcctgaagtacgactaccccctggacggcaaccaggagctgatcgccctgggcctgggcaacatcgtgtgcggcgtgttcagaggcttcgccggcagcaccgccctgagcagaagcgccgtgcaggagagcaccggcggcaagacccagatcgccggcctgatcggcgccatcatcgtgctgatcgtggtgctggccatcggcttcctgctggcccccctgcagaagagcgtgctggccgccctggccctgggcaacctgaagggcatgctgatgcagttcgccgagatcggcagactgtggagaaaggacaagtacgactgcctgatctggatcatgaccttcatcttcaccatcgtgctgggcctgggcctgggcctggccgccagcgtggccttccagctgctgaccatcgtgttcagaacccagttccccaagtgcagcaccctggccaacatcggcagaaccaacatctacaagaacaagaaggactactacgacatgtacgagcccgagggcgtgaagatcttcagatgccccagccccatctacttcgccaacatcggcttcttcagaagaaagctgatcgacgccgtgggcttcagccccctgagaatcctgagaaagagaaacaaggccctgagaaagatcagaaagctgcagaagcagggcctgctgcaggtgacccccatcctgcaggagttcatcagaatcaaggtggacgtgtacatcgtgggcaccgacgacgacttcatcgagaagctgaacagatacgagttcttcgacggcgaggtgaagagcagcatcttcttcctgaccatccacgacgccgtgctgcacatcctgatgaagaaggactacagcaccagcaagttcaaccccagccaggagaaggacggcaagatcgacttcaccatcaacaccaacggcggcctgagaaacagagtgtacgaggtgcccgtggagaccaagttctag

SEQ ID NO: 306788 - DNA, 363 bp, Artificial Sequence
  derived and/or modified sequence
atgatcgagcccttcggcaaccagtacatcgtggccagacccgtgtacagcaccaacgccttcgaggagaaccacaagaagaccggcagacaccacaagaccttcctggaccacctgaaggtgtgctgcagctgcagcccccagaaggccaagagaatcgtgctgagcctgttccccatcgccagctggctgcccgcctacagactgaaggagtggctgctgagcgacatcgtgagcggcatcagcaccggcatcgtggccgtgctgcagggcctggccttcgccctgctggtggacatcccccccgtgtacggcctgtacgccagcttcttccccgccatcatctacctgttcttcggctag

SEQ ID NO: 306789 - DNA, 2079 bp, Artificial Sequence
  derived and/or modified sequence
atggcaggcctgaccgccgctgcgcctaggcccggcgtacttttactcttattgagcatactccatccctccaggccaggtggagtgcctggggccattcccgggggagtgccaggcggtgtgttctatccgggcgccgggctgggtgccctgggagggggggcattgggcccgggaggaaaacccctaaaacccgtgcctggaggtctcgccggcgccgggctaggtgccggcctgggagcttttcccgctgtgacttttcccggagcactcgtcccaggcggcgtggccgatgcagctgctgcatacaaagccgctaaggctggggctggactaggtggcgtccccggagtgggcgggctgggcgtgagcgcagcaccctccgtaccaggcgccgttgtgccccagcccggcgcaggagttaagccaggcaaggttccaggggtggggctcccaggcgtctaccccgggggagtgctaccgggagccaggttccccggcgtcggtgtgcttcccggcgtgcccaccggcgccggcgtcaaaccgaaggcccctggggtgggtggcgccttcgccggtattcccggtgtcgggccatttggcgggccccagcccggagtgcctctgggatatcccattaaagcgcccaagctacctggcggatacggcttgccttacacaactgggaagcttccatatggctacggaccagggggcgttgccggggcagccggaaaggcggggtatcctactggcacgggcgtgggcccacaggcggcagccgccgcagctgctaaggccgcagctaaatttggcgccggcgcagccggggtgctcccaggagtcgggggcgccggcgtccctggggtgcctggtgcaattcccggcatcggtgggatagccggcgtcggcacgcccgccgctgctgccgctgctgccgccgcagctaaagccgctaagtatggcgccgccgctggcctggtacctggcggacccggatttggacctggcgtggtgggtgtgccaggcgctggagttcctggtgtgggtgtgccaggagccggaattccagtggtgcccggcgctgggattcccggtgccgcagtacccggcgtggttagtcccgaagccgccgctaaagctgctgccaaagccgccaagtacggagccagacctggagtgggcgtgggcggaattcccacatacggggtcggggccggcggcttccccggctttggcgtgggcgttggtggtattcctggagtggctggagtgccaggggtagggggggtccctggggtggggggagtgcctggcgtcggtattagcccggaagcacaggctgcagccgccgccaaagctgctaaatacggactggtgcccggcgtcggtgtggccccaggagtgggcgttgcgcccggcgtaggagtcgcccccggcgtgggcttagctcctggcgtcggggtcgcccctggagtgggcgtagctccgggcgttggggtcgctccaggaataggccctgggggtgttgcagccgctgctaagagtgcagcgaaggtagccgctaaagcacagctacgggctgcagcaggtttgggggcgggcattcccggcctgggtgtgggcgttggcgtacctggtctgggggtgggcgcgggagttcctgggctgggggtcggggcaggggtcccgggcttcggagctgtaccaggcgctttggctgcggccaaggcagcgaaatacggtgcagccgttcccggagttctcggaggtctgggcgccctcggaggggtcggtatacctgggggtgtagtgggcgcaggacccgccgctgcggccgctgcggccaaagccgccgcaaaggccgctcagttcggactggtcggcgccgctggtttgggcggacttggagtgggggggcttggagtaccaggcgtggggggactaggtggaatacctcctgctgccgccgctaaggccgccaaatacggcgtagccgctaggccaggctttggcctgtccccaatctttccagggggagcctgcttgggcaaggcatgcggacggaaacggaagtag

SEQ ID NO: 306790 - DNA, 2136 bp, Artificial Sequence
  derived and/or modified sequence
atggccggactgaccgctgcagctccacgacctggcgtgctgctcctgctgctcagcatactgcatcctagccgtcctgggggggtgcctggagccattccagggggggtgcccggaggtgtcttctacccaggcgccggcctgggagcgctcgggggcggggcattaggccccggaggcaagcctttgaaaccagtcccaggcgggctggccggcgctggactgggtgcagggctgggagctttcccagccgtgactttccctggcgcgcttgtgcccggcggcgtggcggatgcggctgcagcttacaaggccgctaaagctggagccggtctgggtggagtccctggggtgggtggattaggagtgtcagctgcgccaagcgtccccggggcggtggtgccccagcccggcgctggcgttaagccgggaaaggtacccggcgttggactgcctggcgtttaccccggcggagttctgcctggtgcacggtttccaggggtgggagtgcttcctggcgtacccaccggagctggggtgaagcccaaagcacccggggtggggggcgcattcgcggggattcccggtgtgggtccatttggagggcctcagccaggcgttccactcgggtacccgataaaagctcctaagctccctggaggatacgggttgccctacaccaccggcaagctgccatacggatatggcccaggtggtgtggcaggagccgccggcaaggctggatatcccaccggaactggggtaggtccacaggctgccgctgctgcagctgctaaggccgctgcaaagttcggggccggggccgctggcgtgctcccgggcgtcggcggcgctggggtaccgggcgttcctggggcgataccaggcattggtggaatcgcgggagtggggaccccagccgccgctgccgcagcagctgctgctgcaaaagctgccaaatatggcgcagccgctggtttggttccaggcgggcctggtttcgggcctggagtggtgggcgtaccaggcgccggtgtgcccggcgtgggagtgccaggagccgggattcccgtagtgccaggggccgggatacctggggctgctgtaccgggggtggtgagtcctgaagccgctgcaaaggccgcagctaaagccgcaaagtacggtgccagacccggcgtaggcgttggggggattccaacatacggcgttggggcagggggcttccctgggttcggggttggggtggggggtattcccggagttgccggcgtgcctggagtgggtggcgtcccaggcgtcgggggagtgccaggggttggcataagtcctgaggcacaggctgctgctgcagctaaagctgcaaagtatggggttggaacgcctgcggctgctgccgctaaggccgccgcaaaagctgctcaattcggtctggttccaggcgtcggcgtcgccccaggagtgggtgtggccccaggggtaggagtggcacctggcgtaggattagctcctggagtcggcgtggcgcccggagtgggagttgcccccggtgtgggcgtggcaccagggattggcccaggaggggttgccgctgccgccaaatccgccgccaaagtcgctgccaaagctcagctcagggccgccgctggcctgggcgctgggattcccggtctgggagttggagtcggggtgccagggctcggagttggtgccggagttccaggactgggcgtgggagcaggcgtccccggattcggtgcagtgccaggcgctttagccgcagctaaggcagcaaagtatggcgcagccgtccccggggtgcttggggggctcggcgcgctggggggcgtggggatccctggaggagtggtcggggccggccctgccgccgctgccgctgccgctaaggcagccgcaaaggcggctcagtttggtctcgtaggggcagcgggcttgggaggcctcggtgtgggaggccttggagtccctggcgtgggtgggcttggtgggatacccccagcggctgccgcaaaagcagctaaatacggcgtggccgcgcgacccgggttcgggctgtcaccaatatttcccggcggtgcatgtctgggcaaggcatgtggtaggaagagaaaatag

SEQ ID NO: 306791 - RNA, 2136 nt, Artificial Sequence
  derived and/or modified sequence
auggccggacugaccgcugcagcuccacgaccuggcgugcugcuccugcugcucagcauacugcauccuagccguccugggggggugccuggagccauuccagggggggugcccggaggugucuucuacccaggcgccggccugggagcgcucgggggcggggcauuaggccccggaggcaagccuuugaaaccagucccaggcgggcuggccggcgcuggacugggugcagggcugggagcuuucccagccgugacuuucccuggcgcgcuugugcccggcggcguggcggaugcggcugcagcuuacaaggccgcuaaagcuggagccggucuggguggagucccugggguggguggauuaggagugucagcugcgccaagcguccccggggcgguggugccccagcccggcgcuggcguuaagccgggaaagguacccggcguuggacugccuggcguuuaccccggcggaguucugccuggugcacgguuuccaggggugggagugcuuccuggcguacccaccggagcuggggugaagcccaaagcacccgggguggggggcgcauucgcggggauucccgguguggguccauuuggagggccucagccaggcguuccacucggguacccgauaaaagcuccuaagcucccuggaggauacggguugcccuacaccaccggcaagcugccauacggauauggcccaggugguguggcaggagccgccggcaaggcuggauaucccaccggaacugggguagguccacaggcugccgcugcugcagcugcuaaggccgcugcaaaguucggggccggggccgcuggcgugcucccgggcgucggcggcgcugggguaccgggcguuccuggggcgauaccaggcauugguggaaucgcgggaguggggaccccagccgccgcugccgcagcagcugcugcugcaaaagcugccaaauauggcgcagccgcugguuugguuccaggcgggccugguuucgggccuggaguggugggcguaccaggcgccggugugcccggcgugggagugccaggagccgggauucccguagugccaggggccgggauaccuggggcugcuguaccggggguggugaguccugaagccgcugcaaaggccgcagcuaaagccgcaaaguacggugccagacccggcguaggcguuggggggauuccaacauacggcguuggggcagggggcuucccuggguucgggguuggggugggggguauucccggaguugccggcgugccuggaguggguggcgucccaggcgucgggggagugccagggguuggcauaaguccugaggcacaggcugcugcugcagcuaaagcugcaaaguaugggguuggaacgccugcggcugcugccgcuaaggccgccgcaaaagcugcucaauucggucugguuccaggcgucggcgucgccccaggaguggguguggccccagggguaggaguggcaccuggcguaggauuagcuccuggagucggcguggcgcccggagugggaguugcccccggugugggcguggcaccagggauuggcccaggagggguugccgcugccgccaaauccgccgccaaagucgcugccaaagcucagcucagggccgccgcuggccugggcgcugggauucccggucugggaguuggagucggggugccagggcucggaguuggugccggaguuccaggacugggcgugggagcaggcguccccggauucggugcagugccaggcgcuuuagccgcagcuaaggcagcaaaguauggcgcagccguccccggggugcuuggggggcucggcgcgcuggggggcguggggaucccuggaggaguggucggggccggcccugccgccgcugccgcugccgcuaaggcagccgcaaaggcggcucaguuuggucucguaggggcagcgggcuugggaggccucggugugggaggccuuggagucccuggcgugggugggcuuggugggauacccccagcggcugccgcaaaagcagcuaaauacggcguggccgcgcgacccggguucgggcugucaccaauauuucccggcggugcaugucugggcaaggcaugugguaggaagagaaaauag

SEQ ID NO: 306792 - protein, 168 aa, Artificial Sequence
  derived and/or modified sequence
MAGLTAAAPRPGVLLLLLSILHPSRPGGVPGAIPGGVPGGVFYPGAGLGALGGGALGPGGKPLKPGVGPFGGPQPGVPLGYPIKAPKLPGYGPGGVAGAAGKAGYPTGTGVGPQAAAAAAAKAAAKFGAGAAGVLPGVGGAGVPGVPGAIPGIGGIAGVGTPAAAAAA

SEQ ID NO: 306793 - protein, 294 aa, Artificial Sequence
  derived and/or modified sequence
MAGLTAAAPRPGVLLLLLSILHPSRPGGVPGAIPGGVPGGVFYPGAGLGALGGGALGPGGKPLKPGLGAFPAVTFPGALVPGGVADAAAAYKAAKAGAGLGGVPGVGGLGVSAGAVVPQPGAGVKPGKVPGVGLPGVYPGGVLPGARFPGVGVLPGVPTGAGVKPKAPGVGPFGGPQPGVPLGYPIKAPKLPGGYGLPYTTGKLPYGYGPGGVAGAAGKAGYPTGTGVGPQAAAAAAAKAAAKFGAGAAGVLPGVGGAGVPGVPGAIPGIGGIAGVGTPAAAAAAAAAAKAAKY

SEQ ID NO: 306794 - protein, 663 aa, Artificial Sequence
  derived and/or modified sequence
MAGLTAAAPRPGVLLLLLSILHPSRPGGVPGAIPGGVPGGVFYPGAGLGALGGGALGPGGKPLKPVPGGLAGAGLGAGAGLGGVPGVGGLGVSAGAVVPQPGAGVKPGKVPGVGLPGVYPGGVLPGARFPGVGVLPGVPTGAGVKPKAPGVGGAFAGIPGVGPFGGPQPGVPLGYPIKAPKLPGGYGLPYTTGKLPYGYGPGGVAGAAGKAGYPTGTGVGPQAAAAAAAKAAAKFGAGAAGVLPGVGGAGVPGVPGAIPGIGGIAGVGTPAAAAAAAAAAKAAKYGAAAGLVPGGPGFGPGVVGVPGAGVPGVGVPGAGIPVVPGAGIPGAAVPGVVSPEAAAKAAAKAAKYGARPGVGVGGIPTYGVGAGGFPGFGVGVGGIPGVAGVPGVGGVPGVGGVPGVGISPEAQAAAAAKAAKYGVGTPAAAAAKAAAKAAQFGLVPGVGVAPGVGVAPGIGPGGVAAAAKSAAKVAAKAQLRAAAGLGAGIPGLGVGVGVPGLGVGAGVPGLGVGAGVPGFGAVPGALAAAKAAKYGAAVPGVLGGLGALGGVGIPGGVVGAGPAAAAAAAKAAAKAAQFGLVGAAGLGGLGVGGLGVPGVGGLGGIPPAAAAKAAKYGAAGLGGVLGGAGQFPLGGVAARPGFGLSPIFPGGACLGKACGRKRK

SEQ ID NO: 306795 - DNA, 537 bp, Artificial Sequence
  derived and/or modified sequence
atgctcctgatcctactgtccgtagcacttctggccctgagctcagcagaatcctcgtccgaggatgtgtcccaggaagaatcactgttcctgatcagcgggaagcctgagggaaggcggcctcagggtggcaaccaaccccagaggcctccacctcctcctgggaagcctcagggaccgccaccccagggaggaaatcagagccaggggccaccccctcctcctggtaagcctgaggggcgacctccccagggaggcaaccagagccagggacccccaccacaccccggaaaacccgagagacctccacctcagggaggtaaccagtctcagggtaagccccaaggcccaccgcagcaagagggcaataagccccaagggccaccgccaccaggcaaaccgcagggtccaccacctgcgggagggaatccacagcagccacaagcccctccggcagggaagccccagggacctcctcccccacctcaagggggaaggccacccaggcctgctcaggggcagcagccaccgcagtag

SEQ ID NO: 306796 - DNA, 2639 bp, Artificial Sequence
  derived and/or modified sequence
tccggtcgcgtccgacacccggtgggactcagaaggcagtggagccccggcggcggcggcggcggcgcgcgggggcgacgcgcgggaacaacgcgagtcggcgcgcgggacgaagaataatcatgggccagactgggaagaaatctgagaagggaccagtttgttggcggaagcgtgtaaaatcagagtacatgcgactgagacagctcaagaggttcagacgagctgatgaagtaaagagtatgtttagttccaatcgtcagaaaattttggaaagaacggaaatcttaaaccaagaatggaaacagcgaaggatacagcctgtgcacatcctgacttctgtgagctcattgcgcgggactagggagtgttcggtgaccagtgacttggattttccaacacaagtcatcccattaaagactctgaatgcagttgcttcagtacccataatgtattcttggtctcccctacagcagaattttatggtggaagatgaaactgttttacataacattccttatatgggagatgaagttttagatcaggatggtactttcattgaagaactaataaaaaattatgatgggaaagtacacggggatagagaatgtgggtttataaatgatgaaatttttgtggagttggtgaatgcccttggtcaatataatgatgatgacgatgatgatgatggagacgatcctgaagaaagagaagaaaagcagaaagatctggaggatcaccgagatgataaagaaagccgcccacctcggaaatttccttctgataaaatttttgaagccatttcctcaatgtttccagataagggcacagcagaagaactaaaggaaaaatataaagaactcaccgaacagcagctcccaggcgcacttcctcctgaatgtacccccaacatagatggaccaaatgctaaatctgttcagagagagcaaagcttacactcctttcatacgcttttctgtaggcgatgttttaaatatgactgcttcctacatcgtaagtgcaattattcttttcatgcaacacccaacacttataagcggaagaacacagaaacagctctagacaacaaaccttgtggaccacagtgttaccagcatttggagggagcaaaggagtttgctgctgctctcaccgctgagcggataaagaccccaccaaaacgtccaggaggccgcagaagaggacggcttcccaataacagtagcaggcccagcacccccaccattaatgtgctggaatcaaaggatacagacagtgatagggaagcagggactgaaacggggggagagaacaatgataaagaagaagaagagaagaaagatgaaacttcgagctcctctgaagcaaattctcggtgtcaaacaccaataaagatgaagccaaatattgaacctcctgagaatgtggagtggagtggtgctgaagcctcaatgtttagagtcctcattggcacttactatgacaatttctgtgccattgctaggttaattgggaccaaaacatgtagacaggtgtatgagtttagagtcaaagaatctagcatcatagctccagctcccgctgaggatgtggatactcctccaaggaaaaagaagaggaaacaccggttgtgggctgcacactgcagaaagatacagctgaaaaaggacggctcctctaaccatgtttacaactatcaaccctgtgatcatccacggcagccttgtgacagttcgtgcccttgtgtgatagcacaaaatttttgtgaaaagttttgtcaatgtagttcagagtgtcaaaaccgctttccgggatgccgctgcaaagcacagtgcaacaccaagcagtgcccgtgctacctggctgtccgagagtgtgaccctgacctctgtcttacttgtggagccgctgaccattgggacagtaaaaatgtgtcctgcaagaactgcagtattcagcggggctccaaaaagcatctattgctggcaccatctgacgtggcaggctgggggatttttatcaaagatcctgtgcagaaaaatgaattcatctcagaatactgtggagagattatttctcaagatgaagctgacagaagagggaaagtgtatgataaatacatgtgcagctttctgttcaacttgaacaatgattttgtggtggatgcaacccgcaagggtaacaaaattcgttttgcaaatcattcggtaaatccaaactgctatgcaaaagttatgatggttaacggtgatcacaggataggtatttttgccaagagagccatccagactggcgaagagctgttttttgattacagatacagccaggctgatgccctgaagtatgtcggcatcgaaagagaaatggaaatcccttgacatctgctacctcctcccccctcctctgaaacagctgccttagcttcaggaacctcgagtactgtgggcaatttagaaaaagaacatgcagtttgaaattctgaatttgcaaagtactgtaagaataatttatagtaatgagtttaaaaatcaactttttattgccttctcaccagctgcaaagtgttttgtaccagtgaatttttgcaataatgcagtatggtacatttttcaactttgaataaagaatacttgaacttg

SEQ ID NO: 306797 - protein, 751 aa, Artificial Sequence
  derived and/or modified sequence
MGQTGKKSEKGPVCWRKRVKSEYMRLRQLKRFRRADEVKSMFSSNRQKILERTEILNQEWKQRRIQPVHILTSVSSLRGTRECSVTSDLDFPTQVIPLKTLNAVASVPIMYSWSPLQQNFMVEDETVLHNIPYMGDEVLDQDGTFIEELIKNYDGKVHGDRECGFINDEIFVELVNALGQYNDDDDDDDGDDPEEREEKQKDLEDHRDDKESRPPRKFPSDKIFEAISSMFPDKGTAEELKEKYKELTEQQLPGALPPECTPNIDGPNAKSVQREQSLHSFHTLFCRRCFKYDCFLHRKCNYSFHATPNTYKRKNTETALDNKPCGPQCYQHLEGAKEFAAALTAERIKTPPKRPGGRRRGRLPNNSSRPSTPTINVLESKDTDSDREAGTETGGENNDKEEEEKKDETSSSSEANSRCQTPIKMKPNIEPPENVEWSGAEASMFRVLIGTYYDNFCAIARLIGTKTCRQVYEFRVKESSIIAPAPAEDVDTPPRKKKRKHRLWAAHCRKIQLKKDGSSNHVYNYQPCDHPRQPCDSSCPCVIAQNFCEKFCQCSSECQNRFPGCRCKAQCNTKQCPCYLAVRECDPDLCLTCGAADHWDSKNVSCKNCSIQRGSKKHLLLAPSDVAGWGIFIKDPVQKNEFISEYCGEIISQDEADRRGKVYDKYMCSFLFNLNNDFVVDATRKGNKIRFANHSVNPNCYAKVMMVNGDHRIGIFAKRAIQTGEELFFDYRYSQADALKYVGIEREMEIP

SEQ ID NO: 306798 - DNA, 2256 bp, Artificial Sequence
  derived and/or modified sequence
atgggacaaaccggtaagaagagcgagaaaggccctgtgtgctggcggaagcgtgtgaagtcagaatacatgaggcttagacagctcaagcgattcaggcgtgccgacgaagtgaagtcaatgttctcctcaaaccgacagaagatcctggagaggacagaaatcctgaatcaggagtggaagcagcgtcgaatccagcctgtgcatatcctgaccagcgtcagttcactgcgtggcacaagagagtgttcagttacctctgatcttgatttccccacacaggtgatcccactcaagaccttaaacgccgtcgcgagcgtgccaatcatgtactcctggtctcccctgcagcagaatttcatggttgaagacgaaacagtgctgcataacatcccttacatgggggacgaggtgctggaccaggatggaacctttattgaggagttaatcaagaactatgacggaaaagtccatggggacagagaatgtggatttattaatgacgaaatcttcgtggagctcgttaacgcactgggccagtataacgatgacgatgatgatgacgacggagacgatcccgaggagagagaggaaaagcagaaggatctagaggatcacagggatgacaaagagagtcgtccccctcgaaagttccccagtgacaagattttcgaggcaatctcatctatgttccctgacaagggtacagccgaagaactcaaagaaaaatataaagaattaactgaacagcagctgcctggtgcccttcctcccgaatgtaccccgaatattgacgggccgaatgcgaaatcagtacaacgtgaacagagcctgcactcctttcacaccttgttctgtagaagatgcttcaagtacgactgctttctacaccggaaatgcaattatagcttccacgccacgccgaatacctacaaacgcaaaaacaccgagaccgctctggacaacaagccatgcggcccacagtgttaccagcatctggagggcgccaaagaatttgctgccgccctgacagcggagagaatcaaaactccccccaagaggcctggcggaagacggagaggaaggctgcccaataacagctctcgaccaagcactcctaccattaatgtgctggaatccaaggacacagacagcgacagagaagccgggaccgaaaccgggggggagaataatgacaaggaggaggaagagaagaaggatgagacttccagcagttcggaggcaaattcaagatgtcagacaccaataaagatgaaacctaacattgaaccacccgagaacgtggagtggagcggcgccgaagccagcatgtttagggtgctgatcggtacatattatgataatttttgtgcgatcgccaggctgattggtacaaagacctgcagacaggtgtatgaatttagggtaaaggagtcaagcattatcgctccagcacccgcagaggatgtcgataccccaccaaggaagaagaaaagaaagcatcggctctgggctgcacattgtcggaaaattcagctgaagaaagatggaagctccaaccacgtctacaattaccaaccctgcgaccacccccgccagccttgtgactcttcttgtccatgcgtgatcgcgcagaatttctgcgaaaagttttgtcagtgttcatctgaatgccagaatcgctttcctgggtgcaggtgcaaagcacaatgtaataccaaacaatgcccttgttatctagcagtgcgcgaatgtgaccccgacttgtgtcttacatgcggcgctgccgaccattgggacagcaaaaatgtttcttgtaagaactgctctatccagagagggtctaagaaacatctgctcctggccccaagtgacgtggcaggatggggaatttttatcaaagacccagtccaaaaaaacgagttcatcagcgaatactgtggggaaattatctcccaggatgaggccgaccgccgaggcaaggtttacgacaagtatatgtgcagctttctttttaatttgaataatgacttcgtcgtcgacgctacgcggaagggcaataaaattagattcgccaaccacagcgtcaatcctaactgctatgcgaaggtaatgatggtaaacggcgaccatagaattggaatatttgcgaagagagcgattcaaacgggcgaggagttgtttttcgactacagatacagccaggcggacgccctcaagtatgtcggcatcgagcgtgagatggaaatcccttag

SEQ ID NO: 306799 - DNA, 2256 bp, Artificial Sequence
  derived and/or modified sequence
atgggccagacaggcaagaagtctgagaagggccctgtgtgctggaggaagagggtgaagtctgagtacatgaggctgcggcagctgaagcgcttcagaagagcagatgaggtgaagtccatgttcagcagcaaccggcagaagatcctggagaggacagagatcctgaaccaggagtggaagcagaggcgcatccagcctgtgcacatcctgacctctgtgagcagcctgcggggcacccgggagtgcagcgtgaccagtgacctggacttccccacccaggtgatccccctgaagaccctgaatgctgtggcctctgtgcccatcatgtacagctggagccccctgcagcagaacttcatggtggaggatgagaccgtgctgcacaacatcccctacatgggagatgaggtgctggaccaggacggcaccttcatcgaggagctgatcaagaactatgatggcaaggtgcacggggaccgggagtgtggcttcatcaatgatgagatctttgtggagctggtgaatgccctgggccagtacaatgatgatgatgatgatgatgatggagatgatcctgaggagcgggaggagaagcagaaggacctggaggaccacagagatgacaaggagagccggccccccaggaagttccccagcgacaagatctttgaggccatcagctccatgtttcctgacaagggcacagctgaggagctgaaggagaagtacaaggagctgacagagcagcagctgcccggggccctgcccccagaatgtacccccaacattgatggccccaatgccaagtctgtgcagcgggagcagagcctgcacagcttccacaccctcttctgccgccgctgcttcaagtatgactgcttcctgcacaggaagtgcaactacagcttccacgccacccccaacacctacaagaggaagaacacagaaacagccctggacaacaagccctgtggcccccagtgctaccagcacctggagggcgccaaggagtttgctgctgccctgacagctgagcgcatcaagaccccacccaagaggcctgggggcagaagaagaggccgcctgcccaacaacagcagccggcccagcacccccaccatcaacgtgctggagagcaaggacacagacagcgaccgggaggccggcacagaaacaggaggagagaacaatgacaaggaggaggaggagaagaaggatgagaccagcagcagcagcgaggccaacagccgctgccagacccccatcaagatgaagcccaacatcgagcccccagaaaatgtggagtggagcggggctgaggcctccatgttccgggtgctgattggcacctactatgacaacttctgtgccatcgcccggctgattggcaccaagacctgccggcaggtgtatgagttccgggtgaaggagagcagcatcatcgccccagccccagcagaagatgtggacaccccacccaggaagaagaagaggaagcaccggctgtgggccgcccactgcaggaagatccagctgaagaaggatggcagcagcaaccacgtgtacaactaccagccctgtgaccacccccggcagccctgtgacagcagctgcccctgtgtgattgcccagaacttctgtgagaagttctgccagtgcagcagcgagtgccagaaccgcttccctggctgccgctgcaaggcccagtgcaacaccaagcagtgcccctgctacctggccgtgcgggagtgtgaccctgacctgtgcctgacctgtggggctgctgaccactgggacagcaagaatgtgtcctgcaagaactgcagcatccagaggggcagcaagaagcacctgctgctggcccccagtgatgtggccggctggggcatcttcatcaaggaccctgtgcagaagaatgagttcatcagcgagtactgtggggagatcatcagccaggatgaggccgaccggcggggcaaggtgtatgacaagtacatgtgcagcttcctgttcaacctgaacaatgactttgtggtggatgccaccaggaaaggaaacaagatccgctttgccaaccacagcgtgaaccccaactgctacgccaaggtgatgatggtgaatggagaccacagaattggcatctttgccaagagggccatccagacaggagaggagctgttctttgactaccgctacagccaggctgatgccctgaagtatgtgggcatcgagcgggagatggagatcccctag

SEQ ID NO: 306800 - DNA, 2256 bp, Artificial Sequence
  derived and/or modified sequence
atgggccagaccggcaagaagagcgagaagggccccgtgtgctggcggaagagggtcaaatcagagtacatgcggctgcgccaactgaaacgcttccggcgagcagacgaggtaaaaagtatgttctcttccaatcgacagaaaatcttggagcgcacggagatccttaatcaagaatggaagcagcggcggatacaaccggttcacatactcacctccgtgtcctcactgagaggcacccgcgagtgtagcgtcacctccgatcttgactttccaacccaggtcatacccctcaaaactttgaatgcagtggcctctgtccccatcatgtattcatggtctcctctgcagcagaattttatggtcgaggatgaaaccgttcttcataatataccatacatgggcgatgaagtgctggatcaggatggcaccttcatcgaagaactaatcaaaaattatgatgggaaagtccacggcgatagagagtgtgggttcattaacgacgaaatattcgtggagctcgtaaatgccttgggtcaatataatgatgatgacgacgatgatgacggggacgatcccgaggaaagagaggaaaagcagaaagacttagaagaccacagggatgataaggagtcacggcctccccgaaagtttccttctgataagatcttcgaggcaattagctctatgtttccagacaagggaaccgctgaggaattaaaagagaaatacaaggagctaacggagcagcagctgccaggtgccctgccgccggaatgcacaccaaatatcgacggccccaacgccaagagtgtacagcgggaacagagtctgcattcattccacaccttgttttgtcgaagatgttttaagtatgactgcttcttgcatcggaagtgcaactactcttttcacgcaacccctaacacttacaaaaggaaaaataccgagaccgcactggacaataagccgtgcggccctcagtgttaccagcacttagaaggcgccaaagagttcgccgcagccctgaccgccgaacgcataaaaacacctccgaagaggccaggcggacggaggcgagggagattaccaaacaatagctcccgaccatctacgccaactataaatgtgctggaatcgaaagacacagactctgaccgggaggctgggactgagactggtggggagaataacgataaggaggaggaagagaagaaagatgaaacttccagtagctctgaagccaatagccgctgccaaactcccataaaaatgaagcctaacatcgagccacctgagaacgtggagtggtccggcgcagaagcttccatgtttcgcgttctgatcggaacttattacgataacttttgcgccatagccagattgattgggaccaagacgtgccgccaagtctatgagtttcgagtgaaggaaagttctataatagcccctgcacctgcggaagacgtggacacccccccacgaaaaaagaaacggaagcaccgcctgtgggcagcccactgccgaaagatacagctgaagaaagacggaagctcaaaccacgtgtacaattatcagccgtgtgaccatcccagacagccatgcgattcctcttgtccgtgcgttatcgctcaaaatttctgtgagaaattttgccagtgtagtagcgagtgccagaaccggtttcctggatgcagatgcaaggcccagtgcaataccaaacaatgcccctgttacctagccgtgagggagtgtgacccagatctgtgccttacatgtggcgcagcggaccattgggatagcaagaacgtctcgtgtaagaattgctctatacagcgggggtctaaaaaacacctactccttgctccgtctgatgtggctggctggggcatattcatcaaggatccagtgcagaaaaacgaatttattagcgagtactgcggggaaataatctcgcaggacgaggcagacaggcgcggcaaggtatacgacaaatatatgtgcagtttcctgttcaatctcaataacgacttcgtagttgatgcgaccaggaagggaaacaaaatccggtttgcgaatcactcggttaacccaaactgttacgctaaggtcatgatggtgaatggtgaccaccgcatcggtatttttgcaaaacgagccattcagacaggtgaggagttgttcttcgactatagatatagtcaagccgatgcccttaagtacgtgggaatcgagagagagatggagatcccatag

SEQ ID NO: 306801 - DNA, 2256 bp, Artificial Sequence
  derived and/or modified sequence
atgggccagacaggtaagaagtccgagaaaggacctgtttgttggaggaaacgagtgaaatcggagtacatgcgactgcgacagctgaaacgattccggagggccgatgaggtcaagtctatgttttcctccaacagacaaaaaatactcgaaagaactgagattctcaaccaggagtggaagcagcgtaggatccagccagtacatatcctaacttctgtgtctagcctaaggggcactcgggaatgctccgtcacctcggacctggactttccgacccaagtgataccgctgaaaacactcaacgcagtcgctagtgtgcctattatgtacagctggtcacccttgcagcagaattttatggttgaggatgagaccgtgttacataacattccatacatgggagacgaagttctggatcaggatggtacattcattgaagagctgatcaaaaactatgacgggaaggtccacggagatcgagaatgcggtttcatcaatgatgagatcttcgtagagctcgtgaacgcccttggccaatacaacgacgacgatgatgacgatgacggagatgacccagaagagagagaagaaaaacagaaagatcttgaagaccacagagatgacaaggaaagccggccacccaggaagttcccaagtgataaaatctttgaggccatttcatccatgtttccagataaaggcacagccgaggaactgaaggaaaagtacaaggaactgactgagcagcaactcccaggagcactgccacccgagtgtacccctaacattgatgggccaaatgcaaaatccgtccagcgggagcagagtctccatagcttccacactcttttttgccgcaggtgcttcaagtacgactgtttccttcatcgaaaatgcaactactcttttcatgccactccgaacacttacaaaagaaaaaatactgagaccgcccttgacaacaaaccttgcggcccacagtgctaccagcacctggaaggcgcaaaagagtttgccgcagctttgacagcagaaagaattaaaaccccacccaagcggcctggcggaagacgcagaggccgactgcccaacaactcctcaaggccaagcaccccaacaattaacgtgcttgaatcaaaggacacagattcggacagggaagcaggaaccgaaacaggcggtgaaaataacgataaagaagaggaggagaagaaggatgaaacctccagcagtagtgaagccaatagtcgctgccagacacccataaagatgaagccaaacattgagcctcctgagaatgtcgagtggtctggggcagaggcatctatgttccgcgtgctcataggcacgtattatgataacttttgtgctatcgcgcgactgatcggaacaaagacgtgccgccaggtctatgagtttcgcgtgaaagagagttcaatcatcgcccctgctccagctgaagacgtagatacccctcccaggaagaaaaaaagaaaacatcggctgtgggccgcacattgcagaaaaattcagttaaagaaggacggatcatccaatcacgtttacaactatcagccctgcgaccacccgcgacagccttgtgactctagttgcccctgtgtcatagctcagaatttttgtgaaaaattctgccagtgcagcagcgagtgccagaaccgcttcccgggatgtaggtgcaaggcacaatgcaatacgaaacagtgtccatgctacctggccgtgagagaatgtgatcccgatctttgtctcacctgtggggctgctgaccattgggactccaagaacgtgtcctgcaagaactgctccattcaacggggttccaagaagcacttgctgctagccccaagtgacgtggccggatggggcattttcattaaggaccctgtgcaaaagaatgagtttatctcagaatattgcggcgaaataatctcccaggatgaggctgaccgacgcggaaaagtgtatgacaagtacatgtgctcattcctgtttaaccttaataatgatttcgttgtggacgccactaggaaaggcaacaaaattagattcgccaatcatagcgtgaaccccaattgctacgcaaaagtaatgatggtgaatggggaccatagaatcggaattttcgcaaaaagggccattcagacgggggaggagttgttcttcgattaccggtatagccaagccgacgctctgaagtacgttggaattgagagagaaatggaaattccttag

SEQ ID NO: 306802 - DNA, 2256 bp, Artificial Sequence
  derived and/or modified sequence
atgggccagaccggcaagaagagcgagaagggccccgtgtgctggagaaagagagtgaagagcgagtacatgagactgagacagctgaagagattcagaagagccgacgaggtgaagagcatgttcagcagcaacagacagaagatcctggagagaaccgagatcctgaaccaggagtggaagcagagaagaatccagcccgtgcacatcctgaccagcgtgagcagcctgagaggcaccagagagtgcagcgtgaccagcgacctggacttccccacccaggtgatccccctgaagaccctgaacgccgtggccagcgtgcccatcatgtacagctggagccccctgcagcagaacttcatggtggaggacgagaccgtgctgcacaacatcccctacatgggcgacgaggtgctggaccaggacggcaccttcatcgaggagctgatcaagaactacgacggcaaggtgcacggcgacagagagtgcggcttcatcaacgacgagatcttcgtggagctggtgaacgccctgggccagtacaacgacgacgacgacgacgacgacggcgacgaccccgaggagagagaggagaagcagaaggacctggaggaccacagagacgacaaggagagcagaccccccagaaagttccccagcgacaagatcttcgaggccatcagcagcatgttccccgacaagggcaccgccgaggagctgaaggagaagtacaaggagctgaccgagcagcagctgcccggcgccctgccccccgagtgcacccccaacatcgacggccccaacgccaagagcgtgcagagagagcagagcctgcacagcttccacaccctgttctgcagaagatgcttcaagtacgactgcttcctgcacagaaagtgcaactacagcttccacgccacccccaacacctacaagagaaagaacaccgagaccgccctggacaacaagccctgcggcccccagtgctaccagcacctggagggcgccaaggagttcgccgccgccctgaccgccgagagaatcaagaccccccccaagagacccggcggcagaagaagaggcagactgcccaacaacagcagcagacccagcacccccaccatcaacgtgctggagagcaaggacaccgacagcgacagagaggccggcaccgagaccggcggcgagaacaacgacaaggaggaggaggagaagaaggacgagaccagcagcagcagcgaggccaacagcagatgccagacccccatcaagatgaagcccaacatcgagccccccgagaacgtggagtggagcggcgccgaggccagcatgttcagagtgctgatcggcacctactacgacaacttctgcgccatcgccagactgatcggcaccaagacctgcagacaggtgtacgagttcagagtgaaggagagcagcatcatcgcccccgcccccgccgaggacgtggacaccccccccagaaagaagaagagaaagcacagactgtgggccgcccactgcagaaagatccagctgaagaaggacggcagcagcaaccacgtgtacaactaccagccctgcgaccaccccagacagccctgcgacagcagctgcccctgcgtgatcgcccagaacttctgcgagaagttctgccagtgcagcagcgagtgccagaacagattccccggctgcagatgcaaggcccagtgcaacaccaagcagtgcccctgctacctggccgtgagagagtgcgaccccgacctgtgcctgacctgcggcgccgccgaccactgggacagcaagaacgtgagctgcaagaactgcagcatccagagaggcagcaagaagcacctgctgctggcccccagcgacgtggccggctggggcatcttcatcaaggaccccgtgcagaagaacgagttcatcagcgagtactgcggcgagatcatcagccaggacgaggccgacagaagaggcaaggtgtacgacaagtacatgtgcagcttcctgttcaacctgaacaacgacttcgtggtggacgccaccagaaagggcaacaagatcagattcgccaaccacagcgtgaaccccaactgctacgccaaggtgatgatggtgaacggcgaccacagaatcggcatcttcgccaagagagccatccagaccggcgaggagctgttcttcgactacagatacagccaggccgacgccctgaagtacgtgggcatcgagagagagatggagatcccctag

SEQ ID NO: 306803 - DNA, 1491 bp, Artificial Sequence
  derived and/or modified sequence
aaataaaagcgatggcgattgggctgccgcgtttggcgctcggtccggtcgcgtccgacacccggtgggactcagaaggcagtggagccccggcggcggcggcggcggcgcgcgggggcgacgcgcgggaacaacgcgagtcggcgcgcgggacgaagaataatcatgggccagactgggaagaaatctgagaagggaccagtttgttggcggaagcgtgtaaaatcagagtacatgcgactgagacagctcaagaggttcagacgagctgatgaagtaaagagtatgtttagttccaatcgtcagaaaattttggaaagaacggaaatcttaaaccaagaatggaaacagcgaaggatacagcctgtgcacatcctgacttctgtgagctcattgcgcgggactagggaggccattcacctgctcttccctctacgattttccataacacagtttttacttggaaccagccttctgccaagagtctcagtttggttgtgtactcctacaactactatttttggcttgacttccctctccagctcccagtggtccagccacacagtcgcctattgtaccagctggttgattgttcggtgaccagtgacttggattttccaacacaagtcatcccattaaagactctgaatgcagttgcttcagtacccataatgtattcttggtctcccctacagcagaattttatggtggaagatgaaactgttttacataacattccttatatgggagatgaagttttagatcaggatggtactttcattgaagaactaataaaaaattatgatgggaaagtacacggggatagagaatgtgggtttataaatgatgaaatttttgtggagttggtgaatgcccttggtcaatataatgatgatgacgatgatgatgatggagacgatcctgaagaaagagaagaaaagcagaaagatctggaggatcaccgagatgataaagaaagccgcccacctcggaaatttccttctgataaaatttttgaagccatttcctcaatgtttccagataagggcacagcagaagaactaaaggaaaaatataaagaactcaccgaacagcagctcccaggcgcacttcctcctgaatgtacccccaacatagatggaccaaatgctaaatctgttcagagagagcaaagcttacactcctttcatacgcttttctgtaggcgatgttttaaatatgactgcttcctacatccttttcatgcaacacccaacacttataagcggaagaacacagaaacagctctagacaacaaaccttgtggaccacagtgttaccagcatttgccactcctacctaggaactaaatgggtatatattgcctgttggattttggacagaagattcattgaatggcacctgcagaaggagggagcaaaggagtttgctgctgctctcaccgctgagcggataaagaccccaccaaaacgtccaggaggccgcagaaga

SEQ ID NO: 306804 - protein, 707 aa, Artificial Sequence
  derived and/or modified sequence
MGQTGKKSEKGPVCWRKRVKSEYMRLRQLKRFRRADEVKSMFSSNRQKILERTEILNQEWKQRRIQPVHILTSVSSLRGTREVEDETVLHNIPYMGDEVLDQDGTFIEELIKNYDGKVHGDRECGFINDEIFVELVNALGQYNDDDDDDDGDDPEEREEKQKDLEDHRDDKESRPPRKFPSDKIFEAISSMFPDKGTAEELKEKYKELTEQQLPGALPPECTPNIDGPNAKSVQREQSLHSFHTLFCRRCFKYDCFLHPFHATPNTYKRKNTETALDNKPCGPQCYQHLEGAKEFAAALTAERIKTPPKRPGGRRRGRLPNNSSRPSTPTINVLESKDTDSDREAGTETGGENNDKEEEEKKDETSSSSEANSRCQTPIKMKPNIEPPENVEWSGAEASMFRVLIGTYYDNFCAIARLIGTKTCRQVYEFRVKESSIIAPAPAEDVDTPPRKKKRKHRLWAAHCRKIQLKKDGSSNHVYNYQPCDHPRQPCDSSCPCVIAQNFCEKFCQCSSECQNRFPGCRCKAQCNTKQCPCYLAVRECDPDLCLTCGAADHWDSKNVSCKNCSIQRGSKKHLLLAPSDVAGWGIFIKDPVQKNEFISEYCGEIISQDEADRRGKVYDKYMCSFLFNLNNDFVVDATRKGNKIRFANHSVNPNCYAKVMMVNGDHRIGIFAKRAIQTGEELFFDYRYSQADALKYVGIEREMEIP

SEQ ID NO: 306805 - DNA, 2124 bp, Artificial Sequence
  derived and/or modified sequence
atgggccagactggcaaaaaatctgagaaggggcctgtgtgttggaggaaacgtgtgaagagcgagtatatgcgcctgagacagctgaagaggtttagacgagcagacgaagtaaagtccatgttttcttccaatcgacagaaaatcttagaacgtactgaaatattaaatcaggaatggaaacagaggaggattcagcctgtccacatccttactagtgtgagctctctgaggggcactagggaggttgaagacgaaacagtcctacataatattccctatatgggcgacgaggtactcgaccaagacggcacgttcatcgaggaactaatcaaaaattatgacggcaaagttcatggcgatcgggagtgcggcttcatcaacgatgaaatctttgtagaacttgttaacgctctgggtcaatataacgacgatgacgacgacgacgacggcgacgacccagaggagcgcgaagagaagcaaaaggatctcgaagatcatcgggacgataaggaaagcagacctccgagaaagtttcccagtgacaaaatttttgaagccattagcagcatgtttccggataaggggacagccgaggagctgaaggagaagtataaggaactgactgagcagcagcttcccggagccctcccccctgaatgcacccctaacatagatggcccgaatgccaaaagcgtccagcgcgaacaatcccttcactcctttcatactttgttctgtcggagatgcttcaaatatgactgctttcttcaccccttccatgccactcccaatacttacaagaggaagaatacagaaactgccctagacaacaaaccctgtgggccacaatgttatcagcatttagagggggccaaggagttcgctgcagctctgacagccgagaggataaaaactccccctaagaggcctggcggccgccgcagaggacgcctgcctaacaactctagccgacctagtactccaacaatcaatgttctggaatctaaggacaccgacagtgacagggaggcaggtactgagacaggtggtgaaaacaacgacaaagaggaggaggaaaaaaaggatgagacatccagcagctctgaagctaattctcggtgccagacccctataaaaatgaaacccaacatcgagccgccagagaatgtggagtggtctggggctgaggcctcaatgttccgtgtgttgatcggcacgtactatgacaatttctgtgctatagctaggcttatagggaccaagacgtgtcgccaggtgtacgagttccgggtaaaggagagcagcattatcgcacccgcccccgccgaggacgtggacacaccaccccgtaagaaaaagcggaagcatcgcctgtgggcggctcactgcagaaagatacagttgaaaaaggacgggtctagcaaccatgtgtataattaccagccctgtgatcatcccaggcagccctgcgattcttcctgcccgtgtgtgatcgcgcagaacttctgcgaaaaattctgtcagtgcagctccgagtgtcagaatagattcccagggtgtcgatgcaaggcccagtgtaatactaagcaatgcccatgttacctggctgtgagggaatgcgacccagatctttgtctgacatgtggtgcggccgatcattgggacagcaagaatgtttcatgtaaaaactgtagtatccaacgggggagcaagaagcaccttcttttagctcccagcgacgtggctggttggggaatttttatcaaggacccagtccagaaaaatgagtttatttcagaatactgtggcgagatcatcagccaggacgaagctgacagaaggggcaaggtgtacgacaaatatatgtgtagcttcttgttcaacttgaacaacgatttcgtggtagacgctacaaggaaggggaacaaaatccggtttgccaaccattccgtcaaccccaattgctacgccaaggttatgatggtgaatggggatcatcggatcggcatttttgccaaacgggctatacagactggcgaggagctcttctttgactaccgctactcccaggctgacgccctgaagtatgtaggcatagagagggagatggagattccctag

SEQ ID NO: 306806 - DNA, 2124 bp, Artificial Sequence
  derived and/or modified sequence
atgggccagacaggcaagaagtctgagaagggccctgtgtgctggaggaagagggtgaagtctgagtacatgaggctgcggcagctgaagcgcttcagaagagcagatgaggtgaagtccatgttcagcagcaaccggcagaagatcctggagaggacagagatcctgaaccaggagtggaagcagaggcgcatccagcctgtgcacatcctgacctctgtgagcagcctgcggggcacccgggaggtggaggatgaaacagtgctgcacaacatcccctacatgggagatgaggtgctggaccaggacggcaccttcatcgaggagctgatcaagaactatgatggcaaggtgcatggagacagagaatgtggcttcatcaatgatgagatctttgtggagctggtgaatgccctgggccagtacaatgatgatgatgatgatgatgatggagatgatcctgaggagcgggaggagaagcagaaggacctggaggaccacagagatgacaaggagagcaggcctcccaggaagttccccagcgacaagatctttgaggccatcagctccatgtttcctgacaagggcacagctgaggagctgaaggagaagtacaaggagctgacagagcagcagctgcccggggccctgcccccagagtgcacccccaacattgatggccccaatgccaagtctgtgcagcgggagcagagcctgcacagcttccacaccctcttctgccgccgctgcttcaagtatgactgcttcctgcaccccttccacgccacccccaacacctacaagaggaagaacacagaaacagccctggacaacaagccctgtggcccccagtgctaccagcacctggagggcgccaaggagtttgctgctgccctgacagctgagcgcatcaagaccccacccaagaggcctgggggcagaagaagaggccgcctgcccaacaacagcagccggcccagcacccccaccatcaacgtgctggagagcaaggacacagacagcgaccgggaggccggcacagaaacaggaggagagaacaatgacaaggaggaggaggagaagaaggatgagaccagcagcagcagcgaggccaacagccgctgccagacccccatcaagatgaagcccaacatcgagcccccagaaaatgtggagtggagcggggctgaggcctccatgttccgggtgctgattggcacctactatgacaacttctgtgccatcgcccggctgattggcaccaagacctgccggcaggtgtatgagttccgggtgaaggagagcagcatcatcgccccagccccagcagaagatgtggacaccccacccaggaagaagaagaggaagcaccggctgtgggccgcccactgcaggaagatccagctgaagaaggatggcagcagcaaccacgtgtacaactaccagccctgtgaccacccccggcagccctgtgacagcagctgcccctgtgtgattgcccagaacttctgtgagaagttctgccagtgcagcagcgagtgccagaaccgcttccctggctgccgctgcaaggcccagtgcaacaccaagcagtgcccctgctacctggccgtgcgggagtgtgaccctgacctgtgcctgacctgtggggctgctgaccactgggacagcaagaatgtgtcctgcaagaactgcagcatccagaggggcagcaagaagcacctgctgctggcccccagtgatgtggccggctggggcatcttcatcaaggaccctgtgcagaagaatgagttcatcagcgagtactgtggggagatcatcagccaggatgaggccgaccggcggggcaaggtgtatgacaagtacatgtgcagcttcctgttcaacctgaacaatgactttgtggtggatgccaccaggaaaggaaacaagatccgctttgccaaccacagcgtgaaccccaactgctacgccaaggtgatgatggtgaatggagaccacagaattggcatctttgccaagagggccatccagacaggagaggagctgttctttgactaccgctacagccaggctgatgccctgaagtatgtgggcatcgagcgggagatggagatcccctag

SEQ ID NO: 306807 - DNA, 2124 bp, Artificial Sequence
  derived and/or modified sequence
atgggccagaccggcaagaagagcgagaagggccccgtgtgctggagaaagcgggtaaaaagtgagtatatgaggcttaggcagctgaagcggttcaggcgggctgatgaagtgaaaagtatgtttagcagtaacagacagaaaattctggaaaggaccgagatactcaatcaagagtggaaacagcgaagaatccagcctgtccacattctaaccagtgttagcagtctgcggggtacccgagaggtcgaagacgaaacggtgttgcataacattccctacatgggggatgaggtcctggatcaggacggaacattcatagaagaacttataaagaattacgatggcaaagttcatggggaccgagaatgtggctttattaacgacgagatttttgttgagttggtgaacgccttgggacagtataatgacgatgatgacgacgacgatggcgatgacccagaagaacgagaagagaagcagaaggacctggaggaccaccgtgacgacaaagaatctcggccgccccgtaaattcccctctgataaaatctttgaggcaatctccagcatgttccccgacaagggaaccgcggaggagttaaaagagaagtacaaagaactcacagagcaacaactgccaggcgcactgccacccgaatgtaccccaaacatagatggtccgaacgccaagtccgtgcagagggagcagagtcttcattcctttcatactttgttttgtaggagatgcttcaagtacgattgcttcctccacccctttcacgccacccccaacacatataagagaaagaacacagagacagcccttgacaataaaccatgcggaccccagtgctatcagcacttggagggcgccaaagagtttgccgccgccttgactgccgagaggatcaagacaccccctaaaagaccaggtggccgccgcagggggcggcttcctaacaatagttctaggccttctaccccaactattaatgtgctggagagcaaggacaccgacagcgatagggaggccggaactgaaactggcggcgagaataacgataaggaagaagaagaaaagaaggatgagacctcctcctcttctgaagcaaattcccggtgccaaactcccatcaagatgaagccaaatattgagcctcccgaaaacgtggagtggagcggtgccgaggcgtccatgtttcgagtcttgatcggcacctactacgataatttctgcgccatagctcggctgatcgggaccaaaacctgtagacaagtatacgagttcagggtaaaggagagcagtatcatagcgcctgcgccagcagaggacgttgatacaccaccgagaaaaaaaaaaagaaaacaccgcctttgggctgcccactgtagaaaaatacagttgaagaaagacggttccagtaaccacgtttataactatcagccatgtgaccatcctcggcaaccctgcgacagcagttgtccctgcgttatagcccagaacttctgtgaaaaattctgccagtgttcatcggaatgtcagaatcgcttccctggctgccgctgcaaagcacaatgcaatacaaaacagtgcccctgttatttggccgtccgggaatgtgatcctgacctatgtctcacctgcggtgccgccgatcactgggatagtaaaaacgtgtcatgcaagaactgttctatacaaaggggctccaaaaagcacttattattggctccttccgacgtggccggctggggcatcttcatcaaagatcctgtccagaaaaacgagtttatttcagagtactgcggcgaaattatttcgcaagacgaggcagaccggcgcggtaaggtgtacgataaatacatgtgcagtttcctcttcaatctgaacaatgattttgtggtcgatgcaacaagaaaaggcaacaagatccgcttcgcaaaccactctgtgaatcctaattgctatgcaaaggttatgatggtcaatggcgatcatcgaatcggaattttcgcgaagcgggcaatacagacgggcgaagagctgttctttgactatcggtacagtcaggctgacgcactgaagtatgtgggcattgagagggagatggaaatcccttag

SEQ ID NO: 306808 - DNA, 2124 bp, Artificial Sequence
  derived and/or modified sequence
atgggccagacaggcaaaaaatccgaaaaggggccagtgtgctggcgtaaaagggtgaaaagtgaatatatgcgcctgagacagctcaaacggtttcgaagggccgacgaggtcaagtctatgttctcatctaatcgtcagaaaatattggaacggaccgaaatcctgaaccaggaatggaagcaacggaggattcagccggtgcacattttgacctcagtttcctctctccgaggaacacgagaagtggaagacgaaacagtcctccacaatattccctacatgggcgatgaggtgttggaccaggacggcacgttcatcgaggaacttatcaagaattacgacggtaaagtacacggagacagggagtgcggcttcattaatgatgaaattttcgtggagctggtgaatgccctgggccagtacaacgatgacgatgatgatgacgatggggatgatccagaggaaagagaagaaaagcagaaggatctggaggaccatcgggacgataaggaatcccgtccccctaggaagtttccctctgataaaatcttcgaggcgatctcaagtatgttccctgataaaggaactgccgaggagctgaaggagaagtacaaggagctgaccgaacagcagttgccaggcgcattgcctcccgaatgcacacctaatattgatggccctaacgccaaatccgtgcaacgcgagcagagcctccacagctttcacacacttttctgtcgacgatgtttcaaatatgactgcttcctgcacccgttccacgccactcccaacacctacaaacggaagaacacggaaactgctctggataacaaaccatgcggccctcagtgttatcagcacttggagggtgcaaaagaattcgccgcagctttaacagcggaacggattaagaccccacctaaaagacctgggggtcggagacggggtagactcccaaataattctagccgaccctccacaccgaccattaacgtgctggagtcgaaagacactgacagtgacagagaggctggaacagagaccggcggagagaacaacgacaaagaggaagaagaaaagaaggatgagacaagtagcagctcagaggctaacagcaggtgtcagacacctataaagatgaagccaaacatcgaacccccagaaaacgttgagtggagcggggcagaagcctccatgtttcgagtattgatcgggacgtactatgataacttctgtgcgattgcgagactgattggaaccaagacctgccggcaagtgtacgagttccgagtgaaagagagcagcattatcgcgccagcacctgctgaggatgtcgacactcctccacggaagaaaaaacggaagcacagattgtgggctgctcactgtcgcaagatacagctcaagaaggacggctcctcgaatcacgtgtataattaccaaccctgtgatcaccctcgacaaccatgcgattcgtcttgtccgtgtgtgatcgcacagaacttttgcgaaaaattctgccagtgttcctccgaatgtcagaaccgtttccctggatgcaggtgtaaagctcagtgcaacaccaaacagtgtccttgttacctcgctgttcgcgagtgtgatcccgatctctgccttacatgcggggctgctgaccactgggatagcaaaaacgtgagctgcaagaattgttcaattcagcggggaagcaaaaaacacctgctcttggccccttcggatgttgccggatggggaatcttcatcaaagacccagtccagaagaacgaattcatttccgagtattgtggagagatcatctctcaagacgaagccgaccggagaggaaaagtgtacgacaaatatatgtgcagcttcctcttcaaccttaataatgattttgtcgttgacgctacccgtaaaggaaacaagatccgttttgctaatcatagtgttaatcctaactgctatgctaaggttatgatggttaacggcgatcaccgcattggtatattcgccaagcgcgcaatccaaacaggagaagaactcttctttgactaccgctatagtcaagcggacgccctgaaatatgtgggaatcgaacgtgaaatggaaattccttag

SEQ ID NO: 306809 - DNA, 2124 bp, Artificial Sequence
  derived and/or modified sequence
atgggccagaccggcaagaagagcgagaagggccccgtgtgctggagaaagagagtgaagagcgagtacatgagactgagacagctgaagagattcagaagagccgacgaggtgaagagcatgttcagcagcaacagacagaagatcctggagagaaccgagatcctgaaccaggagtggaagcagagaagaatccagcccgtgcacatcctgaccagcgtgagcagcctgagaggcaccagagaggtggaggacgagaccgtgctgcacaacatcccctacatgggcgacgaggtgctggaccaggacggcaccttcatcgaggagctgatcaagaactacgacggcaaggtgcacggcgacagagagtgcggcttcatcaacgacgagatcttcgtggagctggtgaacgccctgggccagtacaacgacgacgacgacgacgacgacggcgacgaccccgaggagagagaggagaagcagaaggacctggaggaccacagagacgacaaggagagcagaccccccagaaagttccccagcgacaagatcttcgaggccatcagcagcatgttccccgacaagggcaccgccgaggagctgaaggagaagtacaaggagctgaccgagcagcagctgcccggcgccctgccccccgagtgcacccccaacatcgacggccccaacgccaagagcgtgcagagagagcagagcctgcacagcttccacaccctgttctgcagaagatgcttcaagtacgactgcttcctgcaccccttccacgccacccccaacacctacaagagaaagaacaccgagaccgccctggacaacaagccctgcggcccccagtgctaccagcacctggagggcgccaaggagttcgccgccgccctgaccgccgagagaatcaagaccccccccaagagacccggcggcagaagaagaggcagactgcccaacaacagcagcagacccagcacccccaccatcaacgtgctggagagcaaggacaccgacagcgacagagaggccggcaccgagaccggcggcgagaacaacgacaaggaggaggaggagaagaaggacgagaccagcagcagcagcgaggccaacagcagatgccagacccccatcaagatgaagcccaacatcgagccccccgagaacgtggagtggagcggcgccgaggccagcatgttcagagtgctgatcggcacctactacgacaacttctgcgccatcgccagactgatcggcaccaagacctgcagacaggtgtacgagttcagagtgaaggagagcagcatcatcgcccccgcccccgccgaggacgtggacaccccccccagaaagaagaagagaaagcacagactgtgggccgcccactgcagaaagatccagctgaagaaggacggcagcagcaaccacgtgtacaactaccagccctgcgaccaccccagacagccctgcgacagcagctgcccctgcgtgatcgcccagaacttctgcgagaagttctgccagtgcagcagcgagtgccagaacagattccccggctgcagatgcaaggcccagtgcaacaccaagcagtgcccctgctacctggccgtgagagagtgcgaccccgacctgtgcctgacctgcggcgccgccgaccactgggacagcaagaacgtgagctgcaagaactgcagcatccagagaggcagcaagaagcacctgctgctggcccccagcgacgtggccggctggggcatcttcatcaaggaccccgtgcagaagaacgagttcatcagcgagtactgcggcgagatcatcagccaggacgaggccgacagaagaggcaaggtgtacgacaagtacatgtgcagcttcctgttcaacctgaacaacgacttcgtggtggacgccaccagaaagggcaacaagatcagattcgccaaccacagcgtgaaccccaactgctacgccaaggtgatgatggtgaacggcgaccacagaatcggcatcttcgccaagagagccatccagaccggcgaggagctgttcttcgactacagatacagccaggccgacgccctgaagtacgtgggcatcgagagagagatggagatcccctag

SEQ ID NO: 306810 - DNA, 2477 bp, Artificial Sequence
  derived and/or modified sequence
agaaggcagtggagccccggcggcggcggcggcggcgcgcgggggcgacgcgcgggaacaacgcgagtcggcgcgcgggacgaagaataatcatgggccagactgggaagaaatctgagaagggaccagtttgttggcggaagcgtgtaaaatcagagtacatgcgactgagacagctcaagaggttcagacgagctgatgaagtaaagagtatgtttagttccaatcgtcagaaaattttggaaagaacggaaatcttaaaccaagaatggaaacagcgaaggatacagcctgtgcacatcctgacttctgtgagctcattgcgcgggactagggaggtggaagatgaaactgttttacataacattccttatatgggagatgaagttttagatcaggatggtactttcattgaagaactaataaaaaattatgatgggaaagtacacggggatagagaatgtgggtttataaatgatgaaatttttgtggagttggtgaatgcccttggtcaatataatgatgatgacgatgatgatgatggagacgatcctgaagaaagagaagaaaagcagaaagatctggaggatcaccgagatgataaagaaagccgcccacctcggaaatttccttctgataaaatttttgaagccatttcctcaatgtttccagataagggcacagcagaagaactaaaggaaaaatataaagaactcaccgaacagcagctcccaggcgcacttcctcctgaatgtacccccaacatagatggaccaaatgctaaatctgttcagagagagcaaagcttacactcctttcatacgcttttctgtaggcgatgttttaaatatgactgcttcctacatccttttcatgcaacacccaacacttataagcggaagaacacagaaacagctctagacaacaaaccttgtggaccacagtgttaccagcatttggagggagcaaaggagtttgctgctgctctcaccgctgagcggataaagaccccaccaaaacgtccaggaggccgcagaagaggacggcttcccaataacagtagcaggcccagcacccccaccattaatgtgctggaatcaaaggatacagacagtgatagggaagcagggactgaaacggggggagagaacaatgataaagaagaagaagagaagaaagatgaaacttcgagctcctctgaagcaaattctcggtgtcaaacaccaataaagatgaagccaaatattgaacctcctgagaatgtggagtggagtggtgctgaagcctcaatgtttagagtcctcattggcacttactatgacaatttctgtgccattgctaggttaattgggaccaaaacatgtagacaggtgtatgagtttagagtcaaagaatctagcatcatagctccagctcccgctgaggatgtggatactcctccaaggaaaaagaagaggaaacaccggttgtgggctgcacactgcagaaagatacagctgaaaaaggacggctcctctaaccatgtttacaactatcaaccctgtgatcatccacggcagccttgtgacagttcgtgcccttgtgtgatagcacaaaatttttgtgaaaagttttgtcaatgtagttcagagtgtcaaaaccgctttccgggatgccgctgcaaagcacagtgcaacaccaagcagtgcccgtgctacctggctgtccgagagtgtgaccctgacctctgtcttacttgtggagccgctgaccattgggacagtaaaaatgtgtcctgcaagaactgcagtattcagcggggctccaaaaagcatctattgctggcaccatctgacgtggcaggctgggggatttttatcaaagatcctgtgcagaaaaatgaattcatctcagaatactgtggagagattatttctcaagatgaagctgacagaagagggaaagtgtatgataaatacatgtgcagctttctgttcaacttgaacaatgattttgtggtggatgcaacccgcaagggtaacaaaattcgttttgcaaatcattcggtaaatccaaactgctatgcaaaagttatgatggttaacggtgatcacaggataggtatttttgccaagagagccatccagactggcgaagagctgttttttgattacagatacagccaggctgatgccctgaagtatgtcggcatcgaaagagaaatggaaatcccttgacatctgctacctcctcccccctcctctgaaacagctgccttagcttcaggaacctcgagtactgtgggcaatttagaaaaagaacatgcagtttgaaattctgaatttgcaaagtactgtaagaataatttatagtaatgagtttaaaaatcaactttttattgccttctcaccagctgcaaagtgttttgtaccagtgaatttttgcaataatgcagtatggtacatttttcaactttgaataaagaatacttgaacttg

SEQ ID NO: 306811 - DNA, 678 bp, Artificial Sequence
  derived and/or modified sequence
atgtatagttggtcacctttgcaacaaaacttcatggtagaagatgaaaccgtgctccataatatcccttatatgggcgatgaggtcttggaccaggatggcacattcatcgaagagttgattaaaaactatgatggcaaagtgcacggtgaccgcgaatgtggcttcatcaacgacgaaatatttgtggagctggtcaacgccctgggtcagtataacgatgatgatgatgacgatgatggggatgacccagaagaacgggaggagaaacagaaagatctcgaggaccatcgcgacgataaagaaagccggccgcccagaaagtttcctagcgataaaatattcgaagccatttcctccatgtttcctgataagggcaccgccgaggagctcaaggagaagtacaaagaattgaccgagcagcaactccccggggctctcccacctgagtgcactcctaacattgatggaccaaacgctaaatccgtccagcgggaacagtctctgcactcttttcacaccctcttttgccgcaggtgctttaagtatgattgttttttgcaccccttccatgctacaccgaacacatataagcggaaaaacacggaaaccgcacttgacaataagccctgcggacctcagtgctaccagcatttgccccttctgccccggaactag

SEQ ID NO: 306812 - DNA, 678 bp, Artificial Sequence
  derived and/or modified sequence
atgtacagctggagccccctgcagcagaacttcatggtggaggatgaaacagtgctgcacaacatcccctacatgggagatgaggtgctggaccaggacggcaccttcatcgaggagctgatcaagaactatgatggcaaggtgcatggagacagagaatgtggcttcatcaatgatgagatctttgtggagctggtgaatgccctgggccagtacaatgatgatgatgatgatgatgatggagatgatcctgaggagcgggaggagaagcagaaggacctggaggaccacagagatgacaaggagagcaggcctcccaggaagttccccagcgacaagatctttgaggccatcagctccatgtttcctgacaagggcacagctgaggagctgaaggagaagtacaaggagctgacagagcagcagctgcccggggccctgcccccagagtgcacccccaacattgatggccccaatgccaagtctgtgcagcgggagcagagcctgcacagcttccacaccctcttctgccgccgctgcttcaagtatgactgcttcctgcaccccttccacgccacccccaacacctacaagaggaagaacacagaaacagccctggacaacaagccctgtggcccccagtgctaccagcacctgcccctgctgcccaggaactag

SEQ ID NO: 306813 - DNA, 678 bp, Artificial Sequence
  derived and/or modified sequence
atgtacagctggagccccctgcagcagaacttcatggtggaggacgagaccgtgctccacaacatcccgtacatgggtgatgaggtgctggatcaggatggaacgttcattgaggagctcataaagaattacgacggaaaagtacatggcgaccgtgaatgtggattcatcaatgacgagatttttgtggaactcgtcaacgcactgggccaatacaatgatgacgacgatgacgatgacggggatgatcccgaggaaagggaagagaaacaaaaggatctggaggaccaccgggacgataaggagtcacgacccccccgcaagtttccgtctgacaagatttttgaagcgatctccagtatgtttccagataagggaactgcagaggagctcaaagaaaagtacaaggagttgacagagcagcagcttcccggggctcttcctcccgagtgcaccccaaacatcgacgggcccaatgccaagagcgtccaaagagaacagtcgttacattctttccacaccttgttctgtagacgctgcttcaagtatgactgtttcctgcaccctttccacgctacccccaatacctacaagcgcaagaacaccgaaaccgcactggacaataagccatgcggaccccagtgctaccagcatctgccgctgttacctcggaactag

SEQ ID NO: 306814 - DNA, 678 bp, Artificial Sequence
  derived and/or modified sequence
atgtactcatggtcccctcttcagcaaaatttcatggtcgaggatgagactgttttgcacaatatcccatatatgggcgacgaagttctcgatcaggacggcacttttatcgaggaactgatcaaaaactatgacggcaaagtccacggggaccgggaatgcggtttcatcaacgatgagatcttcgtggagctggttaatgccctagggcaatacaacgatgacgatgatgacgacgatggagatgatccagaggagagagaggaaaaacagaaggatctagaagaccatcgggacgacaaagagtcgaggccccctcgcaagttcccaagtgataagatctttgaagcgatttcaagtatgttcccggacaaggggacggccgaggaattgaaggagaagtacaaggagctgactgagcagcagctgccaggcgctctgccccctgagtgcacacccaacattgacgggccaaacgccaagtcggtgcagcgggaacagtcactacattcatttcacactctgttctgtcgaagatgtttcaaatatgattgtttcctccacccattccacgcaaccccaaacacctataaacgcaagaacactgagacggcgctggacaacaaaccatgtggccctcagtgttaccagcatcttcccctcttgcccagaaattag

SEQ ID NO: 306815 - DNA, 678 bp, Artificial Sequence
  derived and/or modified sequence
atgtacagctggagccccctgcagcagaacttcatggtggaggacgagaccgtgctgcacaacatcccctacatgggcgacgaggtgctggaccaggacggcaccttcatcgaggagctgatcaagaactacgacggcaaggtgcacggcgacagagagtgcggcttcatcaacgacgagatcttcgtggagctggtgaacgccctgggccagtacaacgacgacgacgacgacgacgacggcgacgaccccgaggagagagaggagaagcagaaggacctggaggaccacagagacgacaaggagagcagaccccccagaaagttccccagcgacaagatcttcgaggccatcagcagcatgttccccgacaagggcaccgccgaggagctgaaggagaagtacaaggagctgaccgagcagcagctgcccggcgccctgccccccgagtgcacccccaacatcgacggccccaacgccaagagcgtgcagagagagcagagcctgcacagcttccacaccctgttctgcagaagatgcttcaagtacgactgcttcctgcaccccttccacgccacccccaacacctacaagagaaagaacaccgagaccgccctggacaacaagccctgcggcccccagtgctaccagcacctgcccctgctgcccagaaactag

SEQ ID NO: 306816 - protein, 253 aa, Artificial Sequence
  derived and/or modified sequence
MSFSVHNQKGSKRPLPLEPLLFLQVPRSNYLHFQEEKQRLHLKKFLLDRMFLVAKIQANVERKDVADYYEQMFQSVLKHHLGEAVTGLLLIYPTSILHILESSSDTLYKVLLDYIGHVKDETVFFIQQMKIIVISHNIPMRLFMQWHVSVIKVPVMYLDDVTQSQSLKEVITDFLTQTHKLSLYLCQTMKVGTKGPGDNLHQVAPDLLLPEQIIKYLCKSEEFMDPATFINMYNRPIHITLDSEVVWPAPSRF

SEQ ID NO: 306817 - DNA, 762 bp, Artificial Sequence
  derived and/or modified sequence
atgagcttcagcgtgcacaaccagaagggcagcaagagacccctgcccctggagcccctgctgttcctgcaggtgcccagaagcaactacctgcacttccaggaggagaagcagagactgcacctgaagaagttcctgctggacagaatgttcctggtggccaagatccaggccaacgtggagagaaaggacgtggccgactactacgagcagatgttccagagcgtgctgaagcaccacctgggcgaggccgtgaccggcctgctgctgatctaccccaccagcatcctgcacatcctggagagcagcagcgacaccctgtacaaggtgctgctggactacatcggccacgtgaaggacgagaccgtgttcttcatccagcagatgaagatcatcgtgatcagccacaacatccccatgagactgttcatgcagtggcacgtgagcgtgatcaaggtgcccgtgatgtacctggacgacgtgacccagagccagagcctgaaggaggtgatcaccgacttcctgacccagacccacaagctgagcctgtacctgtgccagaccatgaaggtgggcaccaagggccccggcgacaacctgcaccaggtggcccccgacctgctgctgcccgagcagatcatcaagtacctgtgcaagagcgaggagttcatggaccccgccaccttcatcaacatgtacaacagacccatccacatcaccctggacagcgaggtggtgtggcccgcccccagcagattctag

SEQ ID NO: 306818 - DNA, 1023 bp, Artificial Sequence
  derived and/or modified sequence
tggcagttgggagcctgatggaggacaagtagggcctcgaggacaggtgcgtgacagaagcacaggaaaaaaaagaaaaatgaagaaataaaaacacgagttcatcagtaaagaggtaccctggcagcataaatattatgataagctaaaagctggaatcatctggaaaaataaataagactcctcatgtccttttcggtccataaccagaagggcagcaaaaggcctttgccactggaacctcttctttttctccaagtcccacgtagcaattacctgcactttcaagaagagaaacaacgactacacctaaagaaattccttcttgataggatgtttctagtggccaagatacaagcaaatgtagaaagaaaagatgttgctgactactatgaacaaatgtttcagtcagttttgaaacatcacctaggagaagcagtgacaggattgctgctcatctatcccacttccattctgcatatcctcgagtcctccagcgacactctctacaaagttcttttagattatattggccatgtcaaagatgaaacagtattttttattcaacaaatgaaaattatagtcatttctcataacattccaatgaggctttttatgcaatggcatgtttcagtgataaaagttccagttatgtatctcgacgatgtgacacagtcacagtccctaaaggaggtcatcacagattttctcacacaaactcataaactgtcactctacctttgccagactatgaaagtaggcactaaaggaccaggcgataacttacaccaagttgcacctgacctactcctcccagaacaaatcataaagtacttgtgcaaatccgaagaattcatggacccggcaacatttataaacatgtataatagacccatacacatcactctggattctgaggtggtatggcctgctccttcacgtttctaggattgagagggataatgtgcccatgtctcttaaggagtttgtgctacttaaataaaaaaaacatttttaaagtta

SEQ ID NO: 306819 - DNA, 762 bp, Artificial Sequence
  derived and/or modified sequence
atgtcgttttcggttcacaaccagaaagggtccaagcgtcccctgcctctggagcccctcttatttctgcaggtaccacggagcaattacctccactttcaggaggaaaaacagagactgcacttaaagaaatttttactggacaggatgttcttagtggcgaagatccaagccaatgtggagagaaaggatgtcgccgactactatgagcaaatgttccagtctgtattaaaacatcacttgggcgaagcagtgactggtctgcttctgatctatcctacatcaatcttgcatatcttagagtcctcttcggacaccctgtataaagtactgttagactatatcgggcacgtgaaagacgagacagtcttctttatacagcagatgaaaatcatagttatttctcacaacataccaatgaggcttttcatgcagtggcacgtatcagtcatcaaggtcccagtaatgtacctggacgatgtgacacagagccagtcactgaaagaggtgattaccgatttcctgacccagacccacaagctttccttatatctatgtcaaactatgaaagtgggcacaaagggcccaggggacaacctgcatcaggtcgcgccagatctgctgctgccagagcagatcataaagtatctgtgtaagtccgaggaatttatggatccagccaccttcatcaatatgtacaaccgcccaattcacattaccctcgactcagaggtagtttggccagcaccaagcagattctag

SEQ ID NO: 306820 - DNA, 762 bp, Artificial Sequence
  derived and/or modified sequence
atgtccttctctgtgcacaaccagaagggcagcaagaggcccctgcccctggagcccctgctcttcctgcaggtgcccaggagcaactacctgcacttccaggaggagaagcagaggctgcacctgaagaagttcctgctggacaggatgttcctggtggccaagatccaggccaacgtggagaggaaggatgtggccgactactatgagcagatgttccagagcgtgctgaagcaccacctgggggaggccgtgacaggcctgctgctgatctaccccaccagcatcctgcacatcctggagagcagcagtgacaccctgtacaaggtgctgctggactacatcggccacgtgaaggatgagaccgtcttcttcatccagcagatgaagatcatcgtcatcagccacaacatccccatgaggctcttcatgcagtggcacgtgtctgtcatcaaggtgcctgtgatgtacctggatgatgtgacccagagccagagcctgaaggaggtgatcacagacttcctgacccagacccacaagctgagcctgtacctgtgccagaccatgaaggtgggcaccaagggccctggggacaacctgcaccaggtggccccagacctgctgctgcctgagcagatcatcaagtacctgtgcaagtctgaggagttcatggaccctgccaccttcatcaacatgtacaaccggcccatccacatcaccctggacagcgaggtggtgtggccagcccccagccgcttctag

SEQ ID NO: 306821 - DNA, 762 bp, Artificial Sequence
  derived and/or modified sequence
atgagcttcagcgtgcacaaccagaagggcagcaagcggcccctgcctctggagccactcttatttcttcaggtgcctcgctcaaactatctccacttccaggaggagaagcagaggcttcatctgaagaagtttcttctcgacagaatgtttcttgttgccaagatccaggcaaacgtcgagcgtaaagacgtagcggattattacgagcagatgttccagtcagtgctgaaacatcacctgggggaagcggtgactgggctactgttaatataccccacaagtattctccacattctggagagcagctccgacaccctatacaaggtactccttgactatatcggtcacgtgaaagacgagaccgtcttttttattcaacagatgaaaatcattgtgatctcacataacatccccatgaggctgttcatgcagtggcacgtctctgtcatcaaagtccctgtgatgtatctcgacgacgtgactcagtcacaaagtctgaaggaggtgattaccgacttcctgacgcagacgcataagcttagcctgtatttgtgccaaacaatgaaagtgggcacaaagggccccggagataatctgcaccaggtggctccagacctactgcttcctgaacagattataaaatacctttgtaagtctgaggagtttatggatcctgccacattcatcaatatgtacaacaggccaattcacattacgctggattccgaggtggtttggcctgcgccaagcaggttttag

SEQ ID NO: 306822 - DNA, 762 bp, Artificial Sequence
  derived and/or modified sequence
atgagcttcagtgtgcacaatcaaaagggatcaaaacggcctctgcccctggagcccttgttgtttctacaggtgccacgatcaaattaccttcactttcaggaagagaaacagcggttacacctgaagaaatttctacttgacaggatgtttttggttgccaaaattcaggccaatgtcgagcgtaaggacgtggctgattattatgaacaaatgttccaatcagtcctgaagcatcacttgggggaggcggtgactggacttctgttgatttaccctacctcgatcctccatatcctcgaaagcagctccgacacgctatacaaagtgctgctggattacattggccatgtcaaggacgagacggtcttttttatccagcaaatgaagatcattgtgatctcgcataatattcccatgcggctgttcatgcagtggcacgtgagtgtcattaaggttcccgtcatgtacctcgatgatgtgacacagtctcagtcgttgaaagaagtgatcactgatttccttacacaaacgcacaagttgtcactgtatctgtgccagacaatgaaagttgggaccaaaggtcctggcgacaatttacaccaggtcgcccctgatctcctgctgccagagcagattataaagtatctgtgcaagagcgaagagttcatggaccccgcaacttttattaatatgtacaataggcctatccacattacactcgatagcgaggtggtgtggcctgctccgagtaggttttag

SEQ ID NO: 306823 - DNA, 563 bp, Artificial Sequence
  derived and/or modified sequence
acacagtgagggaggcaaaacagtgtggatgcagcagaataaccacaaccaggattttgaactgaataagtaagaaagattatcactttgaatatacggaatgtgatagcagtggctccaggtggagagttgccattccaaattctgcagtggactgctctggcctgcctgacccagtgagaggcaaagaatgcactttctcctgtgcttctggagagtatctagaaatgaagaaccaggtatgcagtaagtgtggtgaaggcacctattccttgggcagtggcatcaaatttgatgaatgggatgaattgccggcaggattttctaacatcgcaacattcatggacactgtggtgggcccttctgacagcaggccagacggctgtaacaactcttcttggatccctcgtggaaactacatagaatctaatcgtgatgactgcacggtgtctttgatctatgctgtgcaccttaagaagtcaggctatgtcttctttgagtaccagtatgtcgacaacaacatcttctttgagttctttattcaaaatgatcagtgccaggag

SEQ ID NO: 306824 - protein, 149 aa, Artificial Sequence
  derived and/or modified sequence
MQEAIILLALLGAMSGGEALHLILLPATGNVAENSPPGTSVHKFSVKLSASLSPVIPGFPQIVNSNPLTEAFRVNWLSGTYFEVVTTGMEQLDFETGPNIFDLQIYVKDEVGVTDLQVLTVQVTDVNEPPQFQGNLAEARHECTQSWRN

SEQ ID NO: 306825 - protein, 279 aa, Artificial Sequence
  derived and/or modified sequence
MINQLTGTIQVAQRIDRDAGELRQNPTISLEVLVKDRPYGGQENRIQITFIVEDVNDNPATCQKFTFSIMVPERTAKGTLLLDLNKFCFDDDSEAPNNRFNFTMPSGVGSGSRFLQDPAGSGKIVLIGDLDYENPSNLAAGNKYTVIIQVQDVAPPYYKSKYNVYVYILTSPENEFPLIFDRPSYVFDVSERRPAQGHLSGPEEKRLLSICMVRAVCHHFGLHIASGSPRVPGRPIGQSHPQTLPLQDWEEQGTSVREIPNEDCRERRRGGNYPDEHYL

SEQ ID NO: 306826 - protein, 318 aa, Artificial Sequence
  derived and/or modified sequence
YTVLEELSPGTIVANITAEDPDDEGFPSHLLYSITTVSKYFMINQLTGTIQVAQRIDRDAGELRQNPTISLEVLVKDRPYGGQENRIQITFIVEDVNDNPATCQKFTFSIMVPERTAKGTLLLDLNKFCFDDDSEAPNNRFNFTMPSGVGSGSRFLQDPAGSGKIVLIGDLDYENPSNLAAGNKYTVIIQVQDVAPPYYKNNVYVYILTSPENEFPLIFDRPSYVFDVSERRPAQGHLSGPEEKRLLSICMVRAVCHHFGLHIASGSPRVPGRPIGQSHPQTLPLQDWEEQGTSDKERRNEDCRERRRGGNYPDEHYL

SEQ ID NO: 306827 - DNA, 840 bp, Artificial Sequence
  derived and/or modified sequence
atgatcaaccagctgaccggcaccatccaggtggcccagagaatcgacagagacgccggcgagctgagacagaaccccaccatcagcctggaggtgctggtgaaggacagaccctacggcggccaggagaacagaatccagatcaccttcatcgtggaggacgtgaacgacaaccccgccacctgccagaagttcaccttcagcatcatggtgcccgagagaaccgccaagggcaccctgctgctggacctgaacaagttctgcttcgacgacgacagcgaggcccccaacaacagattcaacttcaccatgcccagcggcgtgggcagcggcagcagattcctgcaggaccccgccggcagcggcaagatcgtgctgatcggcgacctggactacgagaaccccagcaacctggccgccggcaacaagtacaccgtgatcatccaggtgcaggacgtggcccccccctactacaagagcaagtacaacgtgtacgtgtacatcctgaccagccccgagaacgagttccccctgatcttcgacagacccagctacgtgttcgacgtgagcgagagaagacccgcccagggccacctgagcggccccgaggagaagagactgctgagcatctgcatggtgagagccgtgtgccaccacttcggcctgcacatcgccagcggcagccccagagtgcccggcagacccatcggccagagccacccccagaccctgcccctgcaggactgggaggagcagggcaccagcgtgagagagatccccaacgaggactgcagagagagaagaagaggcggcaactaccccgacgagcactacctgtag

SEQ ID NO: 306828 - DNA, 957 bp, Artificial Sequence
  derived and/or modified sequence
tacaccgtgctggaggagctgagccccggcaccatcgtggccaacatcaccgccgaggaccccgacgacgagggcttccccagccacctgctgtacagcatcaccaccgtgagcaagtacttcatgatcaaccagctgaccggcaccatccaggtggcccagagaatcgacagagacgccggcgagctgagacagaaccccaccatcagcctggaggtgctggtgaaggacagaccctacggcggccaggagaacagaatccagatcaccttcatcgtggaggacgtgaacgacaaccccgccacctgccagaagttcaccttcagcatcatggtgcccgagagaaccgccaagggcaccctgctgctggacctgaacaagttctgcttcgacgacgacagcgaggcccccaacaacagattcaacttcaccatgcccagcggcgtgggcagcggcagcagattcctgcaggaccccgccggcagcggcaagatcgtgctgatcggcgacctggactacgagaaccccagcaacctggccgccggcaacaagtacaccgtgatcatccaggtgcaggacgtggcccccccctactacaagaacaacgtgtacgtgtacatcctgaccagccccgagaacgagttccccctgatcttcgacagacccagctacgtgttcgacgtgagcgagagaagacccgcccagggccacctgagcggccccgaggagaagagactgctgagcatctgcatggtgagagccgtgtgccaccacttcggcctgcacatcgccagcggcagccccagagtgcccggcagacccatcggccagagccacccccagaccctgcccctgcaggactgggaggagcagggcaccagcgacaaggagagaagaaacgaggactgcagagagagaagaagaggcggcaactaccccgacgagcactacctgtag

SEQ ID NO: 306829 - DNA, 450 bp, Artificial Sequence
  derived and/or modified sequence
atgcaggaggccatcatcctgctggccctgctgggcgccatgagcggcggcgaggccctgcacctgatcctgctgcccgccaccggcaacgtggccgagaacagcccccccggcaccagcgtgcacaagttcagcgtgaagctgagcgccagcctgagccccgtgatccccggcttcccccagatcgtgaacagcaaccccctgaccgaggccttcagagtgaactggctgagcggcacctacttcgaggtggtgaccaccggcatggagcagctggacttcgagaccggccccaacatcttcgacctgcagatctacgtgaaggacgaggtgggcgtgaccgacctgcaggtgctgaccgtgcaggtgaccgacgtgaacgagcccccccagttccagggcaacctggccgaggccagacacgagtgcacccagagctggagaaactag

SEQ ID NO: 306830 - DNA, 840 bp, Artificial Sequence
  derived and/or modified sequence
atgatcaatcagctgacgggcactatccaggtggcacagcgcatcgatagggatgccggcgagctccgccagaatccgacgataagtctggaagtgctagttaaggaccggccttacgggggccaggagaaccggatacaaataacctttattgtcgaagatgtgaatgataatcccgcaacttgccagaaatttacttttagtatcatggtgcctgagcggacagctaagggcactctgctgctggacctgaacaaattttgctttgatgatgattctgaggccccgaacaatcgatttaactttaccatgccaagcggggtggggtccggctccaggttcctacaagaccccgcaggcagcggtaaaattgtcttgatcggggacttggattatgaaaaccctagcaatctggctgcgggcaacaaatatacagtgatcattcaagttcaggatgtggctccaccatactataaatccaaatacaatgtgtacgtgtatattctcacctctccagagaatgaatttcctctgatttttgaccggccttcatacgtttttgacgtgtccgagcgaagaccagcccagggccacttgagcggtcctgaagagaaacggctcctttctatttgcatggtgagggccgtttgtcaccactttggattacatattgcaagtggcagcccccgcgtgccaggcagaccgattggacagagtcacccacaaacgctccccctgcaggattgggaggaacagggtacctcagttagagagatccctaacgaagactgtcgggaacgtcggcggggggggaactatcccgacgagcattatctctag

SEQ ID NO: 306831 - DNA, 957 bp, Artificial Sequence
  derived and/or modified sequence
tatacagttctcgaggagttatctccaggcaccatcgtggctaacataacagccgaggacccagacgatgaaggcttcccaagccacctcttatactcaatcactaccgtgagcaaatacttcatgatcaaccagttgacaggcaccattcaagtggctcagcgaattgacagagatgcaggggaacttcggcagaaccctacaatcagtctggaggtgctcgtcaaggatcgcccatatggcggccaagagaacagaatccaaataacctttattgtcgaggacgtgaacgacaatcccgctacgtgccaaaaattcacattttcaataatggtgcctgagcgaacagcgaaaggtaccctgcttttggatctcaacaagttctgttttgatgacgacagtgaagccccaaataaccggtttaattttacaatgccctcgggggttggcagtggttcgaggtttttgcaggatcccgctgggagcgggaagatcgtgctgattggtgacctggattatgagaacccatccaatctcgcagcgggtaataaatatacggtgatcatccaggtccaggacgtggctcccccttactacaagaataatgtttacgtgtatatccttacttcacctgagaatgagttcccactgatattcgacagaccgtcctatgttttcgatgtgtccgagcgcaggccagcgcagggacacctgagtggtcctgaagagaagcgacttctgagtatctgtatggtccgtgccgtttgccatcatttcggcctacacatagccagcgggtccccgagagtcccaggtcggccaatcggtcagtcgcacccccaaactctgccactccaggattgggaggagcagggcactagtgacaaggagagaagaaacgaggattgcagggagcgcaggcgcgggggaaactacccggatgagcattacctctag

SEQ ID NO: 306832 - DNA, 450 bp, Artificial Sequence
  derived and/or modified sequence
atgcaggaggcgataattctgctggcattattgggtgccatgagcggaggggaagctctgcacctgattctgctgccagccactggcaacgtcgctgagaacagtccacctggaacctccgttcataagttctcggtgaagttgtctgcctctctgtctcccgttatccctggcttcccacagatcgtaaacagcaatccactgaccgaggctttcagggtgaactggctttcaggtacctacttcgaagtcgtgactactgggatggagcagcttgactttgagaccggacctaacatctttgatttgcagatttatgtgaaagatgaggtgggtgtaaccgatcttcaggtattaacagttcaggtgacagacgtgaacgaaccccctcagttccaaggtaacctggccgaggcacgccatgaatgtacacagtcttggaggaattag

SEQ ID NO: 306833 - DNA, 840 bp, Artificial Sequence
  derived and/or modified sequence
atgatcaaccagctgaccggcaccatccaggtggcccagagaattgacagagatgctggggagctgcggcagaaccccaccatcagcctggaggtgctggtgaaggaccggccctatggaggccaggagaaccgcatccagatcaccttcatcgtggaggatgtgaatgacaacccagccacctgccagaagttcaccttcagcatcatggtgcctgagaggacagccaagggcaccctgctgctggacctgaacaagttctgctttgatgatgattctgaggcccccaacaaccgcttcaacttcaccatgcccagcggcgtgggcagcggcagccgcttcctgcaggaccctgctggcagcggcaagatcgtgctgattggagacctggactatgagaaccccagcaacctggccgccggcaacaagtacaccgtcatcatccaggtgcaggatgtggccccaccctactacaagagcaagtacaacgtgtatgtgtacatcctgaccagcccagaaaatgagttccccctcatctttgaccggcccagctatgtgtttgatgtgtctgagcggcggcctgcccagggccacctgagcggccctgaggagaagaggctgctgagcatctgcatggtgcgggctgtgtgccaccacttcggcctgcacatcgccagcggcagcccccgggtgcccggccggcccatcggccagagccacccccagaccctgcccctgcaggactgggaggagcagggcacctctgtgcgggagatccccaatgaagactgccgggagcggcggcggggcggcaactacccagatgagcactacctgtag

SEQ ID NO: 306834 - DNA, 957 bp, Artificial Sequence
  derived and/or modified sequence
tacacagtgctggaggagctgagccctggcaccatcgtggccaacatcacagcagaagatcctgatgatgagggcttccccagccacctgctgtacagcatcaccaccgtgtccaagtacttcatgatcaaccagctgaccggcaccatccaggtggcccagagaattgacagagatgctggggagctgcggcagaaccccaccatcagcctggaggtgctggtgaaggaccggccctacggcggccaggagaaccgcatccagatcaccttcatcgtggaggatgtgaatgacaacccagccacctgccagaagttcaccttcagcatcatggtgcctgagaggacagccaagggcaccctgctgctggacctgaacaagttctgctttgatgatgacagcgaggcccccaacaaccgcttcaacttcaccatgcccagcggcgtgggcagcggcagccgcttcctgcaggaccctgctggcagcggcaagatcgtgctgattggagacctggactatgagaaccccagcaacctggccgccggcaacaagtacaccgtcatcatccaggtgcaggatgtggccccaccctactacaagaacaacgtgtatgtgtacatcctgaccagcccagaaaatgagttccccctcatctttgaccggcccagctatgtgtttgatgtgtctgaaagaagacctgcccagggccacctgagcggccctgaggagaagaggctgctgagcatctgcatggtgcgggctgtgtgccaccacttcggcctgcacatcgccagcggcagcccccgggtgcccggccggcccatcggccagagccacccccagaccctgcccctgcaggactgggaggagcagggcaccagtgacaaggagaggagaaatgaagactgccgggagaggagaagaggaggcaactacccagatgagcactacctgtag

SEQ ID NO: 306835 - DNA, 450 bp, Artificial Sequence
  derived and/or modified sequence
atgcaggaggccatcatcctgctggccctgctgggcgccatgtctggaggagaggccctgcacctgatcctgctgcctgccactggaaatgtggccgagaacagccccccaggcacctctgtgcacaagttctctgtgaagctgagcgccagcctgagccctgtgattcctggcttcccccagatcgtgaacagcaaccccctgacagaggccttccgggtgaactggctgagcggcacctactttgaggtggtgaccaccggcatggagcagctggactttgagaccggccccaacatctttgacctgcagatctacgtgaaggatgaggtgggcgtgacagacctgcaggtgctgactgtgcaggtgacagatgtgaatgaaccaccccagttccagggcaacctggccgaggcccggcatgagtgcacccagagctggaggaactag

SEQ ID NO: 306836 - DNA, 840 bp, Artificial Sequence
  derived and/or modified sequence
atgatcaaccagctgaccggcaccatccaggtggcccagcggatcgatcgggatgctggcgagctgaggcagaaccccaccatctctctggaagtgctggtgaaggaccggccatacggaggacaggagaatagaatccagataacattcatcgtggaagacgtgaacgacaacccggccacatgtcagaaatttaccttcagcatcatggtaccagagcggacagccaaagggactctgctgctggatctaaacaagttttgtttcgatgatgactcagaagcacctaataacaggttcaattttaccatgccatccggcgttggttccgggagtaggtttctgcaggaccccgctggaagcggaaagattgtgctgattggcgacctcgactatgaaaatccaagtaacctggctgccggtaacaagtatacggtcataatacaagtacaagacgtggcccctccatattacaaatccaaatataacgtatatgtgtacattctgacatccccggagaacgagtttcctcttatatttgaccggccttcctacgtattcgacgttagtgagcgaaggcccgcccagggacatctaagcggaccagaagaaaagaggttgctgagtatttgtatggtaagggcagtttgccatcattttggactgcacatcgccagcggcagccctcgcgtgcccggcaggccaatcgggcagagtcacccgcagacactccccctgcaggactgggaagagcagggcacttctgttcgagaaatacctaacgaagactgccgcgaacggcgccgtggcgggaactacccggacgaacactacctctag

SEQ ID NO: 306837 - DNA, 957 bp, Artificial Sequence
  derived and/or modified sequence
tacaccgtgctggaggagctgagccccggcaccatcgtggccaacattaccgccgaggatcctgacgacgagggcttcccatcccacctgctttactccatcacgacagtcagtaagtatttcatgatcaaccagttgaccgggaccattcaggtggcccagcggatcgaccgagatgccggagagctgcgacagaaccctaccatctcccttgaggttctcgtgaaagatagaccctatggaggacaggagaataggatccagattacgtttatcgttgaagacgtgaatgataatccagccacatgtcaaaagtttacattctcaatcatggtccctgaaagaacagccaaaggaactctcctactcgacctgaataaattctgtttcgacgatgattccgaggccccaaacaatcgatttaacttcaccatgcccagcggcgttggcagtggttcccggtttctacaggacccggctggaagcgggaagattgtattgatcggagacctggactatgagaacccgagcaacttagcagcggggaacaaatacactgtcatcatacaggtgcaagacgtggcccctccttattataagaacaatgtgtacgtatatattttaacttcacccgaaaacgagtttccattgatatttgaccgtccttcctacgtgttcgatgtgtctgaacgaaggcccgcccaggggcatctgtctgggccggaagagaaacgactgctgtccatatgtatggtgagagcggtatgtcaccattttggactgcatatagcctcaggaagcccacgagtgcctggacggccaatcgggcaatcacacccacagacactgcccttacaggattgggaggaacaaggaacctccgacaaggaaagaagaaatgaggattgtagggaaaggaggcggggtgggaattaccccgacgaacattatctttag

SEQ ID NO: 306838 - DNA, 450 bp, Artificial Sequence
  derived and/or modified sequence
atgcaggaggccatcatcctgctggccctgctgggcgccatgagcggcggtgaagcactgcacctgatcctgttgcccgcgaccggcaacgtggccgagaattcgccaccaggcacatcagtccacaagtttagtgtgaagctctccgcatctttgtctccagttataccagggtttccacagattgtcaatagcaacccactgaccgaggccttccgggtgaactggctgagcgggacctattttgaagttgtaactacaggaatggagcaactggacttcgagacaggacctaacatcttcgatcttcaaatctatgtgaaagatgaggtgggggtcacagacctgcaagtgttaaccgtgcaagtgacggacgtgaacgaaccgccccagttccagggaaacctagccgaagcccgccacgaatgcactcagagctggcgaaattag

SEQ ID NO: 306839 - DNA, 840 bp, Artificial Sequence
  derived and/or modified sequence
atgataaaccaactcacgggcactatacaagtcgcccagcgaatcgatagggatgccggtgaactaagacagaatcctacaatctcattagaggtgctcgtgaaagacagaccatacggcggtcaggaaaacaggatccagataaccttcatagtcgaagatgtcaatgataaccctgcgacttgccagaaatttactttcagcattatggtaccagagagaacggccaagggaactttgctgctcgacctcaacaagttttgtttcgacgatgatagtgaggcacctaataacaggtttaacttcactatgccgtcgggcgtcggttccggcagcagatttctgcaggacccagccggttcaggcaagattgtcctgatcggcgacctggactatgaaaatccctcaaatttggcggctggcaacaagtacacagtgataatccaggtgcaggatgtggcaccaccctactataagtccaagtataatgtctatgtttacatcttgacgtcacccgaaaatgagttcccgctaatcttcgaccggccttcctatgtgtttgatgtaagcgaacgccgtccagcccaagggcatctgtcgggccctgaggagaagcgcttactgtccatttgcatggtgagagcagtatgtcatcacttcggccttcacatagcgtctggctccccgagagtgccaggccgacccatcggtcagtcccacccacaaactctgcctcttcaggattgggaggaacaggggacaagcgtaagagaaatcccgaacgaagattgcagggaacgcagacgcggtggaaactatcccgacgagcactatctttag

SEQ ID NO: 306840 - DNA, 957 bp, Artificial Sequence
  derived and/or modified sequence
tacaccgtgctagaggagctgtctcccggaaccattgttgcgaatattactgctgaggatcctgacgacgagggatttcctagtcacctcctgtatagtattacaaccgtgtctaagtacttcatgataaatcagctgactggaacgatccaggtggcccaacggatcgatagagatgccggtgaacttcgccagaacccgacaatctccctggaggttctggtgaaggacagaccatatggaggtcaagagaatagaatccagattactttcatagttgaggatgtgaatgacaaccccgctacgtgccagaagttcaccttcagtatcatggttccggagcggactgctaaaggaaccctgctgttggacttaaacaaattttgcttcgatgatgatagcgaagcccctaacaataggttcaactttaccatgccgagcggcgtaggaagtggctcccgcttcctccaggatcctgctgggtctgggaagattgtgcttatcggggacttggattatgagaatccatcgaacctagccgcaggaaacaaatacactgtgattattcaggtgcaggatgtggcccctccatattataagaataatgtctacgtctacattctcacttctcctgaaaacgagtttcccttaattttcgatagaccttcttacgtctttgatgtgagcgagcggaggccagcacagggccatctctcagggccagaagaaaaaaggctgctgagtatttgtatggttagagcggtttgtcaccattttggactgcatatcgcaagtgggtcgcctagagttcctggccgtcccatcggccagagccacccccagacccttcctttgcaggactgggaagaacagggtactagtgataaagagcgaaggaatgaagattgtagagaacggagacgagggggaaactatcccgacgaacactatctgtag

SEQ ID NO: 306841 - DNA, 450 bp, Artificial Sequence
  derived and/or modified sequence
atgcaggaggcaataattctgctggctttgttgggcgctatgtctggaggcgaggccttacatttgattctgctgccagctacaggtaacgtagctgaaaacagtcccccagggaccagtgtgcacaaattcagcgttaagttgagcgcctccctttctcccgtaatacctggattccctcaaatagtcaacagcaacccgctgacagaagcattcagagtgaactggctaagcgggacatatttcgaggtagtcacgacggggatggagcagctggacttcgagaccggccctaatatttttgaccttcagatctatgtgaaggatgaggtgggcgtgaccgacttgcaagtcttaacagttcaggtgaccgatgttaacgagccaccacagtttcagggcaacttagcagaagccagacacgaatgcactcagagttggcggaactag

SEQ ID NO: 306842 - DNA, 5856 bp, Artificial Sequence
  derived and/or modified sequence
aaaaccaggaggggaagctgagtggcttctggaataaactttgggtgtgagacgggattcaggctgtggctaatgtgctggaagcacgcacagttgtgaccatcaagtatgcaggaagcaatcattctcctggctctcctgggtgccatgtcagggggagaagcactacacctaatcctcttacctgctacaggcaatgtggcagagaattctccacctgggacttcagtgcacaagttttctgtgaagttatcagcatcattgtcacctgtgatcccaggatttccccagatagtcaactcaaatcccctcactgaagcttttagggtgaattggctgtcaggcacctactttgaggttgtcaccactgggatggaacaactagattttgaaacaggaccaaacatatttgatttgcagatttatgtgaaggatgaggttggtgtcacagacctgcaagtcctgactgtccaggtaacagatgtgaacgagccacctcagtttcaaggcaacttggcagaaggtctacacctctacatagtagaaagagcaaaccctggattcatttaccaggttgaggccttcgatccagaagacacaagccgaaacattcccctcagttatttcctgatttctcccccaaagagcttcagaatgtctgctaatggcaccctcttctccacaacagaattggactttgaagcaggacacagaagtttccatctcatcgtggaggtgagggacagtggaggcctcaaagcctccacagagctccaggtgaacatcgtgaacctcaacgacgaagtccctcgctttaccagcccgacacgagtgtacacagtcctggaggaactgagtccaggaaccatcgtggccaatatcacagcggaggatcctgatgatgaaggttttcccagccacctcctctacagcattaccactgttagcaaatatttcatgataaatcagttgactggtacaatccaagtggcccaaaggatagaccgagatgcaggtgaattgagacaaaatcccaccatttccctggaagttctagtgaaggacagaccatatgggggtcaggagaatcgcatccagataaccttcattgtggaagacgtcaacgacaatcctgccacatgccaaaagttcaccttcagcattatggtgccggaaagaacagccaaggggacgttgcttcttgacctaaacaagttctgctttgatgatgacagtgaggcaccaaacaacagattcaacttcaccatgccatctggagtggggagcggcagcagatttttacaggatccagctggctctgggaagattgtgctgattggtgatctagactacgaaaatccaagtaacctagcagccggcaataaatatacggtgataatccaggtgcaggatgtggcccccccttactataaaagcaaatataacgtctacgtttatatcctaacaagcccagaaaatgagtttcctctcatttttgataggccatcctatgtatttgatgtgtcagaaagaaggcccgcccagggtcacctatcaggtcctgaggaaaaacgtttactctccatctgcatggtacgtgccgtttgtcatcactttgggctccatattgcttctgggtctcctcgtgtacctggtcgtcctattggccaaagccatccacagacactgcccctgcaagactgggaagaacaaggaacctctgtaagggaaataccaaacgaagactgcagagagagacgtcgtggtggaaactatccagatgaacactatctttgatggagaagccatagatccagtgaccggggaaacatatgaattcaactcaaaaactggagccagaaagtggaaagatccactaacccaaatgccaaaatggaaagagtccagccaccagggagctgccccacgcagagtcactgctggggaagggatggggtcactgagaagtgccaactgggaagaagatgagctgagtggcaaagcgtgggctgaggatgctggtctgggttccagaaatgagggtggcaagctgggcaacccaaagaacagaaatccagccttcatgaacagggcttaccccaaaccacacccaggaaagtaaacggggtctaaggaggggcctgtcaatcactgagatgctgcctcaccctaaattctatggggatggtgtgggcatggtgtaggggggaaaatgtgggctgaggggattcagacatccagggtcaaacatgggatgtttgacaaatttttaaacaaatagaaaggggtttgatcacatagttgcgtgttctgaaatgatacaggaacattttctatcagatttcagaactacctgtgcttctgataagcaagactgttaactttggggtgtggaattgttgtgtttcttctttgcattgactgctaggaagctctattctgttcaccatagaaagtttgtaggaattcctgacataaatagtgaagactatccttacatctggtttccaccttattttcctgccctcgttttaacatcacccagatttcttcagttataaatatgccatacacctttgtaagtcacctcaaatcttcttcaaaagaagcagaacagtgaaaaaaacagatgagtaagttaagagttggtcatctggaaagaagaaaactcagtaggcaccttcttttgttttttcttgtggtgtccggatcagcatcctgcatgtgagattcatccacgttgtcctgtctagcagtagttcagttctcttcatggttatgtctggtttcattctatgattatatcacaatttatctattctacacttgggtggcagctgcttcagattttttacttttaaaaaatatacttaaaagtgaactacaggcagggcatgatggctcatgcctgtaatgccagcactttgccaaggtgggcagatcacctaaggtcaggagttcaagatcagcctggcctagatggcaaaaccctgtctctactaaaaaatacaaaaattagcttggtgtggtggtgggcacatgtaatcccagctacttgggaggctgaggtagggagaactgcttaaacctgagaggtggaggttacagtgagttgagattgtgccactgcactctagcctgggtgacaaagcaagactccatctcagaaaaaaaaaataaaagtgaattacaacactatgaactttcttgtacatgtcttttggtgaacataaacactcacttttttgctcatatatctaagagtgggattgctggagcaattgctggatctgccaaagagttccaaagtggtggctctgattcacattccagcagcaaacactgagagttgcaattgctctctatccttgccaacacttgggattgtcaatccttttaactttagccattctggttaaaattactattgaagtgaaatcactttttcctcaaagctgaaacaccatcagccttacaacctacctgccttgctccttcccacttcctatgattggaaggaactgcaggactctgagtggggacatactggaagccccatctagacataaaactcagacttccacctgtaggcatgagcaatgaactgggaataaatggtattatgatggaataggaaatgtaactttccaatgtgtgcctagcagagcctgagcaagcttcactcgagctctatgccctgctgcccagctgctgcgaccctagtccagtaaccctaagaaaggtccaggtgagtgttcattagggaagcactcccttcccaactggggagtcaggtgagagcctaccaggtccacaaggtcctgtgggagacagactggatccagcaaatgtagagcttcagagagagcagcagcttgtttactgtgtgcctagtgccagtgtcacttctcaagcaaaagaagcatttgcaaaatgcctgtcctggcctagattgagcgtgatttattaataagggttggttgccagggaactcccttgaatggatttaaactttgcaaaagaaggcagaactgttcatttatgcaggttaaagtgagtgaagtggctgattgcccatttaaggcattgcaaatctgtggggcccggagtcaaatgctttccttggaagctctcagcttcaatgcaagtaaaatgaggttctgagaaggctgaagggggacttaataactgcttataagcccattaagaatgattaaaagggccgggtgaggtggctcatgcctgtaatcccagcactctgggaggctgaggcaggtggatcacctgaggtcaggagtttgagaccagcctggccaacatggtgaaaccctgtctctactaaaaaatagaaaaattagctggacgtgttagcaggcacctgtaatcccagctactcaggaggctgaggcaagagaatcgcttgaacccaggaggcagaagttgcagtgggctgagattgcgccactgcactccagcctgggtgacaagggcaaaactctgtgtcaagaaaaaaaaaaaaaaaagaataattaaaaggagagagtggtgagcagctggtctttcttctccagtgatgacagggcaagagggaattgtgcttaatggccagagaagagatttaagtcaggcaccaagagggacttcctgaagcctggggcctctctgaagagctcagtgtcttctctggtgataggcaggaagagctgagtgtcttcctagtcgcaaggcaagcctcgagaaactcaagaaataggggcaagagtgcgccaggaggagagaacacctgctgccccgtttcttttgtatatccggctatttggttcggggaaatccagaagtcaaagtgtcaccggtggagggtcttgactgcaagttgtccaagttcttggagttttgaacaaagaatggaacaaaatgcccagcaaagcagagaaagaatgaggcaacgaaagaatgaaagcagggatttattgaaaaccaaagtacactccacagtgtgggaacgggcctgagcaagtgactcaagggcccagatacagtcttctcagtccaaataccccttggaggtttccccttggccacttcatgctcacctcatggaaatgaagtagtggaccacaattggtctgattggttgcaggaagcaaccaatcagagactgaagtggagttacaaaggtcacgctcctgtgcaaacatctgattggttgcaaaaagcaaccaatcagaggctaaggtgaagttacaacgttgcaacgaagactcggctggcaatcagtctgattggttacagacagccaatttcccagcgttgaccaggttttggggggaacaaaattatctgaataaaatgaagacagcaaccgtcgtggatttggtgaaagttttctcccatctccctctcaaggccttaaacaggtatgagttgattatagccaatgtttacttttctcattctgattcattataaaactggggtaaatacgttcaggaattagaccacgtaacaattataattgtcgaagactttgaaactgcatagtagattgtgacattggagctttttgttgtgctcattagaaagcagggtctgaaactcagcctgtgtagcaagcacgggtggctcacaagcagaactgggaaatgacacttctgctccccagagccccctttcacatctggggttctcattgtttgcctttttacttaatgtattttgtaatggctgtgaaaattaagctacaaaatgagtgaacattgaagacaatgattgctattgaaacttaggatttctcatttcaaacttagcgtgtgtttatccttcgtattcattcaataaatatctgtggagcaacta

SEQ ID NO: 306843 - DNA, 2358 bp, Artificial Sequence
  derived and/or modified sequence
tacacagtcctggaggaactgagtccaggaaccatcgtggccaatatcacagcggaggatcctgatgatgaaggttttcccagccacctcctctacagcattaccactgttagcaaatatttcatgataaatcagttgactggtacaatccaagtggcccaaaggatagaccgagatgcaggtgaattgagacaaaatcccaccatttccctggaagttctagtgaaggacagaccatatgggggtcaggagaatcgcatccagataaccttcattgtggaagacgtcaacgacaatcctgccacatgccaaaagttcaccttcagcattatggtgccggaaagaacagccaaggggacgttgcttcttgacctaaacaagttctgctttgatgatgacagtgaggcaccaaacaacagattcaacttcaccatgccatctggagtggggagcggcagcagatttttacaggatccagctggctctgggaagattgtgctgattggtgatctagactacgaaaatccaagtaacctagcagccggcaataaatatacggtgataatccaggtgcaggatgtggcccccccttactataaaaataacgtctacgtttatatcctaacaagcccagaaaatgagtttcctctcatttttgataggccatcctatgtatttgatgtgtcagaaagaaggcccgcccagggtcacctatcaggtcctgaggaaaaacgtttactctccatctgcatggtacgtgccgtttgtcatcactttgggctccatattgcttctgggtctcctcgtgtacctggtcgtcctattggccaaagccatccacagacactgcccctgcaagactgggaagaacaaggaacctctgacaaagaaaggagaaacgaagactgcagagagagacgtcgtggtggaaactatccagatgaacactatctttgatggagaagccatagatccagtgaccggggaaacatatgaattcaactcaaaaactggagccagaaagtggaaagatccactaacccaaatgccaaaatggaaagagtccagccaccagggagctgccccacgcagagtcactgctggggaagggatggggtcactgagaagtgccaactgggaagaagatgagctgagtggcaaagcgtgggctgaggatgctggtctgggttccagaaatgagggtggcaagctgggcaacccaaagaacagaaatccagccttcatgaacagggcttaccccaaaccacacccaggaaagtaaacggggtctaaggaggggcctgtcaatcactgagatgctgcctcaccctaaattctatggggatggtgtgggcatggtgtaggggggaaaatgtgggctgaggggattcagacatccagggtcaaacatgggatgtttgacaaatttttaaacaaatagaaaggggtttgatcacatagttgcgtgttctgaaatgatacaggaacattttctatcagatttcagaactacctgtgcttctgataagcaagactgttaactttggggtgtggaattgttgtgtttcttctttgcattgactgctaggaagctctattctgttcaccatagaaagtttgtaggaattcctgacataaatagtgaagactatccttacatctggtttccaccttattttcctgccctcgttttaacatcacccagatttcttcagttataaatatgccatacacctttgtaagtcacctcaaatcttcttcaaaagaagcagaacagtgaaaaaaacagatgagtaagttaagagttggtcatctggaaagaagaaaactcagtaggcaccttcttttgttttttcttgtggtgtccggatcagcatcctgcatgtgagattcatccacgttgtcctgtctagcagtagttcagttctcttcatggttatgtctggtttcattctatgattatatcacaatttatctattctacacttgggtggcagctgcttcagattttttacttttaaaaaatatacttaaaagtgaactacaggcagggcatgatggctcatgcctgtaatgccagcactttgccaaggtgggcagatcacctaaggtcaggagttcaagatcagcctggcctagatggcaaaaccctgtctctactaaaaaatacaaaaattagcttggtgtggtggtgggcacatgtaatcccagctacttgggaggctgaggtagggagaactgcttaaacctgagaggtggaggttacagtgagttgagattgtgccactgcactctagcctgggtgacaaagcaagactccatctcagaaaaaaaaaataaaagtgaattacaacacta

SEQ ID NO: 306844 - DNA, 971 bp, Artificial Sequence
  derived and/or modified sequence
acgcacagttgtgaccatcaagtatgcaggaagcaatcattctcctggctctcctgggtgccatgtcagggggagaagcactacacctaatcctcttacctgctacaggcaatgtggcagagaattctccacctgggacttcagtgcacaagttttctgtgaagttatcagcatcattgtcacctgtgatcccaggatttccccagatagtcaactcaaatcccctcactgaagcttttagggtgaattggctgtcaggcacctactttgaggttgtcaccactgggatggaacaactagattttgaaacaggaccaaacatatttgatttgcagatttatgtgaaggatgaggttggtgtcacagacctgcaagtcctgactgtccaggtaacagatgtgaacgagccacctcagtttcaaggcaacttggcagaagcccgacacgagtgtacacagtcctggaggaactgagtccaggaaccatcgtggccaatatcacagcggaggatcctgatgatgaaggttttcccagccacctcctctacagcattaccactgttagcaaatatttcatgataaatcagttgactggtacaatccaagtggcccaaaggatagaccgagatgcaggtgaattgagacaaaatcccaccatttccctggaagttctagtgaaggacagaccatatgggggtcaggagaatcgcatccagataaccttcattgtggaagacgtcaacgacaatcctgccacatgccaaaagttcaccttcagcattatggtgccggaaagaacagccaaggggacgttgcttcttgacctaaacaagttctgctttgatgatgacagtgaggcaccaaacaacagattcaacttcaccatgccatctggagtggggagcggcagcagatttttacaggatccagctggctctgggaagattgtgctgattggtgatctagactacg

SEQ ID NO: 306845 - protein, 347 aa, Artificial Sequence
  derived and/or modified sequence
MTLDHQIINPTLKWSQPAVPSGGPLVQHAHTTLDSDAGLTENPLTKLLAIGKEDDNAQWHMEDVIEDIIGMESSFKEEGADSPLLMQRTLSGSILDVYSGEQGISPINMGLTSASCPSSLPMKREITETDTRALAKERQKKDNHNLIERRRRYNINYRIKELGTLIPKSNDPDMRWNKGTILKASVEYIKWLQKEQQRARELEHRQKKLEQANRRLLLRIQELEIQARTHGLPTLASLGTVDLGAHVTKQQSHPEQNSVDYCQQLTVSQGPSPELCDQAIAFSDPLSYFTDLSFSAALKEEQRLDGMLLDDTISPFGTDPLLSATSPAVSKESSRRSSFSSDDGDEL

SEQ ID NO: 306846 - protein, 316 aa, Artificial Sequence
  derived and/or modified sequence
MLQALTGLQFQLKEQLGEKERRLQISQEISAHRTEFHMQFSYKPVLHRLVPARPQIYSSQLPSFTRVPAHLESSARPQLQKAQRQKVNSFMTLDHQIINPTLKWSQPAVPSGGPLVQHAHTTLDSDAGLTENPLTKLLAIGKEDDNAQWHMEDVIEDIIGMESSFKEEGADSPLLMQRTLSGSILDVYSGEQGISPINMGLTSASCPSSLPMKREITETDTRALAKERQKKDNHNLIERRRRYNINYRIKELGTLIPKSNDPDMRWNKGTILKASVEYIKWLQKEQQRARELEHRQKKLEQANRRLLLRIQVFIRM

SEQ ID NO: 306847 - DNA, 6631 bp, Artificial Sequence
  derived and/or modified sequence
atcgtttactttggttgtcccttctggcatggtgcatatgttatgggaagagggattataatttggtgctgtttgtagagatgacaacactgataaaatccactcattgctggtcccagcacacctggaaagttctgcaaggcctcagctacagaaagcccagagacagaaagtaaactctttcatgacccttgatcatcagatcatcaatccaactcttaaatggtcacaacctgcagtgccaagtggtgggcctcttgtgcagcatgcacacacaactctggacagtgatgctggcctcacagaaaacccactcaccaagttactagctattgggaaagaagatgacaatgcacaatggcatatggaggacgttattgaggatataatcggtatggaatcaagttttaaagaggaaggagcagactctcctctgctaatgcaaagaacattatctggaagtattttggatgtgtatagcggtgaacaaggaatttcaccaattaacatggggcttacaagtgcttcttgtccaagtagtctaccaatgaaaagagaaattacagaaactgacactagagctttagcaaaagagagacaaaaaaaggacaaccacaacctcattgaaagaagaagaaggtataatattaattaccgaatcaaggagcttggcactcttattccaaagtctaatgatcctgatatgcgctggaacaaaggaaccattctaaaagcatcagtggagtacatcaagtggctacaaaaagaacaacagagagcccgagaattggaacacagacagaagaaattagagcaggctaacaggcgacttctacttcggattcaggaactagaaattcaggctcgtactcatggtctgccaaccctggcttcacttggcacggttgatttaggtgctcatgtcaccaaacagcagagccatcctgagcagaattcagtagactattgccaacaactgactgtgtctcaggggccaagccctgagctctgtgatcaagctatagccttttctgatcctttgtcatacttcacagatttatcatttagtgctgcattgaaagaggaacaaagattggatggcatgctattggatgacacaatctctccatttggaacagatcctctgctatctgccacttcccctgcagtttccaaagaaagcagtaggagaagtagctttagctcagatgatggtgatgaattataagaaataaacagacccaattcatcaactggaaagcaattctatgctggtgctatgcaattatgctctgtgtttcatatgttgctttggcttattttttttcttaaaggaatgtgttgttcatgaaaaactgatagaagcaacagaagaattcgcaggaagaaaaatcatagtgttaatgaattattgagggcgaaaaaaaggtgttttcttctttgactacggagtccaaatccacttaaattctgttttcctgaaaagaggtacagcataagaaatagctctttattgatgttttaaaagcagcaacttggtggtgtactactggaactaatgactgcaaagtgttaaacgactgaaatatacaaacagtctcttagttactcatttccatcttctcttcaactttcacatcagtcttccggaatcaagatcaacatatcaggtggtcattgcctttctccattgtctagtagacatgtctaaagttcaaactttataggataaataaatgtataatagattatctgtcacttgtggttgaaaggcaaatctacaataaatgtgagaattttccacaataaaatatggataacttataaaaacattggttactaaaattagatcctcattttattgtagttggttcaattacactaattctaaaagcatccatgcatatttatatctccagtctctgttcaggaaaaggaacatattgaatattttcctcaggaatatggaccagaattgtatcccttcacacaaacatacacatacacatatgcacatcattcaggtagtatatgttcttttgttttcttcatgcttctgactgcatcagaatcacattccaaattctcttttcttatgaagaagagatgtcagatcatcaattttagtaaataaaatataaaatgtccccctgcaaggacagttttcaggtacttaaaacttttcatcagtattggacagaaatcaattagttgttgatttggtttttctccaaatggataaaatattgaaaattgaattgccaattgacaaaataattattacaacaaactatttcttattattttcagttctgagaggaacgtaaggttctatttctataaacacttagagtgtcctatgatctttggttgcactgttagcatttattataagcacttataactatgatgcttcatttagatttttatctcttgcgcttgttttaggttaggaaattaagttaccaagcacgttgctctgtgctggacctccaagagtgatcatccgatcaatgagtattcatggaggcatactcagaactgcagtgagtcctgagaaaatgtagaagagttgaaaaagatatggtcttactcctaaggtagttaatgagaatgcatgaaaaacaaaaacaaaagatagaagacatatagaataaaaaatctaagcataaactgtaaatacagaaggtcagagaaaatgaaaatgactgacaaactttatgggaacagcagaatttgacttctctttgaaaggcattaattgagtgaaagtgagggcatataaaggaataataccaaccaaatgataaaagtgagaataataggggaagtatctttataggactttaattagaaagatctggatgccctagaagatgtctgttggggagttctgaagcataagactgacaacaggttgtgaaggcccttagaaaactatggtgaaataatatagtattaatataatagaaacaaatctttttagtagcagggaggatgctaaaaactaaaatatatattactaatgagtgagatgtaatctttcatgaatattaagctttgggataaattttgaaaggatcttttagttgcttctcacatggaaaatatgtcactatgaaatgtgagaccctaatgctgataaaagtagaaaaatagtaaatcattatggtataataattatctcaggcttagcttgtatcatttgctcagaatttggagaattaaaataattttattgtttgacatggaaaaataattactaacttctgggtacagtcattaaagcctgatagataaattcatctgaaatatgccatgtgaaacagctattagatacatcttctcaataattttcaagacgatattacatacttttaattttataacaaaattccacttcattatctgagttgataatttgattaaatgttaaaaattatagataaggaatatattttggagttcatagaaaacacaccactttattagatagagactggcttcagttctcattttatctgctcttctcatttcttcatattttgagtagacttgcactgatgatgtcattactcagtcattattttctgttctgttaaggtacaactactgggccttgaaatctatccttcacaatcttggctgagataaggacttggcacaggatgatagagcctggacacaagagatctggagagggaactgctatttgctgctacattcagattatgagatgtcagggaactgtaaaaagggtaatgaatttttaaagagagtaaagagttatgctgtgtcccggtcaactgaaatacattaaaaattaattagatggtagttcttaactttttaaggcagataccttgagaatctagtgagttatagaccctctccctagaaaagtatagaactgtttatatggacaataattcacatgcattcagagatcttagggatctcctgaatgttttcttggatcccaagtgaaaaattcctgaatcaggtctcttaggtgtgcggttaatgtcatgtataacaatggggggacccttacttatctaaatataattatcccaatcctaataatgatgaggttgcataggaaagtaatagtgtaccaaactttagattattcactaaaaaagttgttcatttatgaagtagtcgtttatcaaacatgtcctccccactcagcaaactatgccttctatttattatatatgggtcagtttcactataattactgagtgttataaacatctgaccataacattttgaaatgatgcaaataaatttccaaacaaaaatagtgtgaatttaaaagcaaattatttgagtatctaagaaacaagatagacttctagaaaaatttgactctctagaatatttcttgcagaaatgagatttttcataatagtaaaagaggcatatgtttatcaaacaatgctgtcacaaaaagcatcaactgtaatgggactattaatgcataattattgatttattcattcaattaatatacaattatcccttttcatttaaagatttaattcataattacaattataataaaacttcctttaaagtaagatacaataattttattgtttttcattcttttttcaacaaaatatcccatccaatcattttttatattattaaatattggctgctttttcttggattcacattaaacagccctttccaacttccaattgtcttaaaataatgatgacctcctgtgagtagatacagctctttacaatttttttctttagtgccttttcttcttgaatttttcctatatcaaatggagaatatatgtacagatggtattttctcagtttataggcatatcagtgaccatggctttctttatataggtttttaaaaaagccctaaataataaatagccagatgagctggggacattgagaaatagccttcctcttcctttttcaactcatttttttcccacctacatgactgtaaatcaaatatttaatagctcttacttaaaaaaacagatacaaagaatgtcttgatttggtgtgctcatttaccataatgtcatgaggggaattagatttcacaactttaaaaggaatatatttttattttattttgaaaaactgagtcatataggaattttcttatacttcaaggcatcatggaaacacttttttcctgtttggatattgtggaatttaaacgttcaaataaataaatggcataactaagtgttccaaatttttttacaatgtctttgaccctattcaaacactttaggtatttactgaccgtctgatgtgtaagatgtggaataaaactggaatcaattaattatttcactgtgttatcagcgcaagatcaaccatctgggtttcttaaagacacccgaaggattgaattttgtttcagtattgataatggcatagtctctatgtgctacatggaattacatcatttatccctccagtgccctatatgttgataagtatgtcagtttgacttagtatacatatatacagagatttcattacatttacctaataaatacaaaatacatttcgagtgttactgatctcctatgttacatgagcctcctgtaatcattgtgcattgatgttccaatgttttattgtttgtatgaattttaatttgaaaacaaggaaacaatccaaaagcagaaaaaatagcttttcttaaaattttcagtgctacattttccctctgaggtccatagagatttgaatgtataggagattatccgaaaacagctattttgattaaaaaatatatctcccaggattcaaccaacttaatgatgaagtactattgtctactgctttatacataaaagggaactttttatctgcttgtaaagggatttttatgtgtatttctgcataatcagatgacttctattgtgttttctactgatgaaattctctgtaaaatgtctttttcttacattatccaacaggcataaagaataacagtaaagacttttgtgtttgtaatactacctcttttatccctgcactactgttttattgcaaaaattctatattgtcactgtattttttccatagaatataaattttgttcttgtgctaaagctggtagtttatgtagcagacaaaatatacaaataaaagaagagactgattttgctgaaagaattatatataatcaagaagttacatattgttctttaaatatgatactgaattttaaaagcaaacgaaattcaagaatcttatctaacagcatagcagttgcttatggcatacaaggctaaaattaattcagctatttaatcttaataattattatgtagttaaaaatctttgactttaatagtgttttacatatacaaatagctgaagtaacattcctataattttaatctgacattggttagatcaagaaaacattgttaataagactgtagaatttgtaattattgctatttttcatttttaataacaaagtaatgtgtcttattttctaagaaaatggagaactttggtgtactttaatacatacaaaaatctttgtaaaaataccttaaaatgtaccaatattttctttgcatatattaaatgaaagactataattatgaaatgtt

SEQ ID NO: 306848 - DNA, 951 bp, Artificial Sequence
  derived and/or modified sequence
atgctgcaggctctaactggcctgcagttccagttaaaggagcagctaggcgaaaaagaacgtaggctgcaaatcagtcaagagatcagcgcgcacagaaccgagttccatatgcagttttcctataagcctgtccttcacaggcttgtccccgcccggccccagatctacagcagtcagttgccgtcttttacgagagtgccagcgcatctggagtctagcgctcgcccccagctgcagaaggcacagagacaaaaagtgaattctttcatgacgttagatcaccagatcattaatccaaccttgaaatggtctcaacctgccgttccttcgggagggcctctggttcagcacgcacacacgacactcgacagcgacgccggccttacggaaaatccactaaccaagctgctggccatagggaaagaggacgataatgcacagtggcacatggaagacgtaatcgaggatatcatcggcatggaaagctcatttaaagaggaaggcgcagattcccctcttctcatgcagcgaactctctccggcagtatccttgacgtgtacagcggagagcagggtatctccccaattaatatgggcctcacaagcgccagctgcccatccagcctgccgatgaagagagaaatcaccgagactgataccagggccctcgccaaagagaggcaaaagaaggacaatcacaacttgatcgagagacgacgccggtataacatcaactatagaattaaggaactaggcaccctcattcctaagagtaatgacccagacatgaggtggaataagggaactatactgaaagccagcgtggaatacattaagtggttgcagaaagagcaacagcgggcacgggagcttgagcaccgtcagaagaaactcgagcaagccaatcgacggctacttctcagaatccaggtgttcataagaatgtag

SEQ ID NO: 306849 - DNA, 951 bp, Artificial Sequence
  derived and/or modified sequence
atgctgcaggccctgaccggcctgcagttccagctgaaggagcagctgggggagaaggagcggcggctgcagatcagccaggagatcagcgcccacaggacagagttccacatgcagttctcctacaagcctgtgctgcaccggctggtgcctgcccggccccagatctacagcagccagctgcccagcttcaccagggtgcctgcccacctggagagcagcgcccggccccagctgcagaaggcccagaggcagaaggtgaacagcttcatgaccctggaccaccagatcatcaaccccaccctgaagtggagccagcctgctgtgcccagcggcggccccctggtgcagcacgcccacaccaccctggacagtgatgctggcctgacagagaaccccctgaccaagctgctggccatcggcaaggaggatgacaatgcccagtggcacatggaggatgtgattgaggacatcatcggcatggagagcagcttcaaggaggagggcgctgacagccccctgctgatgcagaggaccctgagcggcagcatcctggatgtgtacagcggggagcagggcatcagccccatcaacatgggcctgaccagcgccagctgccccagcagcctgcccatgaagcgggagatcacagaaacagacacccgggccctggccaaggagcggcagaagaaggacaaccacaacctgattgaaagaagaagacgctacaacatcaactaccgcatcaaggagctgggcaccctcatccccaagagcaatgaccctgacatgcgctggaacaagggcaccatcctgaaggcctctgtggagtacatcaagtggctgcagaaggagcagcagagggcccgggagctggagcaccggcagaagaagctggagcaggccaacagaaggctgctgctgcgcatccaggtgttcatccgcatgtag

SEQ ID NO: 306850 - DNA, 951 bp, Artificial Sequence
  derived and/or modified sequence
atgctgcaggccctgaccggcctgcagttccagctgaaggagcagctaggggagaaggagcggcgcctccagatttcacaggaaatcagtgcccatcgcacagagttccatatgcagttttcctataagccagtcctccatagactcgttcctgctagaccacagatatattcttcacagctgccatctttcacacgagtgccagctcaccttgaatcaagtgcccgacctcagctgcaaaaggcacagcgccagaaggtgaactcttttatgaccctggaccaccagattataaaccctacgttaaaatggtcccaacctgctgtgccttccggcggcccgctggttcagcacgcccatacaactttggacagcgacgcaggactcactgagaaccctctcactaagctactggcaatcggcaaggaggacgataacgcccagtggcacatggaagatgtgatagaggacattatagggatggagtcatcatttaaggaggaaggggcggatagtccgctgctgatgcagcgaacgctgagtggttccattctggacgtctactccggggagcagggtattagccctatcaacatgggtttgaccagcgcatcctgtccttcatcattaccaatgaaacgcgaaattacagagactgatacacgagcactggccaaggagaggcagaagaaagacaaccataacttgatagaaaggcggcgccgatacaatataaattaccgaatcaaagagctcggcaccctgataccaaagagcaacgacccggatatgcgctggaacaagggcactatcctgaaggccagtgtggaatacatcaagtggctgcagaaagagcaacagcgcgcacgcgagctcgagcatagacagaagaagcttgagcaggctaatcggaggcttctgctcagaatccaggtctttattcgcatgtag

SEQ ID NO: 306851 - DNA, 951 bp, Artificial Sequence
  derived and/or modified sequence
atgttacaggcccttacaggactgcagtttcagctgaaggaacaactcggagagaaggagcggaggctgcagatttcgcaagagatttctgctcaccgaacagagtttcacatgcagtttagctacaagcccgtgctccataggctggttcctgctcgtccccagatctactccagtcagctgcccagtttcacccgggtacccgctcaccttgagtcttccgcccgaccacagttacagaaagcccagcgccagaaggtcaattcgttcatgaccctggatcaccagatcattaatcccaccctgaagtggtctcagcccgctgtgccctcaggcggaccactcgttcaacacgcacacacaacgctcgatagcgatgctgggcttacagaaaacccgctgactaagctgctggctatcggtaaagaggatgacaatgcccaatggcacatggaggacgtcatcgaagatattatcggtatggaatcttctttcaaagaggagggcgctgacagcccgttgctgatgcaacgcaccctgtccggcagcatcttagatgtgtatagcggagagcaaggaattagccccattaacatgggcctgacgagcgctagctgtccaagttcattgcccatgaaacgcgagatcactgagacagacactcgagcactcgctaaagaacgacagaagaaggataaccataatctgattgaacggagacggagatacaacattaactatcgtataaaagagctcggcaccctcattccaaaaagcaatgaccccgacatgcgctggaataaaggaactattttgaaggcatcggttgagtacattaaatggctgcaaaaggagcagcaaagagccagggagctcgaacaccgccaaaagaaactggagcaggcaaacagacgcctgctgcttcgcatccaggtgtttataaggatgtag

SEQ ID NO: 306852 - DNA, 6628 bp, Artificial Sequence
  derived and/or modified sequence
gtttactttggttgtcccttctggcatggtgcatatgttatgggaagagggattataatttggtgctgtttgtagagatgacaacactgataaaatccactcattgctggtcccagcacacctggaaagttctgcaaggcctcagctacagaaagcccagagacagaaagtaaactctttcatgacccttgatcatcagatcatcaatccaactcttaaatggtcacaacctgcagtgccaagtggtgggcctcttgtgcagcatgcacacacaactctggacagtgatgctggcctcacagaaaacccactcaccaagttactagctattgggaaagaagatgacaatgcacaatggcatatggaggacgttattgaggatataatcggtatggaatcaagttttaaagaggaaggagcagactctcctctgctaatgcaaagaacattatctggaagtattttggatgtgtatagcggtgaacaaggaatttcaccaattaacatggggcttacaagtgcttcttgtccaagtagtctaccaatgaaaagagaaattacagaaactgacactagagctttagcaaaagagagacaaaaaaaggacaaccacaacctcattgaaagaagaagaaggtataatattaattaccgaatcaaggagcttggcactcttattccaaagtctaatgatcctgatatgcgctggaacaaaggaaccattctaaaagcatcagtggagtacatcaagtggctacaaaaagaacaacagagagcccgagaattggaacacagacagaagaaattagagcaggctaacaggcgacttctacttcggattcaggaactagaaattcaggctcgtactcatggtctgccaaccctggcttcacttggcacggttgatttaggtgctcatgtcaccaaacagcagagccatcctgagcagaattcagtagactattgccaacaactgactgtgtctcaggggccaagccctgagctctgtgatcaagctatagccttttctgatcctttgtcatacttcacagatttatcatttagtgctgcattgaaagaggaacaaagattggatggcatgctattggatgacacaatctctccatttggaacagatcctctgctatctgccacttcccctgcagtttccaaagaaagcagtaggagaagtagctttagctcagatgatggtgatgaattataagaaataaacagacccaattcatcaactggaaagcaattctatgctggtgctatgcaattatgctctgtgtttcatatgttgctttggcttattttttttcttaaaggaatgtgttgttcatgaaaaactgatagaagcaacagaagaattcgcaggaagaaaaatcatagtgttaatgaattattgagggcgaaaaaaaggtgttttcttctttgactacggagtccaaatccacttaaattctgttttcctgaaaagaggtacagcataagaaatagctctttattgatgttttaaaagcagcaacttggtggtgtactactggaactaatgactgcaaagtgttaaacgactgaaatatacaaacagtctcttagttactcatttccatcttctcttcaactttcacatcagtcttccggaatcaagatcaacatatcaggtggtcattgcctttctccattgtctagtagacatgtctaaagttcaaactttataggataaataaatgtataatagattatctgtcacttgtggttgaaaggcaaatctacaataaatgtgagaattttccacaataaaatatggataacttataaaaacattggttactaaaattagatcctcattttattgtagttggttcaattacactaattctaaaagcatccatgcatatttatatctccagtctctgttcaggaaaaggaacatattgaatattttcctcaggaatatggaccagaattgtatcccttcacacaaacatacacatacacatatgcacatcattcaggtagtatatgttcttttgttttcttcatgcttctgactgcatcagaatcacattccaaattctcttttcttatgaagaagagatgtcagatcatcaattttagtaaataaaatataaaatgtccccctgcaaggacagttttcaggtacttaaaacttttcatcagtattggacagaaatcaattagttgttgatttggtttttctccaaatggataaaatattgaaaattgaattgccaattgacaaaataattattacaacaaactatttcttattattttcagttctgagaggaacgtaaggttctatttctataaacacttagagtgtcctatgatctttggttgcactgttagcatttattataagcacttataactatgatgcttcatttagatttttatctcttgcgcttgttttaggttaggaaattaagttaccaagcacgttgctctgtgctggacctccaagagtgatcatccgatcaatgagtattcatggaggcatactcagaactgcagtgagtcctgagaaaatgtagaagagttgaaaaagatatggtcttactcctaaggtagttaatgagaatgcatgaaaaacaaaaacaaaagatagaagacatatagaataaaaaatctaagcataaactgtaaatacagaaggtcagagaaaatgaaaatgactgacaaactttatgggaacagcagaatttgacttctctttgaaaggcattaattgagtgaaagtgagggcatataaaggaataataccaaccaaatgataaaagtgagaataataggggaagtatctttataggactttaattagaaagatctggatgccctagaagatgtctgttggggagttctgaagcataagactgacaacaggttgtgaaggcccttagaaaactatggtgaaataatatagtattaatataatagaaacaaatctttttagtagcagggaggatgctaaaaactaaaatatatattactaatgagtgagatgtaatctttcatgaatattaagctttgggataaattttgaaaggatcttttagttgcttctcacatggaaaatatgtcactatgaaatgtgagaccctaatgctgataaaagtagaaaaatagtaaatcattatggtataataattatctcaggcttagcttgtatcatttgctcagaatttggagaattaaaataattttattgtttgacatggaaaaataattactaacttctgggtacagtcattaaagcctgatagataaattcatctgaaatatgccatgtgaaacagctattagatacatcttctcaataattttcaagacgatattacatacttttaattttataacaaaattccacttcattatctgagttgataatttgattaaatgttaaaaattatagataaggaatatattttggagttcatagaaaacacaccactttattagatagagactggcttcagttctcattttatctgctcttctcatttcttcatattttgagtagacttgcactgatgatgtcattactcagtcattattttctgttctgttaaggtacaactactgggccttgaaatctatccttcacaatcttggctgagataaggacttggcacaggatgatagagcctggacacaagagatctggagagggaactgctatttgctgctacattcagattatgagatgtcagggaactgtaaaaagggtaatgaatttttaaagagagtaaagagttatgctgtgtcccggtcaactgaaatacattaaaaattaattagatggtagttcttaactttttaaggcagataccttgagaatctagtgagttatagaccctctccctagaaaagtatagaactgtttatatggacaataattcacatgcattcagagatcttagggatctcctgaatgttttcttggatcccaagtgaaaaattcctgaatcaggtctcttaggtgtgcggttaatgtcatgtataacaatggggggacccttacttatctaaatataattatcccaatcctaataatgatgaggttgcataggaaagtaatagtgtaccaaactttagattattcactaaaaaagttgttcatttatgaagtagtcgtttatcaaacatgtcctccccactcagcaaactatgccttctatttattatatatgggtcagtttcactataattactgagtgttataaacatctgaccataacattttgaaatgatgcaaataaatttccaaacaaaaatagtgtgaatttaaaagcaaattatttgagtatctaagaaacaagatagacttctagaaaaatttgactctctagaatatttcttgcagaaatgagatttttcataatagtaaaagaggcatatgtttatcaaacaatgctgtcacaaaaagcatcaactgtaatgggactattaatgcataattattgatttattcattcaattaatatacaattatcccttttcatttaaagatttaattcataattacaattataataaaacttcctttaaagtaagatacaataattttattgtttttcattcttttttcaacaaaatatcccatccaatcattttttatattattaaatattggctgctttttcttggattcacattaaacagccctttccaacttccaattgtcttaaaataatgatgacctcctgtgagtagatacagctctttacaatttttttctttagtgccttttcttcttgaatttttcctatatcaaatggagaatatatgtacagatggtattttctcagtttataggcatatcagtgaccatggctttctttatataggtttttaaaaaagccctaaataataaatagccagatgagctggggacattgagaaatagccttcctcttcctttttcaactcatttttttcccacctacatgactgtaaatcaaatatttaatagctcttacttaaaaaaacagatacaaagaatgtcttgatttggtgtgctcatttaccataatgtcatgaggggaattagatttcacaactttaaaaggaatatatttttattttattttgaaaaactgagtcatataggaattttcttatacttcaaggcatcatggaaacacttttttcctgtttggatattgtggaatttaaacgttcaaataaataaatggcataactaagtgttccaaatttttttacaatgtctttgaccctattcaaacactttaggtatttactgaccgtctgatgtgtaagatgtggaataaaactggaatcaattaattatttcactgtgttatcagcgcaagatcaaccatctgggtttcttaaagacacccgaaggattgaattttgtttcagtattgataatggcatagtctctatgtgctacatggaattacatcatttatccctccagtgccctatatgttgataagtatgtcagtttgacttagtatacatatatacagagatttcattacatttacctaataaatacaaaatacatttcgagtgttactgatctcctatgttacatgagcctcctgtaatcattgtgcattgatgttccaatgttttattgtttgtatgaattttaatttgaaaacaaggaaacaatccaaaagcagaaaaaatagcttttcttaaaattttcagtgctacattttccctctgaggtccatagagatttgaatgtataggagattatccgaaaacagctattttgattaaaaaatatatctcccaggattcaaccaacttaatgatgaagtactattgtctactgctttatacataaaagggaactttttatctgcttgtaaagggatttttatgtgtatttctgcataatcagatgacttctattgtgttttctactgatgaaattctctgtaaaatgtctttttcttacattatccaacaggcataaagaataacagtaaagacttttgtgtttgtaatactacctcttttatccctgcactactgttttattgcaaaaattctatattgtcactgtattttttccatagaatataaattttgttcttgtgctaaagctggtagtttatgtagcagacaaaatatacaaataaaagaagagactgattttgctgaaagaattatatataatcaagaagttacatattgttctttaaatatgatactgaattttaaaagcaaacgaaattcaagaatcttatctaacagcatagcagttgcttatggcatacaaggctaaaattaattcagctatttaatcttaataattattatgtagttaaaaatctttgactttaatagtgttttacatatacaaatagctgaagtaacattcctataattttaatctgacattggttagatcaagaaaacattgttaataagactgtagaatttgtaattattgctatttttcatttttaataacaaagtaatgtgtcttattttctaagaaaatggagaactttggtgtactttaatacatacaaaaatctttgtaaaaataccttaaaatgtaccaatattttctttgcatatattaaatgaaagactataattatgaaatgtt

SEQ ID NO: 306853 - DNA, 1245 bp, Artificial Sequence
  derived and/or modified sequence
gaaaaagaggagaagtgggagtaaacagaaagataatgcttatggtacatacaaaacaaatggagagattgagtctcacggattcttcgcctgagccaccagcaaagagtcctatcaatgatttagttccctagagaaaatcagaaagtaaaagtgagaagaaaagaagagaaatatgttacaagctttaactggacttcaatttcagctgaaagaacaattaggagaaaaggagagaagacttcaaatcagccaggaaatcagtgcccatagaacagagttccacatgcagttttcatacaaaccagtgttgcatagacttgtcccagcaagaccacaaatttattcaagtcaattaccatcctttaccagggtcccagcacacctggaaagttctgcaaggcctcagctacagaaagcccagagacagaaagtaaactctttcatgacccttgatcatcagatcatcaatccaactcttaaatggtcacaacctgcagtgccaagtggtgggcctcttgtgcagcatgcacacacaactctggacagtgatgctggcctcacagaaaacccactcaccaagttactagctattgggaaagaagatgacaatgcacaatggcatatggaggacgttattgaggatataatcggtatggaatcaagttttaaagaggaaggagcagactctcctctgctaatgcaaagaacattatctggaagtattttggatgtgtatagcggtgaacaaggaatttcaccaattaacatggggcttacaagtgcttcttgtccaagtagtctaccaatgaaaagagaaattacagaaactgacactagagctttagcaaaagagagacaaaaaaaggacaaccacaacctcattgaaagaagaagaaggtataatattaattaccgaatcaaggagcttggcactcttattccaaagtctaatgatcctgatatgcgctggaacaaaggaaccattctaaaagcatcagtggagtacatcaagtggctacaaaaagaacaacagagagcccgagaattggaacacagacagaagaaattagagcaggctaacaggcgacttctacttcggattcaggtttttataagaatgtagccatgagtcacatagcttacacatgactcagctgtcatcagttttcttcattggtctcatttattttttctcttattaacaattatttttccttttgaaggataattttactgcttttt

SEQ ID NO: 306854 - DNA, 951 bp, Artificial Sequence
  derived and/or modified sequence
atgctgcaggccctgaccggcctgcagttccagctgaaggagcagctgggcgagaaggagagaagactgcagatcagccaggagatcagcgcccacagaaccgagttccacatgcagttcagctacaagcccgtgctgcacagactggtgcccgccagaccccagatctacagcagccagctgcccagcttcaccagagtgcccgcccacctggagagcagcgccagaccccagctgcagaaggcccagagacagaaggtgaacagcttcatgaccctggaccaccagatcatcaaccccaccctgaagtggagccagcccgccgtgcccagcggcggccccctggtgcagcacgcccacaccaccctggacagcgacgccggcctgaccgagaaccccctgaccaagctgctggccatcggcaaggaggacgacaacgcccagtggcacatggaggacgtgatcgaggacatcatcggcatggagagcagcttcaaggaggagggcgccgacagccccctgctgatgcagagaaccctgagcggcagcatcctggacgtgtacagcggcgagcagggcatcagccccatcaacatgggcctgaccagcgccagctgccccagcagcctgcccatgaagagagagatcaccgagaccgacaccagagccctggccaaggagagacagaagaaggacaaccacaacctgatcgagagaagaagaagatacaacatcaactacagaatcaaggagctgggcaccctgatccccaagagcaacgaccccgacatgagatggaacaagggcaccatcctgaaggccagcgtggagtacatcaagtggctgcagaaggagcagcagagagccagagagctggagcacagacagaagaagctggagcaggccaacagaagactgctgctgagaatccaggtgttcatcagaatgtag

SEQ ID NO: 306855 - protein, 318 aa, Artificial Sequence
  derived and/or modified sequence
MTLDHQIINPTLKWSQPAVPSGGPLVQHAHTTLDSDAGLTENPLTKLLAIGKEDDNAQWHLSGSILDVYSGEQGISPINMGLTSASCPSSLPMKREITETDTRALAKERQKKDNHNLIERRRRYNINYRIKELGTLIPKSNDPDMRWNKGTILKASVEYIKWLQKEQQRARELEHRQKKLEQANRRLLLRIQELEIQARTHGLPTLASLGTVDLGAHVTKQQSHPEQNSVDYCQQLTVSQGPSPELCDQAIAFSDPLSYFTDLSFSAALKEEQRLDGMLLDDTISPFGTDPLLSATSPAVSKESSRRSSFSSDDGDEL

SEQ ID NO: 306856 - protein, 197 aa, Artificial Sequence
  derived and/or modified sequence
MTLDHQIINPTLKWSQPAVPSGGPLVQHAHTTLDSDAGLTENPLTKLLAIGKEDDNAQWHLSGSILDVYSGEQGISPINMGLTSASCPSSLPMKREITETDTRALAKERQKKDNHNLIERRRRYNINYRIKELGTLIPKSNDPDMRWNKGTILKASVEYIKWLQKEQQRARELEHRQKKLEQANRRLLLRIQVFIRM

SEQ ID NO: 306857 - DNA, 6605 bp, Artificial Sequence
  derived and/or modified sequence
acttctcttttctctttcctcaactaactggattccaaccagcccaaagtattcattactcacggctagatcgtttactttggttgtcccttctggcatggtgcatatgttatgggaagagggattataatttggtgctgtttgtagagatgacaacactgataaaatccactcattgctggtcccagcacacctggaaagttctgcaaggcctcagctacagaaagcccagagacagaaagtaaactctttcatgacccttgatcatcagatcatcaatccaactcttaaatggtcacaacctgcagtgccaagtggtgggcctcttgtgcagcatgcacacacaactctggacagtgatgctggcctcacagaaaacccactcaccaagttactagctattgggaaagaagatgacaatgcacaatggcatttatctggaagtattttggatgtgtatagcggtgaacaaggaatttcaccaattaacatggggcttacaagtgcttcttgtccaagtagtctaccaatgaaaagagaaattacagaaactgacactagagctttagcaaaagagagacaaaaaaaggacaaccacaacctcattgaaagaagaagaaggtataatattaattaccgaatcaaggagcttggcactcttattccaaagtctaatgatcctgatatgcgctggaacaaaggaaccattctaaaagcatcagtggagtacatcaagtggctacaaaaagaacaacagagagcccgagaattggaacacagacagaagaaattagagcaggctaacaggcgacttctacttcggattcaggaactagaaattcaggctcgtactcatggtctgccaaccctggcttcacttggcacggttgatttaggtgctcatgtcaccaaacagcagagccatcctgagcagaattcagtagactattgccaacaactgactgtgtctcaggggccaagccctgagctctgtgatcaagctatagccttttctgatcctttgtcatacttcacagatttatcatttagtgctgcattgaaagaggaacaaagattggatggcatgctattggatgacacaatctctccatttggaacagatcctctgctatctgccacttcccctgcagtttccaaagaaagcagtaggagaagtagctttagctcagatgatggtgatgaattataagaaataaacagacccaattcatcaactggaaagcaattctatgctggtgctatgcaattatgctctgtgtttcatatgttgctttggcttattttttttcttaaaggaatgtgttgttcatgaaaaactgatagaagcaacagaagaattcgcaggaagaaaaatcatagtgttaatgaattattgagggcgaaaaaaaggtgttttcttctttgactacggagtccaaatccacttaaattctgttttcctgaaaagaggtacagcataagaaatagctctttattgatgttttaaaagcagcaacttggtggtgtactactggaactaatgactgcaaagtgttaaacgactgaaatatacaaacagtctcttagttactcatttccatcttctcttcaactttcacatcagtcttccggaatcaagatcaacatatcaggtggtcattgcctttctccattgtctagtagacatgtctaaagttcaaactttataggataaataaatgtataatagattatctgtcacttgtggttgaaaggcaaatctacaataaatgtgagaattttccacaataaaatatggataacttataaaaacattggttactaaaattagatcctcattttattgtagttggttcaattacactaattctaaaagcatccatgcatatttatatctccagtctctgttcaggaaaaggaacatattgaatattttcctcaggaatatggaccagaattgtatcccttcacacaaacatacacatacacatatgcacatcattcaggtagtatatgttcttttgttttcttcatgcttctgactgcatcagaatcacattccaaattctcttttcttatgaagaagagatgtcagatcatcaattttagtaaataaaatataaaatgtccccctgcaaggacagttttcaggtacttaaaacttttcatcagtattggacagaaatcaattagttgttgatttggtttttctccaaatggataaaatattgaaaattgaattgccaattgacaaaataattattacaacaaactatttcttattattttcagttctgagaggaacgtaaggttctatttctataaacacttagagtgtcctatgatctttggttgcactgttagcatttattataagcacttataactatgatgcttcatttagatttttatctcttgcgcttgttttaggttaggaaattaagttaccaagcacgttgctctgtgctggacctccaagagtgatcatccgatcaatgagtattcatggaggcatactcagaactgcagtgagtcctgagaaaatgtagaagagttgaaaaagatatggtcttactcctaaggtagttaatgagaatgcatgaaaaacaaaaacaaaagatagaagacatatagaataaaaaatctaagcataaactgtaaatacagaaggtcagagaaaatgaaaatgactgacaaactttatgggaacagcagaatttgacttctctttgaaaggcattaattgagtgaaagtgagggcatataaaggaataataccaaccaaatgataaaagtgagaataataggggaagtatctttataggactttaattagaaagatctggatgccctagaagatgtctgttggggagttctgaagcataagactgacaacaggttgtgaaggcccttagaaaactatggtgaaataatatagtattaatataatagaaacaaatctttttagtagcagggaggatgctaaaaactaaaatatatattactaatgagtgagatgtaatctttcatgaatattaagctttgggataaattttgaaaggatcttttagttgcttctcacatggaaaatatgtcactatgaaatgtgagaccctaatgctgataaaagtagaaaaatagtaaatcattatggtataataattatctcaggcttagcttgtatcatttgctcagaatttggagaattaaaataattttattgtttgacatggaaaaataattactaacttctgggtacagtcattaaagcctgatagataaattcatctgaaatatgccatgtgaaacagctattagatacatcttctcaataattttcaagacgatattacatacttttaattttataacaaaattccacttcattatctgagttgataatttgattaaatgttaaaaattatagataaggaatatattttggagttcatagaaaacacaccactttattagatagagactggcttcagttctcattttatctgctcttctcatttcttcatattttgagtagacttgcactgatgatgtcattactcagtcattattttctgttctgttaaggtacaactactgggccttgaaatctatccttcacaatcttggctgagataaggacttggcacaggatgatagagcctggacacaagagatctggagagggaactgctatttgctgctacattcagattatgagatgtcagggaactgtaaaaagggtaatgaatttttaaagagagtaaagagttatgctgtgtcccggtcaactgaaatacattaaaaattaattagatggtagttcttaactttttaaggcagataccttgagaatctagtgagttatagaccctctccctagaaaagtatagaactgtttatatggacaataattcacatgcattcagagatcttagggatctcctgaatgttttcttggatcccaagtgaaaaattcctgaatcaggtctcttaggtgtgcggttaatgtcatgtataacaatggggggacccttacttatctaaatataattatcccaatcctaataatgatgaggttgcataggaaagtaatagtgtaccaaactttagattattcactaaaaaagttgttcatttatgaagtagtcgtttatcaaacatgtcctccccactcagcaaactatgccttctatttattatatatgggtcagtttcactataattactgagtgttataaacatctgaccataacattttgaaatgatgcaaataaatttccaaacaaaaatagtgtgaatttaaaagcaaattatttgagtatctaagaaacaagatagacttctagaaaaatttgactctctagaatatttcttgcagaaatgagatttttcataatagtaaaagaggcatatgtttatcaaacaatgctgtcacaaaaagcatcaactgtaatgggactattaatgcataattattgatttattcattcaattaatatacaattatcccttttcatttaaagatttaattcataattacaattataataaaacttcctttaaagtaagatacaataattttattgtttttcattcttttttcaacaaaatatcccatccaatcattttttatattattaaatattggctgctttttcttggattcacattaaacagccctttccaacttccaattgtcttaaaataatgatgacctcctgtgagtagatacagctctttacaatttttttctttagtgccttttcttcttgaatttttcctatatcaaatggagaatatatgtacagatggtattttctcagtttataggcatatcagtgaccatggctttctttatataggtttttaaaaaagccctaaataataaatagccagatgagctggggacattgagaaatagccttcctcttcctttttcaactcatttttttcccacctacatgactgtaaatcaaatatttaatagctcttacttaaaaaaacagatacaaagaatgtcttgatttggtgtgctcatttaccataatgtcatgaggggaattagatttcacaactttaaaaggaatatatttttattttattttgaaaaactgagtcatataggaattttcttatacttcaaggcatcatggaaacacttttttcctgtttggatattgtggaatttaaacgttcaaataaataaatggcataactaagtgttccaaatttttttacaatgtctttgaccctattcaaacactttaggtatttactgaccgtctgatgtgtaagatgtggaataaaactggaatcaattaattatttcactgtgttatcagcgcaagatcaaccatctgggtttcttaaagacacccgaaggattgaattttgtttcagtattgataatggcatagtctctatgtgctacatggaattacatcatttatccctccagtgccctatatgttgataagtatgtcagtttgacttagtatacatatatacagagatttcattacatttacctaataaatacaaaatacatttcgagtgttactgatctcctatgttacatgagcctcctgtaatcattgtgcattgatgttccaatgttttattgtttgtatgaattttaatttgaaaacaaggaaacaatccaaaagcagaaaaaatagcttttcttaaaattttcagtgctacattttccctctgaggtccatagagatttgaatgtataggagattatccgaaaacagctattttgattaaaaaatatatctcccaggattcaaccaacttaatgatgaagtactattgtctactgctttatacataaaagggaactttttatctgcttgtaaagggatttttatgtgtatttctgcataatcagatgacttctattgtgttttctactgatgaaattctctgtaaaatgtctttttcttacattatccaacaggcataaagaataacagtaaagacttttgtgtttgtaatactacctcttttatccctgcactactgttttattgcaaaaattctatattgtcactgtattttttccatagaatataaattttgttcttgtgctaaagctggtagtttatgtagcagacaaaatatacaaataaaagaagagactgattttgctgaaagaattatatataatcaagaagttacatattgttctttaaatatgatactgaattttaaaagcaaacgaaattcaagaatcttatctaacagcatagcagttgcttatggcatacaaggctaaaattaattcagctatttaatcttaataattattatgtagttaaaaatctttgactttaatagtgttttacatatacaaatagctgaagtaacattcctataattttaatctgacattggttagatcaagaaaacattgttaataagactgtagaatttgtaattattgctatttttcatttttaataacaaagtaatgtgtcttattttctaagaaaatggagaactttggtgtactttaatacatacaaaaatctttgtaaaaataccttaaaatgtaccaatattttctttgcatatattaaatgaaagactataattat

SEQ ID NO: 306858 - DNA, 2704 bp, Artificial Sequence
  derived and/or modified sequence
atcgtttactttggttgtcccttctggcatggtgcatatgttatgggaagagggattataatttggtgctgtttgtagagatgacaacactgataaaatccactcattgctggtcccagcacacctggaaagttctgcaaggcctcagctacagaaagcccagagacagaaagtaaactctttcatgacccttgatcatcagatcatcaatccaactcttaaatggtcacaacctgcagtgccaagtggtgggcctcttgtgcagcatgcacacacaactctggacagtgatgctggcctcacagaaaacccactcaccaagttactagctattgggaaagaagatgacaatgcacaatggcatttatctggaagtattttggatgtgtatagcggtgaacaaggaatttcaccaattaacatggggcttacaagtgcttcttgtccaagtagtctaccaatgaaaagagaaattacagaaactgacactagagctttagcaaaagagagacaaaaaaaggacaaccacaacctcattgaaagaagaagaaggtataatattaattaccgaatcaaggagcttggcactcttattccaaagtctaatgatcctgatatgcgctggaacaaaggaaccattctaaaagcatcagtggagtacatcaagtggctacaaaaagaacaacagagagcccgagaattggaacacagacagaagaaattagagcaggctaacaggcgacttctacttcggattcaggtttttataagaatgtagccatgagtcacatagcttacacatgactcagctgtcatcagttttcttcattggtctcatttattttttctcttattaacaattatttttccttttgaaggataattttactgctttttagaagttcgtgaattgggttgtttcaattaggatttgactagaaatccaggatcaagatggctgaatatgtatatatgtatatatgtatatacacatatatgtgtatatatgtgtgtatgtgtgcatgtatatatatatacacatatataatgacaacaaattacaaaatgcataaaatataactcatttcataaatgcacacattattatcctaatcaaataataatactaagtaaaacatttgtttctctacattatattggacattaaattctcccctccttctttcatttctttccaacattgctatggatttcattgcctcaaggcatgttgtgacagtgtatattaagtcacttctcatctgttcatataatccaaaatatcaaaatatgggcttttataactctcaagattttttaaaaatgtgagtatgcttagcaccaggtaaaacatttactgtttccatgaaaaggtcctgcatttacagtgagaaattaatcaggaagaataaatagatgactttctgctatctccaaatggctatattgtagtctgagccactatggaaccatcatcagtcataacctttgtagaacaatgagaccaaacttaaaaaaaagtctgagtaattttctcagagttatttttcatgcatcagaaatgtatcaatttcattatttgcaaagattattcataatttgtattgtattactcttcattttaaatgcttgttaatattttgattctatgtctggcttattctctagtgttaaatccaatttcaaagacattatttaatgattttcgtttgaaattacaggaactagaaattcaggctcgtactcatggtctgccaaccctggcttcacttggcacggttgatttaggtgctcatgtcaccaaacagcagagccatcctgagcagaattcagtagactattgccaacaactgactgtgtctcaggggccaagccctgagctctgtgatcaagctatagccttttctgatcctttgtcatacttcacagatttatcatttagtgctgcattgaaagaggaacaaagattggatggcatgctattggatgacacaatctctccatttggaacagatcctctgctatctgccacttcccctgcagtttccaaagaaagcagtaggagaagtagctttagctcagatgatggtgatgaattataagaaataaacagacccaattcatcaactggaaagcaattctatgctggtgctatgcaattatgctctgtgtttcatatgttgctttggcttattttttttcttaaaggaatgtgttgttcatgaaaaactgatagaagcaacagaagaattcgcaggaagaaaaatcatagtgttaatgaattattgagggcgaaaaaaaggtgttttcttctttgactacggagtccaaatccacttaaattctgttttcctgaaaagaggtacagcataagaaatagctctttattgatgttttaaaagcagcaacttggtggtgtactactggaactaatgactgcaaagtgttaaacgactgaaatatacaaacagtctcttagttactcatttccatcttctcttcaactttcacatcagtcttccggaatcaagatcaacatatcaggtggtcattgcctttctccattgtctagtagacatgtctaaagttcaaactttataggataaataaatgtataatagattatctgtcacttgtggttgaaaggcaaatctacaataaatgtgagaattttccacaataaaatatggataacttataaaaa

SEQ ID NO: 306859 - protein, 101 aa, Artificial Sequence
  derived and/or modified sequence
MKLLLVVAFIAVAVTAGLSIPLNEFEDLVDFQDWDEAAVDEDAGVRQRRVTCDLLSFGGVVGDSACAANCLSMGKAGGSCNGGICECRKTTFKELWDQRFG

SEQ ID NO: 306860 - protein, 1723 aa, Artificial Sequence
  derived and/or modified sequence
MQFQLTLFLHLGWLSYSKAQDDCNRGACHPTTGDLLVGRNTQLMASSTCGLSRAQKYCILSYLEGEQKCFICDSRFPYDPYDQPNSHTIENVIVSFEPDREKKWWQSENGLDHVSIRLDLEALFRFSHLILTFKTFRPAAMLVERSTDYGHNWKVFKYFAKDCATSFPNITSGQAQGVGDIVCDSKYSDIEPSTGGEVVLKVLDPSFEIENPYSPYIQDLVTLTNLRINFTKLHTLGDALLGRRQNDSLDKYYYALYEMIVRGSCFCNGHASECRPMQKMRGDVFSPPGMVHGQCVCQHNTDGPNCERCKDFFQDAPWRPAADLQDNACRSCSCNSHSSRCHFDMTTYLASGGLSGGVCEDCQHNTEGQHCDRCRPLFYRDPLKTISDPYACIPCECDPDGTISGGICVSHSDPALGSVAGQCLCKENVEGAKCDQCKPNHYGLSATDPLGCQPCDCNPLGSLPFLTCDVDTGQCLCLSYVTGAHCEECTVGYWGLGNHLHGCSPCDCDIGGAYSNVCSPKNGQCECRPHVTGRSCSEPAPGYFFAPLNFYLYEAEEATTLQGLAPLGSETFGQSPAVHVVLGEPVPGNPVTWTGPGFARVLPGAGLRFAVNNIPFPVDFTIAIHYETQSAADWTVQIVVNPPGGSEHCIPKTLQSKPQSFALPAATRIMLLPTPICLEPDVQYSIDVYFSQPLQGESHAHSHVLVDSLGLIPQINSLENFCSKQDLDEYQLHNCVEIASAMGPQVLPGACERLIISMSAKLHDGAVACKCHPQGSVGSSCSRLGGQCQCKPLVVGRCCDRCSTGSYDLGHHGCHPCHCHPQGSKDTVCDQVTGQCPCHGEVSGRRCDRCLAGYFGFPSCHPCPCNRFAELCDPETGSCFNCGGFTTGRNCERCIDGYYGNPSSGQPCRPCLCPDDPSSNQYFAHSCYQNLWSSDVICNCLQGYTGTQCGECSTGFYGNPRISGAPCQPCACNNNIDVTDPESCSRVTGECLRCLHNTQGANCQLCKPGHYGSALNQTCRRCSCHASGVSPMECPPGGGACLCDPVTGACPCLPNVTGLACDRCADGYWNLVPGRGCQSCDCDPRTSQSSHCDQLTGQCPCKLGYGGKRCSECQENYYGDPPGRCIPCDCNRAGTQKPICDPDTGMCRCREGVSGQRCDRCARGHSQEFPTCLQCHLCFDQWDHTISSLSKAVQGLMRLAANMEDKRETLPVCEADFKDLRGNVSEIERILKHPVFPSGKFLKVKDYHDSVRRQIMQLNEQLKAVYEFQDLKDTIERAKNEADLLLEDLQEEIDLQSSVLNASIADSSENIKKYYHISSSAEKKINETSSTINTSANTRNDLLTILDTLTSKGNLSLERLKQIKIPDIQILNEKVCGDPGNVPCVPLPCGGALCTGRKGHRKCRGPGCHGSLTLSTNALQKAQEAKSIIRNLDKQVRGLKNQIESISEQAEVSKNNALQLREKLGNIRNQSDSEEENINLFIKKVKNFLLEENVPPEDIEKVANGVLDIHLPIPSQNLTDELVKIQKHMQLCEDYRTDENRLNEEADGAQKLLVKAKAAEKAANILLNLDKTLNQLQQAQITQGRANSTITQLTANITKIKKNVLQAENQTREMKSELELAKQRSGLEDGLSLLQTKLQRHQDHAVNAKVQAESAQHQAGSLEKEFVELKKQYAILQRKTSTTGLTKETLGKVKQLKDAAEKLAGDTEAKIRRITGCFQNSAR

SEQ ID NO: 306861 - DNA, 5171 bp, Artificial Sequence
  derived and/or modified sequence
atgcagttccagctgaccctgttcctccacctcggctggctgtcatacagtaaagcacaggacgactgtaaccggggtgcatgccaccccacaacgggcgacttgctggtgggtaggaacacacaactgatggcatcttccacttgtggtctgtcccgggcacaaaaatattgcatacttagttacttagagggggagcagaaatgttttatctgtgatagtcgcttcccgtacgatccttacgaccagccgaactcccacactattgaaaacgttatcgttagttttgagcccgatagagagaaaaagtggtggcagtctgaaaacggtttggatcatgtgtcaattcggctcgacctcgaagcactgttccgtttctctcacctaatcctgacgttcaaaacattcagacctgcagctatgctggtggagcgttcaacggattatggacacaattggaaagtttttaagtatttcgctaaggactgtgcaacatctttcccaaatatcacttccgggcaggcgcaaggcgtgggcgacattgtctgcgactcaaagtattccgacatcgagcctagcaccggcggtgaagtggtgctcaaggtcctcgatccaagctttgaaattgagaacccatacagcccttatatccaggatttggtgacgttgactaacctgcgcattaacttcaccaagctgcacactctgggcgacgccctccttggtagacgacagaacgactccctggataaatactattacgcactgtacgaaatgatagttagagggagctgcttttgtaatggtcacgctagtgagtgccggccaatgcagaaaatgcgcggagatgtgttttccccacccggtatggtgcatgggcaatgtgtgtgccagcataataccgatggcccaaattgcgaacgttgcaaagacttctttcaggacgcaccttggaggcctgccgctgaccttcaagataatgcttgccggagctgttcctgcaatagccactcctcaaggtgtcacttcgacatgactacttacctggcctcggggggactgagcggtggagtgtgcgaggactgtcagcataatacagaaggccagcattgtgatcggtgcaggccgctcttttaccgcgatcctctgaaaaccatctctgatccctatgcctgtatcccttgcgaatgcgatccagacggcaccatctccggaggcatctgcgtcagtcattcggacccagccctcggcagtgtcgccggtcagtgtctctgcaaggagaatgttgagggcgcaaaatgtgaccagtgtaaacccaatcactatggcctcagcgccacagaccctcttgggtgccagccttgcgactgcaacccactgggatccctgccttttcttacttgcgacgttgataccggccagtgcctctgcctctcttacgttaccggcgcacattgtgaagaatgtaccgtagggtactggggactggggaaccatcttcatggctgttcgccctgtgactgcgatatcggtggggcatatagcaatgtttgtagccctaagaacggccagtgtgagtgccgcccacacgtgaccggccgatcttgttcagagcccgcaccagggtactttttcgctccactcaatttctatctttacgaggctgaagaggcgactactttacaagggctggccccactcggctccgagacctttggacagtcacccgcagtacatgtggttctgggggaaccagtgcccggaaatcccgttacctggacagggccaggtttcgcgagggtcctccctggggctggcctccggttcgctgtgaacaatatacctttccctgtggatttcaccatcgcgattcattatgagacgcagtctgccgctgactggacagtccaaatcgtggtcaacccccctgggggatctgaacattgcattcctaaaaccctccaatctaagcctcagtccttcgcattgccagcagccacccgcatcatgctgttacccacccctatttgcttggaaccggacgtgcagtacagcatcgacgtgtacttctctcagcctctgcagggagagagtcacgcccactcacacgtgttggtggactcattaggcctcatcccgcagattaacagcttggagaatttctgttcaaaacaggatcttgatgagtatcaactgcacaattgcgtggagatcgcctcagccatggggccacaagtcctgccaggcgcttgtgagagactgattatcagtatgtctgccaaactgcatgatggggcagtggcatgtaagtgccatccccaaggtagtgttggttcaagttgtagccggttagggggtcaatgccagtgcaaaccactagtagtgggaaggtgctgtgatagatgctcgaccggttcatacgacctgggccatcatggatgccacccttgccactgtcatccgcagggaagtaaggacactgtgtgtgaccaggtaacaggccagtgtccgtgccacggtgaggtgtcaggaagacgttgtgaccgatgcttggcagggtactttggcttcccttcatgccacccgtgtccctgtaacagattcgcagagttgtgcgacccagagacagggtcctgttttaattgcggcggatttactacagggagaaactgtgagcgttgcattgacggttactatggcaacccatctagcggacagccttgtcgaccttgcctgtgtccagatgatccgtcatccaatcaatacttcgcccattcatgttaccagaacctatggtcttcagatgtaatctgcaactgcctgcaaggatataccggtacgcagtgtggggagtgttcgaccggtttctatgggaatccaaggatatccggagcaccctgccagccatgcgcctgcaacaacaacatcgacgttaccgatccagaatcttgcagcagagtgacaggcgagtgcctgcgctgcctacacaacacccagggcgctaactgccaactgtgcaaacccggtcactatgggtcagctcttaaccagacctgtcgacggtgctcgtgccatgcttcaggtgtgtccccgatggaatgtccccctggcggtggcgcttgtctgtgcgatcccgttactggggcttgtccttgtctccctaacgtgacagggctcgcttgcgacagatgcgccgacgggtactggaacctggtccctgggaggggttgccagagctgtgactgtgatccacgaacaagtcaaagtagtcattgcgatcagctaaccggccaatgcccatgcaaactgggctatggcggaaagagatgcagcgagtgccaagagaattactacggtgacccacctgggaggtgcataccatgcgactgcaatagagcagggactcagaaacccatctgtgatcccgacaccggcatgtgtcgctgcagggagggggtgtctggccagcggtgcgacagatgcgccaggggacacagtcaggaattccccacttgcttacagtgccatctctgcttcgatcagtgggaccacaccatctcttccctcagtaaggccgtccaggggcttatgagactcgctgctaatatggaggataagcgggagaccctcccggtctgcgaggccgatttcaaagatctgcggggaaacgtttcagagatcgagcggatactcaaacatcccgtctttccttccggcaagtttctcaaggtgaaagactaccatgatagcgtccgccgtcagatcatgcaacttaatgaacagctaaaggctgtgtatgagttccaggaccttaaggacactattgagcgagcaaaaaatgaggctgatctgcttctcgaagacttacaggaggagatcgacctgcagagtagtgtgctgaatgcctccattgctgatagcagtgagaacatcaagaaatattaccatatatcctcatcagctgaaaagaagataaatgagacctcttctacaattaacaccagtgccaacacgcggaatgatcttctgacgattttagatacactcacaagcaaaggcaatctcagcttagaaagattaaaacaaatcaagatccccgacattcagattttgaatgagaaggtttgtggcgatcctggtaatgtgccttgtgtgcctctaccctgcgggggagcactgtgtaccggtagaaaaggtcatagaaaatgtcggggtccaggatgtcacgggagtctgaccctgtctacgaacgccctgcagaaggcccaggaggcaaagtctatcattcgcaatctagataagcaggtgcggggtctgaaaaaccagatagaatctattagtgaacaagccgaagttagtaaaaacaatgccctccagctgcgcgagaagctcggcaatattcggaatcaaagcgatagtgaggaggaaaatatcaatttgttcatcaaaaaggtcaagaactttcttctagaggagaatgtccccccagaagacatagagaaggtggctaacggcgtgttggacattcatctgcccatcccctcccagaatcttacagatgaactggtgaaaatccagaaacacatgcaactgtgcgaggattatagaacagatgagaaccggctcaacgaggaagccgatggcgcacagaagctcctcgtgaaggcgaaagctgctgaaaaggccgcaaacatcctgctgaatctggacaaaactctgaaccagctgcaacaggcgcagattactcagggcagggctaatagcacaataactcagctgactgcaaatatcacaaagatcaaaaagaacgtcctgcaagcagagaatcaaactagggaaatgaagtcagagttagagctcgcgaaacaacgctctgggcttgaggatggtcttagtctgctgcagactaaactgcaaagacatcaggatcacgcagtgaacgctaaagtgcaagccgaatctgcccagcatcaagcgggaagcctggagaaggaatttgttgaactgaagaagcaatatgccatccttcagcgaaagaccagcaccacgggcttgaccaaagaaaccttgggtaaggtgaagcagcttaaggacgctgccgagaaactggcaggcgacaccgaggccaagattaggaggatcacaggatgcttccagaattcagctcgata

SEQ ID NO: 306862 - DNA, 5172 bp, Artificial Sequence
  derived and/or modified sequence
atgcagtttcagcttactctgtttctgcaccttggctggctgagttatagcaaagcccaagacgattgcaatcggggtgcgtgccatccaactacaggagatttacttgtcggtcgtaacactcagcttatggcatcgtcaacttgtggtctttcaagagctcagaaatattgtatcctgtcttacctggagggggaacaaaagtgtttcatttgcgactcccgctttccatatgatccgtacgaccaaccgaacagtcacaccattgaaaatgtcatcgttagcttcgagcctgatagagaaaaaaagtggtggcagtcagagaacggtctggaccatgtgagtatcagactcgatctcgaggccctgttccgcttttcccacctaatactcaccttcaaaacatttcggccggctgctatgcttgtggaacggagcacagattatggccacaactggaaggttttcaagtattttgccaaagactgcgctacatctttccctaacatcacaagcggacaggctcaaggtgtaggagatatcgtttgcgactctaagtattcagatatcgagcctagcaccgggggagaggtggttctgaaggtcctggatcccagctttgagatcgaaaacccttatagcccctatatccaagacctggtgaccttgacaaacctacgcataaactttaccaaacttcacactctcggggatgcacttttgggtagaaggcagaatgacagtctggataagtattactatgctttatatgaaatgatcgtgcgggggtcttgtttttgcaacggccacgcttctgagtgcaggccaatgcaaaaaatgaggggcgatgtgttctctcccccaggtatggtgcacggtcagtgtgtttgtcaacataataccgacggacctaattgtgagaggtgtaaagacttctttcaggatgccccatggaggccagctgctgacctccaggataacgcgtgccgctcctgttcctgtaattcacatagctcccgctgccacttcgacatgaccacttacctggccagcggaggtttatctggcggcgtctgtgaagattgccagcataacacagaaggtcagcactgcgacagatgccggcctcttttctaccgcgacccattgaaaacaatctcagacccgtacgcgtgcattccctgcgagtgtgacccagatggcactatttccggggggatctgcgtgtcccactccgacccagcacttggctccgtcgccggtcagtgtctgtgcaaggagaacgtcgaaggggcaaagtgcgatcagtgcaaacctaaccactacgggctgtctgctaccgatccattgggatgccagccttgcgactgcaaccctctgggctcactcccctttctcacttgtgatgtggataccgggcagtgtttgtgtctgtcttatgtcacaggcgcgcactgcgaagagtgcaccgttgggtattgggggcttggcaatcaccttcacggatgttctccatgcgattgcgatattgggggcgcgtactctaacgtctgtagtccaaagaacggacagtgtgaatgccgtccacatgtgactggaagatcctgcagcgagccagcccctgggtatttcttcgcaccactcaacttttatctatacgaagcagaggaggcaactactctgcaggggttggcaccgctggggagtgagacattcggccagtcccctgctgttcacgtggtcctgggtgagcctgtgcctgggaaccctgtcacatggacaggacctggatttgctagagtgcttccaggagctggcctgcgctttgccgttaataatataccttttccagtggactttaccatcgcaatccattatgagacccagagcgccgccgactggaccgtgcaaatcgttgtgaacccacccggaggaagtgagcactgcataccaaaaactcttcagtccaaaccccagagcttcgctctgcccgctgccaccagaatcatgctcttaccaacaccgatttgcctggagcctgatgtccagtattcaatcgacgtctacttttctcaaccactgcagggagaaagtcatgctcatagccacgtgcttgtcgattcactaggacttattccccagattaactccttggagaatttttgctcaaagcaggatcttgatgaataccagctgcacaattgcgtggagatcgcttccgccatgggcccgcaggtgctccctggtgcatgtgagcgtttaattatctccatgtctgctaagcttcacgatggggcagtggcttgcaagtgtcacccgcagggctcagtggggtcatcctgctccaggctcgggggtcagtgtcagtgcaaaccgctggtggtggggcggtgttgtgaccggtgcagtaccggcagttacgatctaggccatcacggttgccacccttgtcactgtcatccacaagggagcaaggacacagtgtgcgatcaagtcaccggtcaatgtccctgccacggcgaagtgtcaggaagacgctgtgacagatgcctcgcaggttacttcggatttccctcatgccacccctgcccctgtaatcggttcgccgaactatgtgatcccgaaacaggctcatgtttcaactgtggagggttcaccaccggacggaattgtgagagatgcatcgacggctactacgggaatccctccagcgggcagccttgccggccttgtctgtgtcctgacgacccatctagcaatcaatactttgcccacagttgttaccagaacctgtggagctccgatgtcatttgcaactgtcttcagggttacaccggcacacaatgtggtgagtgctccactggtttttatggaaacccccgaatctctggcgccccttgccagccttgcgcttgtaataataatattgacgtcactgacccagaatcttgctccagagttactggcgagtgtctgaggtgcctacacaacacccagggagcaaattgccagctgtgtaagccgggtcactacggtagcgctctgaatcagacttgtagacgatgttcgtgtcatgcctctggcgtgtcccctatggaatgtccacctggcggcggtgcttgcctgtgtgatccagttactggagcttgcccttgccttccaaacgtaacagggctggcgtgtgaccgctgtgcagatgggtactggaatttagtaccagggaggggatgtcaaagctgtgactgcgaccccagaactagccagagcagccactgtgatcaactaaccggccagtgcccttgcaagctggggtacgggggcaagcggtgcagcgaatgccaagaaaactactatggagaccctcccgggcggtgtattccgtgcgactgtaatcgcgcaggtactcagaagcccatttgcgaccctgacacaggcatgtgccgatgtcgcgaaggtgttagtggtcaacgctgcgatagatgcgcccgtgggcattcgcaggaattccctacctgcctccaatgtcacctgtgttttgaccagtgggatcatacaatatctagtctgtctaaggcagtccaggggctgatgagactcgcggcgaatatggaggataaaagagaaaccctgccagtgtgtgaggcagatttcaaggatctgagaggcaatgtgtctgaaattgaacgcatcctcaagcacccagtctttcccagtggaaaatttttaaaagttaaggattaccacgatagcgtgcgccgtcagataatgcagttgaatgagcagctaaaggccgtctatgaatttcaagatctcaaggacaccatcgaaagagccaaaaacgaggccgatctgctgcttgaagatctccaggaagaaatagacctgcagtcatccgttcttaatgcatccattgctgacagctcggaaaacattaagaagtactaccatatatctagttctgccgagaaaaagattaatgagacgagtagcaccattaacaccagcgctaatacaagaaacgatttgttgactatcttggataccctcacgtcaaagggaaatctctccctcgagagattgaaacagatcaagatacctgacatccagatcctcaacgagaaagtgtgtggagaccccggaaatgtgccctgtgtcccactaccctgcggaggcgccctgtgtaccggtcgcaaggggcaccgaaagtgccgtgggcccggatgccatggtagccttacactgagcacaaacgccctccagaaggcccaggaggcaaagtccattatccgtaacctcgacaagcaggttagagggctcaagaaccagatagagtctatcagcgagcaggcggaagttagtaagaacaacgcgctccaactgagagagaaactgggaaacataagaaaccaatctgatagcgaggaagagaatatcaacctgtttatcaaaaaggtgaagaattttctcctagaggagaacgtcccgccagaggatattgagaaggtcgccaatggggtgctcgacatccatctgccaataccctcccagaatttgacagacgagttagtgaagatccagaaacacatgcagctgtgcgaggactatagaacagatgagaacaggctgaacgaggaggccgatggagctcagaagctcctcgtgaaggccaaggctgcggagaaggctgctaatatccttctgaaccttgataagacgctgaaccagctccaacaggcccaaattactcagggcagagcaaattcaacaatcacccagctcaccgccaatattaccaagataaaaaaaaacgtgttacaggccgagaaccagactcgcgaaatgaaaagcgaattggagctcgccaagcaacgctctggcctcgaggatggcctctccctgctccagacaaagttacagcggcatcaagaccatgccgttaatgctaaggtgcaggcagaatctgctcaacaccaagccggcagtttagagaaggagttcgtcgagctgaaaaagcagtacgcgattctgcagagaaaaacaagtacaaccggactgactaaggagacactcggaaaggttaagcaattgaaggacgctgctgaaaagctggccggcgacactgaagctaaaatcaggaggattacaggctgtttccaaaatagcgctaggtag

SEQ ID NO: 306863 - DNA, 5172 bp, Artificial Sequence
  derived and/or modified sequence
atgcagtttcagcttactctgtttctgcaccttggctggctgagttatagcaaagcccaagacgattgcaatcggggtgcgtgccatccaactacaggagatttacttgtcggtcgtaacactcagcttatggcatcgtcaacttgtggtctttcaagagctcagaaatattgtatcctgtcttacctggagggggaacaaaagtgtttcatttgcgactcccgctttccatatgatccgtacgaccaaccgaacagtcacaccattgaaaatgtcatcgttagcttcgagcctgatagagagaaaaaatggtggcaatcagagaatggcctggaccacgtgtctattcgtctcgatcttgaggctctgtttcggttctcacacctgatcctgacttttaagacctttcggcccgcagcaatgcttgtcgagcgttctacagactatggccacaactggaaggtttttaaatacttcgcgaaagactgcgcgactagcttcccaaacataacttctggacaggcacagggcgttggagatatcgtttgtgattccaagtattctgacatcgaaccatctacaggaggcgaggttgtgctgaaggttttagatccaagctttgagattgagaatccttattcgccttatattcaagaccttgtgacactgacaaacttgcgaattaattttactaaacttcacaccctgggcgatgcactgcttggccgcaggcaaaacgattctcttgataagtactactacgccctttatgaaatgatcgtccggggttcgtgcttctgtaatggccatgctagtgagtgccgccctatgcagaaaatgagaggcgacgtgttttcccctcccggaatggtgcatgggcagtgcgtgtgccagcacaacacagacgggcccaactgtgagaggtgtaaggacttttttcaggatgccccatggcgaccggcagcagatctccaggataacgcatgcagaagttgcagctgtaattcacattcctctcggtgccatttcgatatgactacctatctcgcctccggcgggctaagcggcggtgtgtgcgaggattgtcagcacaatacagaaggacaacactgtgacagatgtagacccttattttatagggatcccttaaagactatcagcgacccctacgcgtgtataccctgtgaatgcgatcctgatggcaccatctcgggtggcatctgtgtgagccatagcgaccccgccttgggttctgttgcaggacagtgtctgtgcaaggaaaatgttgaaggagccaagtgtgatcaatgtaaacccaaccactacggactgtcagcaactgacccgctaggatgccagccctgtgattgtaatcctctaggttctctgcctttcctgacgtgcgacgtggatactggacaatgcctctgcctgagttacgtcactggcgcacactgcgaggaatgcaccgtgggttattggggactcggcaatcacctgcatggttgctcaccttgtgactgcgacatcggcggtgcttattctaatgtgtgctcccctaagaatggccagtgcgagtgtagacctcatgttacaggccgcagttgcagtgagcctgcacccggctacttcttcgccccacttaacttctacctgtacgaggctgaagaagctacaactcttcaggggctggccccccttggttctgaaaccttcggtcaatctcccgctgttcatgtcgttctgggagaacccgtgcccgggaatccagtgacttggaccggccctggatttgcacgggtcctgcccggtgccggattacgattcgcagtgaataacatccccttccccgtagacttcacaattgccatccattacgagactcaatccgccgccgactggaccgtgcaaattgttgtcaatcccccaggtgggtctgaacactgtatccccaagacattacaatcgaaacctcaatccttcgcactgccggccgctactagaataatgctgctgcccacacccatttgtcttgagcccgatgtgcagtatagtattgatgtgtattttagtcagcctcttcagggcgaatcacatgctcatagccatgtattagtcgattccctaggcctgatacctcagatcaacagtcttgagaatttttgcagtaaacaggatctggatgagtatcagttacacaactgtgtcgagattgcctctgccatgggtccgcaggtgcttcctggagcctgtgaaagactcattatcagtatgtctgctaagctacacgatggagctgttgcatgtaaatgtcatccccagggcagcgttggtagtagttgttccagactcggtgggcaatgtcaatgtaaacccttagtcgtggggcggtgttgtgatcgatgctcaaccggcagttacgatttaggccatcatggatgccatccttgccattgtcatccccaggggtccaaagatacagtgtgtgaccaagtcaccggccaatgtccatgtcacggggaggtaagtgggcgacgctgtgaccgatgtctggccggctactttgggttcccaagttgccatccttgtccctgcaaccggttcgcagagctatgcgatcctgaaaccgggtcatgctttaactgtggaggcttcactactgggcggaattgcgaaagatgtatagacggctattacggtaatcccagctctggtcaaccctgtcgcccttgtctctgcccagatgatccaagtagtaaccagtactttgctcactcttgctaccagaacctgtggtcctctgacgtgatctgtaactgtctgcagggatacacaggaacccagtgcggcgagtgttcgacaggcttctacggaaacccaagaattagcggagctccctgccaaccgtgtgcatgcaataacaacatcgacgtgactgatccagaatcttgctccagagtgaccggtgaatgtcttaggtgtttacataatacacagggcgctaattgccagctatgtaagccaggacactacggatcagccttgaaccaaacatgccgtcggtgctcttgccacgcgagcggagtctcccctatggagtgtcccccgggaggaggagcctgcctatgcgacccggtaacaggtgcttgcccctgtctaccaaacgtgaccggcctcgcatgtgaccggtgtgctgatggatactggaaccttgtgcccggaagaggctgtcagtcctgcgactgtgatccccgtacaagccagtctagccattgcgatcaactgacgggacaatgtccttgtaaactcggctatggcgggaagcggtgttccgaatgtcaagagaactattacggagacccaccgggaaggtgtatcccttgcgattgcaatcgagctgggacgcagaaacctatttgtgacccagacactggcatgtgtagatgtagagaaggagtgagcggacaacgttgcgataggtgcgctcgtggccacagtcaagaattccctacctgcttgcagtgtcacctgtgttttgaccagtgggatcacaccattagcagcctgagtaaagctgtgcagggcttgatgaggttagccgccaatatggaggacaaacgcgaaaccctgcccgtgtgtgaagctgattttaaggacttacggggcaatgtctcagagatcgaaagaattctaaagcaccccgtgtttccatcaggcaaattcctaaaagtgaaagactaccacgattccgtccgtaggcagatcatgcaattaaatgaacagctgaaagccgtatacgagttccaggatcttaaagataccatcgagcgagccaagaacgaagctgacttattgcttgaagatttacaggaagaaatagacctccagtccagtgttcttaatgcttcaatcgccgacagttctgaaaacattaaaaaatattatcatatctcctcatctgcagaaaaaaaaattaacgaaacaagttccacaataaatacatctgctaatactcgcaatgacctactgaccatcttggacacactgacaagtaagggcaacttatctctcgaacgtcttaagcaaattaagatcccagacatacagatcctgaatgagaaggtgtgtggggaccctggcaacgttccctgtgtacctctaccctgtggtggggccctatgtaccgggcgcaagggacacaggaaatgtcggggacctggttgccatgggtctctcaccctgagtaccaatgcgctgcagaaggcacaggaggcgaagtcaataattcgtaatctagataagcaggtgcgcggcctaaagaaccagattgaatccattagcgagcaagcggaggtttccaaaaataacgcacttcaattgcgggaaaaactggggaatattagaaaccagagcgacagtgaggaagaaaacatcaatttatttataaagaaagttaaaaattttctgttggaggagaatgtgccacccgaagatattgagaaagtggccaatggagtcctggatatacatttgcccataccgtcccagaacctgacagatgagctggtcaaaatccaaaagcacatgcagctttgtgaagactacagaacagacgaaaaccggcttaacgaagaagccgacggggcgcaaaagcttctggttaaagcaaaggccgccgagaaagctgcgaacatcctcttaaacctggataaaacactcaaccaactgcaacaggcccagatcacccaaggtagagcaaacagtactataacacaacttaccgcaaacatcacaaaaataaagaagaacgtattgcaggccgaaaaccagactcgcgagatgaaaagcgagttagaacttgcgaaacagcgaagcgggctcgaagacgggctatcactgctccagaccaaactgcaaagacaccaggatcacgcagttaacgccaaggttcaagccgaaagcgcccaacaccaggcaggctcgttggaaaaggaattcgtcgagttaaaaaaacaatatgcgattctccagcgaaagacctcaactacaggactgacaaaagaaacgctggggaaagtgaaacagctgaaagacgccgctgagaaattggcaggcgacaccgaagctaaaataagacgcattacaggttgttttcagaactccgcacgctag

SEQ ID NO: 306864 - DNA, 5172 bp, Artificial Sequence
  derived and/or modified sequence
atgcagttccagctgaccctgttcctgcacctgggctggctgagctacagcaaggcccaggacgactgcaacagaggcgcctgccaccccaccaccggcgacctgctggtgggcagaaacacccagctgatggccagcagcacctgcggcctgagcagagcccagaagtactgcatcctgagctacctggagggcgagcagaagtgcttcatctgcgacagcagattcccctacgacccctacgaccagcccaacagccacaccatcgagaacgtgatcgtgagcttcgagcccgacagagagaagaagtggtggcagagcgagaacggcctggaccacgtgagcatcagactggacctggaggccctgttcagattcagccacctgatcctgaccttcaagaccttcagacccgccgccatgctggtggagagaagcaccgactacggccacaactggaaggtgttcaagtacttcgccaaggactgcgccaccagcttccccaacatcaccagcggccaggcccagggcgtgggcgacatcgtgtgcgacagcaagtacagcgacatcgagcccagcaccggcggcgaggtggtgctgaaggtgctggaccccagcttcgagatcgagaacccctacagcccctacatccaggacctggtgaccctgaccaacctgagaatcaacttcaccaagctgcacaccctgggcgacgccctgctgggcagaagacagaacgacagcctggacaagtactactacgccctgtacgagatgatcgtgagaggcagctgcttctgcaacggccacgccagcgagtgcagacccatgcagaagatgagaggcgacgtgttcagcccccccggcatggtgcacggccagtgcgtgtgccagcacaacaccgacggccccaactgcgagagatgcaaggacttcttccaggacgccccctggagacccgccgccgacctgcaggacaacgcctgcagaagctgcagctgcaacagccacagcagcagatgccacttcgacatgaccacctacctggccagcggcggcctgagcggcggcgtgtgcgaggactgccagcacaacaccgagggccagcactgcgacagatgcagacccctgttctacagagaccccctgaagaccatcagcgacccctacgcctgcatcccctgcgagtgcgaccccgacggcaccatcagcggcggcatctgcgtgagccacagcgaccccgccctgggcagcgtggccggccagtgcctgtgcaaggagaacgtggagggcgccaagtgcgaccagtgcaagcccaaccactacggcctgagcgccaccgaccccctgggctgccagccctgcgactgcaaccccctgggcagcctgcccttcctgacctgcgacgtggacaccggccagtgcctgtgcctgagctacgtgaccggcgcccactgcgaggagtgcaccgtgggctactggggcctgggcaaccacctgcacggctgcagcccctgcgactgcgacatcggcggcgcctacagcaacgtgtgcagccccaagaacggccagtgcgagtgcagaccccacgtgaccggcagaagctgcagcgagcccgcccccggctacttcttcgcccccctgaacttctacctgtacgaggccgaggaggccaccaccctgcagggcctggcccccctgggcagcgagaccttcggccagagccccgccgtgcacgtggtgctgggcgagcccgtgcccggcaaccccgtgacctggaccggccccggcttcgccagagtgctgcccggcgccggcctgagattcgccgtgaacaacatccccttccccgtggacttcaccatcgccatccactacgagacccagagcgccgccgactggaccgtgcagatcgtggtgaacccccccggcggcagcgagcactgcatccccaagaccctgcagagcaagccccagagcttcgccctgcccgccgccaccagaatcatgctgctgcccacccccatctgcctggagcccgacgtgcagtacagcatcgacgtgtacttcagccagcccctgcagggcgagagccacgcccacagccacgtgctggtggacagcctgggcctgatcccccagatcaacagcctggagaacttctgcagcaagcaggacctggacgagtaccagctgcacaactgcgtggagatcgccagcgccatgggcccccaggtgctgcccggcgcctgcgagagactgatcatcagcatgagcgccaagctgcacgacggcgccgtggcctgcaagtgccacccccagggcagcgtgggcagcagctgcagcagactgggcggccagtgccagtgcaagcccctggtggtgggcagatgctgcgacagatgcagcaccggcagctacgacctgggccaccacggctgccacccctgccactgccacccccagggcagcaaggacaccgtgtgcgaccaggtgaccggccagtgcccctgccacggcgaggtgagcggcagaagatgcgacagatgcctggccggctacttcggcttccccagctgccacccctgcccctgcaacagattcgccgagctgtgcgaccccgagaccggcagctgcttcaactgcggcggcttcaccaccggcagaaactgcgagagatgcatcgacggctactacggcaaccccagcagcggccagccctgcagaccctgcctgtgccccgacgaccccagcagcaaccagtacttcgcccacagctgctaccagaacctgtggagcagcgacgtgatctgcaactgcctgcagggctacaccggcacccagtgcggcgagtgcagcaccggcttctacggcaaccccagaatcagcggcgccccctgccagccctgcgcctgcaacaacaacatcgacgtgaccgaccccgagagctgcagcagagtgaccggcgagtgcctgagatgcctgcacaacacccagggcgccaactgccagctgtgcaagcccggccactacggcagcgccctgaaccagacctgcagaagatgcagctgccacgccagcggcgtgagccccatggagtgcccccccggcggcggcgcctgcctgtgcgaccccgtgaccggcgcctgcccctgcctgcccaacgtgaccggcctggcctgcgacagatgcgccgacggctactggaacctggtgcccggcagaggctgccagagctgcgactgcgaccccagaaccagccagagcagccactgcgaccagctgaccggccagtgcccctgcaagctgggctacggcggcaagagatgcagcgagtgccaggagaactactacggcgacccccccggcagatgcatcccctgcgactgcaacagagccggcacccagaagcccatctgcgaccccgacaccggcatgtgcagatgcagagagggcgtgagcggccagagatgcgacagatgcgccagaggccacagccaggagttccccacctgcctgcagtgccacctgtgcttcgaccagtgggaccacaccatcagcagcctgagcaaggccgtgcagggcctgatgagactggccgccaacatggaggacaagagagagaccctgcccgtgtgcgaggccgacttcaaggacctgagaggcaacgtgagcgagatcgagagaatcctgaagcaccccgtgttccccagcggcaagttcctgaaggtgaaggactaccacgacagcgtgagaagacagatcatgcagctgaacgagcagctgaaggccgtgtacgagttccaggacctgaaggacaccatcgagagagccaagaacgaggccgacctgctgctggaggacctgcaggaggagatcgacctgcagagcagcgtgctgaacgccagcatcgccgacagcagcgagaacatcaagaagtactaccacatcagcagcagcgccgagaagaagatcaacgagaccagcagcaccatcaacaccagcgccaacaccagaaacgacctgctgaccatcctggacaccctgaccagcaagggcaacctgagcctggagagactgaagcagatcaagatccccgacatccagatcctgaacgagaaggtgtgcggcgaccccggcaacgtgccctgcgtgcccctgccctgcggcggcgccctgtgcaccggcagaaagggccacagaaagtgcagaggccccggctgccacggcagcctgaccctgagcaccaacgccctgcagaaggcccaggaggccaagagcatcatcagaaacctggacaagcaggtgagaggcctgaagaaccagatcgagagcatcagcgagcaggccgaggtgagcaagaacaacgccctgcagctgagagagaagctgggcaacatcagaaaccagagcgacagcgaggaggagaacatcaacctgttcatcaagaaggtgaagaacttcctgctggaggagaacgtgccccccgaggacatcgagaaggtggccaacggcgtgctggacatccacctgcccatccccagccagaacctgaccgacgagctggtgaagatccagaagcacatgcagctgtgcgaggactacagaaccgacgagaacagactgaacgaggaggccgacggcgcccagaagctgctggtgaaggccaaggccgccgagaaggccgccaacatcctgctgaacctggacaagaccctgaaccagctgcagcaggcccagatcacccagggcagagccaacagcaccatcacccagctgaccgccaacatcaccaagatcaagaagaacgtgctgcaggccgagaaccagaccagagagatgaagagcgagctggagctggccaagcagagaagcggcctggaggacggcctgagcctgctgcagaccaagctgcagagacaccaggaccacgccgtgaacgccaaggtgcaggccgagagcgcccagcaccaggccggcagcctggagaaggagttcgtggagctgaagaagcagtacgccatcctgcagagaaagaccagcaccaccggcctgaccaaggagaccctgggcaaggtgaagcagctgaaggacgccgccgagaagctggccggcgacaccgaggccaagatcagaagaatcaccggctgcttccagaacagcgccagatag

SEQ ID NO: 306865 - DNA, 5172 bp, Artificial Sequence
  derived and/or modified sequence
atgcagttccaacttactctgtttcttcatctcggctggctatcttacagcaaggctcaggatgattgtaatagaggcgcctgccaccccacgaccggagacctcctggttgggcgcaatactcaacttatggcaagttcgacatgcggcttgtccagggcacagaagtattgtattctttcctatcttgaaggagagcaaaaatgctttatatgcgactccaggtttccctacgatccatacgatcagcctaactcccataccattgagaatgtaatcgtgagttttgagcctgaccgcgagaagaaatggtggcagtctgaaaacggtctcgatcacgtgtcaatcagattggatctggaggcactctttcggttttcccacctcatcctaacttttaaaacatttagacctgcagccatgctcgtggagagaagtacggactatggacataactggaaggtatttaaatactttgcaaaggattgtgcaactagcttcccaaacattacctcaggccaggctcagggggtgggcgacatcgtgtgtgacagcaaatactctgatattgaaccttctacaggaggtgaagttgtgctgaaggtgcttgacccttccttcgaaatagagaacccttacagtccatacattcaggacttagtgacactcactaacctgaggatcaattttaccaagcttcacaccctgggcgatgctttgctggggcgtcggcaaaacgactccctcgataagtactactatgctctttatgaaatgatcgtgcgcggcagctgcttctgtaatggccacgccagtgaatgccgccctatgcaaaagatgagaggtgatgtcttttcacctcccgggatggtgcacggacagtgtgtgtgtcagcataatacagacggccctaactgtgagagatgcaaggacttctttcaggatgccccttggcgtcccgccgcagacctacaggacaatgcttgtcggagttgctcatgtaactcacactcatcccggtgccattttgacatgaccacctatttggcaagcggcggacttagtggcggggtttgtgaagattgtcagcataataccgagggacagcattgcgaccgatgcaggccccttttttatcgcgatcccttaaagaccatttctgacccctatgcctgcattccttgtgagtgtgaccccgacggcaccatcagcgggggaatatgcgtttctcattctgacccggccttgggttcagtggcaggccagtgtctgtgcaaagagaatgtggagggggcaaaatgcgaccagtgtaaaccaaatcactatgggctgagcgcaacggacccattaggttgccaaccatgtgattgtaatcctttggggtccctgcccttcctgacatgtgacgtggacacgggccagtgcctttgcctcagctacgtgaccggggctcactgtgaggaatgtaccgttggatactggggattgggaaatcatttacatgggtgctctccttgtgattgcgacattggtggagcatactcaaacgtctgtagcccaaaaaatgggcagtgtgagtgccgccctcacgtcacaggccggtcttgcagcgagccagcaccgggctacttctttgcccccctgaatttttacctctacgaagccgaggaggccacaacactgcagggccttgcacctcttgggtccgagacattcggacaaagcccagccgtccacgtcgtgctcggggaaccagttccaggaaatcctgttacctggactggacccgggttcgcgcgcgtcctgccaggtgcgggccttcggttcgccgtgaacaatatcccgtttcccgtcgacttcaccatagccatacattatgaaactcaatcagcagccgattggaccgtccaaatagtggtcaacccaccaggtggatcagaacactgcatacctaaaactctccagagcaaaccacagagcttcgctctgccagctgcgactaggatcatgttacttcctactcccatctgcctggaaccagatgtgcagtactcaattgatgtgtattttagccagccactccagggagagtctcatgcacactcacacgtattagttgattccctgggattgattcctcagattaacagcttggaaaacttctgctccaaacaagacttagatgagtaccagctccacaattgcgtggagattgccagcgctatgggcccgcaggtcttaccaggcgcatgtgaaagactcatcatttctatgagcgccaaactccacgacggtgcagtggcatgtaagtgccaccctcaaggaagcgtgggcagtagctgcagcaggctcggtggacagtgccagtgcaaacctctcgtcgtcggccggtgctgtgatagatgctcaactggctcttacgacctcggtcaccatgggtgccatccttgccattgccacccacagggatccaaagacacagtctgtgatcaggttacaggtcagtgcccgtgtcatggggaagtctccggcaggagatgtgatcgttgccttgctggttattttggatttccatcctgtcacccttgcccttgtaaccggtttgctgagctgtgtgatcccgagacaggttcctgctttaattgtggaggttttacaaccggccgaaattgcgagcgctgtattgatggttactatgggaatccttcaagtggacagccatgtaggccgtgcctctgtcctgatgatcctagctccaatcagtatttcgcccattcctgttaccagaatctttggtcttccgacgtgatttgtaattgcctccagggctataccgggacacagtgtggggaatgttctacagggttttacggcaacccccggatcagtggggctccatgccagccctgcgcttgcaacaataacatcgacgttaccgaccctgaatcctgtagccgtgttaccggtgagtgcttacggtgtcttcataatacacagggtgccaattgtcagctgtgtaagcccgggcactacgggtccgcccttaaccaaacatgccgccgttgtagctgtcatgccagtggagtgtcaccaatggaatgccctcctgggggcggagcatgcctgtgtgaccccgtcacaggcgcttgtccatgcttgcctaacgtgacgggcttagcttgcgatagatgcgctgacggctattggaacctggtgccaggtcgtggatgtcagtcctgcgactgtgacccacggacgtcccagtcttcccactgcgaccagttgacagggcagtgtccatgtaaattggggtacggcggtaagcgttgtagtgaatgtcaagaaaactactacggcgatccccctggccgctgcataccctgcgactgcaatcgggccggcacccagaaacctatttgcgatccggacacggggatgtgtagatgccgggaaggcgtaagcgggcagagatgcgatcggtgcgcccgtgggcactcccaggagtttcctacgtgcctgcaatgccatctgtgcttcgaccaatgggaccacacaatttcttcattgtccaaagcagttcagggacttatgcgtctggctgccaatatggaggacaaacgtgaaactctgccagtatgcgaggccgacttcaaggacctgcgggggaacgtctccgaaatcgagcgaattcttaagcatccagtgttcccatctggaaaattccttaaggttaaagactaccacgattcagtgcggaggcaaatcatgcagctgaatgagcagctcaaagccgtttacgagttccaggacctgaaagacaccatcgaaagggcgaagaacgaggcagatttgctgctcgaagacctgcaagaggagattgacttacaaagttcagtcctcaatgcctccatagcggactcttctgagaacatcaaaaagtactaccacatttcctcttccgccgaaaagaagatcaatgagacatctagcaccattaacacctcagccaatactaggaacgatctgctgaccatcctggacacactgacctctaaaggcaacttgtctctggagcggctgaagcaaatcaagattccagatatccagatactgaacgagaaggtctgcggcgaccccggaaacgtcccctgcgtgccccttccatgcggaggggctttgtgtaccggacggaagggacatcgcaagtgtcgtggcccaggctgtcacggctctctgaccctgtctactaacgcactccaaaaggcccaggaggccaagtctatcatccgcaatcttgataaacaggtcaggggcttgaagaaccagatcgagagcatcagtgagcaggcagaggtgagcaaaaataatgcactccagctgagagagaaactgggtaatatcaggaatcagtccgacagcgaagaagaaaatatcaacttatttattaaaaaagtcaagaatttcctccttgaggagaacgtgcctcccgaggatattgagaaggtggctaatggggtcttagacattcatttgcctataccctcacagaacttgactgacgagctggtcaaaattcagaagcacatgcagctgtgcgaagactaccggactgacgagaatcgcttgaatgaagaggccgatggtgctcagaagctgctggttaaagccaaagcggctgaaaaggctgccaacatcctgttgaacctcgataagactctgaatcagctccaacaggcccagataactcaaggtagagctaattctaccatcacacaactgacagccaacattacaaagatcaagaaaaatgtgctccaggcggagaaccagacgcgcgaaatgaagtccgaattagaactagccaagcagcgctccggactggaagatgggctgagtttgctgcagacgaagctgcagcgacatcaggaccacgctgttaacgccaaagtgcaggccgagagcgcccagcatcaagcaggcagcctcgagaaggagtttgttgaattgaagaagcaatatgcaatcctgcagcggaaaacatccacaacaggattaactaaagaaacgctgggcaaagttaagcagttaaaggacgctgcggagaagctggcaggtgatacagaggctaaaataagacgcataaccgggtgctttcagaacagcgctaggtag

SEQ ID NO: 306866 - DNA, 5172 bp, Artificial Sequence
  derived and/or modified sequence
atgcagttccagctgaccctcttcctgcacctgggctggctgagctacagcaaggcccaggatgactgcaacagaggagcctgccaccccaccaccggggacctgctggtgggcaggaacacccagctgatggccagcagcacctgtggcctgagccgggcccagaagtactgcatcctgagctacctggagggggagcagaagtgcttcatctgtgacagccgcttcccctatgacccctatgaccagcccaacagccacaccattgaaaatgtgattgtgtcctttgagccagaccgggagaagaagtggtggcagagtgaaaatggcctggaccacgtgtccatccggctggacctggaggccctcttccgcttcagccacctgatcctgaccttcaagaccttccggcctgctgccatgctggtggagaggagcacagattatggccacaactggaaggtgttcaagtactttgccaaggactgtgccaccagcttccccaacatcaccagcggccaggcccagggcgtgggggacatcgtgtgtgacagcaagtacagcgacatcgagcccagcactggaggagaggtggtgctgaaggtgctggaccccagctttgaaattgagaacccctacagcccctacatccaggacctggtgaccctgaccaacctgcgcatcaacttcaccaagctgcacaccctgggagatgccctgctgggccggcggcagaatgacagcctggacaagtactactatgccctgtatgagatgattgtgcggggcagctgcttctgcaatggccacgcctctgaatgtcggcccatgcagaagatgagaggagatgtgttcagccccccaggcatggtgcacggccagtgtgtgtgccagcacaacacagatggccccaactgtgagcgctgcaaggacttcttccaggatgccccctggaggcctgctgctgacctgcaggacaatgcctgccgcagctgcagctgcaacagccacagcagccgctgccactttgacatgaccacctacctggccagcggcggcctgtctggaggagtgtgtgaggactgccagcacaacacagagggccagcactgtgaccgctgccggcccctcttctacagagaccccctgaagaccatcagtgacccctatgcctgcatcccctgtgaatgtgaccctgatggcaccatcagcggcggcatctgtgtgagccacagcgaccctgccctgggctctgtggccggccagtgcctgtgcaaggaaaatgtggagggcgccaagtgtgaccagtgcaagcccaaccactacggcctgagcgccacagaccccctgggctgccagccctgtgactgcaaccccctgggcagcctgcccttcctgacctgtgatgtggacaccggccagtgcctgtgcctgtcctatgtgactggagcccactgtgaggagtgcaccgtgggctactggggcctgggcaaccacctgcacggctgcagcccctgtgactgtgacatcggcggggcctacagcaatgtgtgcagccccaagaatggccagtgtgagtgccggccccacgtgacaggccgcagctgcagcgagcccgcccctggctacttctttgcccccctgaacttctacctgtatgaagctgaggaggccaccaccctgcagggcctggcccccctgggcagcgagaccttcggccagagccctgctgtgcacgtggtgctgggggagcctgtgcccggcaaccctgtgacctggacaggccctggctttgcccgggtgctgcctggagctggcctgcgctttgctgtgaacaacatccccttccctgtggacttcaccatcgccatccactatgagacccagagcgctgctgactggacagtgcagatcgtggtgaaccccccaggcggcagcgagcactgcatccccaagaccctgcagagcaagccccagagctttgccctgcctgctgccacccgcatcatgctgctgcccacccccatctgcctggagccagatgtgcagtacagcattgatgtgtacttcagccagcccctgcagggcgagagccacgcccacagccacgtgctggtggacagcctgggcctcatcccccagatcaacagcctggagaacttctgcagcaagcaggacctggatgagtaccagctgcacaactgtgtggagatcgccagcgccatgggcccccaggtgctgcccggggcctgtgagcggctcatcatctccatgtctgccaagctgcatgatggagctgtggcctgcaagtgccacccccagggctctgtgggcagcagctgcagccggctgggcggccagtgccagtgcaagcccctggtggtgggccgctgctgtgaccgctgcagcacaggcagctatgacctgggccaccacggctgccacccctgccactgccacccccagggcagcaaggacacagtgtgtgaccaggtgacaggccagtgcccctgccacggggaggtgtctggaagaagatgtgaccgctgcctggccggctacttcggcttccccagctgccacccctgcccctgcaacagatttgctgagctgtgtgaccctgagaccggcagctgcttcaactgtggcggcttcaccactggaagaaactgtgagcgctgcattgatggctactacggcaaccccagcagcggccagccctgccggccctgcctgtgcccagatgaccccagcagcaaccagtactttgcccacagctgctaccagaacctgtggagcagtgatgtgatctgcaactgcctgcagggctacacaggcacccagtgtggagaatgttccacaggcttctacggcaacccccgcatcagcggggccccctgccagccctgtgcctgcaacaacaacattgatgtgacagatcctgagagctgcagccgggtgactggagagtgcctgcgctgcctgcacaacacccagggcgccaactgccagctgtgcaagccaggccactacggcagcgccctgaaccagacctgccgccgctgcagctgccacgccagcggcgtgagccccatggagtgccccccaggcggcggggcctgcctgtgtgaccctgtgactggagcctgcccctgcctgcccaacgtgacaggcctggcctgtgacagatgtgctgatggctactggaacctggtgcccggccggggctgccagagctgtgactgtgaccccaggaccagccagagcagccactgtgaccagctgaccggccagtgcccctgcaagctgggctatggaggcaagcgctgcagcgagtgccaggagaactactacggggaccccccaggccgctgcatcccctgtgactgcaacagagctggcacccagaagcccatctgtgaccctgacaccggcatgtgccgctgccgggagggcgtgtctggccagagatgtgacagatgtgcccggggccacagccaggagttccccacctgcctgcagtgccacctgtgctttgaccagtgggaccacaccatcagcagcctgagcaaggctgtgcagggcctgatgaggctggccgccaacatggaggacaagcgggagaccctgcctgtgtgtgaggccgacttcaaggacctgcggggaaatgtgtctgaaattgagcgcatcctgaagcaccctgtgttccccagcggcaagttcctgaaggtgaaggactaccatgacagcgtgcggcggcagatcatgcagctgaatgagcagctgaaggctgtgtatgagttccaggacctgaaggacaccatcgagcgggccaagaatgaggccgacctgctgctggaggacctgcaggaggagattgacctgcagagctctgtgctgaatgccagcattgctgacagcagcgagaacatcaagaagtactaccacatcagcagcagcgctgagaagaagatcaatgagaccagcagcaccatcaacaccagcgccaacaccagaaatgacctgctgaccatcctggacaccctgaccagcaagggcaacctgagcctggagcggctgaagcagatcaagatcccagacatccagatcctgaatgagaaggtgtgtggggaccctggaaatgtgccctgtgtgcccctgccctgtggcggggccctgtgcaccggcaggaagggccacaggaagtgccggggccctggctgccacggcagcctgaccctgagcaccaatgccctgcagaaggcccaggaggccaagagcatcatccggaacctggacaagcaggtgcggggcctgaagaaccagatcgagagcatcagcgagcaggccgaggtgtccaagaacaatgccctgcagctgcgggagaagctgggcaacatccggaaccagagcgacagcgaggaggagaacatcaacctcttcatcaagaaggtgaagaacttcctgctggaggagaatgtgcccccagaagatattgagaaggtggccaacggggtgctggacatccacctgcccatccccagccagaacctgacagatgagctggtgaagatccagaagcacatgcagctgtgtgaggactacagaacagatgaaaatcggctgaatgaggaggctgatggagcccagaagctgctggtgaaggccaaggctgctgagaaggccgccaacatcctgctgaacctggacaagaccctgaaccagctgcagcaggcccagatcacccagggccgggccaacagcaccatcacccagctgacagccaacatcaccaagatcaagaagaatgtgctgcaggccgagaaccagacccgggagatgaagtctgagctggagctggccaagcagaggagcggcctggaggatggcctgagcctgctgcagaccaagctgcagaggcaccaggaccatgctgtgaatgccaaggtgcaggccgagagcgcccagcaccaggccggcagcctggagaaggagtttgtggagctgaagaagcagtatgccatcctgcagaggaagaccagcaccaccggcctgaccaaggagaccctgggcaaggtgaagcagctgaaggatgctgctgagaagctggccggggacacagaggccaagatccgccgcatcaccggctgcttccagaacagcgccaggtag

SEQ ID NO: 306867 - DNA, 5172 bp, Artificial Sequence
  derived and/or modified sequence
atgcagttccagctgaccctgttcctgcacctgggctggctgagctacagcaaggctcaggacgattgcaatcgcggagcatgccaccccaccacaggcgatctgctggtgggcagaaacactcagttgatggctagtagcacttgtgggctctcgagggctcagaaatactgcatcttgagctatctcgagggagagcagaagtgcttcatttgcgattcaagattcccgtatgacccctacgaccaaccgaactcccatacgatcgagaatgttatagtatcctttgaacccgatagggaaaagaaatggtggcagtccgagaacggactagatcatgtcagtatcagactggatcttgaagcattgttccgcttttcccacctgattcttacattcaagactttccgcccagcggcgatgcttgtggagagatcaacagactacggccataattggaaggtgtttaaatactttgccaaagattgtgctacttcattcccaaacataaccagcggacaagctcaaggcgtgggggatattgtgtgtgacagtaaatacagcgatatcgagccttccactggaggagaggtggtcttgaaagtgttagacccctcctttgagatcgagaatccatacagtccgtatatccaggatctggttactttgactaacctacgcataaacttcacaaaactacataccttaggggacgcacttctgggccggaggcagaatgactctctcgacaagtactattacgctctgtacgagatgatcgtacgtggtagctgcttttgtaacggtcacgcctcagagtgtagaccaatgcagaagatgagaggggacgtgttcagcccccccggaatggtgcatggccagtgtgtttgtcagcacaatactgacgggcccaattgtgagaggtgcaaggatttctttcaggacgccccatggaggccagctgcagacctgcaagataatgcatgccggtcatgctcctgtaacagtcactcctcgaggtgtcactttgacatgactacttacctggcatctggggggctctccggaggagtctgcgaggactgtcagcataacacagaagggcagcattgtgatcgctgcagaccattattctaccgcgaccctttgaagacgatcagcgacccgtacgcatgtatcccatgcgagtgtgacccggacggaaccataagtggcgggatttgcgtcagtcattcggaccctgcactcgggagcgttgctggccaatgcctgtgtaaagagaacgtagagggcgctaagtgtgaccagtgcaaacccaaccactatggcctgagtgccactgatccgctgggctgtcagccgtgtgattgtaatcctctgggttcactgcctttcctgacctgcgatgtggacacggggcagtgtctctgcctgagttatgttacaggtgctcattgtgaagagtgcacagtcggatactggggcctcggaaatcatctgcacggctgcagcccctgtgactgtgacatcggcggcgcttattctaacgtgtgttcccctaagaatgggcagtgtgaatgtcgcccacacgtaacaggacgctcatgtagcgaacctgcaccaggatacttctttgcccccctgaacttttacctatacgaagcagaggaagcgaccacgctgcaggggcttgcgcctttggggagtgaaactttcgggcagtcccccgccgtacatgtcgtacttggcgagccagtccccgggaatcccgttacatggacgggtcccggcttcgctcgggttttacccggagcaggcctgaggtttgccgttaataacatcccatttccggtggacttcacaattgcgatacattacgaaactcagtctgccgcagattggactgtgcagatcgtagttaacccgccagggggctcagaacactgtattccgaaaacactgcagtcaaaaccacaaagcttcgcactgccggcagcgactcggattatgctgcttccaacccccatctgtttagagcccgatgtgcagtactccatcgacgtttatttttctcagccgttacaaggagagtctcacgcacattcccacgttttggtcgattcactcggtctgatccctcagattaactccctcgagaacttctgttcaaagcaagacctggacgaataccagttgcataactgtgtggagattgccagcgcaatgggaccccaggtcctgccaggcgcctgcgagagactgatcatatctatgtccgccaagctgcacgatggcgccgtcgcatgtaaatgtcaccctcagggctcagttggttcttcatgttcgcggctgggcgggcagtgccaatgtaaacccctggtggtaggcaggtgttgtgacagatgctccactggttcctatgacctcggacaccacgggtgccacccatgccactgtcacccgcagggtagtaaggatacagtctgcgaccaggtcacggggcagtgtccttgtcatggcgaggtatcaggaagacgctgcgacagatgcctggcagggtactttggctttccctcttgccacccatgtccttgtaatcgctttgctgagctgtgcgaccctgagaccggatcttgttttaattgtggcgggttcaccactggtaggaattgtgaaagatgtatcgatggctactacggaaacccgagctccggacaaccatgtagaccatgtttgtgtccagacgaccccagttccaaccagtacttcgctcacagctgctatcagaatctctggtcaagcgacgtcatttgcaattgtctgcagggctacacggggacgcagtgcggcgaatgcagtaccggattctacggaaatcctcgcatctccggcgccccttgtcagccttgtgcctgcaataataatattgatgtcactgacccggagtcctgttccagagtgaccggagagtgcctccgttgcctgcataatacccagggagccaactgtcagctgtgcaaaccaggacactacggatctgccctgaaccagacctgcagaaggtgcagctgccatgccagtggtgtgtcccccatggagtgtccccctggaggaggagcctgcttgtgcgatccagtgactggcgcttgcccatgtttgcctaacgttacggggctcgcctgcgatagatgtgcggatggctattggaatctggtaccagggcggggatgccagtcctgtgattgcgatccccgaacatctcagtctagtcattgcgatcaactaaccggacagtgtccatgtaagctgggatacgggggaaaaagatgctctgagtgccaagaaaactattatggggaccctcctggaagatgcattccatgtgactgtaatcgggctggcactcaaaaaccaatctgcgatcccgataccggaatgtgtcgctgcagagagggggtgtccgggcagcggtgcgataggtgtgcaaggggacactcccaggagttcccgacatgtctgcagtgtcacctgtgcttcgaccagtgggatcatactatcagtagccttagtaaagccgtccagggactgatgaggctggccgctaatatggaggacaaaagagagaccttaccggtgtgtgaagcagacttcaaagatcttcgaggaaatgtgtccgagatagaacgtatcctcaagcacccagtttttccatccggcaaattcctgaaagttaaagattaccatgactccgtacgtcgccagatcatgcagttgaacgagcagctaaaggctgtctacgaattccaggacctcaaagatacaattgagagggcgaaaaatgaggcggatctcctcctggaggacctccaggaagaaattgacctccagagtagtgtcctgaatgcttctatcgcagacagtagcgaaaacattaaaaaatactaccacatctcgagttctgccgagaagaaaataaacgagacatcatctaccatcaatacttcggctaacactagaaatgacctgctgacaatcctcgacactttgacttctaaggggaacctgtccctggaaagactgaaacaaattaagattcctgatattcagattctcaatgaaaaggtgtgcggagatccaggtaacgttccgtgtgtgccgctgccctgcggaggggctctgtgcaccggtcgcaaagggcaccgtaaatgccgaggtcctgggtgtcatgggagcctgacactgtctaccaacgcgctgcagaaggctcaggaggccaaatccattattaggaatcttgacaaacaggtgagggggctgaagaaccagattgagtcgattagcgagcaggcagaagtgtccaagaacaacgctctgcagctcagggaaaagctgggaaacattagaaaccagtctgattccgaggaggaaaatattaacctgtttatcaagaaagtgaagaattttcttctggaagagaatgtgcctccggaggacatcgagaaagttgccaatggtgtattggatatacacctgcccattcccagtcagaacctgacagacgagttggtgaaaattcagaagcacatgcagctctgtgaagactaccggacagacgagaatagactcaatgaggaagcagatggagcccagaagctcctggtgaaagcaaaagccgctgaaaaagcagcaaacatactcctcaacctggacaaaactctgaaccaacttcagcaggctcagattacccaggggcgtgcaaacagtacaattacacaactaacggctaacatcacaaagatcaagaagaacgttcttcaggccgagaaccaaactcgagagatgaagtcagaactggagctggccaagcaacggagcggcctcgaggacgggctgtccctgctccagaccaaactgcagagacaccaagatcatgctgtgaacgctaaggtccaggccgaaagtgcccaacatcaggctggcagtctggaaaaagagtttgtggaattgaagaagcagtatgccatcctgcaaaggaagacatcaaccacaggtctgactaaggaaaccctgggcaaggttaagcaattaaaggatgccgcagaaaagttggccggcgacactgaagccaagatacggcgcataactggctgcttccaaaactctgccagatag

SEQ ID NO: 306868 - DNA, 5256 bp, Artificial Sequence
  derived and/or modified sequence
cacatgccccgtttgctgcctgaacctctccacaaagactcccagatcctgtagaattgaatttaatcatctcctgacaaaagaatgcaatttcaactgaccctttttttgcaccttgggtggctcagttactcaaaagctcaagatgactgcaacaggggtgcctgtcatcccaccactggtgatctcctggtgggcaggaacacgcagcttatggcttcttctacctgtgggctgagcagagcccagaaatactgcatcctcagttacctggagggggaacaaaaatgcttcatctgtgactctagatttccatatgatccgtatgaccaacccaacagccacaccattgagaatgtcattgtaagttttgaaccagacagagaaaagaaatggtggcaatctgaaaatggtcttgatcatgtcagcatcagactggacttagaggcattatttcggttcagccaccttatcctgacctttaagacttttcggcctgctgcaatgttagttgaacgttccacagactatggacacaactggaaagtgttcaaatattttgcaaaagactgtgccacttcctttcctaacatcacatctggccaggcccagggagtgggagacattgtttgtgactccaaatactcggatattgaaccctcaacaggtggagaggttgttttaaaagttttggatcccagttttgaaattgaaaacccttatagcccctacatccaagaccttgtgacattgacaaacctgaggataaactttaccaagctccacacccttggggatgctttgcttggaaggaggcaaaatgattcccttgataaatactactatgctctgtacgagatgattgttcggggaagctgcttttgcaatggccatgctagcgaatgtcgccctatgcagaagatgcggggagatgttttcagccctcctggaatggttcacggtcagtgtgtgtgtcagcacaatacagatggtccgaactgtgagagatgcaaggacttcttccaggatgctccttggaggccagctgcagacctccaggacaacgcttgcagatcgtgcagctgtaatagccactccagccgctgtcactttgacatgactacgtacctggcaagcggtggcctcagcgggggcgtgtgtgaagactgccagcacaacactgaggggcagcactgcgaccgctgcagacccctcttctacagggacccgctcaagaccatctcagatccctacgcgtgcattccttgtgaatgtgaccccgatgggaccatatctggtggcatttgtgtgagccactctgatcctgccttagggtctgtggccggccagtgcctttgtaaagagaacgtggaaggagccaaatgcgaccagtgcaaacccaaccactacggactaagcgccaccgaccccctgggctgccagccctgcgactgtaacccccttgggagtctgccattcttgacctgtgatgtggatacaggccaatgcttgtgcctgtcatatgtcaccggagcacactgcgaagaatgcactgttggatactggggcctgggaaatcatctccatgggtgttctccctgtgactgtgatattggaggtgcttattctaacgtgtgctcacccaagaatgggcagtgtgaatgccgcccacatgtcactggccgtagctgctctgaaccagcccctggctacttctttgctcctttgaatttctatctctacgaggcagaggaagccacaacactccaaggactggcgcctttgggctcggagacgtttggccagagtcctgctgttcacgttgttttaggagagccagttcctgggaaccctgttacatggactggacctggatttgccagggttctccctggggctggcttgagatttgctgtcaacaacattccctttcctgtggacttcaccattgccattcactatgaaacccagtctgcagctgactggactgtccagattgtggtgaacccccctggagggagtgagcactgcatacccaagactctacagtcaaagcctcagtcttttgccttaccagcggctacgagaatcatgctgcttcccacacccatctgtttagaaccagatgtacaatattccatagatgtctatttttctcagcctttgcaaggagagtcccacgctcattcacatgtcctggtggactctcttggccttattccccaaatcaattcattggagaatttctgcagcaagcaggacttagatgagtatcagcttcacaactgtgttgaaattgcctcagcaatgggacctcaagtgctcccgggtgcctgtgaaaggctgatcatcagcatgtctgccaagctgcatgatggggctgtggcctgcaagtgtcacccccagggctcagtcggatccagctgcagccgacttggaggccagtgccagtgtaaacctcttgtggtcgggcgctgctgtgacaggtgctcaactggaagctatgatttggggcatcacggctgtcacccatgtcactgccatcctcaaggatcaaaggacactgtatgtgaccaagtaacaggacagtgcccctgccatggagaggtgtctggccgccgctgtgatcgctgcctggcaggctactttggatttcccagctgccacccttgcccttgtaataggtttgctgaactttgtgatcctgagacagggtcatgcttcaattgtggaggctttacaactggcagaaactgtgaaaggtgtattgatggttactatggaaatccttcttcaggacagccctgtcgtccttgcctgtgtccagatgatccctcaagcaatcagtattttgcccattcctgttatcagaatctgtggagctcagatgtaatctgcaattgtcttcaaggttatacgggtactcagtgtggagaatgctctactggtttctatggaaatccaagaatttcaggagcaccttgccaaccatgtgcctgcaacaacaacatagatgtaaccgatccagagtcctgcagccgggtaacaggggagtgccttcgatgtttgcacaacactcagggcgcaaactgccagctctgcaaaccaggtcactatggatcagccctcaatcagacctgcagaagatgctcctgccatgcttccggcgtgagtcccatggagtgtccccctggtgggggagcttgcctctgtgaccctgtcactggtgcatgtccttgtctgccgaatgtcacaggcctggcctgtgaccgttgtgctgatggatactggaatctggtccctggcagaggatgtcagtcatgtgactgtgaccctaggacctctcaaagtagccactgtgaccagcttacaggccagtgtccgtgtaaattaggttacggcgggaaacgttgcagtgagtgccaggaaaattattatggtgatccacctgggcgatgcattccatgtgattgtaacagggcaggtacccagaagcccatctgtgatccagacacaggcatgtgccgctgccgggagggtgtcagcggccagagatgtgatcgctgtgcccggggacacagccaggaattccctacttgtcttcaatgtcacttgtgctttgatcagtgggaccacaccatttcttccctctccaaagcggtgcaagggttaatgagactggctgctaacatggaagataaaagagagaccctgcctgtctgtgaggcagacttcaaagacctcagagggaacgtgtctgaaatagaaaggattttgaaacatcctgttttcccatctgggaaattcttaaaagtcaaggattatcatgactctgttagaagacaaatcatgcagctaaatgaacaactgaaagcagtgtatgaatttcaagatctgaaagatacaatagaaagagcaaagaatgaagcagacctcttacttgaagaccttcaggaagaaattgatttgcaatccagtgtccttaatgcaagcattgcggactcctcagaaaacatcaagaaatattatcacatatcatcatctgctgaaaagaaaattaatgaaactagttccaccattaatacctctgcaaatacaaggaatgacttacttaccatcttagatacactaacctcaaaaggaaacttgtcattggaaagattaaagcagattaagataccagatatccaaatattgaatgaaaaggtgtgcggagatccaggaaatgtgccatgtgtgcccttgccctgtggcggtgctctctgcacgggccggaaggggcacaggaagtgtaggggtcccggctgtcacggctccctgaccctctcaacgaatgccctccaaaaagcccaggaagcaaaatccattattcgtaatttggacaaacaggttcgtgggttgaaaaatcagatcgaaagtataagtgaacaggcagaagtctccaaaaacaatgccttacagctgagggaaaaactgggaaatataagaaaccaaagtgactctgaagaagaaaacatcaatcttttcatcaaaaaagtgaaaaactttttgttagaggaaaacgtgcctccagaagacatcgagaaggttgcgaatggtgtgcttgacattcacctaccaattccatcccaaaatctaaccgatgaacttgtcaaaatacagaaacatatgcaactctgtgaggattacaggacagatgaaaacaggttaaatgaagaagcagatggagcccaaaagcttttggtgaaggccaaagcagctgagaaagcagcaaatattctattaaatcttgacaaaacattgaaccagttacaacaagctcaaatcactcaaggacgggcaaactctaccattacacagctgactgccaatataacaaaaataaaaaagaatgtgctgcaggctgaaaatcaaaccagggaaatgaagagtgagctggagttagcaaagcagcgatcagggctggaggatggactttccctgctgcagaccaagttgcaaaggcatcaagaccacgctgtcaatgcgaaagttcaggctgaatctgcccaacaccaggctgggagtcttgagaaggaatttgttgagctgaaaaaacaatatgctattctccaacgtaagacaagcactacaggactaacaaaggagacattaggaaaagttaaacagctaaaagatgcggcagaaaaattggctggagatacagaggccaagataagaagaataacaggctgttttcagaactcagcaagatag

SEQ ID NO: 306869 - RNA, 5172 nt, Artificial Sequence
  derived and/or modified sequence
augcaguuucagcuuacucuguuucugcaccuuggcuggcugaguuauagcaaagcccaagacgauugcaaucggggugcgugccauccaacuacaggagauuuacuugucggucguaacacucagcuuauggcaucgucaacuuguggucuuucaagagcucagaaauauuguauccugucuuaccuggagggggaacaaaaguguuucauuugcgacucccgcuuuccauaugauccguacgaccaaccgaacagucacaccauugaaaaugucaucguuagcuucgagccugauagagaaaaaaagugguggcagucagagaacggucuggaccaugugaguaucagacucgaucucgaggcccuguuccgcuuuucccaccuaauacucaccuucaaaacauuucggccggcugcuaugcuuguggaacggagcacagauuauggccacaacuggaagguuuucaaguauuuugccaaagacugcgcuacaucuuucccuaacaucacaagcggacaggcucaagguguaggagauaucguuugcgacucuaaguauucagauaucgagccuagcaccgggggagaggugguucugaagguccuggaucccagcuuugagaucgaaaacccuuauagccccuauauccaagaccuggugaccuugacaaaccuacgcauaaacuuuaccaaacuucacacucucggggaugcacuuuuggguagaaggcagaaugacagucuggauaaguauuacuaugcuuuauaugaaaugaucgugcgggggucuuguuuuugcaacggccacgcuucugagugcaggccaaugcaaaaaaugaggggcgauguguucucucccccagguauggugcacggucaguguguuugucaacauaauaccgacggaccuaauugugagagguguaaagacuucuuucaggaugccccauggaggccagcugcugaccuccaggauaacgcgugccgcuccuguuccuguaauucacauagcucccgcugccacuucgacaugaccacuuaccuggccagcggagguuuaucuggcggcgucugugaagauugccagcauaacacagaaggucagcacugcgacagaugccggccucuuuucuaccgcgacccauugaaaacaaucucagacccguacgcgugcauucccugcgagugugacccagauggcacuauuuccggggggaucugcgugucccacuccgacccagcacuuggcuccgucgccggucagugucugugcaaggagaacgucgaaggggcaaagugcgaucagugcaaaccuaaccacuacgggcugucugcuaccgauccauugggaugccagccuugcgacugcaacccucugggcucacuccccuuucucacuugugauguggauaccgggcaguguuugugucugucuuaugucacaggcgcgcacugcgaagagugcaccguuggguauugggggcuuggcaaucaccuucacggauguucuccaugcgauugcgauauugggggcgcguacucuaacgucuguaguccaaagaacggacagugugaaugccguccacaugugacuggaagauccugcagcgagccagccccuggguauuucuucgcaccacucaacuuuuaucuauacgaagcagaggaggcaacuacucugcagggguuggcaccgcuggggagugagacauucggccaguccccugcuguucacgugguccugggugagccugugccugggaacccugucacauggacaggaccuggauuugcuagagugcuuccaggagcuggccugcgcuuugccguuaauaauauaccuuuuccaguggacuuuaccaucgcaauccauuaugagacccagagcgccgccgacuggaccgugcaaaucguugugaacccacccggaggaagugagcacugcauaccaaaaacucuucaguccaaaccccagagcuucgcucugcccgcugccaccagaaucaugcucuuaccaacaccgauuugccuggagccugauguccaguauucaaucgacgucuacuuuucucaaccacugcagggagaaagucaugcucauagccacgugcuugucgauucacuaggacuuauuccccagauuaacuccuuggagaauuuuugcucaaagcaggaucuugaugaauaccagcugcacaauugcguggagaucgcuuccgccaugggcccgcaggugcucccuggugcaugugagcguuuaauuaucuccaugucugcuaagcuucacgauggggcaguggcuugcaagugucacccgcagggcucaguggggucauccugcuccaggcucgggggucagugucagugcaaaccgcuggugguggggcgguguugugaccggugcaguaccggcaguuacgaucuaggccaucacgguugccacccuugucacugucauccacaagggagcaaggacacagugugcgaucaagucaccggucaaugucccugccacggcgaagugucaggaagacgcugugacagaugccucgcagguuacuucggauuucccucaugccaccccugccccuguaaucgguucgccgaacuaugugaucccgaaacaggcucauguuucaacuguggaggguucaccaccggacggaauugugagagaugcaucgacggcuacuacgggaaucccuccagcgggcagccuugccggccuugucuguguccugacgacccaucuagcaaucaauacuuugcccacaguuguuaccagaaccuguggagcuccgaugucauuugcaacugucuucaggguuacaccggcacacaauguggugagugcuccacugguuuuuauggaaacccccgaaucucuggcgccccuugccagccuugcgcuuguaauaauaauauugacgucacugacccagaaucuugcuccagaguuacuggcgagugucugaggugccuacacaacacccagggagcaaauugccagcuguguaagccgggucacuacgguagcgcucugaaucagacuuguagacgauguucgugucaugccucuggcguguccccuauggaauguccaccuggcggcggugcuugccugugugauccaguuacuggagcuugcccuugccuuccaaacguaacagggcuggcgugugaccgcugugcagauggguacuggaauuuaguaccagggaggggaugucaaagcugugacugcgaccccagaacuagccagagcagccacugugaucaacuaaccggccagugcccuugcaagcugggguacgggggcaagcggugcagcgaaugccaagaaaacuacuauggagacccucccgggcgguguauuccgugcgacuguaaucgcgcagguacucagaagcccauuugcgacccugacacaggcaugugccgaugucgcgaagguguuaguggucaacgcugcgauagaugcgcccgugggcauucgcaggaauucccuaccugccuccaaugucaccuguguuuugaccagugggaucauacaauaucuagucugucuaaggcaguccaggggcugaugagacucgcggcgaauauggaggauaaaagagaaacccugccagugugugaggcagauuucaaggaucugagaggcaaugugucugaaauugaacgcauccucaagcacccagucuuucccaguggaaaauuuuuaaaaguuaaggauuaccacgauagcgugcgccgucagauaaugcaguugaaugagcagcuaaaggccgucuaugaauuucaagaucucaaggacaccaucgaaagagccaaaaacgaggccgaucugcugcuugaagaucuccaggaagaaauagaccugcagucauccguucuuaaugcauccauugcugacagcucggaaaacauuaagaaguacuaccauauaucuaguucugccgagaaaaagauuaaugagacgaguagcaccauuaacaccagcgcuaauacaagaaacgauuuguugacuaucuuggauacccucacgucaaagggaaaucucucccucgagagauugaaacagaucaagauaccugacauccagauccucaacgagaaaguguguggagaccccggaaaugugcccugugucccacuacccugcggaggcgcccuguguaccggucgcaaggggcaccgaaagugccgugggcccggaugccaugguagccuuacacugagcacaaacgcccuccagaaggcccaggaggcaaaguccauuauccguaaccucgacaagcagguuagagggcucaagaaccagauagagucuaucagcgagcaggcggaaguuaguaagaacaacgcgcuccaacugagagagaaacugggaaacauaagaaaccaaucugauagcgaggaagagaauaucaaccuguuuaucaaaaaggugaagaauuuucuccuagaggagaacgucccgccagaggauauugagaaggucgccaauggggugcucgacauccaucugccaauacccucccagaauuugacagacgaguuagugaagauccagaaacacaugcagcugugcgaggacuauagaacagaugagaacaggcugaacgaggaggccgauggagcucagaagcuccucgugaaggccaaggcugcggagaaggcugcuaauauccuucugaaccuugauaagacgcugaaccagcuccaacaggcccaaauuacucagggcagagcaaauucaacaaucacccagcucaccgccaauauuaccaagauaaaaaaaaacguguuacaggccgagaaccagacucgcgaaaugaaaagcgaauuggagcucgccaagcaacgcucuggccucgaggauggccucucccugcuccagacaaaguuacagcggcaucaagaccaugccguuaaugcuaaggugcaggcagaaucugcucaacaccaagccggcaguuuagagaaggaguucgucgagcugaaaaagcaguacgcgauucugcagagaaaaacaaguacaaccggacugacuaaggagacacucggaaagguuaagcaauugaaggacgcugcugaaaagcuggccggcgacacugaagcuaaaaucaggaggauuacaggcuguuuccaaaauagcgcuagguag

SEQ ID NO: 306870 - RNA, 5172 nt, Artificial Sequence
  derived and/or modified sequence
augcaguuucagcuuacucuguuucugcaccuuggcuggcugaguuauagcaaagcccaagacgauugcaaucggggugcgugccauccaacuacaggagauuuacuugucggucguaacacucagcuuauggcaucgucaacuuguggucuuucaagagcucagaaauauuguauccugucuuaccuggagggggaacaaaaguguuucauuugcgacucccgcuuuccauaugauccguacgaccaaccgaacagucacaccauugaaaaugucaucguuagcuucgagccugauagagagaaaaaaugguggcaaucagagaauggccuggaccacgugucuauucgucucgaucuugaggcucuguuucgguucucacaccugauccugacuuuuaagaccuuucggcccgcagcaaugcuugucgagcguucuacagacuauggccacaacuggaagguuuuuaaauacuucgcgaaagacugcgcgacuagcuucccaaacauaacuucuggacaggcacagggcguuggagauaucguuugugauuccaaguauucugacaucgaaccaucuacaggaggcgagguugugcugaagguuuuagauccaagcuuugagauugagaauccuuauucgccuuauauucaagaccuugugacacugacaaacuugcgaauuaauuuuacuaaacuucacacccugggcgaugcacugcuuggccgcaggcaaaacgauucucuugauaaguacuacuacgcccuuuaugaaaugaucguccgggguucgugcuucuguaauggccaugcuagugagugccgcccuaugcagaaaaugagaggcgacguguuuuccccucccggaauggugcaugggcagugcgugugccagcacaacacagacgggcccaacugugagagguguaaggacuuuuuucaggaugccccauggcgaccggcagcagaucuccaggauaacgcaugcagaaguugcagcuguaauucacauuccucucggugccauuucgauaugacuaccuaucucgccuccggcgggcuaagcggcggugugugcgaggauugucagcacaauacagaaggacaacacugugacagauguagacccuuauuuuauagggaucccuuaaagacuaucagcgaccccuacgcguguauacccugugaaugcgauccugauggcaccaucucggguggcaucugugugagccauagcgaccccgccuuggguucuguugcaggacagugucugugcaaggaaaauguugaaggagccaagugugaucaauguaaacccaaccacuacggacugucagcaacugacccgcuaggaugccagcccugugauuguaauccucuagguucucugccuuuccugacgugcgacguggauacuggacaaugccucugccugaguuacgucacuggcgcacacugcgaggaaugcaccguggguuauuggggacucggcaaucaccugcaugguugcucaccuugugacugcgacaucggcggugcuuauucuaaugugugcuccccuaagaauggccagugcgaguguagaccucauguuacaggccgcaguugcagugagccugcacccggcuacuucuucgccccacuuaacuucuaccuguacgaggcugaagaagcuacaacucuucaggggcuggccccccuugguucugaaaccuucggucaaucucccgcuguucaugucguucugggagaacccgugcccgggaauccagugacuuggaccggcccuggauuugcacggguccugcccggugccggauuacgauucgcagugaauaacauccccuuccccguagacuucacaauugccauccauuacgagacucaauccgccgccgacuggaccgugcaaauuguugucaaucccccaggugggucugaacacuguauccccaagacauuacaaucgaaaccucaauccuucgcacugccggccgcuacuagaauaaugcugcugcccacacccauuugucuugagcccgaugugcaguauaguauugauguguauuuuagucagccucuucagggcgaaucacaugcucauagccauguauuagucgauucccuaggccugauaccucagaucaacagucuugagaauuuuugcaguaaacaggaucuggaugaguaucaguuacacaacugugucgagauugccucugccauggguccgcaggugcuuccuggagccugugaaagacucauuaucaguaugucugcuaagcuacacgauggagcuguugcauguaaaugucauccccagggcagcguugguaguaguuguuccagacucggugggcaaugucaauguaaacccuuagucguggggcgguguugugaucgaugcucaaccggcaguuacgauuuaggccaucauggaugccauccuugccauugucauccccagggguccaaagauacagugugugaccaagucaccggccaauguccaugucacggggagguaagugggcgacgcugugaccgaugucuggccggcuacuuuggguucccaaguugccauccuugucccugcaaccgguucgcagagcuaugcgauccugaaaccgggucaugcuuuaacuguggaggcuucacuacugggcggaauugcgaaagauguauagacggcuauuacgguaaucccagcucuggucaacccugucgcccuugucucugcccagaugauccaaguaguaaccaguacuuugcucacucuugcuaccagaaccugugguccucugacgugaucuguaacugucugcagggauacacaggaacccagugcggcgaguguucgacaggcuucuacggaaacccaagaauuagcggagcucccugccaaccgugugcaugcaauaacaacaucgacgugacugauccagaaucuugcuccagagugaccggugaaugucuuagguguuuacauaauacacagggcgcuaauugccagcuauguaagccaggacacuacggaucagccuugaaccaaacaugccgucggugcucuugccacgcgagcggagucuccccuauggagugucccccgggaggaggagccugccuaugcgacccgguaacaggugcuugccccugucuaccaaacgugaccggccucgcaugugaccggugugcugauggauacuggaaccuugugcccggaagaggcugucaguccugcgacugugauccccguacaagccagucuagccauugcgaucaacugacgggacaauguccuuguaaacucggcuauggcgggaagcgguguuccgaaugucaagagaacuauuacggagacccaccgggaagguguaucccuugcgauugcaaucgagcugggacgcagaaaccuauuugugacccagacacuggcauguguagauguagagaaggagugagcggacaacguugcgauaggugcgcucguggccacagucaagaauucccuaccugcuugcagugucaccuguguuuugaccagugggaucacaccauuagcagccugaguaaagcugugcagggcuugaugagguuagccgccaauauggaggacaaacgcgaaacccugcccgugugugaagcugauuuuaaggacuuacggggcaaugucucagagaucgaaagaauucuaaagcaccccguguuuccaucaggcaaauuccuaaaagugaaagacuaccacgauuccguccguaggcagaucaugcaauuaaaugaacagcugaaagccguauacgaguuccaggaucuuaaagauaccaucgagcgagccaagaacgaagcugacuuauugcuugaagauuuacaggaagaaauagaccuccaguccaguguucuuaaugcuucaaucgccgacaguucugaaaacauuaaaaaauauuaucauaucuccucaucugcagaaaaaaaaauuaacgaaacaaguuccacaauaaauacaucugcuaauacucgcaaugaccuacugaccaucuuggacacacugacaaguaagggcaacuuaucucucgaacgucuuaagcaaauuaagaucccagacauacagauccugaaugagaagguguguggggacccuggcaacguucccuguguaccucuacccugugguggggcccuauguaccgggcgcaagggacacaggaaaugucggggaccugguugccaugggucucucacccugaguaccaaugcgcugcagaaggcacaggaggcgaagucaauaauucguaaucuagauaagcaggugcgcggccuaaagaaccagauugaauccauuagcgagcaagcggagguuuccaaaaauaacgcacuucaauugcgggaaaaacuggggaauauuagaaaccagagcgacagugaggaagaaaacaucaauuuauuuauaaagaaaguuaaaaauuuucuguuggaggagaaugugccacccgaagauauugagaaaguggccaauggaguccuggauauacauuugcccauaccgucccagaaccugacagaugagcuggucaaaauccaaaagcacaugcagcuuugugaagacuacagaacagacgaaaaccggcuuaacgaagaagccgacggggcgcaaaagcuucugguuaaagcaaaggccgccgagaaagcugcgaacauccucuuaaaccuggauaaaacacucaaccaacugcaacaggcccagaucacccaagguagagcaaacaguacuauaacacaacuuaccgcaaacaucacaaaaauaaagaagaacguauugcaggccgaaaaccagacucgcgagaugaaaagcgaguuagaacuugcgaaacagcgaagcgggcucgaagacgggcuaucacugcuccagaccaaacugcaaagacaccaggaucacgcaguuaacgccaagguucaagccgaaagcgcccaacaccaggcaggcucguuggaaaaggaauucgucgaguuaaaaaaacaauaugcgauucuccagcgaaagaccucaacuacaggacugacaaaagaaacgcuggggaaagugaaacagcugaaagacgccgcugagaaauuggcaggcgacaccgaagcuaaaauaagacgcauuacagguuguuuucagaacuccgcacgcuag

SEQ ID NO: 306871 - protein, 893 aa, Artificial Sequence
  derived and/or modified sequence
VRVLIQAGALCWSLPELSQGEVGKGACPAEVGKHRDHLPSSDPVLMQAEASVVMCWVSSEDRSALWALVTFYGGDCQLTLNKKCTHLIVPEPKGEKYECALKRASIKIVTPDWVLDCVSEKTKKDEAFYHPRLIIYEEEEEEEEEEEEVENEEQDSQNEGSTDEKSSPASSQEGSPSGDQQFSPKSNTEKSKGELMFDDSSDSSPEKQERNLNWTPAEVPQLAAAKRRLPQGKEPGLINLCANVPPVPGNILPPEVRGNLMAAGQNLQSSERSEMIATWSPAVRTLRNITNNADIQQMNRPSNVAHILQTLSAPTKNLEQQVNHSQQGHTNANAVLFSQVKVTPETHMLQQQQQAQQQQQQHPVLHLQPQQIMQLQQQQQQQISQQPYPQQPPHPFSQQQQQQQQPPPSPQQHQLFGHDPAVEIPEEGFLLGCVFAIADYPEQMSDKQLLATWKRIIQAHGGTVDPTFTSRCTHLLCESQVSSAYAQAIRERKRCVTAHWLNTVLKKKKMVPPHRALHFPVAFPPGGKPCSQHIISVTGFVDSDRDDLKLMAYLAGAKYTGYLCRSNTVLICKEPTGLKYEKAKEWRIPCVNAQWLGDILLGNFEALRQIQYSRYTAFSLQDPFAPTQHLVLNLLDAWRVPLKVSAELLMSIRLPPKLKQNEVANVQPSSKRARIEDVPPPTKKLTPELTPFVLFTGFEPVQVQQYIKKLYILGGEVAESAQKCTHLIASKVTRTVKFLTAISVVKHIVTPEWLEECFRCQKFIDEQNYILRDAEAEVLFSFSLEESLKRAHVSPLFKAKYFYITPGICPSLSTMKAIVECAGGKVLSKQPSFRKLMEHKQNSSLSEIILISCENDLHLCREYFARGIDVHNAEFVLTGVLTQTLDYESYKFN

SEQ ID NO: 306872 - DNA, 2732 bp, Artificial Sequence
  derived and/or modified sequence
  misc_feature (940)..(940): n is a, c, g, or t
  misc_feature (2650)..(2650): n is a, c, g, or t
  misc_feature (2656)..(2656): n is a, c, g, or t
  misc_feature (2690)..(2690): n is a, c, g, or t
cgaaaatgaggaacaagattctcagaatgagggtagtacagatgagaagtcaagccctgccagctctcaagaagggtctccttcaggtgaccagcagttttcacctaaatccaacactgaaaaatctaaaggggaattaatgtttgatgattcttcagattcatcaccggaaaaacaggagagaaatttaaactggaccccggccgaagtcccacagttagctgcagcaaaacgcaggctgcctcagggaaaggagcctgggttgattaacttgtgtgccaatgtcccacccgtcccaggtaacattttgccccctgaggtccggggtaatttaatggctgctggacaaaacctccaaagttctgaaagatcagaaatgatagctacctggagtccagctgtacggacactgaggaatattactaataatgctgacattcagcagatgaaccggccatcaaatgtagcacatatcttacagactctttcagcacctacgaaaaatttagaacagcaggtgaatcacagccagcagggacatacaaatgccaatgcagtgctgtttagccaagtgaaagtgactccagagacacacatgctacagcagcagcagcaggcccagcagcagcagcagcagcacccggttttacaccttcagccccagcagataatgcagctccagcagcagcagcagcagcagatctctcagcaaccttacccccagcagccgccgcatccattttcacagcagcagcagcagcaacagcagccaccaccatcgcctcagcagcatcagctttttggacatgatccagcagtggagattccagaagaaggcttcttattgggatgtgtgtttgcaattgcggattatccagagcagatgtctgataagcaactgctggccacctggaaaaggataatccaggcacatggcggnactgttgacccaccttcacgagtcgatgcacgcaccttctctgtgagagtcaagtcagcagcgcgtattgcacaggcaataagagaaagaaagagatgtgttactgcacactggttaaacacagtcttaaagaagaagaaaatggtaccgccgcaccgagcccttcacttcccagtggccttcccaccaggaggaaagccatgttcacagcatattatttctgtgactggatttgttgatagtgacagagatgacctaaaattaatggcttatttggcaggtgccaaatatacgggttatctatgccgcagcaacacagtcctcatctgtaaagaaccaactggtttaaagtatgaaaaagccaaagagtggaggataccctgtgtcaacgcccagtggcttggcgacattcttctgggaaactttgaggcactgaggcagattcagtatagtcgctacacggcattcagtctgcaggatccatttgcccctacccagcatttagttttaaatcttttagatgcttggagagttcccttaaaagtgtctgcagagttgttgatgagtataagactacctcccaaactgaaacagaatgaagtagctaatgtccagccttcttcccaaagagccagaattgaagacgtaccacctcccactaaaaagctaactccagaattgaccccttttgtgcttttcactggattcgagcctgtccaggttcaacagtatattaagaagctctacattcttggtggagaggttgcggagtctgcacagaagtgcacacacctcattgccagcaaagtgactcgcaccctgaagttcctggcggcgatttctgtcgtgaagcacatagtgacgccagagtggctggaagaatgcttcaggtgtcagaagttcattgatgagcagaactacattctccgagatgctgaggcggaagtacttttctctttcagcttggaagaatccttaaaacgggcacacgtttctccactctttaaggcaaaatatttttacatcacacctggaatctgcccaagtctttccactatgaaggcaatcgtagagtgtgcaggaggaaaggtgttatccaagcagccatctttccggaagctcatggagcacaagcagaactcgagtttgtcggaaataattttaatatcctgtgaaaatgaccttcatttatgccgagaatattttgccagaggcatagatgttcacaatgcagagttcgttctgactggagtgctcactcaaacgctggactatgaatcatataagtttaactgatggcgtctaggctgccgtgcatgtcgactcctgcggtgcggggctggctgtctggctggcgaggagctgctgcgcttccttcacgtgctcttgttttccagctgctttcctgggggatcagactgtgaagcaggaagacagatataataaatatactgcatctttttaagatgtgcaattttattctgaggaaacataaattatgttttgtattatatgactttaagagcccacattaggttttatgattcatttgccaggtttttaaatgttttcacaaaactgttacgggacttcaactagaaataaaatggtgtaaataaagaccttgctatctctaaattatggatgttaaagatttgaaatgttttgtactttgattatttttatttctaaaactctgttttcttttanattganatcttgcccacattttaaataaatgtacttttgnacttaaaaaaaaaaaaaaaaaaaaaaaaaaaaaaaaaaaaaa

SEQ ID NO: 306873 - DNA, 3069 bp, Artificial Sequence
  derived and/or modified sequence
atgtttcgggaggtcaaatattatgctgtgggagacattgacccccaggtgatacagctgctgaaagcgggaaaggcaaaggaagtgagctacaatgcactggcctcccacatcatctccgaagacggtgataaccccgaggtgggggaggccagagaggtatttgacctgccagtggtgaaagtcagtagcgaagaccggtcagccttatgggcccttgtgaccttctacggcggagattgccagctcacacttaataagaagtgtacccacctgattgtgcccgagccgaagggagagaaatacgagtgcgcgttgaagcgcgctagcatcaaaatcgtgaccccggactgggtgctggactgtgtaagtgagaaaacaaaaaaagacgaagcgttctatcacccccggttgataatctatgaagaagaggaagaggaggaagaagaggaggaggaagttgagaacgaggagcaggatagccaaaatgagggatccacagatgagaagtcttcccccgccagctcccaagaagggtcaccctcgggtgaccaacagtttagtccaaaatcaaacacagagaaaagtaagggggaactaatgttcgacgattctagcgacagctcccccgagaaacaggaacgcaaccttaattggactccagccgaggtgccacagttggccgcagctaagagaagactccctcagggcaaagagcccgggctcattaacctgtgtgctaacgtgccacctgtgcccgggaacattttgccaccagaggtccggggaaatctcatggccgccggccaaaacctgcagagttctgagcgcagcgagatgattgctacatggtcaccggccgtgcgcacactccgtaatatcacaaacaatgcagatatccagcagatgaaccgcccaagtaacgtcgcacacatccttcaaactttaagcgctccaaccaagaacttagaacagcaggttaatcactcacaacagggacacactaatgcaaacgctgttctatttagccaggtgaaggtcacgccagagacgcacatgctacagcaacaacagcaagcacagcagcagcaacagcaacatcccgttctccacctccagccacagcagattatgcagctgcagcagcagcagcaacagcagattagtcagcagccctatccccagcagcccccccaccccttttcccagcagcagcagcagcaacagcaagcccacccccatcaattcagtcagcaacaactccaatttcctcaacagcagctgcacccccctcaacagctgcatcggccccaacagcaactgcagcctttccagcagcagcatgcactccagcagcagtttcatcagttgcaacaacaccagctccaacagcagcaactggcacagctgcagcagcagcactccctgctgcagcaacagcaacagcagcagatccagcagcaacagctgcaacgcatgcatcagcagcagcagcagcagcagatgcagagccagaccgctccccacctttctcagacgagccaagctctgcagcaccaggttccccctcagcagccaccacagcagcaacagcaacaacagccccctccttccccacagcaacaccagctgtttggacacgatcctgccgtagagatacctgaagaagggttcctgctgggatgcgtgttcgccattgccgactatccagagcagatgtccgacaagcagctgctcgccacctggaaacgcatcattcaagcacacggcgggacggtcgaccctactttcacttctcgttgcacgcatttactctgcgagagccaggtgagctcagcttacgcccaggccatcagggagcggaagagatgcgtgacagcccactggctcaataccgtgctgaagaagaagaagatggttcctcctcatcgggctctgcacttccccgtcgccttccccccaggtggcaagccgtgctcgcagcacattataagtgtgaccggatttgtagactcagatagagatgacttgaagttgatggcatatctggcaggcgctaaatatacaggatatctctgcagaagtaataccgtgctgatttgtaaagagccaaccggcctgaagtacgagaaggctaaggaatggcgtatcccttgcgtgaatgcacagtggcttggtgatattttactcggaaactttgaggccctgcgtcagatacagtacagtcggtacacagccttcagcctgcaggatccattcgctcccactcaacacttggttcttaatcttcttgacgcatggcgggtgcctttaaaagtgtccgcagagctgctgatgtccatccggcttccgccaaaattaaagcagaacgaagtagccaacgtgcagccctcttccaagcgagcccgcatcgaggacgtgcctcctcctactaagaaattgacgccagaactgaccccatttgttttgtttaccgggttcgagcctgtgcaggtgcagcagtatattaagaagctgtatattctcggcggagaggtagcagaatctgctcagaagtgcactcacttgattgcctcaaaggtcacacggactgtaaagtttctgaccgccatcagtgtagtgaaacacattgtcacccctgagtggctggaggagtgttttcggtgccagaagttcattgatgagcagaactatattctccgtgacgccgaggcggaagtgctcttttcattctctcttgaggagtccctaaaaagggcgcatgtgagtcctctcttcaaagccaagtacttctacatcactccaggcatttgtcccagcctcagcactatgaaggccattgtcgagtgtgccggcggcaaggtgctcagcaaacaaccttcttttaggaaactgatggagcacaaacaaaactccagtctgtctgaaatcatattgatctcatgcgagaacgacttgcacctctgtcgggagtatttcgccagagggattgacgtgcataacgctgaatttgtgctaacaggggtcctgacacagactctcgattatgagagctacaagtttaactag

SEQ ID NO: 306874 - DNA, 2682 bp, Artificial Sequence
  derived and/or modified sequence
gttcgcgtactcatccaggcaggggccctgtgttggagcctcccagaactgtcccagggtgaggttggcaaaggcgcctgcccagcggaggtcgggaagcacagagaccacttgcctagcagcgaccccgtcttaatgcaggcggaagccagcgtcgtgatgtgttgggtgtccagtgaggataggagcgcgctctgggctctggtcactttttatggcggcgattgccaacttaccctgaacaagaagtgcacacacctaattgtccctgaacctaaaggcgaaaaatacgagtgtgcgctcaaaagagctagcataaaaattgtgacgccagattgggtcctcgactgtgttagcgaaaaaacaaagaaagatgaagccttctatcaccccaggctgatcatttacgaggaagaagaggaagaagaagaagaggaggaagaggtcgaaaacgaggagcaggactcacagaatgagggatccacagacgaaaagtcaagtccggcctctagccaggaaggatcccccagcggtgatcagcagtttagccctaagagcaatacagagaaatccaaaggcgagctgatgtttgatgattcctcagactcaagccctgagaagcaggagaggaacttgaattggacaccagcagaggtaccacagcttgccgctgctaaacgcagactgccacagggcaaagaacctggtctgattaacctttgtgcaaatgtgccaccagtgcccggaaacatcctgcctcccgaagtccggggaaacctgatggccgccggccaaaacttgcaatctagcgagcgcagcgagatgatcgccacatggtcccccgctgtgagaacgctccggaatatcacgaataacgctgatatccagcaaatgaatagaccctccaacgtagcccacatactgcagaccctgtcagccccgactaagaacctggagcagcaggtgaatcactcacagcaggggcatacgaatgcaaacgcggtgctcttttcccaggtgaaggtcactcctgagactcacatgttgcagcaacagcagcaagcccaacagcagcaacagcagcatcctgtgcttcatttgcagccccagcagatcatgcagctgcaacagcagcaacagcagcaaatatcccaacagccctatcctcaacaaccaccacaccctttctcacagcaacagcaacagcagcagcagcccccaccatccccccagcagcatcagctttttggtcacgatccagcagtggaaatcccagaggagggttttctcctggggtgcgtctttgcaatcgcagattacccagagcagatgtccgacaaacagcttctggcaacatggaaaaggattattcaggctcatgggggaaccgtggatcccacattcacctcgcgatgtactcatttgctgtgcgagagccaggtttcctccgcatatgctcaggctatcagagaacgtaagcggtgtgtcaccgcccactggctgaatactgtgctgaagaagaagaaaatggtgccaccacaccgcgcgctgcatttccctgtggcatttccccctggcgggaaaccttgctctcaacacattattagtgtcactggcttcgtcgacagcgaccgggatgatttgaaactgatggcgtatctggccggagccaagtataccggttacctctgtcgcagcaacacagttttaatctgcaaggagcccacagggctgaagtatgagaaagccaaggagtggcgaataccctgtgtcaacgcacagtggctcggcgacattctactgggcaatttcgaagcactgaggcagattcagtactccaggtacacagcctttagtcttcaagaccctttcgcgcctactcagcacctggttctgaacctgttggatgcgtggcgtgtgccattaaaggtgtctgccgaactgttgatgagcatcagactgccgcctaaactgaagcagaatgaagtggcaaatgtgcaaccatcgtcaaaacgggcacgaatcgaagacgtgcctccccccaccaaaaaactcacacccgagttaactccatttgtgctgttcactgggtttgagcccgtccaggttcagcagtacattaagaagctgtatattcttggtggggaggtggcggagtccgcgcagaagtgcacacatttgatagctagcaaagtgacgcggaccgtaaagtttttgaccgcaatctctgttgtgaaacacattgtgacccccgaatggctggaagaatgtttccgctgccaaaagtttattgacgaacagaactatatcctacgggatgctgaggctgaagtgctgttctcgttcagtctggaggaaagcctcaagcgggctcacgtaagtccactgtttaaggcaaagtatttctacatcacacctggcatttgtccaagcctatcgaccatgaaagccatcgtcgaatgtgcaggcggaaaggtcctttccaaacagccttccttcaggaagctcatggaacataagcagaatagcagtctgagcgagataattttgatctcctgcgagaacgacctgcatttgtgccgcgaatacttcgctagaggtatcgacgtgcataacgccgagtttgtgttaactggagtgctgacccagaccctggactatgagagttacaaattcaactag

SEQ ID NO: 306875 - DNA, 3210 bp, Artificial Sequence
  derived and/or modified sequence
atgagcgaccaggcacccaaagtccccgaagagatgtttcgcgaagtgaaatactacgcagtcggagatatcgacccacaggtaatccagcttttgaaggctggcaaggcgaaggaagtatcctacaacgctttggccagccacatcattagcgaggacggtgacaatcctgaggtcggggaagcgagggaggtttttgatttgcccgtggtcaaaccaagctgggtcatcctgagcgttcagtgtggaacactgctgccagtaaacggattctcgccagagtcctgccagattttcttcggaatcacggcttgcctctcccaggtcagtagtgaggatcgcagcgctctgtgggcactggttactttttacggcggcgactgccagttgaccctgaataaaaagtgtacccaccttatcgtgcccgaaccaaaaggagagaagtatgaatgcgccctgaagcgcgcatctataaagatagtaacacccgattgggtcctcgattgtgtttccgaaaagactaagaaggatgaagcattttatcacccccgcctcattatttacgaagaggaggaggaagaagaggaggaggaggaggaggtcgagaacgaggagcaagactcccagaacgagggttcgaccgacgaaaagtcttcacccgcttcctctcaggagggatccccctctggagatcagcagttttccccaaagagcaacaccgagaagagtaaaggggaacttatgttcgatgatagttccgattcctcccccgaaaaacaggaacggaatctaaattggaccccagctgaagtgcctcagttggctgccgccaagcgacgcctgcctcagggcaaagaacccgggctgatcaacttgtgcgctaacgtgccccccgttccaggaaacatcctcccccctgaagtacggggcaaccttatggcggccgggcaaaatctgcaaagttctgagcgctccgagatgatcgccacgtggagtccagccgtccgcacgcttagaaatataacaaataacgctgacatccaacagatgaacaggccttccaacgtggcccacatcctgcagaccctttccgcacccacaaagaatttggagcagcaggtgaaccacagtcaacagggacatacaaacgccaatgccgtgctgttctcccaggtgaaggtgacacccgaaacacacatgttgcagcagcagcaacaagctcaacagcaacagcagcagcatcccgttcttcatctgcaacctcagcagataatgcagctgcagcaacagcagcagcaacagatctcccagcagccatatccccaacagccacctcacccgttctcacagcagcagcagcagcagcaacaggcacaccctcatcaattcagccagcagcagctccagtttccacagcaacagcttcaccccccccagcagcttcacaggcctcagcaacagctccagcccttccagcagcagcacgccctccagcagcaattccatcagctacaacagcaccagcttcagcagcaacagctggcgcagctccaacaacagcactcacttctgcagcagcagcagcagcaacagatccagcagcaacagttacagagaatgcaccagcagcaacaacagcaacaaatgcaaagccagacagccccgcacctttcgcaaacctcgcaggccctgcagcatcaggtgcccccacagcagccacctcagcagcagcagcagcaacagccccctcctagcccgcagcagcaccagctattcggacacgatccagcggtggagatccccgaagaagggtttcttctcgggtgtgtgttcgccatcgccgattaccccgaacagatgtcggataaacagctgctcgctacttggaagcggatcatccaggctcatggtggaacggtggaccccaccttcacctctcgctgtacacacctgctctgcgaatcacaggtgtccagtgcctatgcgcaggctatccgggagcgtaaaaggtgtgtcaccgcccactggttgaatactgtgttgaagaaaaagaagatggttccaccccaccgagctctgcactttcccgtcgcctttccccccggaggcaagccttgctcacagcatatcatcagtgtcactggatttgtggatagcgatcgcgacgatctgaaactgatggcctacttagctggcgccaaatacacaggttacctgtgtcggtccaatacagtgctcatctgcaaagaacccaccggtctgaagtacgagaaagctaaggaatggcgcattccctgcgtgaacgcacagtggcttggtgacatcctgctgggtaactttgaagccctgagacaaatacaatactccaggtacaccgcctttagcctgcaagatccattcgcccctactcaacatttagtgttaaacctgttggacgcatggagggtccccctcaaggttagcgccgaacttcttatgagtataaggcttccccctaaactcaagcagaacgaggtggctaacgtccagccgtcctctaagagggcccggatcgaagacgtcccacccccaaccaaaaaactcactcccgaactcaccccgttcgtactgttcaccggattcgaacctgttcaggtgcagcagtacatcaaaaaactatacatcttggggggagaggtggctgaatccgcccagaagtgtacacatttgatcgcgagcaaagtcacccggaccgtcaagtttctcacggctatttctgttgtgaagcacatcgtcactccagagtggcttgaagaatgcttccgatgtcagaaattcattgacgagcaaaactatatcctaagagacgctgaggctgaggtcctcttcagcttcagtttggaggagtcattaaagcgggctcacgttagtcctctgtttaaggccaagtatttttacattacccccggcatttgtccttcgctctccacaatgaaagccattgtcgaatgcgctggtggcaaggtgctgtcaaagcagccaagtttccgcaaactgatggagcacaagcaaaacagctcactctccgaaatcatcctgataagttgcgagaacgacctacacctgtgtcgggaatattttgctcgcggcattgatgtgcataatgcagaattcgtgctgaccggagtgttaacacaaaccttggattatgaaagttataaattcaattag

SEQ ID NO: 306876 - DNA, 3210 bp, Artificial Sequence
  derived and/or modified sequence
atgagcgaccaggcccccaaggtcccagaggaaatgttccgcgaagttaaatactatgcagtgggagacatagatccacaggtaattcagctcctcaaggccgggaaagccaaggaggtgagctataatgccttggcgagtcacattatcagtgaggacggagacaacccagaggtgggcgaagctcgcgaagtgtttgatctgcctgtggtgaagccctcctgggtgatcctctccgtgcagtgtggaacgctccttccagttaacggattctcccccgagtcctgtcagatctttttcggaataacggcatgtctcagccaggtgagctccgaggatagatcagccctgtgggctctggtgaccttttatggaggcgattgccagcttacgctcaataagaagtgtacccatctgatcgtaccggagcctaaaggagaaaaatacgagtgcgctttgaagagagccagcataaaaatcgtcacacccgattgggtgctggattgcgtttcagaaaagacaaagaaagatgaggcgttctaccaccccaggctgattatctacgaagaggaggaagaggaggaggaagaagaagaggaggtggaaaatgaagagcaggactctcaaaatgagggtagcacggatgaaaagtccagccctgcctcgtcacaggagggtagcccttccggggatcaacagtttagccctaagagcaacaccgaaaaaagcaaaggggaactaatgttcgacgattcctccgactcatcacctgagaaacaggagaggaacttgaactggaccccagctgaagtcccccaactggccgccgccaagaggcgattgccccaggggaaggaacccgggttgataaatctatgcgctaacgttccaccagtgccggggaatatcctgccgccagaggtcagaggaaatctaatggccgccggacaaaatctccagtccagcgagcgatcagagatgatcgccacctggagtccggcagtacggacactgaggaatattacaaataatgctgacatccaacaaatgaatcggccctctaacgtggcacacattcttcaaaccttgtccgcgcccaccaaaaatctagagcaacaggtcaatcatagtcaacaagggcacacgaacgcgaacgccgttcttttctcacaagtgaaagtgacacctgaaacccatatgttacaacaacagcagcaagctcagcagcagcagcagcagcacccggtcctccacctccaaccacagcaaataatgcagctgcagcaacagcagcagcagcagatctcacagcagccgtatcctcagcagccaccacatcctttcagccagcagcaacaacagcaacaacaggcacaccctcaccagttctcacagcagcagctgcagtttcctcaacagcagcttcatcccccgcaacagctgcatcgcccgcagcaacagttgcagcctttccagcagcagcatgcgctgcagcagcagttccatcaacttcagcagcatcagctccagcagcaacaactggcccagctgcaacaacagcacagtctgctccagcagcagcagcagcagcaaatacagcagcagcagctccagcggatgcaccagcagcaacagcaacagcaaatgcagtctcagaccgctccgcacctaagccagacctcacaggccctgcaacaccaggtgccacctcagcaaccacctcagcagcaacagcagcaacagcctccgccaagtcctcagcagcaccaactctttggtcacgacccagcagtggagattccggaagagggattcctgctgggctgtgtgttcgccatcgcagattatcctgaacaaatgagcgacaagcagctccttgctacctggaagaggattattcaagcccatggcggaacggttgacccaacatttacatctaggtgcacacacctgctctgtgagagccaggtttcaagtgcatatgcacaggccattcgtgagcggaagcgctgcgtcacagctcactggctaaatacggtgcttaaaaaaaagaagatggtgccaccgcatcgcgcactccacttccccgtcgcattccctcccggaggcaagccgtgtagccagcacatcatcagcgtgacaggtttcgtggactcagatagggatgacctgaagctgatggcctacttggccggagctaagtataccggttatctgtgccgaagtaacaccgtgctcatctgtaaggagcccacaggacttaagtatgagaaggctaaagagtggcgtataccttgcgtaaacgcacaatggctgggggatatactgttggggaacttcgaggctttgcggcaaatccagtatagtagatataccgcattttccctgcaggatccttttgcccctacacagcatctggtcctgaacctgcttgacgcatggagggtccccttaaaggtctcagcggaattactgatgagcatccgactgccccctaagttgaaacaaaatgaggtcgcgaacgtgcagccaagttccaagagagcacggattgaagacgtgcccccaccaaccaagaaactgactccagaactgaccccgttcgttctatttacagggttcgaacctgtccaggtgcaacagtatattaaaaagctgtatatactcggcggggaggtggctgagtcagcccagaagtgcacccatctgatcgcctcaaaagtcacaaggactgtcaagtttctaaccgccatatccgtagtgaaacacatcgtcacaccggagtggctcgaggaatgctttaggtgccaaaaatttattgatgagcaaaactatatcctgcgcgatgcggaagcagaggtgcttttttcattttccctggaagaatcccttaaaagggctcacgtgtctccactttttaaggctaaatacttttatatcacacctggaatatgcccttccctgagcactatgaaggctattgttgagtgcgctggcgggaaagttctgtccaaacagccatcattccgtaaactgatggagcacaagcagaattcatctctgtccgagattatcttaatcagctgtgaaaatgatctccacctgtgtcgggaatacttcgctagaggtattgacgtgcataacgcagagtttgttctgactggggtcctgacccagactctagattacgagagttacaaattcaactag

SEQ ID NO: 306877 - DNA, 3423 bp, Artificial Sequence
  derived and/or modified sequence
aaagttcctgaggagatgttcagggaggtcaagtattacgcggtgggcgacatcgacccgcaggttattcagcttctcaaggctggaaaagcgaaggaagtttcctacaatgcactagcctcacacataatctcagaggatggggacaatccagaggtgggagaagctcgggaagtctttgacttacctgttgtaaaggtgtcatctgaagacagaagtgccctgtgggctttggttacgttctatgggggagattgccagctaaccctcaataagaaatgcacgcatttgattgttccagagccaaagggggagaaatacgaatgtgctttaaagcgagcaagtattaaaattgtgactcctgactgggttctggattgcgtatcagagaaaaccaaaaaggacgaagcattttatcatcctcgtctgattatttatgaagaggaagaagaggaagaggaagaggaggaggaagtagaaaatgaggaacaagattctcagaatgagggtagtacagatgagaagtcaagccctgccagctctcaagaagggtctccttcaggtgaccagcagttttcacctaaatccaacactgaaaaatctaaaggggaattaatgtttgatgattcttcagattcatcaccggaaaaacaggagagaaatttaaactggaccccggccgaagtcccacagttagctgcagcaaaacgcaggctgcctcagggaaaggagcctgggttgattaacttgtgtgccaatgtcccacccgtcccaggtaacattttgccccctgaggtccggggtaatttaatggctgctggacaaaacctccaaagttctgaaagatcagaaatgatagctacctggagtccagctgtacggacactgaggaatattactaataatgctgacattcagcagatgaaccggccatcaaatgtagcacatatcttacagactctttcagcacctacgaaaaatttagaacagcaggtgaatcacagccagcagggacatacaaatgccaatgcagtgctgtttagccaagtgaaagtgactccagagacacacatgctacagcagcagcagcaggcccagcagcagcagcagcagcacccggttttacaccttcagccccagcagataatgcagctccagcagcagcagcagcagcagatctctcagcaaccttacccccagcagccgccgcatccattttcacagcaacagcagcagcagcagcaagcccatccgcatcagttttcacagcaacagctacagtttccacagcaacagttgcatcctccacagcagctgcatcgccctcagcagcagctccagccctttcagcagcagcatgccctgcagcagcagttccatcagctgcagcagcaccagctccagcagcagcagcttgcccagctccagcagcagcacagcctgctccagcagcagcagcaacagcagattcagcagcagcagctccagcgcatgcaccagcagcagcagcagcagcagatgcaaagtcagacagcgccacacttgagtcagacgtcacaggcgctgcagcatcaggttccacctcagcagcccccgcagcagcagcagcaacagcagccaccaccatcgcctcagcagcatcagctttttggacatgatccagcagtggagattccagaagaaggcttcttattgggatgtgtgtttgcaattgcggattatccagagcagatgtctgataagcaactgctggccacctggaaaaggataatccaggcacatggcggcactgttgaccccaccttcacgagtcgatgcacgcaccttctctgtgagagtcaagtcagcagcgcgtatgcacaggcaataagagaaagaaagagatgtgttactgcacactggttaaacacagtcttaaagaagaagaaaatggtaccgccgcaccgagcccttcacttcccagtggccttcccaccaggaggaaagccatgttcacagcatattatttctgtgactggatttgttgatagtgacagagatgacctaaaattaatggcttatttggcaggtgccaaatatacgggttatctatgccgcagcaacacagtcctcatctgtaaagaaccaactggtttaaagtatgaaaaagccaaagagtggaggataccctgtgtcaacgcccagtggcttggcgacattcttctgggaaactttgaggcactgaggcagattcagtatagtcgctacacggcattcagtctgcaggatccatttgcccctacccagcatttagttttaaatcttttagatgcttggagagttcccttaaaagtgtctgcagagttgttgatgagtataagactacctcccaaactgaaacagaatgaagtagctaatgtccagccttcttccaaaagagccagaattgaagacgtaccacctcccactaaaaagctaactccagaattgaccccttttgtgcttttcactggattcgagcctgtccaggttcaacagtatattaagaagctctacattcttggtggagaggttgcggagtctgcacagaagtgcacacacctcattgccagcaaagtgactcgcaccgtgaagttcctgacggcgatttctgtcgtgaagcacatagtgacgccagagtggctggaagaatgcttcaggtgtcagaagttcattgatgagcagaactacattctccgagatgctgaggcagaagtacttttctctttcagcttggaagaatccttaaaacgggcacacgtttctccactctttaaggcaaaatatttttacatcacacctggaatctgcccaagtctttccactatgaaggcaatcgtagagtgtgcaggaggaaaggtgttatccaagcagccatctttccggaagctcatggagcacaagcagaactcgagtttgtcggaaataattttaatatcctgtgaaaatgaccttcatttatgccgagaatattttgccagaggcatagatgttcacaatgcagagttcgttctgactggagtgctcactcaaacgctggactatgaatcatataagtttaactgatggcgtctaggctgccgtgcatgtcgactcctgcggtgcggggctggctgtctggctggcgaggagctgctgcgcttccttcacatgctcttgttttccagctgctttcctgggggatcagactgtgaagcaggaagacagatataataaatatactgcatctttttaagatgtgcaattttattctgaggaaacataaattatgttttgtattatatgactttaagagcccacattaggttttatgattcatttgccaggtttttaaatgttttcacaaaactgttacgggacttcaactagaaataaaatggtgtaaataaagaccttgctatctct

SEQ ID NO: 306878 - DNA, 3140 bp, Artificial Sequence
  derived and/or modified sequence
gtcagggtgttgatacaagctggagctctttgttggagtcttccagagctctcccagggagaggtagggaagggagcttgtccagcagaagttgggaagcacagagatcatctgccttcttctgacccggtattgatgcaggctgaggcctctgttgtaatgtgctgggtgtcatctgaagacagaagtgccctgtgggctttggttacgttctatgggggagattgccagctaaccctcaataagaaatgcacgcatttgattgttccagagccaaagggggagaaatacgaatgtgctttaaagcgagcaagtattaaaattgtgactcctgactgggttctggattgcgtatcagagaaaaccaaaaaggacgaagcattttatcatcctcgtctgattatttatgaagaggaagaagaggaagaggaagaggaggaggaagtagaaaatgaggaacaagattctcagaatgagggtagtacagatgagaagtcaagccctgccagctctcaagaagggtctccttcaggtgaccagcagttttcacctaaatccaacactgaaaaatctaaaggggaattaatgtttgatgattcttcagattcatcaccggaaaaacaggagagaaatttaaactggaccccggccgaagtcccacagttagctgcagcaaaacgcaggctgcctcagggaaaggagcctgggttgattaacttgtgtgccaatgtcccacccgtcccaggtaacattttgccccctgaggtccggggtaatttaatggctgctggacaaaacctccaaagttctgaaagatcagaaatgatagctacctggagtccagctgtacggacactgaggaatattactaataatgctgacattcagcagatgaaccggccatcaaatgtagcacatatcttacagactctttcagcacctacgaaaaatttagaacagcaggtgaatcacagccagcagggacatacaaatgccaatgcagtgctgtttagccaagtgaaagtgactccagagacacacatgctacagcagcagcagcaggcccagcagcagcagcagcagcacccggttttacaccttcagccccagcagataatgcagctccagcagcagcagcagcagcagatctctcagcaaccttacccccagcagccgccgcatccattttcacagcaacagcagcagcaacagcagccaccaccatcgcctcagcagcatcagctttttggacatgatccagcagtggagattccagaagaaggcttcttattgggatgtgtgtttgcaattgcggattatccagagcagatgtctgataagcaactgctggccacctggaaaaggataatccaggcacatggcggcactgttgaccccaccttcacgagtcgatgcacgcaccttctctgtgagagtcaagtcagcagcgcgtatgcacaggcaataagagaaagaaagagatgtgttactgcacactggttaaacacagtcttaaagaagaagaaaatggtaccgccgcaccgagcccttcacttcccagtggccttcccaccaggaggaaagccatgttcacagcatattatttctgtgactggatttgttgatagtgacagagatgacctaaaattaatggcttatttggcaggtgccaaatatacgggttatctatgccgcagcaacacagtcctcatctgtaaagaaccaactggtttaaagtatgaaaaagccaaagagtggaggataccctgtgtcaacgcccagtggcttggcgacattcttctgggaaactttgaggcactgaggcagattcagtatagtcgctacacggcattcagtctgcaggatccatttgcccctacccagcatttagttttaaatcttttagatgcttggagagttcccttaaaagtgtctgcagagttgttgatgagtataagactacctcccaaactgaaacagaatgaagtagctaatgtccagccttcttccaaaagagccagaattgaagacgtaccacctcccactaaaaagctaactccagaattgaccccttttgtgcttttcactggattcgagcctgtccaggttcaacagtatattaagaagctctacattcttggtggagaggttgcggagtctgcacagaagtgcacacacctcattgccagcaaagtgactcgcaccgtgaagttcctgacggcgatttctgtcgtgaagcacatagtgacgccagagtggctggaagaatgcttcaggtgtcagaagttcattgatgagcagaactacattctccgagatgctgaggcagaagtacttttctctttcagcttggaagaatccttaaaacgggcacacgtttctccactctttaaggcaaaatatttttacatcacacctggaatctgcccaagtctttccactatgaaggcaatcgtagagtgtgcaggaggaaaggtgttatccaagcagccatctttccggaagctcatggagcacaagcagaactcgagtttgtcggaaataattttaatatcctgtgaaaatgaccttcatttatgccgagaatattttgccagaggcatagatgttcacaatgcagagttcgttctgactggagtgctcactcaaacgctggactatgaatcatataagtttaactgatggcgtctaggctgccgtgcatgtcgactcctgcggtgcggggctggctgtctggctggcgaggagctgctgcgcttccttcacatgctcttgttttccagctgctttcctgggggatcagactgtgaagcaggaagacagatataataaatatactgcatctttttaagatgtgcaattttattctgaggaaacataaattatgttttgtattatatgactttaagagcccacattaggttttatgattcatttgccaggtttttaaatgttttcacaaaactgttacgggacttcaactagaaataaaatggtgtaaataaagaccttgctatctctaaattatggatgttaaagatttgaaatgttttgtactttgattatttttatttcttatactctgttttcttttatattgatatcttgcccacattttaaataaatgtacttttgaactt

SEQ ID NO: 306879 - DNA, 3711 bp, Artificial Sequence
  derived and/or modified sequence
cggggccgggcgccgccgcggagcctcccgggccgccgcgatcatgtcggaccaggcgcccaaagttcctgaggagatgttcagggaggtcaagtattacgcggtgggcgacatcgacccgcaggttattcagcttctcaaggctggaaaagcgaaggaagtttcctacaatgcactagcctcacacataatctcagaggatggggacaatccagaggtgggagaagctcgggaagtctttgacttacctgttgtaaagccttcttgggtgattctgtccgttcagtgtggaactcttctgccagtaaatggtttttctccagaatcatgtcagattttttttggaatcactgcctgcctttctcaggtgtcatctgaagacagaagtgccctgtgggctttggttacgttctatgggggagattgccagctaaccctcaataagaaatgcacgcatttgattgttccagagccaaagggggagaaatacgaatgtgctttaaagcgagcaagtattaaaattgtgactcctgactgggttctggattgcgtatcagagaaaaccaaaaaggacgaagcattttatcatcctcgtctgattatttatgaagaggaagaagaggaagaggaagaggaggaggaagtagaaaatgaggaacaagattctcagaatgagggtagtacagatgagaagtcaagccctgccagctctcaagaagggtctccttcaggtgaccagcagttttcacctaaatccaacactgaaaaatctaaaggggaattaatgtttgatgattcttcagattcatcaccggaaaaacaggagagaaatttaaactggaccccggccgaagtcccacagttagctgcagcaaaacgcaggctgcctcagggaaaggagcctgggttgattaacttgtgtgccaatgtcccacccgtcccaggtaacattttgccccctgaggtccggggtaatttaatggctgctggacaaaacctccaaagttctgaaagatcagaaatgatagctacctggagtccagctgtacggacactgaggaatattactaataatgctgacattcagcagatgaaccggccatcaaatgtagcacatatcttacagactctttcagcacctacgaaaaatttagaacagcaggtgaatcacagccagcagggacatacaaatgccaatgcagtgctgtttagccaagtgaaagtgactccagagacacacatgctacagcagcagcagcaggcccagcagcagcagcagcagcacccggttttacaccttcagccccagcagataatgcagctccagcagcagcagcagcagcagatctctcagcaaccttacccccagcagccgccgcatccattttcacagcaacagcagcagcagcagcaagcccatccgcatcagttttcacagcaacagctacagtttccacagcaacagttgcatcctccacagcagctgcatcgccctcagcagcagctccagccctttcagcagcagcatgccctgcagcagcagttccatcagctgcagcagcaccagctccagcagcagcagcttgcccagctccagcagcagcacagcctgctccagcagcagcagcaacagcagattcagcagcagcagctccagcgcatgcaccagcagcagcagcagcagcagatgcaaagtcagacagcgccacacttgagtcagacgtcacaggcgctgcagcatcaggttccacctcagcagcccccgcagcagcagcagcaacagcagccaccaccatcgcctcagcagcatcagctttttggacatgatccagcagtggagattccagaagaaggcttcttattgggatgtgtgtttgcaattgcggattatccagagcagatgtctgataagcaactgctggccacctggaaaaggataatccaggcacatggcggcactgttgaccccaccttcacgagtcgatgcacgcaccttctctgtgagagtcaagtcagcagcgcgtatgcacaggcaataagagaaagaaagagatgtgttactgcacactggttaaacacagtcttaaagaagaagaaaatggtaccgccgcaccgagcccttcacttcccagtggccttcccaccaggaggaaagccatgttcacagcatattatttctgtgactggatttgttgatagtgacagagatgacctaaaattaatggcttatttggcaggtgccaaatatacgggttatctatgccgcagcaacacagtcctcatctgtaaagaaccaactggtttaaagtatgaaaaagccaaagagtggaggataccctgtgtcaacgcccagtggcttggcgacattcttctgggaaactttgaggcactgaggcagattcagtatagtcgctacacggcattcagtctgcaggatccatttgcccctacccagcatttagttttaaatcttttagatgcttggagagttcccttaaaagtgtctgcagagttgttgatgagtataagactacctcccaaactgaaacagaatgaagtagctaatgtccagccttcttccaaaagagccagaattgaagacgtaccacctcccactaaaaagctaactccagaattgaccccttttgtgcttttcactggattcgagcctgtccaggttcaacagtatattaagaagctctacattcttggtggagaggttgcggagtctgcacagaagtgcacacacctcattgccagcaaagtgactcgcaccgtgaagttcctgacggcgatttctgtcgtgaagcacatagtgacgccagagtggctggaagaatgcttcaggtgtcagaagttcattgatgagcagaactacattctccgagatgctgaggcagaagtacttttctctttcagcttggaagaatccttaaaacgggcacacgtttctccactctttaaggcaaaatatttttacatcacacctggaatctgcccaagtctttccactatgaaggcaatcgtagagtgtgcaggaggaaaggtgttatccaagcagccatctttccggaagctcatggagcacaagcagaactcgagtttgtcggaaataattttaatatcctgtgaaaatgaccttcatttatgccgagaatattttgccagaggcatagatgttcacaatgcagagttcgttctgactggagtgctcactcaaacgctggactatgaatcatataagtttaactgatggcgtctaggctgccgtgcatgtcgactcctgcggtgcggggctggctgtctggctggcgaggagctgctgcgcttccttcacatgctcttgttttccagctgctttcctgggggatcagactgtgaagcaggaagacagatataataaatatactgcatctttttaagatgtgcaattttattctgaggaaacataaattatgttttgtattatatgactttaagagcccacattaggttttatgattcatttgccaggtttttaaatgttttcacaaaactgttacgggacttcaactagaaataaaatggtgtaaataaagaccttgctatctctaaattatggatgttaaagatttgaaatgttttgtactttgattatttttatttcttatactctgttttcttttatattgatatcttgcccacattttaaataaatgtacttttgaactt

SEQ ID NO: 306880 - DNA, 3827 bp, Artificial Sequence
  derived and/or modified sequence
ggcgggggagcggaccccgattcgcaggaccgggcccgggctgcgcgggcagggccgttggcggggcgagtgggggcgccgggcgccgcgggggccgggggcggggggtgggcggggccgggcgccgccgcggagcctcccgggccgccgcgatcatgtcggaccaggcgcccaaagttcctgaggagatgttcagggaggtcaagtattacgcggtgggcgacatcgacccgcaggttattcagcttctcaaggctggaaaagcgaaggaagtttcctacaatgcactagcctcacacataatctcagaggatggggacaatccagaggtgggagaagctcgggaagtctttgacttacctgttgtaaagccttcttgggtgattctgtccgttcagtgtggaactcttctgccagtaaatggtttttctccagaatcatgtcagattttttttggaatcactgcctgcctttctcaggtgtcatctgaagacagaagtgccctgtgggctttggttacgttctatgggggagattgccagctaaccctcaataagaaatgcacgcatttgattgttccagagccaaagggggagaaatacgaatgtgctttaaagcgagcaagtattaaaattgtgactcctgactgggttctggattgcgtatcagagaaaaccaaaaaggacgaagcattttatcatcctcgtctgattatttatgaagaggaagaagaggaagaggaagaggaggaggaagtagaaaatgaggaacaagattctcagaatgagggtagtacagatgagaagtcaagccctgccagctctcaagaagggtctccttcaggtgaccagcagttttcacctaaatccaacactgaaaaatctaaaggggaattaatgtttgatgattcttcagattcatcaccggaaaaacaggagagaaatttaaactggaccccggccgaagtcccacagttagctgcagcaaaacgcaggctgcctcagggaaaggagcctgggttgattaacttgtgtgccaatgtcccacccgtcccaggtaacattttgccccctgaggtccggggtaatttaatggctgctggacaaaacctccaaagttctgaaagatcagaaatgatagctacctggagtccagctgtacggacactgaggaatattactaataatgctgacattcagcagatgaaccggccatcaaatgtagcacatatcttacagactctttcagcacctacgaaaaatttagaacagcaggtgaatcacagccagcagggacatacaaatgccaatgcagtgctgtttagccaagtgaaagtgactccagagacacacatgctacagcagcagcagcaggcccagcagcagcagcagcagcacccggttttacaccttcagccccagcagataatgcagctccagcagcagcagcagcagcagatctctcagcaaccttacccccagcagccgccgcatccattttcacagcaacagcagcagcagcagcaagcccatccgcatcagttttcacagcaacagctacagtttccacagcaacagttgcatcctccacagcagctgcatcgccctcagcagcagctccagccctttcagcagcagcatgccctgcagcagcagttccatcagctgcagcagcaccagctccagcagcagcagcttgcccagctccagcagcagcacagcctgctccagcagcagcagcaacagcagattcagcagcagcagctccagcgcatgcaccagcagcagcagcagcagcagatgcaaagtcagacagcgccacacttgagtcagacgtcacaggcgctgcagcatcaggttccacctcagcagcccccgcagcagcagcagcaacagcagccaccaccatcgcctcagcagcatcagctttttggacatgatccagcagtggagattccagaagaaggcttcttattgggatgtgtgtttgcaattgcggattatccagagcagatgtctgataagcaactgctggccacctggaaaaggataatccaggcacatggcggcactgttgaccccaccttcacgagtcgatgcacgcaccttctctgtgagagtcaagtcagcagcgcgtatgcacaggcaataagagaaagaaagagatgtgttactgcacactggttaaacacagtcttaaagaagaagaaaatggtaccgccgcaccgagcccttcacttcccagtggccttcccaccaggaggaaagccatgttcacagcatattatttctgtgactggatttgttgatagtgacagagatgacctaaaattaatggcttatttggcaggtgccaaatatacgggttatctatgccgcagcaacacagtcctcatctgtaaagaaccaactggtttaaagtatgaaaaagccaaagagtggaggataccctgtgtcaacgcccagtggcttggcgacattcttctgggaaactttgaggcactgaggcagattcagtatagtcgctacacggcattcagtctgcaggatccatttgcccctacccagcatttagttttaaatcttttagatgcttggagagttcccttaaaagtgtctgcagagttgttgatgagtataagactacctcccaaactgaaacagaatgaagtagctaatgtccagccttcttccaaaagagccagaattgaagacgtaccacctcccactaaaaagctaactccagaattgaccccttttgtgcttttcactggattcgagcctgtccaggttcaacagtatattaagaagctctacattcttggtggagaggttgcggagtctgcacagaagtgcacacacctcattgccagcaaagtgactcgcaccgtgaagttcctgacggcgatttctgtcgtgaagcacatagtgacgccagagtggctggaagaatgcttcaggtgtcagaagttcattgatgagcagaactacattctccgagatgctgaggcagaagtacttttctctttcagcttggaagaatccttaaaacgggcacacgtttctccactctttaaggcaaaatatttttacatcacacctggaatctgcccaagtctttccactatgaaggcaatcgtagagtgtgcaggaggaaaggtgttatccaagcagccatctttccggaagctcatggagcacaagcagaactcgagtttgtcggaaataattttaatatcctgtgaaaatgaccttcatttatgccgagaatattttgccagaggcatagatgttcacaatgcagagttcgttctgactggagtgctcactcaaacgctggactatgaatcatataagtttaactgatggcgtctaggctgccgtgcatgtcgactcctgcggtgcggggctggctgtctggctggcgaggagctgctgcgcttccttcacatgctcttgttttccagctgctttcctgggggatcagactgtgaagcaggaagacagatataataaatatactgcatctttttaagatgtgcaattttattctgaggaaacataaattatgttttgtattatatgactttaagagcccacattaggttttatgattcatttgccaggtttttaaatgttttcacaaaactgttacgggacttcaactagaaataaaatggtgtaaataaagaccttgctatctctaaattatggatgttaaagatttgaaatgttttgtactttgattatttttatttcttatactctgttttcttttatattgatatcttgcccacattttaaataaatgtacttttgaacttagaa

SEQ ID NO: 306881 - DNA, 3069 bp, Artificial Sequence
  derived and/or modified sequence
atgttccgggaggtgaagtactatgctgtgggggacatcgacccccaggtgatccagctgctgaaggccggcaaggccaaggaggtgtcctacaatgccctggccagccacatcatcagtgaagatggagacaaccctgaggtgggggaggcccgggaggtgtttgacctgcctgtggtgaaggtgtccagtgaagatagaagtgccctgtgggccctggtgaccttctatggaggagactgccagctgaccctgaacaagaagtgcacccacctgattgtgcctgagcccaagggggagaagtatgaatgtgccctgaagagggccagcatcaagatcgtgaccccagactgggtgctggactgtgtgtctgagaagaccaagaaggatgaggccttctaccaccccaggctcatcatctatgaggaggaggaggaggaggaggaggaggaggaggaggtggagaatgaggagcaggacagccagaatgaaggcagcacagatgagaagagcagccctgccagcagccaggagggcagccccagcggggaccagcagttcagccccaagagcaacacagagaagagcaaaggagagctgatgtttgatgacagcagtgacagcagccctgagaagcaggagaggaacctgaactggaccccagctgaggtgccccagctggccgccgccaagaggcggctgccccagggcaaggagcccggcctcatcaacctgtgtgccaacgtgccccctgtgcccggcaacatcctgcccccagaggtgcggggcaacctgatggccgccggccagaacctgcagagcagcgagaggtctgagatgattgccacctggagccctgctgtgaggaccctgaggaacatcaccaacaatgctgacatccagcagatgaaccggcccagcaatgtggcccacatcctgcagaccctgagcgcccccaccaagaacctggagcagcaggtgaaccacagccagcagggccacaccaatgccaatgctgtgctcttcagccaggtgaaggtgaccccagagacccacatgctgcagcagcagcagcaggcccagcagcagcagcagcagcaccctgtgctgcacctgcagccccagcagatcatgcagctgcagcagcagcagcagcagcagatcagccagcagccctacccccagcagcccccccaccccttcagccagcagcagcagcagcagcagcaggcccacccccaccagttcagccagcagcagctgcagttcccccagcagcagctgcaccccccccagcagctgcaccggccccagcagcagctgcagcccttccagcagcagcacgccctgcagcagcagttccaccagctgcagcagcaccagctgcagcagcagcagctggcccagctgcagcagcagcacagcctgctgcagcagcagcagcagcagcagatccagcagcagcagctgcagaggatgcaccagcagcagcagcagcagcagatgcagagccagacagccccccacctgagccagaccagccaggccctgcagcaccaggtgcccccccagcagcccccccagcagcagcagcagcagcagcccccacccagcccccagcagcaccagctgtttggacatgaccctgctgtggagatccctgaggagggcttcctgctgggctgtgtgtttgccatcgctgactacccagagcagatgtctgacaagcagctgctggccacctggaagaggatcatccaggcccatggaggcaccgtggaccccaccttcaccagccgctgcacccacctgctgtgtgagagccaggtgagcagcgcctatgcccaggccatccgggagaggaagagatgtgtgacagcccactggctgaacacagtgctgaagaagaagaagatggtgcccccccaccgggccctgcacttccctgtggccttccccccaggcggcaagccctgcagccagcacatcatctctgtgactggatttgtggacagcgacagagatgacctgaagctgatggcctacctggccggggccaagtacacaggctacctgtgccgcagcaacacagtgctgatctgcaaggagcccaccggcctgaagtatgagaaggccaaggagtggaggatcccctgtgtgaatgcccagtggctgggggacatcctgctgggcaactttgaggccctgcggcagatccagtacagccgctacacagccttcagcctgcaggacccctttgcccccacccagcacctggtgctgaacctgctggatgcctggagggtgcccctgaaggtgtctgctgagctgctgatgagcatccggctgccccccaagctgaagcagaatgaggtggccaacgtgcagcccagcagcaagagggccagaattgaagatgtgcccccacccaccaagaagctgaccccagagctgaccccatttgtgctcttcaccggctttgagcctgtgcaggtgcagcagtacatcaagaagctgtacatcctgggcggggaggtggccgagagcgcccagaagtgcacccacctgattgccagcaaggtgaccaggacagtgaagttcctgacagccatctctgtggtgaagcacatcgtgaccccagagtggctggaggagtgcttccgctgccagaagttcattgatgagcagaactacatcctgagagatgctgaggccgaggtgctcttctccttcagcctggaggagagcctgaagagggcccacgtgagccccctcttcaaggccaagtacttctacatcaccccaggcatctgccccagcctgagcaccatgaaggccatcgtggagtgtgccggcggcaaggtgctgagcaagcagcccagcttcaggaagctgatggagcacaagcagaacagcagcctgtctgagatcatcctgatcagctgtgaaaatgacctgcacctgtgccgggagtactttgcccggggcattgatgtgcacaatgctgagtttgtgctgactggagtgctgacccagaccctggactatgagagctacaagttcaactag

SEQ ID NO: 306882 - DNA, 2682 bp, Artificial Sequence
  derived and/or modified sequence
gtgcgggtgctgatccaggccggggccctgtgctggagcctgcctgagctgagccagggcgaggtgggcaagggggcctgcccagctgaggtgggcaagcaccgggaccacctgcccagcagtgaccctgtgctgatgcaggccgaggcctctgtggtgatgtgctgggtgtcctctgaggacagaagtgccctgtgggccctggtgaccttctacggcggggactgccagctgaccctgaacaagaagtgcacccacctgattgtgcctgagcccaagggggagaagtatgaatgtgccctgaagagggccagcatcaagatcgtgaccccagactgggtgctggactgtgtgtctgagaagaccaagaaggatgaggccttctaccaccccaggctcatcatctatgaggaggaggaggaggaggaggaggaggaggaggaggtggagaatgaggagcaggacagccagaatgaaggcagcacagatgagaagagcagccctgccagcagccaggagggcagccccagcggggaccagcagttcagccccaagagcaacacagagaagagcaagggggagctgatgtttgatgacagcagtgacagcagccctgagaagcaggagaggaacctgaactggaccccagctgaggtgccccagctggccgccgccaagaggcggctgccccagggcaaggagcccggcctcatcaacctgtgtgccaacgtgccccctgtgcccggcaacatcctgcccccagaggtgcggggcaacctgatggctgctggccagaacctgcagagcagcgagaggtctgagatgattgccacctggagccctgctgtgaggaccctgaggaacatcaccaacaatgctgacatccagcagatgaaccggcccagcaatgtggcccacatcctgcagaccctgagcgcccccaccaagaacctggagcagcaggtgaaccacagccagcagggccacaccaatgccaatgctgtgctcttcagccaggtgaaggtgaccccagagacccacatgctgcagcagcagcagcaggcccagcagcagcagcagcagcaccctgtgctgcacctgcagccccagcagatcatgcagctgcagcagcagcagcagcagcagatcagccagcagccctacccccagcagcccccccaccccttcagccagcagcagcagcagcagcagcagcccccacccagcccccagcagcaccagctgtttggacatgaccctgctgtggagatccctgaggagggcttcctgctgggctgtgtgtttgccatcgctgactacccagagcagatgtctgacaagcagctgctggccacctggaagaggatcatccaggcccacggcggcaccgtggaccccaccttcaccagccgctgcacccacctgctgtgtgagagccaggtgtcctctgcctatgcccaggccatccgggagaggaagagatgtgtgacagcccactggctgaacacagtgctgaagaagaagaagatggtgcccccccaccgggccctgcacttccctgtggccttccccccaggcggcaagccctgcagccagcacatcatctctgtgacaggctttgtggacagcgacagagatgacctgaagctgatggcctacctggccggggccaagtacacaggctacctgtgccgcagcaacacagtgctgatctgcaaggagcccaccggcctgaagtatgagaaggccaaggagtggaggatcccctgtgtgaatgcccagtggctgggggacatcctgctgggcaactttgaggccctgcggcagatccagtacagccgctacacagccttcagcctgcaggacccctttgcccccacccagcacctggtgctgaacctgctggatgcctggagggtgcccctgaaggtgtctgctgagctgctgatgagcatccggctgccccccaagctgaagcagaatgaggtggccaacgtgcagcccagcagcaagagggccagaattgaagatgtgcccccacccaccaagaagctgaccccagagctgaccccatttgtgctcttcaccggctttgagcctgtgcaggtgcagcagtacatcaagaagctgtacatcctgggcggggaggtggccgagagcgcccagaagtgcacccacctgattgccagcaaggtgaccaggacagtgaagttcctgacagccatctctgtggtgaagcacatcgtgaccccagagtggctggaggagtgcttccgctgccagaagttcattgatgagcagaactacatcctgagagatgctgaggccgaggtgctcttctccttcagcctggaggagagcctgaagagggcccacgtgagccccctcttcaaggccaagtacttctacatcaccccaggcatctgccccagcctgagcaccatgaaggccatcgtggagtgtgccggcggcaaggtgctgagcaagcagcccagcttcaggaagctgatggagcacaagcagaacagcagcctgtctgagatcatcctgatcagctgtgaaaatgacctgcacctgtgccgggagtactttgcccggggcattgatgtgcacaatgctgagtttgtgctgactggagtgctgacccagaccctggactatgagagctacaagttcaactag

SEQ ID NO: 306883 - DNA, 3210 bp, Artificial Sequence
  derived and/or modified sequence
atgtctgaccaggcccccaaggtgcctgaggagatgttccgggaggtgaagtactatgctgtgggggacatcgacccccaggtgatccagctgctgaaggccggcaaggccaaggaggtgtcctacaatgccctggccagccacatcatcagtgaagatggagacaaccctgaggtgggggaggcccgggaggtgtttgacctgcctgtggtgaagcccagctgggtgatcctgtctgtgcagtgtggcaccctgctgcctgtgaatggcttcagccctgagagctgccagatcttcttcggcatcacagcctgcctgagccaggtgtcctctgaggacagaagtgccctgtgggccctggtgaccttctacggcggggactgccagctgaccctgaacaagaagtgcacccacctgattgtgcctgagcccaagggggagaagtatgaatgtgccctgaagagggccagcatcaagatcgtgaccccagactgggtgctggactgtgtgtctgagaagaccaagaaggatgaggccttctaccaccccaggctcatcatctatgaggaggaggaggaggaggaggaggaggaggaggaggtggagaatgaggagcaggacagccagaatgaaggcagcacagatgagaagagcagccctgccagcagccaggagggcagccccagcggggaccagcagttcagccccaagagcaacacagagaagagcaagggggagctgatgtttgatgacagcagtgacagcagccctgagaagcaggagaggaacctgaactggaccccagctgaggtgccccagctggccgccgccaagaggcggctgccccagggcaaggagcccggcctcatcaacctgtgtgccaacgtgccccctgtgcccggcaacatcctgcccccagaggtgcggggcaacctgatggctgctggccagaacctgcagagcagcgagaggtctgagatgattgccacctggagccctgctgtgaggaccctgaggaacatcaccaacaatgctgacatccagcagatgaaccggcccagcaatgtggcccacatcctgcagaccctgagcgcccccaccaagaacctggagcagcaggtgaaccacagccagcagggccacaccaatgccaatgctgtgctcttcagccaggtgaaggtgaccccagagacccacatgctgcagcagcagcagcaggcccagcagcagcagcagcagcaccctgtgctgcacctgcagccccagcagatcatgcagctgcagcagcagcagcagcagcagatcagccagcagccctacccccagcagcccccccaccccttcagccagcagcagcagcagcagcagcaggcccacccccaccagttcagccagcagcagctgcagttcccccagcagcagctgcaccccccccagcagctgcaccggccccagcagcagctgcagcccttccagcagcagcacgccctgcagcagcagttccaccagctgcagcagcaccagctgcagcagcagcagctggcccagctgcagcagcagcacagcctgctgcagcagcagcagcagcagcagatccagcagcagcagctgcagaggatgcaccagcagcagcagcagcagcagatgcagagccagacagccccccacctgagccagaccagccaggccctgcagcaccaggtgcccccccagcagcccccccagcagcagcagcagcagcagcccccacccagcccccagcagcaccagctgtttggacatgaccctgctgtggagatccctgaggagggcttcctgctgggctgtgtgtttgccatcgctgactacccagagcagatgtctgacaagcagctgctggccacctggaagaggatcatccaggcccacggcggcaccgtggaccccaccttcaccagccgctgcacccacctgctgtgtgagagccaggtgtcctctgcctatgcccaggccatccgggagaggaagagatgtgtgacagcccactggctgaacacagtgctgaagaagaagaagatggtgcccccccaccgggccctgcacttccctgtggccttccccccaggcggcaagccctgcagccagcacatcatctctgtgacaggctttgtggacagcgacagagatgacctgaagctgatggcctacctggccggggccaagtacacaggctacctgtgccgcagcaacacagtgctgatctgcaaggagcccaccggcctgaagtatgagaaggccaaggagtggaggatcccctgtgtgaatgcccagtggctgggggacatcctgctgggcaactttgaggccctgcggcagatccagtacagccgctacacagccttcagcctgcaggacccctttgcccccacccagcacctggtgctgaacctgctggatgcctggagggtgcccctgaaggtgtctgctgagctgctgatgagcatccggctgccccccaagctgaagcagaatgaggtggccaacgtgcagcccagcagcaagagggccagaattgaagatgtgcccccacccaccaagaagctgaccccagagctgaccccatttgtgctcttcaccggctttgagcctgtgcaggtgcagcagtacatcaagaagctgtacatcctgggcggggaggtggccgagagcgcccagaagtgcacccacctgattgccagcaaggtgaccaggacagtgaagttcctgacagccatctctgtggtgaagcacatcgtgaccccagagtggctggaggagtgcttccgctgccagaagttcattgatgagcagaactacatcctgagagatgctgaggccgaggtgctcttctccttcagcctggaggagagcctgaagagggcccacgtgagccccctcttcaaggccaagtacttctacatcaccccaggcatctgccccagcctgagcaccatgaaggccatcgtggagtgtgccggcggcaaggtgctgagcaagcagcccagcttcaggaagctgatggagcacaagcagaacagcagcctgtctgagatcatcctgatcagctgtgaaaatgacctgcacctgtgccgggagtactttgcccggggcattgatgtgcacaatgctgagtttgtgctgactggagtgctgacccagaccctggactatgagagctacaagttcaactag

SEQ ID NO: 306884 - DNA, 3069 bp, Artificial Sequence
  derived and/or modified sequence
atgttccgggaggtgaagtactacgccgtgggcgacatcgacccccaagtgatccagctgctgaaggccggtaaagccaaagaagtcagctataatgccctggcctctcacataatttcagaggacggcgacaacccagaggtcggtgaggcccgggaagtgtttgatctgccagtcgtgaaagttagcagtgaagatagaagtgcactttgggcgttggttaccttttacgggggagactgtcagctgaccctgaacaagaagtgcactcacctcatcgtgcccgagcctaaaggggagaagtacgaatgcgctctgaagagggcctctatcaagatcgtgacaccagattgggttttggattgtgtctctgaaaagacgaagaaagatgaggcattttatcatcctaggctcatcatatacgaagaggaggaggaggaggaggaagaagaagaagaggtggaaaatgaagagcaggacagccagaatgaaggaagtactgatgagaaatctagtccagccagttcccaggaggggtcgccttccggagaccaacagttctcccctaaaagcaacacagagaagtctaagggtgaattaatgttcgacgacagtagtgattctagtccagagaagcaagagcgaaatctgaattggacgccggctgaagtgccacaactggctgctgcgaaacgaagactccctcagggtaaggaaccgggcttgattaatctgtgcgccaatgtgccacctgtgcccggaaatattctgcctcccgaagtcaggggcaacctgatggcggccggccaaaatttgcagtccagtgaaaggagcgagatgatcgccacttggagtccggcagttcgcacactacggaatataaccaataatgctgacatccagcagatgaaccggcccagcaatgtggcccatattctgcaaaccttatctgcaccaacaaaaaacctcgagcaacaggtgaaccattcccaacaggggcacacaaacgctaacgcagtgttgttcagccaggtcaaggtgacaccagagacacacatgttgcagcagcagcagcaagcacagcagcagcagcaacaacaccccgtcctccacctacagcctcagcaaatcatgcaactacaacaacagcaacagcagcagatctcacaacagccatatcctcagcagcctccccaccccttctctcaacagcagcagcagcaacaacaggcgcacccacaccaatttagccagcagcagctgcagttcccccaacagcagctccacccaccacaacagctgcatcgtccacaacagcagctgcaaccgtttcagcagcagcatgcactgcaacaacagtttcaccagcttcagcaacaccagctgcagcagcaacagctggctcagctgcagcagcaacactcgctgctccagcagcaacagcagcagcagatccagcagcagcagctacagcgcatgcaccaacagcagcagcagcagcagatgcagagtcagaccgccccacacctgtcccagacatctcaggctttgcagcatcaggtacccccccagcagcctcctcaacagcagcagcagcagcagccccccccaagtccccagcagcaccaactttttgggcacgaccccgcagtggaaatacctgaagaagggttcctgctgggctgtgtgttcgccatcgcagactacccggagcaaatgtctgacaagcagcttctggctacttggaagaggattattcaagcacacgggggaactgtggatccaaccttcacgagcagatgtactcatctactctgcgaatcacaggtgtccagcgcctacgctcaggccatccgggagagaaagagatgcgtcacggcacactggttgaatacggtcctgaagaagaaaaagatggtgcctcctcaccgtgccctgcatttccctgtcgcgttcccacctggcggcaagccatgcagtcagcacattattagcgttacagggttcgtggattcagatagggatgatctcaagctgatggcttacctggccggtgcgaaatacactggttacctttgccgatctaatactgtcctcatctgcaaggagcccaccggcctcaagtacgagaaagcaaaggagtggagaatcccctgtgtgaacgcgcagtggctgggggatatcctgctgggcaattttgaagctcttcggcagatacagtactcacgttatactgctttctccctgcaggatccattcgctccaacacagcatttggtgttgaacctgctcgacgcttggagggttccactgaaggtgagcgctgagctcctgatgtccatccgtttaccccctaagctcaagcaaaatgaagtggcaaatgttcagccttcctccaagcgtgcacgcatcgaggacgttccccctcccacgaagaaacttactcctgagcttacccctttcgtgctgttcacaggctttgaacctgtgcaggttcaacagtatatcaagaagctatatattctgggtggagaagttgcagagtcagcccagaagtgcactcatctgattgcgtcgaaggttacacgcactgtgaagttccttactgccatttctgtcgtgaaacacattgtaacccctgagtggctggaagaatgtttcagatgtcagaagttcattgatgaacagaactacatcctgcgtgatgcagaagctgaagtcttattctctttctccttggaggaaagtttgaaacgggcccatgtgtcaccactctttaaggcaaaatacttctacatcacacctgggatttgtccaagtctgtcaaccatgaaagctatcgtcgagtgtgctgggggtaaggtgctctccaaacagccttcttttagaaagcttatggagcacaagcagaattcttctctcagtgaaatcatccttatttcttgcgagaatgatctacacttgtgccgagaatactttgcccggggtatagacgtgcacaatgctgagtttgtgctgacaggggtgttgacccagacacttgactacgaatcctacaagtttaattag

SEQ ID NO: 306885 - DNA, 2682 bp, Artificial Sequence
  derived and/or modified sequence
gtgcgggtgctgatccaggccggcgccctgtgctggagcctgcccgaactgtcccagggcgaagtgggcaaaggagcatgccccgcggaagtaggcaaacatcgtgaccacctgccatcttcggaccctgtgttgatgcaggccgaggcttctgtggttatgtgttgggtgagctctgaggatcgtagtgcactgtgggcattggtaactttctatggtggcgactgccagttaaccctgaacaaaaagtgcacacatctgattgttcctgagccaaagggggaaaagtatgagtgcgcactgaaaagggcctctattaagatcgtcacacctgattgggtgctggattgcgttagcgagaagacgaaaaaggacgaagccttctaccacccacgcctcatcatttacgaggaggaggaagaggaggaggaggaggaggaggaagtggaaaacgaggaacaggactcgcagaacgaggggagtacagacgaaaagagctctccagccagtagccaagaaggctcaccgtccggggaccaacagttttcaccaaagtctaacacggaaaagtccaagggggagttaatgtttgacgactctagtgacagttcgccggaaaaacaggaacgcaatctgaattggacaccagccgaggtgccccaactggctgcagctaaaagaaggctgccacagggaaaggagccaggactgataaacctgtgcgccaacgttcccccagtccctgggaacattctgccccccgaggttaggggcaatcttatggccgcaggacagaatctgcagtccagcgaaaggagcgaaatgatcgctacttggagcccggcagtacgtaccctccggaacatcacaaacaacgccgacatccagcagatgaaccgaccttccaatgtggctcacattttacagacattgagcgcgcccacaaaaaacctggagcagcaagtgaaccactcacagcaaggtcatactaatgccaatgccgtgctattttcccaggtgaaggtgacccccgagacacatatgctgcagcagcagcagcaggcccagcagcaacagcaacagcatcccgtcctacacctacagccgcagcagattatgcagcttcagcaacagcagcaacagcagatatctcagcaaccatacccccagcaaccaccacaccccttcagccagcagcagcagcagcagcagcaaccccccccttcaccacagcaacatcagctgtttggacacgaccctgcggtggaaatcccagaggagggctttctgctcgggtgtgtcttcgcaattgctgattaccccgagcaaatgtctgacaagcaacttctggccacatggaagagaattatccaagctcatggtggaacagtggatccaactttcacctccagatgcactcaccttctgtgcgaaagtcaggtgtcctcagcatatgctcaggccatacgcgagagaaagcggtgtgtcacagctcactggctcaataccgttcttaagaagaagaagatggttccccctcatcgtgccctgcacttccctgtggctttccctcccggcggaaagccgtgctcccagcacattatctctgtgactggattcgttgatagtgaccgggacgatctcaaactgatggcatatctggcaggtgcaaagtatacgggctatttgtgtcgatccaacacggtgctgatttgtaaggaaccgacaggactcaagtatgagaaggccaaagagtggagaattccctgtgtaaatgcccagtggctgggggacatccttctcggcaattttgaggctttgcgccagatccaatattcgcggtatactgcctttagtctccaggacccgttcgccccaacccagcacctggttctgaatttacttgatgcttggagggttccactcaaagtctccgccgaactgctgatgagcatcagactgccgcccaagctgaagcaaaatgaagtggccaacgtgcagccctcctccaaaagggccagaattgaagatgttcccccacctaccaaaaaacttactccggagttgacgccttttgtgctattcaccggtttcgaacctgtgcaggtgcaacagtatatcaaaaagctatatatcctgggtggtgaagtggccgagtcagcccagaaatgcacccaccttattgcctcaaaagtgacaagaaccgtcaaatttctgactgccatttccgtcgtgaagcatatcgtaacgccggaatggctcgaggagtgcttcagatgccagaagtttatcgatgaacagaattatattctgcgggatgccgaggccgaagtgctgtttagcttcagccttgaagagtccctgaagcgagcccacgtcagtccgcttttcaaggctaagtatttctacattaccccggggatctgccctagcctttcaacaatgaaagctattgtcgagtgtgccggaggcaaagtcctttcaaaacagccatcattccgcaagctgatggaacacaaacagaactcttctctgtccgagatcatccttatcagctgcgagaatgatctacacttgtgtagagaatattttgctagaggaattgacgtgcacaacgctgagtttgttctcaccggggtgctgacacagaccttagattacgaatcgtacaagttcaactag

SEQ ID NO: 306886 - DNA, 3210 bp, Artificial Sequence
  derived and/or modified sequence
atgagcgaccaggcccccaaggtgcccgaggagatgttccgggaggtgaaatactatgcagtgggcgacatcgacccacaggtaatccagcttcttaaagccggcaaagcgaaagaggtgtcctataatgccttggcgtctcacatcatctcagaagatggcgataatccagaagtgggggaagcacgcgaagtgtttgacctgcccgtagtaaagccaagctgggtgattctgagcgttcagtgcggtaccttactgcctgtgaacggtttctcgccggagagttgtcagatctttttcggcatcacagcctgcctcagccaggtgtcatctgaggaccgctccgcgctgtgggccctggtcacattctatggaggtgactgtcagttgactctgaataagaagtgcacacatttaattgtgcccgagcccaagggcgagaaatatgaatgtgccctgaagcgcgcctccatcaaaattgtgacccccgactgggtcctggactgcgtgtccgaaaaaaccaagaaagacgaggccttctatcatccacgcctgattatctatgaggaggaagaagaagaagaagaagaggaggaggaagttgaaaacgaggagcaggatagccagaatgaaggatcgacagacgagaaatccagcccagcctccagccaggaaggctcaccgtcaggtgatcaacaattctctccaaagtcaaataccgagaaatcaaaaggagagctgatgttcgacgactcatcagatagcagcccagaaaagcaggagagaaacctcaattggactcccgctgaggtcccacagctcgctgccgccaaacgtagattgccccaaggaaaggaacctggcctcataaacctgtgtgccaatgtcccacctgtgcccggtaacatcctgcctcccgaggtgcgaggcaatcttatggccgcgggccagaacctgcagagctcagaacgctccgaaatgatagctacttggtctcctgctgtgaggacattaaggaatatcactaacaacgctgacatccagcagatgaacagaccctcgaacgtggcccacattctgcagactctgtctgccccgaccaagaacttagagcagcaggtgaaccacagtcagcagggccacacgaacgccaatgccgtgctgttttcccaggtcaaagtcacccctgaaactcacatgcttcagcagcagcagcaggcacagcagcagcaacagcagcatcctgtgctccatttgcagccacagcaaatcatgcaactacagcaacagcagcaacagcagatcagccagcaaccatatcctcagcaaccacctcatcccttctcccagcagcagcagcagcaacaacaggcgcacccccaccagttctcacaacagcagttgcagtttccgcagcagcagttacatccccctcagcagctccataggccacagcagcagctccagcccttccagcaacaacatgcactgcaacagcagttccatcagttgcaacagcatcagctgcaacagcagcagctggcccagctgcaacagcagcacagccttttgcagcagcagcagcagcagcagatccagcagcagcagctccagcggatgcatcagcagcagcagcagcaacagatgcagtcccagactgccccccacctgagtcagacctctcaggccttgcagcatcaggttccccctcagcagccccctcagcagcagcaacagcaacagccaccaccaagccctcaacagcaccagctgttcggccacgatcccgccgtggagattccggaagaaggcttccttctgggatgcgtgttcgcgatagctgactaccctgagcagatgtctgataagcagttgctggcaacttggaaaagaatcatccaagcacacgggggcaccgtggatccgacctttactagtcgttgcacacaccttctctgtgaaagccaggtgtcctcagcctacgctcaggcaatccgcgagagaaaacgctgtgtgacagcccactggctgaacaccgtgcttaagaagaaaaaaatggttccaccccatagggcactccacttccctgtcgcctttccacccggcggaaaaccctgcagccaacacataatcagcgtaaccggcttcgtggattcggaccgcgatgacttgaagttaatggcctaccttgctggggccaaatacacaggctatctatgcaggtctaatacggtcctgatctgcaaagaacccaccggcctcaaatacgagaaagcaaaggaatggaggataccttgtgttaacgcccaatggttgggcgacatcctgttaggcaatttcgaggctctaagacagatccagtattcccggtacaccgctttctccttacaagatcccttcgcacctacccaacatctcgtgttgaatctactggatgcatggcgggtgccactcaaagtaagcgccgagctcctgatgtccattagactgcccccgaagttgaagcaaaatgaggtggcgaatgtgcagcctagttctaagagagcaagaattgaggatgtccccccccccactaagaagttgacgcccgagttgacaccctttgtactcttcacaggattcgaaccggttcaggtacaacaatacatcaagaagctctatatcctgggaggagaagtagctgaaagtgcgcaaaaatgtactcatctcatcgccagtaaagtcacacgtacagtcaagtttttaacggcgatcagcgttgtcaagcacatcgtgacccccgagtggttggaggagtgcttccgctgtcagaaattcatcgacgaacaaaactacattttgcgggacgcggaggccgaggtgcttttttccttctccctcgaggaatctctaaagcgcgcccacgtttcccctctcttcaaggcaaaatacttctatatcaccccggggatctgcccctccctgagcacaatgaaagctattgttgaatgcgcggggggcaaagtgctctcgaaacagccgtcgtttaggaaactgatggagcataagcagaatagtagtctttctgaaatcattttaatttcttgcgagaacgacctgcatctctgccgggaatatttcgctcgggggattgatgttcacaatgcggaattcgtactcaccggggttctgacacagacacttgattacgagtcgtacaaattcaattag

SEQ ID NO: 306887 - DNA, 3210 bp, Artificial Sequence
  derived and/or modified sequence
atgagcgaccaggcccccaaggtgcccgaggagatgttccgggaggtcaaatactacgccgtaggcgatattgatccccaggtgatccagcttctcaaggcaggcaaggccaaggaggtctcgtataatgcactcgcgtcccacattatctcggaggacggcgataatcctgaagtcggcgaagcgcgggaagtctttgacctgcccgtggtcaaaccaagctgggtcatactttctgtacagtgcggcacattactcccagtaaatggcttctcaccagagtcctgtcagatcttcttcggaataaccgcctgcttgtcacaagtgtcaagcgaagacaggtcagccctgtgggccttagtgacattctatgggggcgactgccagttaacgctcaataaaaaatgcacgcacctaatcgtgcccgaaccgaagggagaaaagtacgaatgtgctttgaagagagccagtattaaaattgtgacaccagactgggtacttgactgcgtgagtgagaagaccaaaaaagatgaggccttctatcaccctagattgatcatctatgaagaagaagaggaagaggaggaggaagaagaagaagttgaaaacgaggaacaggactctcagaacgaaggtagcacagacgaaaaaagttcccccgcctcatctcaggaaggaagcccttcaggcgaccagcaattcagtcccaaatccaacactgagaaaagcaaaggggagctgatgtttgacgacagttctgattcttcgccagagaagcaggagaggaatctaaattggaccccagcagaggtgccccagctcgcagccgcgaaaaggcggcttccccagggtaaagagccaggtctgattaatctatgcgccaatgtacctccagtgcccggaaatatccttccacccgaagtgaggggaaacttaatggcagccgggcagaaccttcagtcctctgagaggtctgaaatgatagccacctggagtcctgcggtgagaaccctgcgcaacattacaaataatgccgatattcagcagatgaacaggccttcaaacgttgcccatatcttacagactctttccgcccccacaaagaacttggaacagcaggtcaaccacagccaacagggacacaccaacgccaatgccgtgttgttctctcaggtaaaagtgacaccggaaacacatatgttgcaacagcaacagcaggcccagcaacagcagcaacagcatcccgttttgcatctgcagcctcagcagataatgcaactgcagcagcagcagcagcaacagatctctcaacaaccatacccgcaacagccaccccaccctttctctcaacagcaacagcagcaacagcaggcacatcctcaccagtttagccaacagcagctgcagttcccacagcagcagttacatccaccccagcagttgcacaggccccaacaacagctgcagcctttccagcagcagcatgcactgcagcagcagttccaccaactgcaacagcaccagctccagcaacagcagctcgcgcagttacagcagcagcactcgctcctacagcagcaacagcagcagcagatccagcaacaacagctccagcggatgcatcagcagcagcagcagcagcaaatgcagagccaaacagctcctcacttatctcagacaagtcaagctctgcagcatcaggttcccccccagcaacccccccagcagcaacaacagcagcaaccccctcctagccctcagcagcaccagctgttcgggcacgatccagctgtggagatacccgaggaagggttcctgctcggatgcgtttttgccatcgccgactaccccgaacaaatgtcggacaagcagctgcttgctacttggaagcggataatccaagctcacggcggcacagttgatcctacgtttactagtagatgtacccatttgttgtgtgaatcacaggtgagcagcgcatacgctcaggcgatcagagagcgaaagagatgcgtcacagcccactggttgaacacagttttgaagaagaagaaaatggtgccccctcatagagcactgcattttcctgtggctttccctccaggaggaaagccttgtagtcagcacatcatcagcgtcacaggatttgtggactctgaccgcgacgaccttaagctgatggcgtatcttgccggcgccaaatataccgggtacttgtgccgctctaacacagtcctcatatgtaaagaacctactgggttgaagtatgaaaaagccaaagagtggcgtatcccctgcgttaatgctcaatggctgggtgatatcctgctcggaaacttcgaagctttgcgacagattcagtatagccgctatacagcctttagtttgcaggacccctttgctcctacccaacatctcgtgctgaacttactggacgcttggcgggtaccactaaaggtatcagccgagctgctcatgagtattcggctgccgcctaaactgaagcagaacgaggtggctaatgtgcagccatcctctaaacgggcacggattgaagatgtgcctccccccaccaaaaagttaaccccagagctcaccccttttgttctgttcacaggctttgaacccgtgcaggtgcaacagtacataaagaaactctatatacttggtggtgaggtcgctgaatcagcccagaagtgtacccacctcatcgcctccaaagtgacccgcaccgtgaaattccttacagccatttccgtggtcaagcacatcgtgacccctgagtggcttgaggagtgtttcaggtgtcagaagttcatcgacgagcagaactatattctacgcgacgctgaagcggaggtcttgttctcattttcgctggaggaaagcttgaaaagagctcatgtatcaccgctgtttaaagccaagtacttttacatcaccccagggatctgcccttccctgtctactatgaaagcaatagtcgagtgcgccggtggcaaagtactgagtaaacagccaagttttcggaaactcatggagcataagcagaacagcagcctgtcagagataattctgattagttgcgaaaacgatctccacctctgccgggagtattttgcccggggaatcgatgtgcacaacgctgagtttgtgctaacgggggtactgactcaaacattggattatgaatcttataagtttaattag

SEQ ID NO: 306888 - DNA, 3069 bp, Artificial Sequence
  derived and/or modified sequence
atgtttagagaagtaaaatattacgctgtgggggacatcgacccccaagtaatccagctgttgaaggcaggtaaggccaaggaggtatcttataacgctctagcaagccacattatttcggaggacggcgacaatccagaggtgggagaggcacgagaggtcttcgatcttcccgtggttaaggtgagtagcgaggacaggtccgccctctgggcgctggtgacgttctatggaggggattgccagctgactcttaataagaagtgcactcacctgattgtccctgagcccaaaggtgaaaagtacgaatgcgctctcaaacgagcctcgatcaaaattgtgacccctgactgggtgctcgattgtgtgagtgagaaaactaaaaaggacgaagccttctatcatcccaggctcatcatctatgaggaagaggaagaagaagaggaagaggaagaggaagtggagaatgaggagcaggattcgcagaacgagggatcaacagacgaaaagagctctccagcatcctcacaggaaggaagcccctctggcgaccagcagttctcaccaaaatcaaacaccgagaaatccaagggcgagttgatgttcgacgacagttccgactccagcccagaaaagcaggagcgcaatttgaattggaccccggctgaagttccccagttggcagccgcaaaacggcgtctgcctcagggcaaagagcctggccttattaacttatgcgctaacgttcctcccgtccctggcaatatccttccacctgaagttaggggcaacctgatggccgctgggcaaaatctgcagtcgagtgagaggagcgagatgatcgccacatggtccccggcagtccgcacattgcggaacataaccaacaatgcggatatccagcaaatgaatcgtccctcaaacgtggctcacattctgcagacgctaagcgccccaaccaaaaacttggagcaacaggtcaatcactctcaacagggccatacaaacgccaatgctgtcctcttcagccaggtgaaggtcacgcctgagacccacatgcttcagcagcaacagcaagcccaacaacaacagcagcagcaccccgtgctccacctgcaacctcaacagatcatgcagttgcagcaacaacaacagcagcagatttcacagcagccgtatcctcagcaacctccccacccctttagtcagcagcagcagcagcagcagcaggcgcaccctcatcaattctcccagcagcagcttcagttcccacagcaacagctgcatcctcctcaacagcttcacagaccccagcagcagctgcagcccttccagcagcagcacgctctgcagcagcagtttcaccagctgcaacaacatcaattgcagcaacaacaattagctcagctgcagcagcaacattccttgctgcagcagcagcagcagcagcagatccagcagcaacagctgcaacggatgcaccaacagcagcaacaacagcaaatgcaatctcagactgcaccccatctctctcagacctctcaggccctccagcaccaggtgccccctcagcagccaccccagcagcaacagcagcagcaaccacctccctccccccaacagcaccagttgttcggacacgaccccgcagtggagatccccgaagagggcttcctgttggggtgcgtattcgctatcgccgactatccggagcagatgtccgataagcagctgctggccacctggaaaagaataatccaagcccatggagggaccgtggatcctacctttacatctaggtgcactcatttgctctgcgagtcccaggtctcatctgcttacgcgcaggccataagggaacggaagagatgtgtaaccgcccactggttgaataccgtgctgaagaagaaaaaaatggtgccaccccatcgcgcactgcatttcccagtggctttcccgccaggcggtaagccctgcagtcagcacatcatcagtgtaaccggcttcgtggatagcgacagggacgaccttaaactcatggcctatctcgccggagctaagtacactgggtatctgtgtaggagcaataccgtgttgatctgtaaagaaccgaccggcctcaagtacgaaaaggccaaggagtggcgcatcccctgcgtcaacgctcagtggctaggtgacattctgctcgggaatttcgaggcactgcggcagatccagtacagccgatatacggccttttcactacaagacccctttgctccaacacagcacctcgtcttaaacctgcttgacgcgtggcgagtcccactgaaagtctcagccgagctactcatgagcatccgactgccccctaagctgaagcaaaacgaggtggctaacgtgcagccttcatccaagagagcacgaatcgaagatgtgcccccaccaacaaaaaagctaaccccggagttgacgccatttgtactgtttacaggttttgaacctgtgcaagtgcagcagtatatcaaaaagctgtatattcttggaggggaggttgctgaatccgcacaaaagtgtacacacctgatcgcaagcaaagtgactaggaccgtgaagttcctgactgcaattagtgttgttaaacacatcgttacgccagagtggctagaggagtgtttcaggtgtcagaaattcatagatgaacagaattacatccttcgagatgccgaagctgaagttctgttctctttttctttagaggagagccttaagagagcccacgtgtccccacttttcaaagccaaatacttttatatcacccccggtatctgcccttccctgtcaactatgaaagcaatcgtcgagtgcgccggagggaaggtcttatctaagcagccttcatttaggaaactcatggagcacaaacagaattcatccttatcagagatcattttgatctcatgtgaaaatgatttacacctgtgtcgcgagtacttcgccagggggattgacgtccacaatgcagagtttgtgctgacaggcgtgctgacccagactttggattatgaatcttacaagtttaactag

SEQ ID NO: 306889 - DNA, 2682 bp, Artificial Sequence
  derived and/or modified sequence
gtccgggtgctgatccaagcaggggcactgtgctggtccctgcccgaactctctcagggggaggtgggcaagggagcctgccctgctgaagtcggaaagcacagggatcacctcccctcaagtgaccccgttcttatgcaggcagaggcctccgtggtgatgtgctgggtctcctcagaggatcggtccgccctatgggccctcgtcaccttctacggtggcgactgtcagctgacactgaataagaaatgtactcatctgattgtgcctgagccgaaaggagagaaatatgagtgtgctctcaagcgggcatccatcaagatcgtcacccccgattgggtcttggactgcgtcagtgaaaagactaagaaggacgaggccttttatcaccctcgcttgattatttacgaggaagaggaggaagaagaagaagaagaagaggaggtcgaaaacgaagagcaggatagtcagaacgaggggtccacagacgagaaatcatcacccgcatcatctcaggaaggtagcccatctggggatcagcagttttcaccgaaatccaatacggagaagtcaaaaggggagctaatgtttgacgatagcagtgatagttcccccgagaaacaggaacggaacctgaattggacaccagccgaagtgcctcagcttgcggctgcaaagagacgtctaccccaaggcaaggagcctggcctgataaacctctgtgcaaatgtaccccctgtccccggtaatatcttgccgcctgaagtccgcggtaatctcatggcggcaggacagaatctgcaaagctctgaaagatctgagatgatcgcaacttggtcccccgctgtgaggacactgcgcaacattaccaataatgccgatatccaacagatgaacagaccctccaatgtcgcacatatcctgcaaaccctttccgcccctacaaaaaacctcgaacagcaggtgaaccattctcagcaggggcacacaaacgcaaacgcggtactattctcgcaggtcaaagtgacgcccgaaacccacatgctgcaacagcagcagcaggcccagcagcagcaacagcagcatcccgttctccacctgcaaccacagcagataatgcagttgcagcagcaacaacagcagcagattagtcaacaaccttacccacagcagccaccccatccgttcagccagcagcaacagcagcagcagcaaccgcctccttcacctcagcagcatcagctcttcggtcacgaccccgcagtggaaatccctgaagagggattcctactcggatgcgtgttcgccatcgctgattaccctgagcaaatgagtgataaacagctgttagctacatggaagcgcattattcaggcgcacggcggaaccgtggatcccactttcacctcccggtgtacccatttgctgtgcgagtctcaagtgtccagcgcgtacgcacaggctattcgtgagcgtaaacggtgcgtcaccgcccactggctgaatacagtcctcaagaagaagaaaatggtgccacctcacagagcgctacactttccagtagcgttcccacctgggggtaagccctgctctcagcatattatcagtgtcaccggcttcgttgactctgatagagacgatctcaaactaatggcctacttggctggagctaagtacactgggtatctgtgccggtcaaataccgttcttatttgtaaggaacccacaggacttaaatatgagaaggccaaggaatggcgcattccatgtgtcaatgctcagtggctgggcgacatactactcggcaattttgaagctctgcgccagatccagtattctcgatacaccgcatttagcctccaagatccatttgctcctactcaacatctagtcctgaatctgctggacgcttggagagtcccactgaaggtatcagcggagttactgatgtcgatcagactgcctcctaaacttaagcagaacgaggtagctaacgttcaacctagttccaagagggctaggattgaagatgtcccaccaccaaccaagaagcttacccccgagctgactcctttcgtcttatttaccgggtttgagcccgtacaggtgcagcagtacattaagaagctttacattctggggggagaagttgctgaaagcgcacagaagtgcacgcacttgattgcctccaaagttacacgcactgtgaaatttctgacggccattagtgttgtaaaacatattgtgactccagaatggttggaagaatgtttccgatgtcagaaattcatcgacgagcagaattatattctaagggacgccgaagcagaagtcctattttctttctccctagaggagtcgcttaaacgggctcacgtgagccccctcttcaaagccaaatatttctatattacccctgggatctgccctagcttgtcaactatgaaggccatcgtggaatgcgcaggtggcaaagtgctcagtaaacagccctccttccgtaagctgatggagcacaagcaaaactcttctctgtccgagataattttgattagctgtgagaacgatctacacctgtgtcgggaatattttgcgcgtgggatcgatgttcataacgcagagtttgtgctcacgggtgtgttaacgcagaccctggattacgagtcctataaattcaactag

SEQ ID NO: 306890 - DNA, 3210 bp, Artificial Sequence
  derived and/or modified sequence
atgtccgaccaggcccctaaagttcctgaggaaatgttccgagaagtgaaatactacgcagtgggcgacatcgatccacaggtgatccaactgctgaaagccggaaaggctaaagaggtcagctacaatgccctagccagccacattattagcgaggacggtgataacccagaagttggagaggcccgtgaagtatttgacctgcccgtcgttaaacccagctgggttattctcagcgtgcaatgcggtactctgctgcctgtcaacggcttttcacccgaaagctgccaaatattcttcgggatcaccgcctgcctgagccaggtatcgtccgaggatcggtccgccctctgggcccttgtgaccttctacggcggagattgtcaactcaccctgaataaaaagtgcacacatctcatcgtgcctgagccaaagggagagaagtatgaatgtgctctgaaacgggcatccatcaagatcgtgacccccgactgggtgttagactgcgtgagtgaaaaaacgaagaaggatgaagccttctatcatccaagattgatcatttatgaggaagaagaagaggaagaggaagaggaggaagaggtggagaacgaagagcaggacagccagaatgagggctctactgacgagaaatcatcccccgcaagtagccaggagggatctccctccggcgaccagcagttttctcccaagagtaatactgaaaaatcaaagggagaactgatgttcgacgatagctcagactcctctcctgagaaacaggagaggaacctgaactggactcctgctgaggtcccccagctcgctgctgctaagcgacgcttgccacagggaaaggagcccggactgatcaatctttgtgccaacgtacctcctgtaccagggaacatactgccccctgaggtaaggggcaatctcatggctgccggacaaaatctgcagtcatccgagaggtccgagatgattgctacatggtcgcctgcagtccgcaccctgcgcaacatcaccaataacgccgatatccaacagatgaaccgcccttctaacgtggctcatatcctccagacactgagtgccccaacaaagaacctggagcagcaggttaaccactcccagcagggacatactaatgccaacgccgtcctcttctcacaggtgaaggtaactcccgagacccacatgctccagcagcagcagcaagcccaacaacagcagcagcagcacccggttctgcacctccaaccgcagcagatcatgcagttgcagcaacagcagcagcaacagatctcacagcaaccctacccccagcagcctccacacccctttagccagcagcagcaacagcagcaacaggcccatcctcatcagttttcgcagcagcaactgcaatttcctcagcaacaactgcacccccctcagcagttgcacaggccccaacaacaactccagcctttccaacagcaacatgctttacagcagcaattccaccaattgcagcagcatcagctccaacaacagcagttagcccagctccagcaacagcactccttactgcagcagcaacagcagcagcaaattcaacagcagcagcttcagcgaatgcaccagcagcagcaacagcagcagatgcagtctcagactgctcctcatctgtcccaaaccagccaggccctgcagcatcaggtcccgcctcagcagcccccacagcagcagcagcagcaacagccaccaccttcacctcaacagcaccagttattcggccatgatccagctgtggaaatccccgaggagggcttcctcttgggatgcgttttcgctatcgccgactatcctgaacagatgtcagacaagcagctcctcgccacatggaagcgtattatacaggcacatgggggtacagtcgatccaacatttacaagtcggtgtacccatctattatgtgaaagtcaggtgagtagtgcttacgcccaggctattagggagcgaaaacgttgtgtaactgcccactggctcaataccgtgctcaagaagaaaaaaatggtgccacctcatcgggcattacactttcccgtggcattcccccctgggggaaaaccctgttcacaacatatcatctctgtaacaggttttgttgatagtgaccgggatgaccttaaactgatggcctatctggctggggcaaagtataccggatatctctgtagaagtaacacagtgttaatatgcaaagaacccacaggactgaaatatgaaaaggctaaagagtggagaattccctgtgtcaacgcacagtggcttggcgacatattgttgggcaatttcgaggccctgcggcaaatccagtactctagatacactgcattctccttgcaggaccccttcgcccctacccagcacctggtcctcaatctactggatgcatggcgagtccctcttaaggtctccgccgagcttctgatgtcaatccgactcccacccaagctcaagcagaatgaggttgcgaacgtgcaaccatcgtctaagcgggcacgtatagaggacgtccccccacctactaagaaactcaccccagagctaacgcccttcgtgctcttcaccggttttgagcccgtgcaggtacagcagtacatcaaaaaactctacatcttaggtggggaggtggctgagagcgcccaaaagtgtacccaccttatagcgtcaaaggtgactcgtaccgtgaagttcctgactgctatctcggtcgtgaagcacatcgtaactccggaatggttagaagaatgctttagatgtcagaaattcatcgatgaacaaaattacatcctacgggacgcagaggctgaggtcctattcagtttttccctggaggagtccctcaagagagctcatgtgagccctctctttaaggctaagtatttttacatcaccccgggaatctgccctagcctaagcacgatgaaagccatcgtcgagtgtgccggagggaaggtcttaagtaagcaaccctcctttcggaaattgatggagcacaaacagaattcctcactatcggagatcatccttatcagctgcgagaacgaccttcatttatgccgggaatatttcgctcggggtatagatgtgcacaatgcggagttcgtgctcacaggtgtcttaacacaaactctcgactacgagagctacaagtttaactag

SEQ ID NO: 306891 - DNA, 3210 bp, Artificial Sequence
  derived and/or modified sequence
atgtccgatcaggctccaaaggtgccagaggagatgttccgggaggttaagtattatgctgtgggcgatatcgacccccaggttatacagctgctcaaggcagggaaggcaaaggaagtgagttacaacgccctcgcgtcccacattatttccgaggatggtgacaaccctgaggtcggagaagccagagaggtgttcgacctgccggtcgtcaaaccgtcttgggttatcctgagcgtgcagtgcggaacactgttgccagtgaacggtttcagcccagagtcctgccaaatctttttcggaattactgcctgtctgtcacaagtgtcctcagaagataggagcgctctttgggcacttgtgacattttacggcggtgactgccagctcacattgaacaaaaaatgcactcaccttattgtgcccgagccaaagggagagaagtacgaatgtgcactgaagcgcgcaagtattaagattgtaaccccagactgggttctggactgcgtaagtgaaaagaccaagaaggatgaagccttttaccatcctcggctgatcatatacgaggaggaggaggaagaggaagaggaagaagaggaggtggagaacgaggagcaggactcccaaaatgagggcagcactgatgaaaagagttctccggcaagctctcaagagggcagccctagcggcgatcagcagttctcccctaaaagcaatactgagaagtccaaaggggaattgatgtttgatgattcctctgatagctctcctgaaaagcaggaacgaaacctgaattggactccggctgaggtgcctcaattggcagctgcaaagcggagactgcctcaggggaaggaacctgggttgatcaatttatgtgccaacgtcccccctgtgccaggaaacatcttgcccccagaagtcagaggtaacctcatggccgcaggacagaacctccagtcgtcagaacggtccgagatgattgccacgtggtctcccgcagttagaacacttaggaacatcacaaacaacgcagacattcagcaaatgaaccgcccttctaacgttgcccacatattacagacattatctgccccaactaagaatttagaacaacaggtgaaccattcacaacaggggcatactaatgccaatgccgtgctgtttagtcaagttaaggtgacacccgagacacacatgctgcagcaacagcaacaggcccagcagcaacaacaacagcaccctgttttgcatctacagcctcagcagattatgcagctccagcagcagcagcagcagcagatttcccagcagccctatcctcagcaaccaccacatccattttcccagcaacaacagcaacagcaacaggcacacccgcaccagttctctcagcagcagttgcaatttccgcaacagcaattgcaccccccacagcagctacacaggccgcagcaacagctgcagccattccagcaacaacacgccttgcaacaacaattccatcagttgcaacaacatcagttacagcaacagcaattggcccaactccagcaacaacactcactgttgcagcagcagcagcagcagcagatacaacagcaacagctacagaggatgcatcaacaacagcagcaacaacagatgcagtcacagactgcccctcacctaagtcagacttctcaggctctgcagcaccaggtccctccccagcagccaccacagcagcaacaacagcaacaacctcctcctagtccccagcagcaccagctatttgggcacgacccagccgtcgagattccagaggagggtttcttattggggtgtgtgtttgcaatcgccgactatcctgaacagatgtcggataagcagctgctggccacttggaaacgcatcattcaggcacacggaggtaccgtggacccaacttttaccagccgctgcacacacctgctgtgtgagagccaggtatcgagtgcctatgcgcaagctatcagggagcgcaagcggtgcgttaccgcccactggctcaatacagttctgaaaaagaaaaagatggtccccccacatcgcgcactgcatttccccgtggcctttcctccgggtggcaagccttgttcacagcatattatttctgtaactggctttgtggatagcgatagagatgatctgaagctaatggcttatctagccggtgccaagtataccgggtatttgtgtcgcagcaacaccgtgctcatctgcaaagagcctactggcctgaaatatgaaaaggcaaaagaatggcgcatcccctgcgtcaacgcccagtggttgggcgatatccttctgggcaattttgaggccttgcgacaaatccaatactcccgctatactgccttctccctccaggaccctttcgccccaacccagcacctggttctgaatctgttagacgcctggagagtcccgctgaaggtctctgccgagttattaatgtccattaggctccctcccaaactcaagcagaacgaggttgctaacgtgcaaccatcttctaagcgcgcacgcattgaggacgtgcccccaccgaccaaaaaattaactccagagctcacaccttttgtgttgttcacaggattcgaaccagttcaagtccagcagtacatcaagaaactgtacatcctggggggagaggtagctgagtccgctcaaaaatgtacacacttaatagcctccaaggtcacccgaactgtcaagtttctcaccgctattagcgtcgtcaagcatatcgtgacaccagagtggctggaggaatgtttccgttgccagaagtttattgacgaacagaattacatcctgcgggatgctgaggccgaagtactcttttcattctctctggaagagagtttgaagcgagctcatgtatccccgctgtttaaggccaaatatttttatatcacaccagggatctgtcccagcttaagtaccatgaaggcgattgtggaatgcgcaggaggaaaagtgctctcaaagcagcccagttttcgtaagttaatggaacacaagcagaattcgtctctcagtgaaattatacttatctcatgcgagaatgatctccatctctgccgagagtacttcgcgcgagggatcgacgtacataacgctgagtttgtgctgaccggagttttgactcaaacactcgactatgagagctacaaatttaactag

SEQ ID NO: 306892 - DNA, 3069 bp, Artificial Sequence
  derived and/or modified sequence
atgttcagagaggtgaagtactacgccgtgggcgacatcgacccccaggtgatccagctgctgaaggccggcaaggccaaggaggtgagctacaacgccctggccagccacatcatcagcgaggacggcgacaaccccgaggtgggcgaggccagagaggtgttcgacctgcccgtggtgaaggtgagcagcgaggacagaagcgccctgtgggccctggtgaccttctacggcggcgactgccagctgaccctgaacaagaagtgcacccacctgatcgtgcccgagcccaagggcgagaagtacgagtgcgccctgaagagagccagcatcaagatcgtgacccccgactgggtgctggactgcgtgagcgagaagaccaagaaggacgaggccttctaccaccccagactgatcatctacgaggaggaggaggaggaggaggaggaggaggaggaggtggagaacgaggagcaggacagccagaacgagggcagcaccgacgagaagagcagccccgccagcagccaggagggcagccccagcggcgaccagcagttcagccccaagagcaacaccgagaagagcaagggcgagctgatgttcgacgacagcagcgacagcagccccgagaagcaggagagaaacctgaactggacccccgccgaggtgccccagctggccgccgccaagagaagactgccccagggcaaggagcccggcctgatcaacctgtgcgccaacgtgccccccgtgcccggcaacatcctgccccccgaggtgagaggcaacctgatggccgccggccagaacctgcagagcagcgagagaagcgagatgatcgccacctggagccccgccgtgagaaccctgagaaacatcaccaacaacgccgacatccagcagatgaacagacccagcaacgtggcccacatcctgcagaccctgagcgcccccaccaagaacctggagcagcaggtgaaccacagccagcagggccacaccaacgccaacgccgtgctgttcagccaggtgaaggtgacccccgagacccacatgctgcagcagcagcagcaggcccagcagcagcagcagcagcaccccgtgctgcacctgcagccccagcagatcatgcagctgcagcagcagcagcagcagcagatcagccagcagccctacccccagcagcccccccaccccttcagccagcagcagcagcagcagcagcaggcccacccccaccagttcagccagcagcagctgcagttcccccagcagcagctgcaccccccccagcagctgcacagaccccagcagcagctgcagcccttccagcagcagcacgccctgcagcagcagttccaccagctgcagcagcaccagctgcagcagcagcagctggcccagctgcagcagcagcacagcctgctgcagcagcagcagcagcagcagatccagcagcagcagctgcagagaatgcaccagcagcagcagcagcagcagatgcagagccagaccgccccccacctgagccagaccagccaggccctgcagcaccaggtgcccccccagcagcccccccagcagcagcagcagcagcagcccccccccagcccccagcagcaccagctgttcggccacgaccccgccgtggagatccccgaggagggcttcctgctgggctgcgtgttcgccatcgccgactaccccgagcagatgagcgacaagcagctgctggccacctggaagagaatcatccaggcccacggcggcaccgtggaccccaccttcaccagcagatgcacccacctgctgtgcgagagccaggtgagcagcgcctacgcccaggccatcagagagagaaagagatgcgtgaccgcccactggctgaacaccgtgctgaagaagaagaagatggtgcccccccacagagccctgcacttccccgtggccttcccccccggcggcaagccctgcagccagcacatcatcagcgtgaccggcttcgtggacagcgacagagacgacctgaagctgatggcctacctggccggcgccaagtacaccggctacctgtgcagaagcaacaccgtgctgatctgcaaggagcccaccggcctgaagtacgagaaggccaaggagtggagaatcccctgcgtgaacgcccagtggctgggcgacatcctgctgggcaacttcgaggccctgagacagatccagtacagcagatacaccgccttcagcctgcaggaccccttcgcccccacccagcacctggtgctgaacctgctggacgcctggagagtgcccctgaaggtgagcgccgagctgctgatgagcatcagactgccccccaagctgaagcagaacgaggtggccaacgtgcagcccagcagcaagagagccagaatcgaggacgtgcccccccccaccaagaagctgacccccgagctgacccccttcgtgctgttcaccggcttcgagcccgtgcaggtgcagcagtacatcaagaagctgtacatcctgggcggcgaggtggccgagagcgcccagaagtgcacccacctgatcgccagcaaggtgaccagaaccgtgaagttcctgaccgccatcagcgtggtgaagcacatcgtgacccccgagtggctggaggagtgcttcagatgccagaagttcatcgacgagcagaactacatcctgagagacgccgaggccgaggtgctgttcagcttcagcctggaggagagcctgaagagagcccacgtgagccccctgttcaaggccaagtacttctacatcacccccggcatctgccccagcctgagcaccatgaaggccatcgtggagtgcgccggcggcaaggtgctgagcaagcagcccagcttcagaaagctgatggagcacaagcagaacagcagcctgagcgagatcatcctgatcagctgcgagaacgacctgcacctgtgcagagagtacttcgccagaggcatcgacgtgcacaacgccgagttcgtgctgaccggcgtgctgacccagaccctggactacgagagctacaagttcaactag

SEQ ID NO: 306893 - DNA, 2682 bp, Artificial Sequence
  derived and/or modified sequence
gtgagagtgctgatccaggccggcgccctgtgctggagcctgcccgagctgagccagggcgaggtgggcaagggcgcctgccccgccgaggtgggcaagcacagagaccacctgcccagcagcgaccccgtgctgatgcaggccgaggccagcgtggtgatgtgctgggtgagcagcgaggacagaagcgccctgtgggccctggtgaccttctacggcggcgactgccagctgaccctgaacaagaagtgcacccacctgatcgtgcccgagcccaagggcgagaagtacgagtgcgccctgaagagagccagcatcaagatcgtgacccccgactgggtgctggactgcgtgagcgagaagaccaagaaggacgaggccttctaccaccccagactgatcatctacgaggaggaggaggaggaggaggaggaggaggaggaggtggagaacgaggagcaggacagccagaacgagggcagcaccgacgagaagagcagccccgccagcagccaggagggcagccccagcggcgaccagcagttcagccccaagagcaacaccgagaagagcaagggcgagctgatgttcgacgacagcagcgacagcagccccgagaagcaggagagaaacctgaactggacccccgccgaggtgccccagctggccgccgccaagagaagactgccccagggcaaggagcccggcctgatcaacctgtgcgccaacgtgccccccgtgcccggcaacatcctgccccccgaggtgagaggcaacctgatggccgccggccagaacctgcagagcagcgagagaagcgagatgatcgccacctggagccccgccgtgagaaccctgagaaacatcaccaacaacgccgacatccagcagatgaacagacccagcaacgtggcccacatcctgcagaccctgagcgcccccaccaagaacctggagcagcaggtgaaccacagccagcagggccacaccaacgccaacgccgtgctgttcagccaggtgaaggtgacccccgagacccacatgctgcagcagcagcagcaggcccagcagcagcagcagcagcaccccgtgctgcacctgcagccccagcagatcatgcagctgcagcagcagcagcagcagcagatcagccagcagccctacccccagcagcccccccaccccttcagccagcagcagcagcagcagcagcagcccccccccagcccccagcagcaccagctgttcggccacgaccccgccgtggagatccccgaggagggcttcctgctgggctgcgtgttcgccatcgccgactaccccgagcagatgagcgacaagcagctgctggccacctggaagagaatcatccaggcccacggcggcaccgtggaccccaccttcaccagcagatgcacccacctgctgtgcgagagccaggtgagcagcgcctacgcccaggccatcagagagagaaagagatgcgtgaccgcccactggctgaacaccgtgctgaagaagaagaagatggtgcccccccacagagccctgcacttccccgtggccttcccccccggcggcaagccctgcagccagcacatcatcagcgtgaccggcttcgtggacagcgacagagacgacctgaagctgatggcctacctggccggcgccaagtacaccggctacctgtgcagaagcaacaccgtgctgatctgcaaggagcccaccggcctgaagtacgagaaggccaaggagtggagaatcccctgcgtgaacgcccagtggctgggcgacatcctgctgggcaacttcgaggccctgagacagatccagtacagcagatacaccgccttcagcctgcaggaccccttcgcccccacccagcacctggtgctgaacctgctggacgcctggagagtgcccctgaaggtgagcgccgagctgctgatgagcatcagactgccccccaagctgaagcagaacgaggtggccaacgtgcagcccagcagcaagagagccagaatcgaggacgtgcccccccccaccaagaagctgacccccgagctgacccccttcgtgctgttcaccggcttcgagcccgtgcaggtgcagcagtacatcaagaagctgtacatcctgggcggcgaggtggccgagagcgcccagaagtgcacccacctgatcgccagcaaggtgaccagaaccgtgaagttcctgaccgccatcagcgtggtgaagcacatcgtgacccccgagtggctggaggagtgcttcagatgccagaagttcatcgacgagcagaactacatcctgagagacgccgaggccgaggtgctgttcagcttcagcctggaggagagcctgaagagagcccacgtgagccccctgttcaaggccaagtacttctacatcacccccggcatctgccccagcctgagcaccatgaaggccatcgtggagtgcgccggcggcaaggtgctgagcaagcagcccagcttcagaaagctgatggagcacaagcagaacagcagcctgagcgagatcatcctgatcagctgcgagaacgacctgcacctgtgcagagagtacttcgccagaggcatcgacgtgcacaacgccgagttcgtgctgaccggcgtgctgacccagaccctggactacgagagctacaagttcaactag

SEQ ID NO: 306894 - DNA, 3210 bp, Artificial Sequence
  derived and/or modified sequence
atgagcgaccaggcccccaaggtgcccgaggagatgttcagagaggtgaagtactacgccgtgggcgacatcgacccccaggtgatccagctgctgaaggccggcaaggccaaggaggtgagctacaacgccctggccagccacatcatcagcgaggacggcgacaaccccgaggtgggcgaggccagagaggtgttcgacctgcccgtggtgaagcccagctgggtgatcctgagcgtgcagtgcggcaccctgctgcccgtgaacggcttcagccccgagagctgccagatcttcttcggcatcaccgcctgcctgagccaggtgagcagcgaggacagaagcgccctgtgggccctggtgaccttctacggcggcgactgccagctgaccctgaacaagaagtgcacccacctgatcgtgcccgagcccaagggcgagaagtacgagtgcgccctgaagagagccagcatcaagatcgtgacccccgactgggtgctggactgcgtgagcgagaagaccaagaaggacgaggccttctaccaccccagactgatcatctacgaggaggaggaggaggaggaggaggaggaggaggaggtggagaacgaggagcaggacagccagaacgagggcagcaccgacgagaagagcagccccgccagcagccaggagggcagccccagcggcgaccagcagttcagccccaagagcaacaccgagaagagcaagggcgagctgatgttcgacgacagcagcgacagcagccccgagaagcaggagagaaacctgaactggacccccgccgaggtgccccagctggccgccgccaagagaagactgccccagggcaaggagcccggcctgatcaacctgtgcgccaacgtgccccccgtgcccggcaacatcctgccccccgaggtgagaggcaacctgatggccgccggccagaacctgcagagcagcgagagaagcgagatgatcgccacctggagccccgccgtgagaaccctgagaaacatcaccaacaacgccgacatccagcagatgaacagacccagcaacgtggcccacatcctgcagaccctgagcgcccccaccaagaacctggagcagcaggtgaaccacagccagcagggccacaccaacgccaacgccgtgctgttcagccaggtgaaggtgacccccgagacccacatgctgcagcagcagcagcaggcccagcagcagcagcagcagcaccccgtgctgcacctgcagccccagcagatcatgcagctgcagcagcagcagcagcagcagatcagccagcagccctacccccagcagcccccccaccccttcagccagcagcagcagcagcagcagcaggcccacccccaccagttcagccagcagcagctgcagttcccccagcagcagctgcaccccccccagcagctgcacagaccccagcagcagctgcagcccttccagcagcagcacgccctgcagcagcagttccaccagctgcagcagcaccagctgcagcagcagcagctggcccagctgcagcagcagcacagcctgctgcagcagcagcagcagcagcagatccagcagcagcagctgcagagaatgcaccagcagcagcagcagcagcagatgcagagccagaccgccccccacctgagccagaccagccaggccctgcagcaccaggtgcccccccagcagcccccccagcagcagcagcagcagcagcccccccccagcccccagcagcaccagctgttcggccacgaccccgccgtggagatccccgaggagggcttcctgctgggctgcgtgttcgccatcgccgactaccccgagcagatgagcgacaagcagctgctggccacctggaagagaatcatccaggcccacggcggcaccgtggaccccaccttcaccagcagatgcacccacctgctgtgcgagagccaggtgagcagcgcctacgcccaggccatcagagagagaaagagatgcgtgaccgcccactggctgaacaccgtgctgaagaagaagaagatggtgcccccccacagagccctgcacttccccgtggccttcccccccggcggcaagccctgcagccagcacatcatcagcgtgaccggcttcgtggacagcgacagagacgacctgaagctgatggcctacctggccggcgccaagtacaccggctacctgtgcagaagcaacaccgtgctgatctgcaaggagcccaccggcctgaagtacgagaaggccaaggagtggagaatcccctgcgtgaacgcccagtggctgggcgacatcctgctgggcaacttcgaggccctgagacagatccagtacagcagatacaccgccttcagcctgcaggaccccttcgcccccacccagcacctggtgctgaacctgctggacgcctggagagtgcccctgaaggtgagcgccgagctgctgatgagcatcagactgccccccaagctgaagcagaacgaggtggccaacgtgcagcccagcagcaagagagccagaatcgaggacgtgcccccccccaccaagaagctgacccccgagctgacccccttcgtgctgttcaccggcttcgagcccgtgcaggtgcagcagtacatcaagaagctgtacatcctgggcggcgaggtggccgagagcgcccagaagtgcacccacctgatcgccagcaaggtgaccagaaccgtgaagttcctgaccgccatcagcgtggtgaagcacatcgtgacccccgagtggctggaggagtgcttcagatgccagaagttcatcgacgagcagaactacatcctgagagacgccgaggccgaggtgctgttcagcttcagcctggaggagagcctgaagagagcccacgtgagccccctgttcaaggccaagtacttctacatcacccccggcatctgccccagcctgagcaccatgaaggccatcgtggagtgcgccggcggcaaggtgctgagcaagcagcccagcttcagaaagctgatggagcacaagcagaacagcagcctgagcgagatcatcctgatcagctgcgagaacgacctgcacctgtgcagagagtacttcgccagaggcatcgacgtgcacaacgccgagttcgtgctgaccggcgtgctgacccagaccctggactacgagagctacaagttcaactag

SEQ ID NO: 306895 - DNA, 585 bp, Artificial Sequence
  derived and/or modified sequence
atgcccgcccccagattcctgtacagcctgagaaactacgagcccatgaagcccctgttcttcatcaactaccccgtgagcgacatggagctgcccgtgagaagcagcaccgtgaccctgctgcccgcccccctgcccagaagaggcagcgtgaagaccttcctggcccccagcaagagctacttccccgaggaggagagagccctgctgaagagcagccacgccttctgcaccggcctgtggccctggagaagagacttccagctgccccagtgccacctggccctgggcctgctgcccggcgagagaagcgtgagactgcccagattcctggccgtgctgaaggagctgagcgccaccgccagcttcaccctggccagcgaggccatccccttcctgagcagcttccccttcccctggaacctgctgctgcccagcgtgttccaggccctgccccagaagtggcagttcaaggccgacttcctgctggagtgcaccctgagcgtgaaggaggccttccaccaggagtgcggcgccggcgtgagcctggccaacggcctgaacaagggcctgagaaccggctag

SEQ ID NO: 306896 - protein, 530 aa, Artificial Sequence
  derived and/or modified sequence
MYFLCFFCLFVSGRKWSRQFLLSFWCTVCSAHQGTIFLSLKIQFADQKQEFNKRPTKIGRRSLSRSISQSSTDSYSSAASYTDSSDDETSPRDKQQKNSKGSSDFCVKNIKQAEFGRREIEIAEQEMPALMALRKRAQGEKPLAGAKIVGCTHITAQTAVLMETLGALGAQCRWAACNIYSTLNEVAAALAESGFPVFAWKGESEDDFWWCIDRCVNVEGWQPNMILDDGGDLTHWIYKKYPNMFKKIKGIVEESVTGVHRLYQLSKAGKLCVPAMNVNDSVTKQKFDNLYCCRESILDGLKRTTDMMFGGKQVVVCGYGEVGKGCCAALKAMGSIVYVTEIDPICALQACMDGFRLVKLNEVIRQVDIVITCTGNKNVVTREHLDRMKNSCIVCNMGHSNTEIDVASLRTPELTWERVRSQVDHVIWPDGKRIVLLAEGRLLNLSCSTVPTFVLSITATTQALALIELYNAPEGRYKQDVYLLPKKMDEYVASLHLPTFDAHLTELTDEQAKYLGLNKNGPFKPNYYRY

SEQ ID NO: 306897 - DNA, 1593 bp, Artificial Sequence
  derived and/or modified sequence
atgtacttcctgtgcttcttctgcctgttcgtgagcggcagaaagtggagcagacagttcctgctgagcttctggtgcaccgtgtgcagcgcccaccagggcaccatcttcctgagcctgaagatccagttcgccgaccagaagcaggagttcaacaagagacccaccaagatcggcagaagaagcctgagcagaagcatcagccagagcagcaccgacagctacagcagcgccgccagctacaccgacagcagcgacgacgagaccagccccagagacaagcagcagaagaacagcaagggcagcagcgacttctgcgtgaagaacatcaagcaggccgagttcggcagaagagagatcgagatcgccgagcaggagatgcccgccctgatggccctgagaaagagagcccagggcgagaagcccctggccggcgccaagatcgtgggctgcacccacatcaccgcccagaccgccgtgctgatggagaccctgggcgccctgggcgcccagtgcagatgggccgcctgcaacatctacagcaccctgaacgaggtggccgccgccctggccgagagcggcttccccgtgttcgcctggaagggcgagagcgaggacgacttctggtggtgcatcgacagatgcgtgaacgtggagggctggcagcccaacatgatcctggacgacggcggcgacctgacccactggatctacaagaagtaccccaacatgttcaagaagatcaagggcatcgtggaggagagcgtgaccggcgtgcacagactgtaccagctgagcaaggccggcaagctgtgcgtgcccgccatgaacgtgaacgacagcgtgaccaagcagaagttcgacaacctgtactgctgcagagagagcatcctggacggcctgaagagaaccaccgacatgatgttcggcggcaagcaggtggtggtgtgcggctacggcgaggtgggcaagggctgctgcgccgccctgaaggccatgggcagcatcgtgtacgtgaccgagatcgaccccatctgcgccctgcaggcctgcatggacggcttcagactggtgaagctgaacgaggtgatcagacaggtggacatcgtgatcacctgcaccggcaacaagaacgtggtgaccagagagcacctggacagaatgaagaacagctgcatcgtgtgcaacatgggccacagcaacaccgagatcgacgtggccagcctgagaacccccgagctgacctgggagagagtgagaagccaggtggaccacgtgatctggcccgacggcaagagaatcgtgctgctggccgagggcagactgctgaacctgagctgcagcaccgtgcccaccttcgtgctgagcatcaccgccaccacccaggccctggccctgatcgagctgtacaacgcccccgagggcagatacaagcaggacgtgtacctgctgcccaagaagatggacgagtacgtggccagcctgcacctgcccaccttcgacgcccacctgaccgagctgaccgacgagcaggccaagtacctgggcctgaacaagaacggccccttcaagcccaactactacagatactag

SEQ ID NO: 306898 - DNA, 4758 bp, Artificial Sequence
  derived and/or modified sequence
atgtattttctctgctttttttgtttgtttgtttcaggcaggaagtggagccgtcagttcctgctttcattctggtgtactgtatgttctgcccatcaaggaaccatctttttatcattaaagatccagtttgctgaccagaagcaagaattcaacaaacgtcccaccaaaattggacgtcgctctttgtctcgttccatttctcagtcatctactgacagctacagctcagcggcttcatatacagatagctctgatgatgagacatcgcccagggacaagcagcaaaagaactctaagggaagcagtgacttctgtgttaagaacatcaaacaggcagagtttggacgaagagaaattgaaattgctgaacaagaaatgcctgcattgatggctttgaggaagagagctcaaggagaaaagcctttggctggagccaaaatcgtgggttgcacacacatcactgctcagactgctgtgcttatggaaactctgggtgctctgggggcccagtgccgatgggctgcctgcaacatctattccactctcaatgaagtggctgctgctctagcagaaagtggatttcctgtttttgcctggaagggagagtcagaagatgacttttggtggtgtatcgatagatgtgtgaatgtggagggctggcagccaaacatgatcttggatgatggaggggatcttacccactggatttataaaaagtatcccaacatgtttaagaaaatcaagggcatagtagaggagagtgttactggagttcacaggctgtaccaactgtccaaagctgggaagctgtgtgttccagccatgaatgtcaatgactcagtcaccaaacagaaatttgacaacctctactgttgccgtgaatcaattcttgatggacttaaaaggacaacagacatgatgtttggtggaaagcaagtggtagtctgtggctatggagaggtggggaaagggtgctgtgctgccctgaaagccatgggctccattgtgtatgtaactgaaattgaccccatctgtgccctgcaagcctgtatggatggatttcgactggtgaaattaaatgaggtcatccgacaagtggacattgttattacctgtacaggtaacaagaatgtggtaaccagagagcacttggaccgtatgaagaatagctgcatcgtttgtaacatgggacattccaacacagagattgacgtggcgagtctgcggacaccagaactgacctgggagcgagtgagatctcaagttgaccatgtgatatggcctgatggcaagaggatagtactgctggcagagggccgcctgctgaaccttagctgctccacagtgcctacatttgtgctctcaatcactgctactactcaggctcttgccttgatagagctttacaatgctcctgagggtcgctataagcaggatgtctacctgttgcccaagaagatggatgagtatgtggccagcctacacctgcctacctttgatgcccacttgacagagctgacagatgaacaggccaagtatctgggactcaacaagaatgggcccttcaagcctaattactacaggtattaagttcctgtaactcaaaccagaatttttaaggaatagaactccaagccttttctccactactatacaagaaagaattcagcaagctgcttctccaatcaaagctgcctgccgtgctcaccctgtgtgttaggttatttatttattaaaatcaagaatcctgtgcctgtagtgttggcccagagtgtggttactgccctgagggccatgaaagccacagaggatgggctgaggaaggaaagaaatggggttactgctcccagtgcatcatttgcatcattccccattgactgaatcctcagcagtggccgtttttcctcttgtccaggctcacgagttagtccagggattccatactccctattccctggagttttctggaataaattttcagcacctgcttttctcagcttggcccttccccgggtgaggccgtttggaattaacatggccagtgtttcacacaagattgggttcccaatcttgaccatcactatcactgccttctttatataaaggctaataaggaaggagtgttatttatggctttgccaagctacatcaagaactcagctgtgctgtgcctaccaggggtctcctttcttacccaggactcctttcttctccttgaatatttatgtccattttaacacttcctggttgcaagagggatgtgcctccattatttcctccacagttttggtatttgtcagacatttgttctgctgtctttctaatccagccaacgtctgctcaggaagtggggccagctccactgggacccatagttttacttccttgtcatttgattggatagtttccaaggaagcccctccagattggcactatctcagaaaaggagagcttgttgtgaaacactgcttcctgaaacttcctgctattgcctaaagctacgtctgaaactgagtagggaaaggcatacttttccagggacttagggggataggctttggaaatgggacaggtctttcagactcacagcttgataccctaacaaagcagagtatatttatttgtttcccaggaaggccattgcagtttgactggctgagggatacagagatgaaattgtaaactgtatccagattatcaaagctaatttgactagtttgaacctcgtcagacattcattcctttggccattgccatggatgaaaccgagatctgcagtctgatctgtggacttctctgctggcatatcttttatgatttaacctcttccatttgatgattctgtatttcagagtcagtttcttgagtaactccagtgctacaaaaagaattagtaatgtggtgtgggcagcgtgacattttatgtcccacccaaaaattggattccttttggagactgatctgttggtctcaggcatttcattaggaccagattggttctaagagttagtctggactggccctaggaaacttgaattaaataagcctcttccccttaccgatcctttttaacactctcaggtttgtttgtttcccacttttttcctatgctggtctgcctcaaagtctcaagaccaaggtgactcaagataacaccagaccacgcatgatcaccaaaaccttcccatcctgattctcttcttctacctctaccctctccaacttctcctggtcttcacatatactctcaaagctagtctgaaagtgaccttactttcggaagtagggaagtggaactttggtaaatgactgtttgcctcatttaatagtatacaggctcagcccatagactacagttcttcagaggccatatgtctcagcaagtactggttatattctttttttgtaaggaagatcataaatgctaaaaattccactaagccattcagttcttccttttgcctacctagtcctgatttttgtattaattggttccctttagcaagggattcagatctttgtaccttatcttatatccagagcagattccatttggcagatagatggtctctagcctattgtattcttagaccaaaaatcataacctgctgtttctcagcaaagccttgctctctggagcttactatgtgctggtacttaaagagtacattctgccttgctgtagtgaagagacccactccaaataaaaaaggggccacacggggcttctaagttaggttgccagtgttgctgcccatgatgagttatttgcctctgagtttcagatgacctctctgtagggacactgtgttatcaaccattaagaagaaagaaccacaagcctcccaagtatttgggttctatcttagggttgaaatctggtcattattccctctacccttggaatcagagcaatgtgtcttctttcctccaacctcttaccttagatgcatcctggttatctggaagcatgggaaagaaggctacttatctctttgtatgtggctccagtctgtgaggatacataacattttctctacaatgaatctgtgctaatattttgccttctttctttcttttcttttcacccttagagacagggtttcactatgttgcccaggctggtctcaaactcctgggctcaagcaatcctcctgcctcagcttcctgagtagctggaaccacaggtgtgtgctaccgtgcctggcacttttttgccttcttaatggagatattcagttttctttttttcatttaaacaaagaaaaaaaatgtatctactctaccttccctctgctctcctccctccctatcctacttgcccatatgagcacggctccccatggccacatactcctgcaaagcttttatgctgcttcgcttttctctaaacagatctgatattgctgctcctgtggttttctcaaaattaactttgccgtggtttttaaaaaggaatcaaaatgcattgttgcattaagctttttcaataaaggaaaattacggaaggaaaataggcaacaccagcaaattatatgtggacaggttctaaactctatatatacatatatatatatatatctatatatctatatacgtaatcatctagttctgtcatcttactgaaaggaataacacttctaaagatcaccatttctgagaagttcttggaaatctttatgtctaagtgattgtattagatcagcaataatgactatgtaatctcaaaaaacaaataaaatattcttaacatgg

SEQ ID NO: 306899 - DNA, 1593 bp, Artificial Sequence
  derived and/or modified sequence
atgtattttctctgttttttttgtctgtttgtgagcggtaggaagtggtccagacagtttctgttgagcttctggtgcaccgtttgcagcgctcaccagggcacaattttcctttctctgaaaatacagttcgcagatcagaaacaggagtttaacaaacgtcccactaagatcggtcgacggtccctcagtagatcgatcagtcaatcctctacagacagctactccagtgctgcatcttatactgattcgagtgatgacgaaacctctcctcgggataaacagcagaagaactccaaaggcagtagcgacttctgcgtgaagaacatcaaacaggccgaattcggaaggcgtgaaattgagatcgccgaacaggaaatgcccgccctaatggcgctgagaaaaagagctcagggggagaagcccttagcaggagctaaaattgtcgggtgcacacacatcaccgcccagaccgccgtgctgatggagacgttgggagctctgggggctcagtgcagatgggccgcctgcaacatctatagcaccctaaatgaggttgcggcagctcttgccgagagtgggttccccgtgtttgcctggaaaggggaatccgaagatgacttttggtggtgcattgacagatgtgttaatgtggaagggtggcaaccaaacatgatacttgatgacggaggggatctgacacactggatttacaagaaatatccaaatatgttcaaaaagattaaagggatcgtggaagaatctgttactggtgtgcatagactgtatcagttgtctaaggcaggcaagctttgtgtgcccgcaatgaacgtgaacgacagcgttaccaagcaaaagttcgacaacttgtactgctgcagggagagcatccttgacggtctgaagcgaacaaccgacatgatgtttggcggtaaacaagtggtggtgtgtggttatggtgaagtgggaaaggggtgctgcgcagccctgaaggcaatggggtccattgtgtatgtgaccgagatcgatcctatctgtgccctgcaagcatgcatggacggtttcaggctggtgaaactcaacgaggtgattagacaagtagacattgtgattacctgcactggaaataagaatgtggtcacacgcgagcacctggacaggatgaagaactcatgtattgtctgcaatatgggacattccaatacagagatcgacgtagcatccctgcgtactcccgagttaacatgggagcgcgtccggagccaggtggatcacgtgatttggcccgatggtaagcgcattgttcttctggcagagggacgactgttaaacctctcttgtagcaccgtgcccaccttcgttctgagcatcacggccaccacgcaagctctcgctctgatagaattatataacgctccagaggggagatacaagcaggatgtctatttgctgcctaagaagatggatgaatatgtcgcaagtctccacctccctacattcgacgcacacctcacagagttgacggacgagcaggccaagtacctggggcttaacaagaacggaccgtttaagcctaactattacagatactag

SEQ ID NO: 306900 - DNA, 1593 bp, Artificial Sequence
  derived and/or modified sequence
atgtacttcctgtgcttcttctgcctgtttgtgtctggcaggaagtggagccggcagttcctgctgtccttctggtgcaccgtgtgcagcgcccaccagggcaccatcttcctgagcctgaagatccagtttgctgaccagaagcaggagttcaacaagaggcccaccaagattggccgccgcagcctgagccgcagcatcagccagagcagcacagacagctacagcagcgctgccagctacacagacagcagtgatgatgagaccagcccccgggacaagcagcagaagaacagcaagggcagcagtgacttctgtgtgaagaacatcaagcaggccgagtttggaagaagagaaattgaaattgctgagcaggagatgcctgccctgatggccctgaggaagagggcccagggcgagaagcccctggccggggccaagatcgtgggctgcacccacatcacagcccagacagctgtgctgatggagaccctgggcgccctgggcgcccagtgccgctgggccgcctgcaacatctacagcaccctgaatgaggtggccgccgccctggccgagagcggcttccctgtgtttgcctggaagggggagagtgaagatgacttctggtggtgcatcgacagatgtgtgaatgtggagggctggcagcccaacatgatcctggatgatggaggagacctgacccactggatctacaagaagtaccccaacatgttcaagaagatcaagggcatcgtggaggagagcgtgactggagtgcaccggctgtaccagctgagcaaggccggcaagctgtgtgtgcctgccatgaatgtgaatgattctgtgaccaagcagaagtttgacaacctgtactgctgccgggagagcatcctggatggcctgaagaggaccacagacatgatgtttggaggcaagcaggtggtggtgtgtggctatggagaggtgggcaagggctgctgtgccgccctgaaggccatgggcagcatcgtgtatgtgacagaaattgaccccatctgtgccctgcaggcctgcatggatggcttccggctggtgaagctgaatgaagtcatccggcaggtggacatcgtcatcacctgcaccggcaacaagaatgtggtgacccgggagcacctggacaggatgaagaacagctgcatcgtgtgcaacatgggccacagcaacacagaaattgatgtggccagcctgcggaccccagagctgacctgggagcgggtgcgcagccaggtggaccacgtgatctggccagatggcaagagaattgtgctgctggccgagggccgcctgctgaacctgagctgcagcacagtgcccacctttgtgctgagcatcacagccaccacccaggccctggccctgattgagctgtacaatgcccctgagggccgctacaagcaggatgtgtacctgctgcccaagaagatggatgaatatgtggccagcctgcacctgcccacctttgatgcccacctgacagagctgacagatgagcaggccaagtacctgggcctgaacaagaatggccccttcaagcccaactactaccgctactag

SEQ ID NO: 306901 - DNA, 1593 bp, Artificial Sequence
  derived and/or modified sequence
atgtacttcctgtgcttcttctgcctgttcgtgagcggccggaagtggtcgagacagttcctgctaagtttctggtgcacagtctgctccgctcaccaggggacaattttcctttcgctcaaaattcagttcgcggatcagaagcaagagtttaacaagcgacccacaaaaattggtcgacggagcctgagccgaagcatctctcagtcgtccacggatagttacagcagcgctgcttcctatacagactccagcgatgacgagaccagcccacgagacaaacagcagaaaaatagcaaaggaagcagtgacttttgcgtgaaaaatattaagcaggcagaattcggcaggcgcgagatcgaaattgcagaacaggagatgcccgccctgatggcgctgaggaagagagctcagggggaaaaacccttggctggagcaaagattgtgggctgtactcacattacggcccaaaccgcagtcttgatggagaccctgggagcactgggggctcagtgccggtgggctgcctgcaacatctacagcactctcaatgaggtggccgcagctctggcagaatctgggttccctgtgttcgcctggaaaggggagagcgaggacgatttttggtggtgtattgaccggtgcgttaatgtggagggatggcagcctaatatgatcctcgatgacgggggcgatctcactcactggatctataagaaataccccaatatgtttaaaaagatcaagggcatcgtagaagaatccgtgacaggggtacataggctgtaccagctgtccaaggctgggaagctgtgtgtccccgctatgaacgtcaacgactctgtgacaaagcagaagtttgacaatttatattgctgtcgggaatccatcctggacggcttgaagcgaaccaccgacatgatgttcgggggcaagcaggtggtggtctgcggatacggggaggttggaaaaggttgttgcgccgccctgaaggcgatgggttccatcgtatatgtgactgagatcgaccctatctgtgccttgcaagcatgtatggatgggtttcgcctcgttaaactgaacgaagttatccggcaagtggacattgtgatcacctgtaccggtaataagaacgtcgtcacccgcgaacaccttgacagaatgaaaaatagttgcatcgtgtgcaatatggggcacagcaacaccgagatcgatgtcgctagtcttcgcacacctgagctcacatgggagagagtgcggtcacaggtggatcatgttatctggcccgacgggaagagaattgtgctgctcgccgaggggagactgctgaatctgtcttgttctaccgtgcctacctttgtactgagcataaccgccaccacacaagccctggcactcatcgagctctataatgctccagagggccgctacaagcaggacgtgtacctgttgccaaagaaaatggatgagtatgtcgctagtctacacctgcccaccttcgatgcccatctgacggagctgacagatgagcaggcgaagtacctcgggctgaacaagaatgggccattcaaaccaaactactacagatactag

SEQ ID NO: 306902 - DNA, 1593 bp, Artificial Sequence
  derived and/or modified sequence
atgtacttcctctgttttttctgtctgttcgtttcaggcagaaaatggtcaaggcaattcctattgagtttttggtgtaccgtgtgttctgcgcaccagggcaccatcttcctgagcctaaaaatacaattcgcagatcagaagcaggagtttaacaaaagaccaacaaagatcggcagacgctctctgagtcgctccatcagtcaatctagtactgattcttacagtagtgctgccagttacacggattcatctgatgacgagacctccccaagagataaacaacagaaaaacagcaaggggagtagcgatttctgtgtgaagaatatcaagcaggccgagttcggtagacgggaaatcgaaatcgccgagcaggagatgcctgccctaatggctctgcggaaaagggcccaaggcgagaagcccctggctggtgccaaaatcgtgggctgcactcatattaccgcccagacagctgttctcatggagacactcggcgctctgggagcacagtgtcggtgggcggcatgcaacatttactcaaccttaaatgaagtagccgctgctctggctgagagcggatttccagtctttgcatggaagggagaatctgaggatgatttttggtggtgtatcgaccggtgcgtcaatgttgaaggatggcagcctaacatgatacttgacgacggaggggatctgacacactggatctacaagaagtacccgaatatgtttaagaaaatcaagggtattgtagaggaatcggtcaccggggtacaccgcctctaccagctctcgaaggcgggaaagctctgtgttccggctatgaatgtgaatgacagcgtcacaaagcagaagtttgacaatctttactgctgtcgcgagtccattctggatggtttaaagcggaccactgacatgatgtttgggggaaagcaggtggtggtttgtggctacggggaagtcgggaaaggttgttgtgcggctctgaaggcaatgggcagcattgtatatgttactgaaattgatcccatttgcgccctgcaggcttgcatggatggtttcaggctcgtgaagctaaatgaggttattagacaggtggacattgttattacatgtacaggaaataaaaatgtagtcactcgggagcacctggacagaatgaagaactcatgcattgtctgtaacatgggccactccaacacagagatcgacgtggccagccttcgcactccggagctcacctgggagcgggtgaggagccaagttgaccacgtaatctggccagacggtaaacgcatagttttactcgcagaagggaggttactgaatttatcctgcagtacggttcccacatttgtcctcagtattaccgccaccacacaggccctcgccctgatcgagctgtacaacgcacccgaggggagatacaagcaggacgtctacctgttgcctaagaagatggacgagtacgtcgccagcctgcacctcccaacatttgatgcacatctgactgagctgaccgacgagcaagccaagtacctcggcttaaataaaaacggcccattcaaaccaaattattatcgttactag

SEQ ID NO: 306903 - protein, 509 aa, Artificial Sequence
  derived and/or modified sequence
MEKWDGNEGTSAFHMPEWMQIQFADQKQEFNKRPTKIGRRSLSRSISQSSTDSYSSAASYTDSSDDETSPRDKQQKNSKGSSDFCVKNIKQAEFGRREIEIAEQEMPALMALRKRAQGEKPLAGAKIVGCTHITAQTAVLMETLGALGAQCRWAACNIYSTLNEVAAALAESGFPVFAWKGESEDDFWWCIDRCVNVEGWQPNMILDDGGDLTHWIYKKYPNMFKKIKGIVEESVTGVHRLYQLSKAGKLCVPAMNVNDSVTKQKFDNLYCCRESILDGLKRTTDMMFGGKQVVVCGYGEVGKGCCAALKAMGSIVYVTEIDPICALQACMDGFRLVKLNEVIRQVDIVITCTGNKNVVTREHLDRMKNSCIVCNMGHSNTEIDVASLRTPELTWERVRSQVDHVIWPDGKRIVLLAEGRLLNLSCSTVPTFVLSITATTQALALIELYNAPEGRYKQDVYLLPKKMDEYVASLHLPTFDAHLTELTDEQAKYLGLNKNGPFKPNYYRY

SEQ ID NO: 306904 - protein, 75 aa, Artificial Sequence
  derived and/or modified sequence
MEKWDGNEGTSAFHMPEWMQIQFADQKQEFNKRPTKIGRRSLSRSISQSSTDSYSSAASYTDSSDDETSPRDKQQ

SEQ ID NO: 306905 - DNA, 1530 bp, Artificial Sequence
  derived and/or modified sequence
atggagaagtgggacggcaacgagggcaccagcgccttccacatgcccgagtggatgcagatccagttcgccgaccagaagcaggagttcaacaagagacccaccaagatcggcagaagaagcctgagcagaagcatcagccagagcagcaccgacagctacagcagcgccgccagctacaccgacagcagcgacgacgagaccagccccagagacaagcagcagaagaacagcaagggcagcagcgacttctgcgtgaagaacatcaagcaggccgagttcggcagaagagagatcgagatcgccgagcaggagatgcccgccctgatggccctgagaaagagagcccagggcgagaagcccctggccggcgccaagatcgtgggctgcacccacatcaccgcccagaccgccgtgctgatggagaccctgggcgccctgggcgcccagtgcagatgggccgcctgcaacatctacagcaccctgaacgaggtggccgccgccctggccgagagcggcttccccgtgttcgcctggaagggcgagagcgaggacgacttctggtggtgcatcgacagatgcgtgaacgtggagggctggcagcccaacatgatcctggacgacggcggcgacctgacccactggatctacaagaagtaccccaacatgttcaagaagatcaagggcatcgtggaggagagcgtgaccggcgtgcacagactgtaccagctgagcaaggccggcaagctgtgcgtgcccgccatgaacgtgaacgacagcgtgaccaagcagaagttcgacaacctgtactgctgcagagagagcatcctggacggcctgaagagaaccaccgacatgatgttcggcggcaagcaggtggtggtgtgcggctacggcgaggtgggcaagggctgctgcgccgccctgaaggccatgggcagcatcgtgtacgtgaccgagatcgaccccatctgcgccctgcaggcctgcatggacggcttcagactggtgaagctgaacgaggtgatcagacaggtggacatcgtgatcacctgcaccggcaacaagaacgtggtgaccagagagcacctggacagaatgaagaacagctgcatcgtgtgcaacatgggccacagcaacaccgagatcgacgtggccagcctgagaacccccgagctgacctgggagagagtgagaagccaggtggaccacgtgatctggcccgacggcaagagaatcgtgctgctggccgagggcagactgctgaacctgagctgcagcaccgtgcccaccttcgtgctgagcatcaccgccaccacccaggccctggccctgatcgagctgtacaacgcccccgagggcagatacaagcaggacgtgtacctgctgcccaagaagatggacgagtacgtggccagcctgcacctgcccaccttcgacgcccacctgaccgagctgaccgacgagcaggccaagtacctgggcctgaacaagaacggccccttcaagcccaactactacagatactag

SEQ ID NO: 306906 - DNA, 228 bp, Artificial Sequence
  derived and/or modified sequence
atggagaagtgggacggcaacgagggcaccagcgccttccacatgcccgagtggatgcagatccagttcgccgaccagaagcaggagttcaacaagagacccaccaagatcggcagaagaagcctgagcagaagcatcagccagagcagcaccgacagctacagcagcgccgccagctacaccgacagcagcgacgacgagaccagccccagagacaagcagcagtag

SEQ ID NO: 306907 - DNA, 5049 bp, Artificial Sequence
  derived and/or modified sequence
attgctgcagaaagtccccactggggaggtgcgggtagagtgtttgggtagcattaaaacagtgagtgccctgtgagaagcacagtgcctgggtgcagcactttgcatcagctctgattttgaaatcagacacagaaggctttgaagccggccagtaaggggttgtcaggcagttgactaatgctcttgatttgaatcggaggctgctgtgaaaagggatgcagcttctgctagccactgtgaacttctgaatctcactagggttgggtctgctttggggcactcagataaccccagtatttccaaaccagctttcccttttgcttcaggacatatcttacccaagcctgcactatggagaagtgggacggtaatgagggcacctcagcttttcacatgcctgagtggatgcagatccagtttgctgaccagaagcaagaattcaacaaacgtcccaccaaaattggacgtcgctctttgtctcgttccatttctcagtcatctactgacagctacagctcagcggcttcatatacagatagctctgatgatgagacatcgcccagggacaagcagcaaaagaactctaagggaagcagtgacttctgtgttaagaacatcaaacaggcagagtttggacgaagagaaattgaaattgctgaacaagaaatgcctgcattgatggctttgaggaagagagctcaaggagaaaagcctttggctggagccaaaatcgtgggttgcacacacatcactgctcagactgctgtgcttatggaaactctgggtgctctgggggcccagtgccgatgggctgcctgcaacatctattccactctcaatgaagtggctgctgctctagcagaaagtggatttcctgtttttgcctggaagggagagtcagaagatgacttttggtggtgtatcgatagatgtgtgaatgtggagggctggcagccaaacatgatcttggatgatggaggggatcttacccactggatttataaaaagtatcccaacatgtttaagaaaatcaagggcatagtagaggagagtgttactggagttcacaggctgtaccaactgtccaaagctgggaagctgtgtgttccagccatgaatgtcaatgactcagtcaccaaacagaaatttgacaacctctactgttgccgtgaatcaattcttgatggacttaaaaggacaacagacatgatgtttggtggaaagcaagtggtagtctgtggctatggagaggtggggaaagggtgctgtgctgccctgaaagccatgggctccattgtgtatgtaactgaaattgaccccatctgtgccctgcaagcctgtatggatggatttcgactggtgaaattaaatgaggtcatccgacaagtggacattgttattacctgtacaggtaacaagaatgtggtaaccagagagcacttggaccgtatgaagaatagctgcatcgtttgtaacatgggacattccaacacagagattgacgtggcgagtctgcggacaccagaactgacctgggagcgagtgagatctcaagttgaccatgtgatatggcctgatggcaagaggatagtactgctggcagagggccgcctgctgaaccttagctgctccacagtgcctacatttgtgctctcaatcactgctactactcaggctcttgccttgatagagctttacaatgctcctgagggtcgctataagcaggatgtctacctgttgcccaagaagatggatgagtatgtggccagcctacacctgcctacctttgatgcccacttgacagagctgacagatgaacaggccaagtatctgggactcaacaagaatgggcccttcaagcctaattactacaggtattaagttcctgtaactcaaaccagaatttttaaggaatagaactccaagccttttctccactactatacaagaaagaattcagcaagctgcttctccaatcaaagctgcctgccgtgctcaccctgtgtgttaggttatttatttattaaaatcaagaatcctgtgcctgtagtgttggcccagagtgtggttactgccctgagggccatgaaagccacagaggatgggctgaggaaggaaagaaatggggttactgctcccagtgcatcatttgcatcattccccattgactgaatcctcagcagtggccgtttttcctcttgtccaggctcacgagttagtccagggattccatactccctattccctggagttttctggaataaattttcagcacctgcttttctcagcttggcccttccccgggtgaggccgtttggaattaacatggccagtgtttcacacaagattgggttcccaatcttgaccatcactatcactgccttctttatataaaggctaataaggaaggagtgttatttatggctttgccaagctacatcaagaactcagctgtgctgtgcctaccaggggtctcctttcttacccaggactcctttcttctccttgaatatttatgtccattttaacacttcctggttgcaagagggatgtgcctccattatttcctccacagttttggtatttgtcagacatttgttctgctgtctttctaatccagccaacgtctgctcaggaagtggggccagctccactgggacccatagttttacttccttgtcatttgattggatagtttccaaggaagcccctccagattggcactatctcagaaaaggagagcttgttgtgaaacactgcttcctgaaacttcctgctattgcctaaagctacgtctgaaactgagtagggaaaggcatacttttccagggacttagggggataggctttggaaatgggacaggtctttcagactcacagcttgataccctaacaaagcagagtatatttatttgtttcccaggaaggccattgcagtttgactggctgagggatacagagatgaaattgtaaactgtatccagattatcaaagctaatttgactagtttgaacctcgtcagacattcattcctttggccattgccatggatgaaaccgagatctgcagtctgatctgtggacttctctgctggcatatcttttatgatttaacctcttccatttgatgattctgtatttcagagtcagtttcttgagtaactccagtgctacaaaaagaattagtaatgtggtgtgggcagcgtgacattttatgtcccacccaaaaattggattccttttggagactgatctgttggtctcaggcatttcattaggaccagattggttctaagagttagtctggactggccctaggaaacttgaattaaataagcctcttccccttaccgatcctttttaacactctcaggtttgtttgtttcccacttttttcctatgctggtctgcctcaaagtctcaagaccaaggtgactcaagataacaccagaccacgcatgatcaccaaaaccttcccatcctgattctcttcttctacctctaccctctccaacttctcctggtcttcacatatactctcaaagctagtctgaaagtgaccttactttcggaagtagggaagtggaactttggtaaatgactgtttgcctcatttaatagtatacaggctcagcccatagactacagttcttcagaggccatatgtctcagcaagtactggttatattctttttttgtaaggaagatcataaatgctaaaaattccactaagccattcagttcttccttttgcctacctagtcctgatttttgtattaattggttccctttagcaagggattcagatctttgtaccttatcttatatccagagcagattccatttggcagatagatggtctctagcctattgtattcttagaccaaaaatcataacctgctgtttctcagcaaagccttgctctctggagcttactatgtgctggtacttaaagagtacattctgccttgctgtagtgaagagacccactccaaataaaaaaggggccacacggggcttctaagttaggttgccagtgttgctgcccatgatgagttatttgcctctgagtttcagatgacctctctgtagggacactgtgttatcaaccattaagaagaaagaaccacaagcctcccaagtatttgggttctatcttagggttgaaatctggtcattattccctctacccttggaatcagagcaatgtgtcttctttcctccaacctcttaccttagatgcatcctggttatctggaagcatgggaaagaaggctacttatctctttgtatgtggctccagtctgtgaggatacataacattttctctacaatgaatctgtgctaatattttgccttctttctttcttttcttttcacccttagagacagggtttcactatgttgcccaggctggtctcaaactcctgggctcaagcaatcctcctgcctcagcttcctgagtagctggaaccacaggtgtgtgctaccgtgcctggcacttttttgccttcttaatggagatattcagttttctttttttcatttaaacaaagaaaaaaaatgtatctactctaccttccctctgctctcctccctccctatcctacttgcccatatgagcacggctccccatggccacatactcctgcaaagcttttatgctgcttcgcttttctctaaacagatctgatattgctgctcctgtggttttctcaaaattaactttgccgtggtttttaaaaaggaatcaaaatgcattgttgcattaagctttttcaataaaggaaaattacggaaggaaaataggcaacaccagcaaattatatgtggacaggttctaaactctatatatacatatatatatatatatctatatatctatatacgtaatcatctagttctgtcatcttactgaaaggaataacacttctaaagatcaccatttctgagaagttcttggaaatctttatgtctaagtgattgtattagatcagcaataatgactatgtaatctcaaaaaacaaataaaatattcttaacatgg

SEQ ID NO: 306908 - DNA, 599 bp, Artificial Sequence
  derived and/or modified sequence
aaagaaggaagtccaactattgctgcagaaagtccccactggggaggtgcgggtagagtgtttgggtagcattaaaacagtgagtgccctgtgagaagcacagtgcctgggtgcagcactttgcatcagctctgattttgaaatcagacacagaaggctttgaagccggccagtaaggggttgtcaggcagttgactaatgctcttgatttgaatcggaggctgctgtgaaaagggatgcagcttctgctagccactgtgaacttctgaatctcactagggttgggtctgctttggggcactcagataaccccagtatttccaaaccagctttcccttttgcttcaggacatatcttacccaagcctgcactatggagaagtgggacggtaatgagggcacctcagcttttcacatgcctgagtggatgcagatccagtttgctgaccagaagcaagaattcaacaaacgtcccaccaaaattggacgtcgctctttgtctcgttccatttctcagtcatctactgacagctacagctcagcggcttcatatacagatagctctgatgatgagacatcgcccagggacaagcagcaaaa

SEQ ID NO: 306909 - DNA, 1530 bp, Artificial Sequence
  derived and/or modified sequence
atggaaaaatgggacggcaacgagggaacaagtgcttttcatatgcctgaatggatgcagatccaattcgccgaccagaagcaagagtttaataagaggccaacaaaaattggcagacgatccctttccagatctatttctcaatcctccacagattcctatagcagcgcagcctcctataccgacagtagtgacgacgagacctcccctagagacaagcagcagaagaactcaaaaggttcatctgatttctgtgtgaaaaacatcaaacaagccgaatttggaaggcgggaaatcgaaatagcagagcaggaaatgcccgctctcatggcacttagaaagcgggcacagggagaaaaaccactggccggtgctaaaattgtaggctgtactcatattacagcccagacagcagtcctcatggaaacgttaggtgctctgggtgctcagtgtaggtgggccgcttgtaatatttattccactctgaatgaggttgctgccgctctggctgagtccggcttccccgttttcgcctggaaaggtgagagtgaagacgatttttggtggtgcatagaccggtgtgtgaatgtggagggttggcaaccaaatatgatcctcgatgatggcggtgatctcacccattggatttacaagaaatatccaaatatgttcaagaagatcaaagggatagtggaagaaagtgtcacaggggtgcataggctgtaccagttgagcaaggcagggaaactgtgtgtacccgctatgaatgttaacgattctgtaactaaacagaagttcgataacctttactgctgtcgtgagagcatcctcgacggactgaagaggaccacggacatgatgttcggtggaaagcaggtggtggtatgtgggtacggtgaggtcggtaagggttgttgtgcagcactgaaggccatgggctctattgtgtacgtgacggaaatagaccctatatgtgcactacaagcctgcatggacggatttagactagtaaagctgaatgaagtgattcggcaggttgatatagtgatcacctgcacaggtaataaaaatgtggtcacgcgtgaacacctggatcgtatgaaaaacagctgcattgtgtgcaacatgggacattctaatactgagatagatgtggcctctctccgaactccagaactgacttgggaaagagtaaggagtcaggtggaccatgtcatttggcctgatgggaaacggattgtgctgctcgccgagggccggttactgaatctgtcttgcagtacggtgccaaccttcgtcctcagtatcacagccactacgcaggccctggccctgattgagctttataacgcccccgaagggaggtataaacaagacgtttacctgctgcctaagaagatggacgagtatgtggcttcactgcatctgccgacatttgacgcccatctgacagagcttaccgacgaacaggctaaatatctgggcctcaacaaaaatggccctttcaaaccaaactactaccgctactag

SEQ ID NO: 306910 - DNA, 228 bp, Artificial Sequence
  derived and/or modified sequence
atggagaagtgggatggcaacgaaggcacctccgcatttcatatgccagagtggatgcagattcaattcgctgatcagaaacaggagttcaacaagagacccactaagatcggtcgtaggtccttgtctaggagtatttcacagtcttccacggactcatactcgtcggcagccagctatacagatagctctgacgatgagacgagtcctagggataagcagcaatag

SEQ ID NO: 306911 - DNA, 1530 bp, Artificial Sequence
  derived and/or modified sequence
atggagaagtgggatggaaatgaaggcaccagcgccttccacatgcctgagtggatgcagatccagtttgctgaccagaagcaggagttcaacaagaggcccaccaagattggaagaagaagcctgagccgcagcatcagccagagcagcacagacagctacagcagcgctgccagctacacagacagcagtgatgatgagaccagcccccgggacaagcagcagaagaacagcaagggcagcagtgacttctgtgtgaagaacatcaagcaggccgagtttggccggcgggagattgaaattgctgagcaggagatgcctgccctgatggccctgaggaagagggcccagggcgagaagcccctggccggggccaagatcgtgggctgcacccacatcacagcccagacagctgtgctgatggagaccctgggcgccctgggcgcccagtgccgctgggccgcctgcaacatctacagcaccctgaatgaggtggccgccgccctggccgagagcggcttccctgtgtttgcctggaagggggagagtgaagatgacttctggtggtgcatcgacagatgtgtgaatgtggagggctggcagcccaacatgatcctggatgatggaggagacctgacccactggatctacaagaagtaccccaacatgttcaagaagatcaagggcatcgtggaggagagcgtgactggagtgcaccggctgtaccagctgagcaaggccggcaagctgtgtgtgcctgccatgaatgtgaatgacagcgtgaccaagcagaagtttgacaacctgtactgctgccgggagagcatcctggatggcctgaagaggaccacagacatgatgtttggaggcaagcaggtggtggtgtgtggctacggggaggtgggcaagggctgctgtgccgccctgaaggccatgggcagcatcgtgtatgtgacagaaattgaccccatctgtgccctgcaggcctgcatggatggcttccggctggtgaagctgaatgaggtgatccggcaggtggacatcgtcatcacctgcaccggcaacaagaatgtggtgacccgggagcacctggacaggatgaagaacagctgcatcgtgtgcaacatgggccacagcaacacagaaattgatgtggccagcctgcggaccccagagctgacctgggagcgggtgcgcagccaggtggaccacgtgatctggccagatggcaagagaattgtgctgctggccgagggccgcctgctgaacctgagctgcagcacagtgcccacctttgtgctgagcatcacagccaccacccaggccctggccctgattgagctgtacaatgcccctgagggccgctacaagcaggatgtgtacctgctgcccaagaagatggatgaatatgtggccagcctgcacctgcccacctttgatgcccacctgacagagctgacagatgagcaggccaagtacctgggcctgaacaagaatggccccttcaagcccaactactaccgctactag

SEQ ID NO: 306912 - DNA, 228 bp, Artificial Sequence
  derived and/or modified sequence
atggagaagtgggatggaaatgaaggcaccagcgccttccacatgcctgagtggatgcagatccagtttgctgaccagaagcaggagttcaacaagaggcccaccaagattggaagaagaagcctgagccgcagcatcagccagagcagcacagacagctacagcagcgctgccagctacacagacagcagtgatgatgagaccagcccccgggacaagcagcagtag

SEQ ID NO: 306913 - DNA, 1530 bp, Artificial Sequence
  derived and/or modified sequence
atggagaagtgggacggcaacgagggcaccagcgccttccacatgcccgaatggatgcaaatacaatttgccgaccagaagcaggagttcaataaaaggcccaccaagataggaaggcgatcattgagcagatcgattagtcagagttcaactgacagttacagctccgccgcaagctacactgactcttcagacgatgagacctccccacgtgataagcaacagaaaaatagcaaaggatcctctgatttttgcgtgaaaaatatcaagcaggccgaattcggtaggagggagatcgagatagccgaacaagagatgcctgcgctaatggcactgagaaagagagctcagggcgagaagcccctggcgggtgcgaaaatcgtggggtgtacccacattaccgctcaaactgccgtgctgatggaaacgttgggtgccctaggcgcccagtgtcgctgggccgcctgcaatatctattcaactttaaatgaggtggcagcagccttagccgagtccggcttccccgtgttcgcctggaaaggagagtccgaggatgacttttggtggtgcattgatcggtgtgtgaacgttgagggttggcagcctaacatgattcttgacgatggcggcgatctcacacactggatatataaaaaatatcccaacatgtttaaaaagataaagggcattgtggaagagagtgtcaccggcgtgcacaggctgtatcagctgtccaaggccggaaagctctgtgtgcccgctatgaatgtgaatgatagtgtaacaaagcagaagttcgacaacctgtattgctgccgcgagtcaatcctcgacggtctgaagagaaccacagacatgatgttcgggggaaagcaggtcgtagtgtgcggatatggggaggttggtaagggctgttgcgctgcgttgaaggctatgggtagcattgtctacgttaccgagatagatcccatatgtgctctgcaggcctgtatggacggttttaggcttgtaaagctgaacgaagtcatcagacaggtggacattgttattacatgtaccgggaataagaacgtggtgacacgcgaacaccttgatcggatgaaaaactcgtgtatagtgtgcaatatggggcactccaatacggaaatcgatgttgcgtctttgcgaacgccagaattgacctgggagcgcgtccgcagtcaggtcgatcacgtcatctggcctgacgggaaacggattgtgctgttggcggagggacgactgctgaatctcagctgctctaccgtgccaacattcgttctttcgattaccgcgaccacccaggccctggcccttattgagctctacaatgctccagaaggacgttataagcaggacgtctatctgcttccgaagaagatggatgagtatgttgcgtccttgcacttgcctacctttgatgctcacttgaccgagctcacagatgagcaggctaaatatctcggattgaataaaaacggaccattcaagcctaattactataggtattag

SEQ ID NO: 306914 - DNA, 228 bp, Artificial Sequence
  derived and/or modified sequence
atggagaagtgggacggcaacgagggcaccagcgccttccacatgcccgagtggatgcagatacagttcgccgaccagaaacaggaatttaataagcgcccaacgaagatcggcaggcgatccctgtcgcgatcaatctcccagtcatccacagattcctatagctccgcagcgagctatacagactccagtgatgatgagacatcccctcgagataagcaacagtag

SEQ ID NO: 306915 - DNA, 1530 bp, Artificial Sequence
  derived and/or modified sequence
atggaaaaatgggatgggaatgaagggactagcgcatttcacatgcctgagtggatgcaaattcagttcgcagatcaaaaacaagagttcaacaagcggccaacaaagattggcaggcgctccttgagtcgaagtatctcacagagcagtactgacagttactccagtgctgcatcatacaccgatagctctgatgacgagactagcccgagggataaacagcagaaaaatagcaaaggcagctcagatttttgcgtcaaaaatatcaaacaggctgagtttggacggagagagattgaaatcgccgaacaggaaatgcctgccctaatggctttaagaaagagagctcaaggagagaagcccttggctggcgcaaagatcgtaggttgtacacatattaccgctcaaactgctgtgcttatggagaccctaggggctctcggagcccaatgcagatgggctgcctgcaatatttacagtacgctaaacgaagtcgcggctgcactggctgaatcagggttcccggtgtttgcttggaagggggaaagtgaggatgatttctggtggtgcattgatcgctgtgtaaacgtggaggggtggcaacccaatatgattctggatgatggtggcgacctcacacactggatttacaaaaagtacccaaatatgttcaagaagatcaaagggattgtagaagaaagtgttaccggagtccaccgcctgtaccaactgtccaaggcaggtaagctatgtgtcccagctatgaacgtgaatgactcagtgacaaagcagaagttcgataacctctactgctgccgtgagtcaattttggacggcttgaagcggaccaccgatatgatgtttggaggaaaacaggtcgttgtgtgtggctacggagaagtgggcaaaggatgttgcgccgctttaaaggctatgggttccatcgtatacgtaactgagatcgaccctatttgtgccctccaggcctgcatggacggatttaggttggtgaagctgaacgaagtgattcgacaggttgatatcgttataacctgtaccggcaacaagaatgtagtgacacgcgaacatctggacaggatgaagaacagctgtatcgtctgcaacatgggccatagcaacaccgaaatagatgtggcatctctgagaactcctgagctcacctgggagcgggtgaggtctcaggtggatcatgtgatctggcctgacgggaaaagaatcgttctccttgctgagggaagattgctcaatctaagttgcagtacagtgcctaccttcgtgctaagcattacagctactacccaggccttagccctgattgagttgtacaacgcccctgaggggagatacaagcaggatgtgtatctgctcccaaaaaagatggacgaatacgttgcctcactgcaccttcctacctttgacgctcacttgaccgaactgaccgacgagcaggctaagtatcttggcctaaataagaatggtcccttcaaacccaattactaccggtattag

SEQ ID NO: 306916 - DNA, 228 bp, Artificial Sequence
  derived and/or modified sequence
atggaaaagtgggatggcaatgaggggaccagcgcgtttcatatgcctgaatggatgcagatccagtttgccgatcagaaacaggaattcaacaagcgcccaacgaagattggccgacgatccttgagtcggagtattagccaatctagcacagattcctactcatctgcagctagctacaccgattcttctgacgacgagacgagcccacgagacaaacagcagtag

SEQ ID NO: 306917 - protein, 481 aa, Artificial Sequence
  derived and/or modified sequence
MKVLSEGQLKLCVVQPVHLTSWLLIFFILKSISCLKPARLPIYQRKPFIAAWNAPTDQCLIKYNLRLNLKMFPVIGSPLAKARGQNVTIFYVNRLGYYPWYTSQGVPINGGLPQNISLQVHLEKADQDINYYIPAEDFSGLAVIDWEYWRPQWARNWNSKDVYRQKSRKLISDMGKNVSATDIEYLAKVTFEESAKAFMKETIKLGIKSRPKGLWGYYLYPDCHNYNVYAPNYSGSCPEDEVLRNNELSWLWNSSAALYPSIGVWKSLGDSENILRFSKFRVHESMRISTMTSHDYALPVFVYTRLGYRDEPLFFLSKQDLVSTIGESAALGAAGIVIWGDMNLTASKANCTKVKQFVSSDLGSYIANVTRAAEVCSLHLCRNNGRCIRKMWNAPSYLHLNPASYHIEASEDGEFTVKGKASDTDLAVMADTFSCHCYQGYEGADCREIKTADGCSGVSPSPGSLMTLCLLLLASYRSIQL

SEQ ID NO: 306918 - protein, 45 aa, Artificial Sequence
  derived and/or modified sequence
MKVLSEGQLKLCVVQPVHLTSWLLIFFILKSISCLKPARLPIYQR

SEQ ID NO: 306919 - protein, 63 aa, Artificial Sequence
  derived and/or modified sequence
MKVLSEGQLKLCVVQPVHLTSWLLIFFILKSISCLKPARLPIYQRKPFIAAWNAPTDQCLIKY

SEQ ID NO: 306920 - DNA, 1446 bp, Artificial Sequence
  derived and/or modified sequence
atgaaggtgctgagcgagggccagctgaagctgtgcgtggtgcagcccgtgcacctgaccagctggctgctgatcttcttcatcctgaagagcatcagctgcctgaagcccgccagactgcccatctaccagagaaagcccttcatcgccgcctggaacgcccccaccgaccagtgcctgatcaagtacaacctgagactgaacctgaagatgttccccgtgatcggcagccccctggccaaggccagaggccagaacgtgaccatcttctacgtgaacagactgggctactacccctggtacaccagccagggcgtgcccatcaacggcggcctgccccagaacatcagcctgcaggtgcacctggagaaggccgaccaggacatcaactactacatccccgccgaggacttcagcggcctggccgtgatcgactgggagtactggagaccccagtgggccagaaactggaacagcaaggacgtgtacagacagaagagcagaaagctgatcagcgacatgggcaagaacgtgagcgccaccgacatcgagtacctggccaaggtgaccttcgaggagagcgccaaggccttcatgaaggagaccatcaagctgggcatcaagagcagacccaagggcctgtggggctactacctgtaccccgactgccacaactacaacgtgtacgcccccaactacagcggcagctgccccgaggacgaggtgctgagaaacaacgagctgagctggctgtggaacagcagcgccgccctgtaccccagcatcggcgtgtggaagagcctgggcgacagcgagaacatcctgagattcagcaagttcagagtgcacgagagcatgagaatcagcaccatgaccagccacgactacgccctgcccgtgttcgtgtacaccagactgggctacagagacgagcccctgttcttcctgagcaagcaggacctggtgagcaccatcggcgagagcgccgccctgggcgccgccggcatcgtgatctggggcgacatgaacctgaccgccagcaaggccaactgcaccaaggtgaagcagttcgtgagcagcgacctgggcagctacatcgccaacgtgaccagagccgccgaggtgtgcagcctgcacctgtgcagaaacaacggcagatgcatcagaaagatgtggaacgcccccagctacctgcacctgaaccccgccagctaccacatcgaggccagcgaggacggcgagttcaccgtgaagggcaaggccagcgacaccgacctggccgtgatggccgacaccttcagctgccactgctaccagggctacgagggcgccgactgcagagagatcaagaccgccgacggctgcagcggcgtgagccccagccccggcagcctgatgaccctgtgcctgctgctgctggccagctacagaagcatccagctgtag

SEQ ID NO: 306921 - DNA, 1446 bp, Artificial Sequence
  derived and/or modified sequence
atgaaagtgctgtctgaggggcagctgaaactatgtgtggtgcagcctgtgcacctgacatcgtggttgctcatttttttcattcttaagtccatatcttgtctgaagccagcgcggttgcctatttatcagcggaaacccttcattgccgcttggaacgccccaacagatcagtgcctgatcaaatataacttgcggctcaatctgaaaatgttccccgtgattgggtcccccctggccaaggcaagggggcagaacgtaacaattttctatgtgaacagactcggctattatccctggtacacatcgcagggtgtccctattaacggtggattgccgcagaacatttccttacaggtgcatttggagaaggcagatcaagatataaactactatataccagcagaagatttcagtggcttggcggtgatagactgggaatactggcgcccccaatgggctaggaattggaatagtaaggacgtgtatcggcagaaaagtaggaagctcatcagcgatatgggaaagaatgtctcagccaccgacatagagtatttggccaaggtgacttttgaagaatcggccaaggccttcatgaaagagacaattaaactcggcattaaatccagaccaaaaggactgtggggatactatttgtacccggactgtcacaattacaatgtgtacgcccccaactatagtggatcttgtccagaagacgaagtcctacgcaacaatgagttatcctggctgtggaactccagcgccgccctttacccgagtatcggggtatggaaaagcctcggggatagcgaaaatattctgcggttttcaaagttccgggttcatgaatccatgcgcatctctactatgacaagccacgattatgcgctgcctgtcttcgtgtatactagattaggctatagagacgaacccttgttcttcttgtccaaacaggatctggtgtccaccattggcgagtccgccgcactgggggcagcaggaattgtcatctggggcgacatgaatctgaccgcctccaaggccaactgtaccaaggtgaagcaatttgttagctccgatttgggctcctatatcgcgaacgtgactcgagccgcagaggtttgttcgttacacttgtgtcgcaataacggacgctgcatccgcaagatgtggaatgccccctcatatctgcacctgaaccctgcgtcttaccacatcgaggcgtccgaggacggggagttcaccgtgaagggcaaagcatccgacacagatctcgctgttatggctgacacattttcatgtcactgttatcagggctatgagggagccgactgccgtgaaataaagacagccgatggttgctccggcgtgagccctagcccaggcagcctgatgacgctgtgtctgctgctgctagcttcctacaggtccattcagctctag

SEQ ID NO: 306922 - DNA, 1446 bp, Artificial Sequence
  derived and/or modified sequence
atgaaggtgctgtctgagggccagctgaagctgtgtgtggtgcagcctgtgcacctgacctcctggctgctgatcttcttcatcctgaagagcatcagctgcctgaagccagcccggctgcccatctaccagaggaagcccttcatcgccgcctggaatgcccccacagaccagtgcctgatcaagtacaacctgcggctgaacctgaagatgtttcctgtgattggcagccccctggccaaggcccggggccagaatgtgaccatcttctacgtgaaccggctgggctactacccctggtacaccagccagggcgtgcccatcaatggaggcctgccccagaacatcagcctgcaggtgcacctggagaaggctgaccaggacatcaactactacatcccagctgaggacttcagcggcctggccgtcatcgactgggagtactggaggccccagtgggccaggaactggaacagcaaggatgtgtaccggcagaagagcaggaagctgatcagtgacatgggcaagaatgtgtctgccacagacatcgagtacctggccaaggtgacctttgaggagagcgccaaggccttcatgaaggagaccatcaagctgggcatcaagagccggcccaagggcctgtggggctactacctgtacccagactgccacaactacaacgtgtatgcccccaactacagcggcagctgcccagaagatgaggtgctgaggaacaatgagctgtcctggctgtggaacagcagcgctgccctgtaccccagcattggagtgtggaagagcctgggggacagcgagaacatcctgcgcttcagcaagttccgggtgcatgagagcatgaggatcagcaccatgaccagccatgactatgccctgcctgtgtttgtgtacacccggctgggctacagagatgagcccctcttcttcctgagcaagcaggacctggtgtccaccatcggggagagcgctgccctgggcgccgccggcatcgtcatctggggagacatgaacctgacagccagcaaggccaactgcaccaaggtgaagcagtttgtgtccagtgacctgggcagctacatcgccaacgtgaccagggctgctgaggtgtgcagcctgcacctgtgcaggaacaacggccgctgcatcaggaagatgtggaatgcccccagctacctgcacctgaacccagccagctaccacatcgaggcctctgaagatggagagttcaccgtgaagggcaaggccagtgacacagacctggccgtgatggctgacaccttcagctgccactgctaccagggctatgaaggagctgactgccgggagatcaagacagcagatggctgcagcggcgtgagccccagccctggcagcctgatgaccctgtgcctgctgctgctggccagctaccgcagcatccagctgtag

SEQ ID NO: 306923 - DNA, 1446 bp, Artificial Sequence
  derived and/or modified sequence
atgaaggtgctgagcgagggccagctgaagctgtgcgtggtgcagccggtccaccttacatcgtggttgctcatattctttatactaaagtcaataagctgtcttaaacccgccaggctccctatttaccagagaaaacctttcatcgctgcctggaatgcccccacagaccagtgcctaatcaagtacaatctgaggctcaacctgaagatgtttccagtcatcgggagcccactcgcaaaggcccgcggccaaaacgtgacaatattttatgttaatcggttaggttattacccatggtacaccagccagggcgtacctattaacggggggcttccgcagaatatctcattgcaggtgcatctcgagaaggccgaccaagatattaactactacatacccgccgaggacttctctggtctggcagtgattgactgggagtactggcggcctcagtgggcccgaaactggaactctaaggacgtgtatagacagaaatctagaaaacttattagtgatatggggaaaaatgtatcggctacggatatcgagtaccttgctaaggtgacttttgaagagagtgccaaggcttttatgaaagagaccattaagctcggtatcaagtctcgccccaaaggtctgtggggatactatctttatcctgattgtcacaactataacgtttatgcccccaactacagcggcagttgcccagaagatgaggtgcttcggaacaacgaactttcttggctctggaattcctctgccgctctttatccatccattggggtgtggaagagtctcggtgactctgagaatattcttcggttctccaagttcagagttcatgagtctatgcgcatcagtactatgacctcccatgactacgccctgccagtctttgtgtatacacgcctgggctacagagacgaaccactgttcttcctcagcaaacaagacctagtatctactattggagaatcagccgcgcttggcgctgctggtattgtgatttggggagacatgaatcttactgccagtaaggcgaattgtacgaaggtgaagcagttcgtgtcatccgacctcggtagctacatcgccaacgtcacaagagccgctgaagtgtgctctttgcacctttgcagaaataatggtaggtgcattcggaaaatgtggaacgctccttcatacctgcacctgaaccccgcgtcataccacatcgaagcatccgaggacggggaatttacagttaagggaaaggcctccgataccgatctcgccgtgatggccgatactttttcatgccactgttatcagggctatgaaggagccgattgtcgcgagattaagacagcagacgggtgctctggcgtgtctccttctcccggatccctgatgaccctatgcctgctactgctcgcaagttaccgctctatacagctgtag

SEQ ID NO: 306924 - DNA, 1446 bp, Artificial Sequence
  derived and/or modified sequence
atgaaggtgctcagtgaaggccaactcaagctgtgtgtagtccagccagtgcacctaacttcctggctgcttatctttttcatactgaagagtatcagttgtctcaaacctgccaggctgccaatttaccagcgtaagcccttcattgctgcatggaatgcacctaccgaccagtgtctcatcaagtataacctgaggctgaatctcaaaatgttccccgtaataggcagccccctcgccaaggcaagggggcagaacgtgaccatcttttatgtgaaccggcttggctattacccatggtatacttcccagggggtgcccatcaacggcggactccctcaaaacatatcactacaagtgcatttggagaaggccgatcaggacataaactattatattccggcagaggacttttcagggctcgccgtgattgactgggagtattggaggcctcagtgggcccgtaactggaacagcaaagatgtttatcgtcaaaaatcccgcaaattgattagtgacatgggcaaaaatgtatccgcaacagatattgagtacctggccaaggtcacttttgaggagagcgcaaaggcattcatgaaggagaccattaaactgggcataaaatcgaggccaaagggtctctgggggtattacctttatcccgactgccacaactacaatgtgtatgcccctaactacagtggatcttgccccgaagacgaggtcctgagaaataatgagttatcttggctgtggaactcaagtgcagccctataccctagtattggcgtctggaaatccctgggcgacagtgaaaatatcctgaggttcagcaaatttcgcgtgcatgaatcgatgcgcataagcacaatgaccagtcacgattatgccctgcctgtatttgtctacaccagattgggttaccgcgatgagcctctgtttttcctgagtaagcaggatctcgtctcgacaatcggtgagtcagcagcgctcggcgctgccggaatagtaatatggggcgatatgaacttaactgcaagcaaggcaaactgcactaaggtaaaacagtttgtgtcttctgacttaggatcatacattgccaacgtaacccgagcagccgaggtctgctcattacacctgtgtcgcaataatggcaggtgtattcgcaagatgtggaatgcccctagctatctgcaccttaaccctgcctcgtaccatatagaggccagcgaggacggggaatttacagttaagggcaaagccagcgacacagacctggcagtgatggcagataccttttcttgtcactgctatcagggttacgagggtgccgattgtagagagatcaagacggctgacggttgcagcggtgtgagtcccagcccaggatccttaatgacactctgcctgctcctgctagcatcatacaggtcgatccagttatag

SEQ ID NO: 306925 - DNA, 1446 bp, Artificial Sequence
  derived and/or modified sequence
atgaaagtgctgtcggaggggcagctaaaactgtgtgtggtgcagcctgtgcacctcacatcctggctgctgatcttttttatcctcaaatcaataagctgtttgaaacctgcgaggctccctatctatcaacggaaaccatttatagctgcatggaacgctccaactgaccagtgccttatcaaatacaacctcagactgaacttgaaaatgtttccagttatcggttctcccttggcgaaagcgcggggtcagaatgttaccatcttttatgtcaaccggctaggatactacccttggtataccagtcaaggtgtgcctattaatgggggcctgccccagaatatctcactacaggtgcacctggaaaaggcggatcaggacatcaattattacattccagcggaagacttttctggtctggccgttattgattgggagtattggcgtcctcagtgggccaggaactggaatagtaaggatgtgtaccgacagaagtcacgcaagcttatctctgatatggggaagaatgtttctgcaactgacatagagtacttagcaaaggtgacattcgaggagagtgccaaagccttcatgaaggaaacaattaaactgggtattaagagtaggcctaagggactgtggggatattacctgtatcccgattgccataactataatgtttacgccccaaactactcggggtcctgtcctgaagacgaggtcctaagaaacaacgagctgtcttggctctggaattcttcggccgcattataccccagcataggggtatggaaatcactgggggattcggagaacatcctacgtttctccaagttccgagtccatgagagtatgcgcatatccacaatgaccagtcacgattatgccttgcctgtgttcgtgtataccagactgggatatagagatgaacctttgttctttctctccaaacaggatcttgttagcaccatcggcgagtcggccgccctgggtgcggcggggatcgtgatctggggagatatgaacctgaccgcgtctaaagctaattgtaccaaagtgaagcaatttgtgtcatctgacctcggctcttatattgctaacgtcactagagctgccgaggtgtgctcccttcacctgtgtcgcaacaacggtagatgtatacggaaaatgtggaatgcccctagttacctgcatctgaatccagcctcataccacatcgaagccagcgaggacggagagtttaccgtcaagggaaaggcatctgacaccgacctggccgtgatggcagacacattttcttgtcactgttatcagggatacgaaggcgccgattgtagagagatcaagaccgcggatggttgtagtggggtgagcccatctccggggagtctgatgactctttgtctgttgctgcttgcgagttaccgcagcatccagctgtag

SEQ ID NO: 306926 - DNA, 2407 bp, Artificial Sequence
  derived and/or modified sequence
tctttattttatttatgctatctatttcttttccttttttttttttttttttttttttgagatgaagtcttactctgttgcccaggctagagtgtagtggtgtgatctcggctcactgcaaccactgcctcctgggttcaagtgattctcctgacttaacctcctgagtagctgggactacaagagcatgccatcatgcccagctaatttttgtatttttagtagagatggggtttcaccatattggccagaatggttttgcattcctgacctcaagtgatctgcctgcctcagcctcccaaaatgttgggttacaggggtgagccaccgtgccttgctatttatgccatctatttcactgaagattccgcctctcatttcttgagtcattttttttaaatttccttaaattggacttcacatttttctgatgcctccttgtttagcttaataactgaccttctgaattcttttttaggaaaatcaggaatttcttcttggtttggagccattgctggacatcctttgccattcaacctctgatttgcacaaggtgactaaaggaccagcagcaaacaaaagcaaaggtcttctagagtgcactaaagcagaagataacgtaacatttttatcttaccatgaaagtattatctgaaggacagttaaagctttgtgttgttcaaccagtacatctcacttcatggctccttatattttttattctaaagtctatctcttgtctaaaacctgctcgacttccaatttatcaaaggaaaccttttatagctgcttggaatgctccaacagatcagtgtttgataaaatataatttaagactaaatttgaaaatgtttcctgtgattggaagcccactggccaaggccagggggcaaaatgtcactatattttatgtcaacagattgggatactatccgtggtatacatcacaaggggtccccattaatggaggtctcccacagaacataagtttacaagtacatctggaaaaagctgaccaagatattaattattacatccctgctgaagatttcagtggacttgctgttatagattgggaatattggcgaccacagtgggcccggaactggaactcaaaagatgtttacagacagaagtcaagaaagcttatttccgatatgggaaagaatgtatcagctaccgatattgaatatttagccaaagtgacctttgaagaaagtgcaaaagctttcatgaaggaaaccatcaaattgggaattaagagccgacccaaaggcctttggggttattatttatatcctgattgccacaattataacgtttatgccccaaactactctgggtcatgcccagaagacgaagtcttgaggaacaatgagctctcttggctctggaacagcagtgctgctttatatccttctatcggtgtctggaaatcccttggagacagtgaaaacattttgcgcttctccaaatttcgggtgcatgaatccatgaggatctccaccatgacatctcatgattatgctctgcctgtatttgtctacacaaggctagggtacagagatgaacctttatttttcctttctaagcaagatctagtcagcaccataggagaaagtgctgccttgggagctgcaggcattgttatttggggagacatgaatttaactgcatccaaggccaactgtacaaaggtgaagcagtttgtgagttctgatttagggagctacatagccaatgtgaccagagctgctgaggtatgcagccttcacctctgcaggaacaatggcaggtgcataaggaagatgtggaacgcgcccagttaccttcacttgaaccctgcaagttaccacatagaggcctctgaggacggggagtttactgtgaaaggaaaagcatctgatacagacctggcagtgatggcagatacattttcctgtcattgttatcagggatatgaaggagctgattgcagagaaataaagacggctgatggctgctctggggtttccccttctcctggttcactaatgacactttgtctactgcttttagcaagttatcgaagcattcagttgtgagataattgagtttaaagggaattgtgtggcctctagcctagtcatttaaagaaggatgtaacttataacattttttttctcttatgaattctattgagagatattataagtagacattatgtatgtcacttaacataaacagaaacattattttatttgcctccagtctggctaggaaaccagatctggggtaaagtcaatgtacacttcctccttattggaatatttaagttgcatttaaactaaaactagtataatttagtcttttcatgaatgtacatacataaaattatacataaaaatattaaattattcatttcaaa

SEQ ID NO: 306927 - DNA, 1616 bp, Artificial Sequence
  derived and/or modified sequence
ttgtctgaaccacgcacaggacatcctttgccattcaacctctgatttgcacaaggtgactaaaggaccagcagcaaacaaaagcaaaggtcttctagagtgcactaaagcagaagataacgtaacatttttatcttaccatgaaagtattatctgaaggacagttaaagctttgtgttgttcaaccagtacatctcacttcatggctccttatattttttattctaaagtctatctcttgtctaaaacctgctcgacttccaatttatcaaaggaaaccttttatagctgcttggaatgctccaacagatcagtgtttgataaaatataatttaagactaaatttgaaaatgtttcctgtgattggaagcccactggccaaggccagggggcaaaatgtcactatattttatgtcaacagattgggatactatccgtggtatacatcacaaggggtccccattaatggaggtctcccacagaacataagtttacaagtacatctggaaaaagctgaccaagatattaattattacatccctgctgaagatttcagtggacttgctgttatagattgggaatattggcgaccacagtgggcccggaactggaactcaaaagatgtttacagacagaagtcaagaaagcttatttccgatatgggaaagaatgtatcagctaccgatattgaatatttagccaaagtgacctttgaagaaagtgcaaaagctttcatgaaggaaaccatcaaattgggaattaagagccgacccaaaggcctttggggttattatttatatcctgattgccacaattataacgtttatgccccaaactactctgggtcatgcccagaagacgaagtcttgaggaacaatgagctctcttggctctggaacagcagtgctgctttatatccttctatcggtgtctggaaatcccttggagacagtgaaaacattttgcgcttctccaaatttcgggtgcatgaatccatgaggatctccaccatgacatctcatgattatgctctgcctgtatttgtctacacaaggctagggtacagagatgaacctttatttttcctttctaagcaagatctagtcagcaccataggagaaagtgctgccttgggagctgcaggcattgttatttggggagacatgaatttaactgcatccaaggccaactgtacaaaggtgaagcagtttgtgagttctgatttagggagctacatagccaatgtgaccagagctgctgaggtatgcagccttcacctctgcaggaacaatggcaggtgcataaggaagatgtggaacgcgcccagttaccttcacttgaaccctgcaagttaccacatagaggcctctgaggacggggagtttactgtgaaaggaaaagcatctgatacagacctggcagtgatggcagatacattttcctgtcattgttatcagggatatgaaggagctgattgcagagaaataaagacggctgatggctgctctggggtttccccttctcctggttcactaatgacactttgtctactgcttttagcaagttatcgaagcattcagttgtgagataattgagtttaaagggaattgtgtggc

SEQ ID NO: 306928 - DNA, 1446 bp, Artificial Sequence
  derived and/or modified sequence
atgaaggtgctgagcgagggccagctgaagctgtgcgtggtgcagccagtgcatttgacttcctggcttctgatctttttcatcctcaaatctatcagctgcctgaagcccgcccgccttcctatttaccagaggaagccctttatcgccgcatggaatgcacctacagatcaatgcttgatcaaatataacctgcggctgaatctgaagatgttccctgtgattggttcccctctcgcaaaggctcgcggacagaacgttacaatcttctatgtcaatcgcctgggttattatccatggtacacatcccagggggtgccaatcaacggcggccttccccagaatatttctctccaagtgcacctagagaaagcagaccaagatatcaactactatatccctgcagaggacttctcaggacttgccgtgattgattgggagtattggagaccccagtgggctcggaattggaattctaaagacgtctatagacaaaaaagccgcaaattgatctccgacatgggcaagaacgtctctgccaccgatattgaatatctcgccaaggtgacttttgaggaatctgctaaggcttttatgaaagagactatcaagctggggatcaagtcccggcctaagggactgtgggggtactatctctatcctgattgtcataactacaatgtgtacgcacctaactactcggggagctgtcccgaggatgaggtgctgcgaaataatgaactctcctggctctggaattcatccgctgccctctacccctcaatcggtgtgtggaagagccttggagattccgagaacatcctgcgatttagcaaatttcgggttcacgaatctatgcggatctccacaatgacctcccacgattacgctttacccgtgttcgtctatacacgcctggggtatagggatgaaccgctgtttttcctatccaagcaagatctggtcagcaccataggagaatctgcagccttaggggcagctggaatcgtgatttggggtgacatgaacctgacagccagcaaggccaactgcacgaaagtgaaacagtttgtctccagcgaccttggcagctatatagccaacgtcacaagggctgctgaggtttgcagtttacatctgtgtcgaaataatggcaggtgtatccggaagatgtggaacgccccgagctacctccatctgaacccggcttcataccatattgaggcaagtgaggatggagaatttactgtgaagggcaaggcatcggacacagacctggcggtgatggcggatacatttagttgtcactgctaccaagggtatgagggagcagattgcagggaaatcaagactgcagatggctgctcaggtgttagcccctctcctggttctctaatgacattatgtttactgcttctggcatcctaccgcagcatccagctctag

SEQ ID NO: 306929 - DNA, 1446 bp, Artificial Sequence
  derived and/or modified sequence
atgaaggttcttagtgagggccagctgaagctctgtgtcgtacagcctgttcacctaacctcttggctgctcatattctttatcttaaagtccatctcttgcctgaaaccagctcggcttcccatttatcagcgtaaacctttcatcgctgcgtggaacgctcctaccgatcagtgtcttataaaatacaacttgcgccttaacctcaagatgttcccggttataggaagcccactggctaaggccagaggtcagaatgtgaccattttctacgtgaatcgcctcggttactatccgtggtataccagtcagggagtacctatcaatggtggcctccctcagaacatcagcctgcaggttcaccttgaaaaggccgatcaagatattaactactatataccagccgaggacttctcaggcttggcagtcattgactgggaatattggcggcctcagtgggcccgaaactggaactccaaggatgtatatagacagaagagccggaagctcatctccgacatgggaaagaatgtgtccgctactgatatcgaatacctggccaaagtcacattcgaggagtccgctaaggcgttcatgaaggagactattaagctagggattaagtctcggccaaaggggttgtggggctactatctgtatcctgattgccacaactataatgtctatgccccaaactatagcgggagttgtccggaggacgaggtgctaagaaacaacgaactgagctggctgtggaactcaagcgccgctctctacccaagcattggagtgtggaaatctctcggcgattcggagaacattctgagattctcaaagtttcgggtgcacgagtccatgcgtatcagtaccatgacttcccatgattatgcccttcccgtcttcgtgtacactcgcttgggttatcgcgacgaacccctattctttctcagcaagcaggatttggtgtcaaccataggggaaagcgcggcactgggagctgcaggaattgtgatctggggggatatgaacctgactgcctcgaaggctaactgcacaaaggtaaaacagtttgtcagctctgatcttggatcctatatcgcaaatgtaacacgtgctgcagaggtctgctctctccacctgtgccgcaataacggcaggtgcatcaggaagatgtggaatgccccttcctatctgcatctaaatccagccagctaccatattgaggcctcagaggatggcgagttcaccgttaaaggaaaagcttccgacaccgatcttgccgtgatggctgatacattttcctgccactgttatcaggggtacgaaggcgctgattgtcgcgagatcaaaaccgcagatggctgttcaggtgtttctccaagtcccggaagtcttatgacactgtgcttgctgctgttggcatcatataggagcatccagctgtag

SEQ ID NO: 306930 - DNA, 138 bp, Artificial Sequence
  derived and/or modified sequence
atgaaagtactcagcgaggggcaactgaaattgtgtgtggttcagcccgtgcacctgactagctggctgctgatattttttatcctcaaatccatctcctgccttaagcccgcccgactgccaatttatcagcggtag

SEQ ID NO: 306931 - DNA, 192 bp, Artificial Sequence
  derived and/or modified sequence
atgaaggtgttaagtgagggtcagctgaagctttgtgttgtacagcccgtgcatttaactagttggctcttaatcttcttcatccttaagtcaatcagttgtctgaaaccagcccgcctccccatctaccaaaggaagccattcatcgctgcttggaatgctcctaccgaccagtgtctgataaagtattag

SEQ ID NO: 306932 - DNA, 314 bp, Artificial Sequence
  derived and/or modified sequence
ccagtgagatgaaccaggaaaatcaggaatttcttcttggtttggagccattgctggacatcctttgccattcaacctctgatttgcacaaggtgactaaaggaccagcagcaaacaaaagcaaaggtcttctagagtgcactaaagcagaagataacgtaacatttttatcttaccatgaaagtattatctgaaggacagttaaagctttgtgttgttcaaccagtacatctcacttcatggctccttatattttttattctaaagtctatctcttgtctaaaacctgctcgacttccaatttatcaaaggaa

SEQ ID NO: 306933 - DNA, 589 bp, Artificial Sequence
  derived and/or modified sequence
tatccgagggcctttgggccattatgctgtgaatgtgacatctgcagccaagctctgcagtcagagtctatgtaacaatcatggaagagtattcgaaaaacacctgagtcctccttctatctgcatatgcctgaaagcagtgtcaggtccctcagctgcaggtctgttggagtttgctggaggtccattccagaccttgtttacctgggtatcaccagcggaggctgcagaaccgcaagaaaatcaggaatttcttcttggtttggagccattgctggacatcctttgccattcaacctctgatttgcacaaggtgactaaaggaccagcagcaaacaaaagcaaaggtcttctagagtgcactaaagcagaagataacgtaacatttttatcttaccatgaaagtattatctgaaggacagttaaagctttgtgttgttcaaccagtacatctcacttcatggctccttatattttttattctaaagtctatctcttgtctaaaacctgctcgacttccaatttatcaaaggaaaccttttatagctgcttggaatgctccaacagatcagtgtttgataaaatataa

SEQ ID NO: 306934 - DNA, 138 bp, Artificial Sequence
  derived and/or modified sequence
atgaaggtgctgtctgagggccagctgaagctgtgtgtggtgcagcctgtgcacctgacctcctggctgctgatcttcttcatcctgaagagcatcagctgcctgaagccagcccggctgcccatctaccagaggtag

SEQ ID NO: 306935 - DNA, 192 bp, Artificial Sequence
  derived and/or modified sequence
atgaaggtgctgtctgagggccagctgaagctgtgtgtggtgcagcctgtgcacctgacctcctggctgctgatcttcttcatcctgaagagcatcagctgcctgaagccagcccggctgcccatctaccagaggaagcccttcatcgccgcctggaatgcccccacagaccagtgcctgatcaagtactag

SEQ ID NO: 306936 - DNA, 138 bp, Artificial Sequence
  derived and/or modified sequence
atgaaggtgctgagcgagggccagctgaagctgtgcgtggtgcagcctgtgcatctcactagctggctgttgattttctttattttgaaatctatctcatgcctgaaacccgcacgcctcccaatctatcaacgctag

SEQ ID NO: 306937 - DNA, 192 bp, Artificial Sequence
  derived and/or modified sequence
atgaaggtgctgagcgagggccagctgaagctgtgcgtggtgcagccagtacacttgacctcctggcttctcatcttctttatcctcaaatctatcagctgcctgaagcccgccagactccctatctaccaaagaaagccatttattgcagcctggaatgctccaactgaccagtgtctaatcaagtactag

SEQ ID NO: 306938 - DNA, 138 bp, Artificial Sequence
  derived and/or modified sequence
atgaaggttctttcagagggacagctgaagctgtgcgtggttcagcctgtacatctgacctcgtggttattgatcttcttcattttgaagtccatttcatgtctcaagcctgcacggctgccgatatatcagagatag

SEQ ID NO: 306939 - DNA, 192 bp, Artificial Sequence
  derived and/or modified sequence
atgaaggttctgtccgaggggcagcttaaactgtgcgtagttcagccagtgcacctcacctcttggctcctgatcttctttatccttaaatcaatcagttgccttaagcccgctcgtcttcccatatatcagaggaagccctttatcgccgcttggaatgcacctaccgatcagtgtctaatcaagtactag

SEQ ID NO: 306940 - DNA, 138 bp, Artificial Sequence
  derived and/or modified sequence
atgaaggtgctgagcgagggccagctgaagctgtgcgtggtgcagcccgtgcacctgaccagctggctgctgatcttcttcatcctgaagagcatcagctgcctgaagcccgccagactgcccatctaccagagatag

SEQ ID NO: 306941 - DNA, 192 bp, Artificial Sequence
  derived and/or modified sequence
atgaaggtgctgagcgagggccagctgaagctgtgcgtggtgcagcccgtgcacctgaccagctggctgctgatcttcttcatcctgaagagcatcagctgcctgaagcccgccagactgcccatctaccagagaaagcccttcatcgccgcctggaacgcccccaccgaccagtgcctgatcaagtactag

SEQ ID NO: 306942 - protein, 305 aa, Artificial Sequence
  derived and/or modified sequence
MAREDSVKCLRCLLYALNLLFWLMSISVLAVSAWMRDYLNNVLTLTAETRVEEAVILTYFPVVHPVMIAVCCFLIIVGMLGYCGTVKRNLLLLAWYFGSLLVIFCVELACGVWTYEQELMVPVQWSDMVTLKARMTNYGLPRYRWLTHAWNFFQREFKCCGVVYFTDWLEMTEMDWPPDSCCVREFPGCSKQAHQEDLSDLYQEGCGKKMYSFLRGTKQLQVLRFLGISIGVTQILAMILTITLLWALYYDRREPGTDQMMSLKNDNSQHLSCPSVELLKPSLSRIFEHTSMANSFNTHFEMEEL

SEQ ID NO: 306943 - protein, 112 aa, Artificial Sequence
  derived and/or modified sequence
MAREDSVKCLRCLLYALNLLFWLMSISVLAVSAWMRDYLNNVLTLTAETRVEEAVILTYFPVVHPVMIAVCCFLIIVGMLGYCGTVKRNLLLLAWYFGSLLVIFCVELACGV

SEQ ID NO: 306944 - protein, 95 aa, Artificial Sequence
  derived and/or modified sequence
MAREDSVKCLRCLLYALNLLFWLMSISVLAVSAWMRDYLNNVLTLTAETRVEEAVILTYFPVVHPVMIAVCCFLIIVGMLGYCGTVKRNLLLLAW

SEQ ID NO: 306945 - protein, 120 aa, Artificial Sequence
  derived and/or modified sequence
MAREDSVKCLRCLLYALNLLFWLMSISVLAVSAWMRDYLNNVLTLTAETRVEEAVILTYFPVVHPVMIAVCCFLIIVGMLGYCGTVKRNLLLLAWYFGSLLVIFCVELACGVWTYEQELM

SEQ ID NO: 306946 - protein, 147 aa, Artificial Sequence
  derived and/or modified sequence
MAREDSVKCLRCLLYALNLLFWLMSISVLAVSAWMRDYLNNVLTLTAETRVEEAVILTYFPVVHPVMIAVCCFLIIVGMLGYCGTVKRNLLLLAWYFGSLLVIFCVELACGVWTYEQELMVPVQWSDMVTLKARMTNYGLPRYRWLT

SEQ ID NO: 306947 - DNA, 339 bp, Artificial Sequence
  derived and/or modified sequence
atggccagagaggacagcgtgaagtgcctgagatgcctgctgtacgccctgaacctgctgttctggctgatgagcatcagcgtgctggccgtgagcgcctggatgagagactacctgaacaacgtgctgaccctgaccgccgagaccagagtggaggaggccgtgatcctgacctacttccccgtggtgcaccccgtgatgatcgccgtgtgctgcttcctgatcatcgtgggcatgctgggctactgcggcaccgtgaagagaaacctgctgctgctggcctggtacttcggcagcctgctggtgatcttctgcgtggagctggcctgcggcgtgtag

SEQ ID NO: 306948 - DNA, 288 bp, Artificial Sequence
  derived and/or modified sequence
atggccagagaggacagcgtgaagtgcctgagatgcctgctgtacgccctgaacctgctgttctggctgatgagcatcagcgtgctggccgtgagcgcctggatgagagactacctgaacaacgtgctgaccctgaccgccgagaccagagtggaggaggccgtgatcctgacctacttccccgtggtgcaccccgtgatgatcgccgtgtgctgcttcctgatcatcgtgggcatgctgggctactgcggcaccgtgaagagaaacctgctgctgctggcctggtag

SEQ ID NO: 306949 - DNA, 363 bp, Artificial Sequence
  derived and/or modified sequence
atggccagagaggacagcgtgaagtgcctgagatgcctgctgtacgccctgaacctgctgttctggctgatgagcatcagcgtgctggccgtgagcgcctggatgagagactacctgaacaacgtgctgaccctgaccgccgagaccagagtggaggaggccgtgatcctgacctacttccccgtggtgcaccccgtgatgatcgccgtgtgctgcttcctgatcatcgtgggcatgctgggctactgcggcaccgtgaagagaaacctgctgctgctggcctggtacttcggcagcctgctggtgatcttctgcgtggagctggcctgcggcgtgtggacctacgagcaggagctgatgtag

SEQ ID NO: 306950 - DNA, 444 bp, Artificial Sequence
  derived and/or modified sequence
atggccagagaggacagcgtgaagtgcctgagatgcctgctgtacgccctgaacctgctgttctggctgatgagcatcagcgtgctggccgtgagcgcctggatgagagactacctgaacaacgtgctgaccctgaccgccgagaccagagtggaggaggccgtgatcctgacctacttccccgtggtgcaccccgtgatgatcgccgtgtgctgcttcctgatcatcgtgggcatgctgggctactgcggcaccgtgaagagaaacctgctgctgctggcctggtacttcggcagcctgctggtgatcttctgcgtggagctggcctgcggcgtgtggacctacgagcaggagctgatggtgcccgtgcagtggagcgacatggtgaccctgaaggccagaatgaccaactacggcctgcccagatacagatggctgacctag

SEQ ID NO: 306951 - DNA, 918 bp, Artificial Sequence
  derived and/or modified sequence
atggctcgtgaagattctgtgaagtgcttgcggtgccttttatacgccctcaacttactcttttggctgatgtccattagtgttctggctgttagcgcatggatgagggactatctgaataatgtcctgaccttgacagctgaaacaagggtagaggaagcagtgatactgacttattttccagtggtgcatccagtgatgattgcagtttgttgtttcctgatcattgtgggcatgctgggttattgcggaaccgtgaaaaggaacttgttattgctcgcctggtacttcggttctctgttagtcatcttttgcgtcgagctggcatgtggggtgtggacatacgagcaggagctcatggttccagtacaatggtctgatatggtgactctgaaggcgcgcatgaccaactatggcctgcctaggtatcgatggctgacacatgcttggaattttttccagagagagttcaagtgctgtggggtcgtgtacttcaccgactggctcgagatgacagagatggactggcctcctgactcatgctgcgtgcgggaattccctggatgttctaagcaagctcatcaggaagacctctcagatctttatcaagaaggttgtgggaagaagatgtacagcttcctgcgcggcacgaagcagctgcaggtgcttcggtttctaggcattagcattggagtgacgcaaattctggctatgatcctcaccattacactcctctgggccttatactacgaccgcagagagcctggcactgaccagatgatgtctctcaagaatgataacagtcagcacctgtcatgcccctctgtcgaacttctgaaaccttctctgtcaagaatcttcgaacatacctctatggccaattcctttaacactcattttgagatggaggaactgtag

SEQ ID NO: 306952 - DNA, 918 bp, Artificial Sequence
  derived and/or modified sequence
atggcgcgggaagactccgtaaaatgcctgcgctgtttgctgtacgccctgaatctcctgttctggctcatgtctatttctgttctcgccgtgtccgcttggatgagggactatcttaataacgtgctgacactcacagctgaaactcgggttgaggaggccgtgatactgacctactttccagtggtccatccagtgatgattgccgtctgctgttttctgattatcgttggaatgttgggatattgtggaaccgtcaaaagaaacctgctgttgctagcctggtactttggctccctgctggtgatcttctgcgtagagcttgcctgcggagtgtggacatacgagcaggagctgatggtgcccgtacaatggagcgatatggtgaccctgaaagcccgcatgaccaactatggcctgcctaggtaccgctggctgacacacgcatggaatttctttcaaagggagtttaaatgctgtggagtcgtttattttactgattggctggaaatgacagaaatggactggccccccgactcttgctgtgtaagggagttcccaggctgtagcaaacaggcccaccaggaggacctcagcgacctgtaccaagaaggttgcgggaagaagatgtattctttcctgcggggaacaaagcagcttcaggtattaaggtttctcggaatcagcatcggagtaacccagatattggccatgatcctcaccatcactttactctgggccctgtactatgacaggcgggagccagggacggatcaaatgatgtccctgaagaatgacaactcacaacacctctcctgcccctccgttgagctgctgaagccaagcctctccagaatatttgagcacacctcaatggcaaattcttttaatacccatttcgagatggaggagctctag

SEQ ID NO: 306953 - DNA, 339 bp, Artificial Sequence
  derived and/or modified sequence
atggctcgtgaggattccgtgaagtgtttaagatgcctgttgtatgctctcaacctcctcttctggttgatgtcaattagcgtactcgctgtcagcgcctggatgcgcgactatcttaacaatgtactcacccttactgcagaaacccgcgtggaagaggcggtgatcttgacatatttccccgtcgtgcatcccgtgatgatagctgtttgttgcttcctcattatcgtcgggatgctgggttattgcggcaccgttaagagaaacttgctcctgctagcttggtactttggctccttgcttgtcatcttctgtgtggaacttgcttgcggcgtgtag

SEQ ID NO: 306954 - DNA, 288 bp, Artificial Sequence
  derived and/or modified sequence
atggcccgcgaagacagcgtaaaatgcttgcgttgcctgttgtatgctcttaacctgttgttttggctaatgagtattagcgtgctggccgttagcgcctggatgagggactatttaaataacgtcttaaccctcaccgccgagacgcgggtagaagaggctgtcatactgacatatttccctgtggtacatcctgtgatgatcgcagtctgctgcttcctgatcattgtcggaatgctgggatattgcgggaccgtcaagcgcaacctgctgctgcttgcttggtag

SEQ ID NO: 306955 - DNA, 363 bp, Artificial Sequence
  derived and/or modified sequence
atggcgagagaggatagtgtaaagtgtctgcggtgcttactctacgccctgaatctgctgttttggctgatgtctatcagcgttctggccgtatccgcttggatgagagattacctgaataacgtacttaccttgaccgccgagactcgggtggaagaagccgtgatcctcacttatttcccagtggtgcacccagtgatgatagcggtttgctgttttctgattatcgttgggatgctggggtattgcggaacagtgaaacggaacctgctccttcttgcctggtatttcggtagtctactggtcattttttgtgtagagctcgcctgcggcgtgtggacgtatgaacaggagctcatgtag

SEQ ID NO: 306956 - DNA, 444 bp, Artificial Sequence
  derived and/or modified sequence
atggctagagaggactcagtcaagtgtctgcggtgcctcctgtatgcgttgaatctactgttctggcttatgtcaatctccgtcttagccgtgtcagcctggatgcgtgactacctaaataacgtgttgacattgactgcggagactcgggtggaagaggcagtaatccttacttacttccctgtcgtgcacccagtgatgattgctgtctgctgctttcttattatcgtggggatgcttggctattgcggtactgttaagcggaatctactgttgttagcctggtacttcggctcactgcttgtcattttttgtgtcgagctcgcatgcggagtttggacctatgagcaggaacttatggtgcctgtgcagtggagcgacatggtgacattaaaagctagaatgacgaactatggcctgcctagatacaggtggctgacttag

SEQ ID NO: 306957 - DNA, 918 bp, Artificial Sequence
  derived and/or modified sequence
atggcccgggaggacagcgtgaagtgcctgcgctgcctgctgtatgccctgaacctgctcttctggctgatgagcatctctgtgctggccgtgtctgcctggatgagggactacctgaacaacgtgctgaccctgacagctgagaccagggtggaggaggccgtcatcctgacctacttccctgtggtgcaccctgtgatgattgctgtgtgctgcttcctgatcatcgtgggcatgctgggctactgcggcaccgtgaagaggaacctgctgctgctggcctggtacttcggcagcctgctggtgatcttctgtgtggagctggcctgtggggtgtggacctatgagcaggagctgatggtgcctgtgcagtggagcgacatggtgaccctgaaggccaggatgaccaactacggcctgccccgctaccgctggctgacccacgcctggaacttcttccagcgggagttcaagtgctgcggcgtggtgtacttcacagactggctggagatgacagagatggactggcccccagacagctgctgcgtgcgggagttccctggctgcagcaagcaggcccaccaggaggacctgagtgacctgtaccaggagggctgtgggaagaagatgtacagcttcctgcggggcaccaagcagctgcaggtgctgcgcttcctgggcatcagcattggagtgacccagatcctggccatgatcctgaccatcaccctgctgtgggccctgtactatgaccggcgggagcctggaacagaccagatgatgagcctgaagaatgacaacagccagcacctgagctgccccagcgtggagctgctgaagcccagcctgagccgcatctttgagcacacctccatggccaacagcttcaacacccactttgagatggaggagctgtag

SEQ ID NO: 306958 - DNA, 339 bp, Artificial Sequence
  derived and/or modified sequence
atggcccgggaggacagcgtgaagtgcctgcgctgcctgctgtatgccctgaacctgctcttctggctgatgagcatctctgtgctggccgtgtctgcctggatgagggactacctgaacaacgtgctgaccctgacagctgagaccagggtggaggaggccgtcatcctgacctacttccctgtggtgcaccctgtgatgattgctgtgtgctgcttcctgatcatcgtgggcatgctgggctactgcggcaccgtgaagaggaacctgctgctgctggcctggtacttcggcagcctgctggtgatcttctgtgtggagctggcctgtggggtgtag

SEQ ID NO: 306959 - DNA, 288 bp, Artificial Sequence
  derived and/or modified sequence
atggcccgggaggacagcgtgaagtgcctgcgctgcctgctgtatgccctgaacctgctcttctggctgatgagcatctctgtgctggccgtgtctgcctggatgagggactacctgaacaacgtgctgaccctgacagctgagaccagggtggaggaggccgtcatcctgacctacttccctgtggtgcaccctgtgatgattgctgtgtgctgcttcctgatcatcgtgggcatgctgggctactgcggcaccgtgaagaggaacctgctgctgctggcctggtag

SEQ ID NO: 306960 - DNA, 363 bp, Artificial Sequence
  derived and/or modified sequence
atggcccgggaggacagcgtgaagtgcctgcgctgcctgctgtatgccctgaacctgctcttctggctgatgagcatctctgtgctggccgtgtctgcctggatgagggactacctgaacaacgtgctgaccctgacagctgagaccagggtggaggaggccgtcatcctgacctacttccctgtggtgcaccctgtgatgattgctgtgtgctgcttcctgatcatcgtgggcatgctgggctactgcggcaccgtgaagaggaacctgctgctgctggcctggtacttcggcagcctgctggtgatcttctgtgtggagctggcctgtggggtgtggacctatgagcaggagctgatgtag

SEQ ID NO: 306961 - DNA, 444 bp, Artificial Sequence
  derived and/or modified sequence
atggcccgggaggacagcgtgaagtgcctgcgctgcctgctgtatgccctgaacctgctcttctggctgatgagcatctctgtgctggccgtgtctgcctggatgagggactacctgaacaacgtgctgaccctgacagctgagaccagggtggaggaggccgtcatcctgacctacttccctgtggtgcaccctgtgatgattgctgtgtgctgcttcctgatcatcgtgggcatgctgggctactgcggcaccgtgaagaggaacctgctgctgctggcctggtacttcggcagcctgctggtgatcttctgtgtggagctggcctgtggggtgtggacctatgagcaggagctgatggtgcctgtgcagtggagcgacatggtgaccctgaaggccaggatgaccaactacggcctgccccgctaccgctggctgacctag

SEQ ID NO: 306962 - DNA, 918 bp, Artificial Sequence
  derived and/or modified sequence
atggcccgggaggacagcgtgaagtgcctgcggtgcctgctgtacgcactaaatcttttgttctggctgatgtcaatctccgtattggcggtgagtgcctggatgcgcgactacctgaacaatgtactgaccctaacggccgagacacgagtggaggaggcagtgatcctgacctacttccccgttgtacacccagtgatgatcgccgtttgctgcttcctcattatagtgggcatgctggggtactgcgggaccgttaagaggaacttgctgttgctcgcctggtatttcggttccctcctagtgatattctgtgtcgaactcgcatgtggcgtctggacctatgagcaggagttgatggttccggtgcagtggagcgatatggtaacgctgaaagcccggatgacaaattacggtctgcccagatatcgctggctgactcacgcttggaactttttccaacgggaatttaagtgttgtggcgtagtctactttactgattggctggaaatgaccgagatggattggccacctgacagctgctgtgtgagagaatttcctggctgctcgaagcaggcccatcaggaagacctgtctgacttgtaccaggaaggatgtggcaagaaaatgtacagcttcctccgggggactaaacagctgcaggtgctgcgcttcttgggtatttctattggggtgacacagatcttagcaatgatattgaccattacactcttgtgggccctttattacgacaggcgagagcccggcactgaccagatgatgagtctgaagaatgataactcacagcacctatcttgcccgagcgtggaactgctgaagccctcattgtcccggatcttcgaacatactagcatggccaactctttcaatacacacttcgagatggaggaactgtag

SEQ ID NO: 306963 - DNA, 918 bp, Artificial Sequence
  derived and/or modified sequence
atggcccgggaggacagcgtgaagtgcctgcggtgcctgctgtacgcattgaatctcttgttctggctcatgtcaatctcagtcctggctgtgtcagcatggatgcgagactacctcaataacgtgttgactttgacagcggagactcgagtggaagaagcggtgatcttgacatactttcctgtggtacacccagtaatgattgcagtctgctgttttctgattatagtcggcatgctcgggtattgtggaacagtgaagcgcaacttgcttctcctcgcttggtactttggctctttgctggtgattttttgcgtggaattggcctgtggagtatggacttatgagcaagagttaatggttccagtgcagtggtccgatatggtaactctcaaggcaagaatgaccaactacggattacctcggtacaggtggctgactcatgcgtggaacttttttcagcgcgaattcaagtgctgcggggtcgtgtattttactgattggctcgagatgactgagatggactggccccctgacagttgctgtgtgagagaattccccggttgcagtaagcaggcacatcaagaggacctctccgatctgtatcaggagggctgcggcaagaaaatgtactcctttttacgaggaaccaagcagctccaggtccttaggttcctgggcatcagcattggcgtcacccaaatcctcgccatgattctgacaatcactctgttatgggccctgtactacgacagaagggaacccggcaccgaccaaatgatgagcctcaagaatgacaattcacagcatctgagctgtccatccgtcgagttactgaagccttctttgagtaggatcttcgagcacactagcatggcgaactcgtttaacacccacttcgaaatggaagaactgtag

SEQ ID NO: 306964 - DNA, 339 bp, Artificial Sequence
  derived and/or modified sequence
atggcccgggaggacagcgtgaagtgcctgcggtgcctgctgtacgccctcaacttgttgttttggcttatgtctatcagtgtcctggccgtttcagcctggatgcgtgactacctgaacaacgttcttaccttgaccgccgaaactcgtgttgaagaggctgttattttgacctacttccccgtggtccatcccgtcatgatcgctgtctgctgtttcttgatcatcgttgggatgctgggatactgcgggaccgtgaaacgaaacctcttgctgctggcttggtacttcggatcactgctggttatcttttgtgtggagctggcatgtggggtctag

SEQ ID NO: 306965 - DNA, 288 bp, Artificial Sequence
  derived and/or modified sequence
atggcccgggaggacagcgtgaagtgcctgcggtgcctgctgtacgcacttaatctgctgttctggctgatgtcgatctccgtgttagcagtctctgcctggatgcgcgactacctgaataatgtcctgaccctgactgctgaaaccagggtagaggaggcagtgatcttgacatattttccagtagtgcacccggttatgattgctgtgtgctgcttcttaatcatcgtcgggatgctcggctactgtggaactgtgaagcgcaacctgctcttgctcgcctggtag

SEQ ID NO: 306966 - DNA, 363 bp, Artificial Sequence
  derived and/or modified sequence
atggcccgggaggacagcgtgaagtgcctgcggtgcctgctgtacgccctgaacctgcttttctggctgatgagtatcagtgtgcttgcagttagcgcatggatgcgggattacctcaacaacgtactgaccctcaccgcggagacacgagtagaagaagccgtgatcctgacatatttccccgtcgtccaccccgtgatgatcgccgtgtgctgtttccttatcattgttggaatgctgggttactgcggcacggtgaagagaaatcttttgttactagcatggtacttcgggtccctcctcgtgattttttgtgtggaactggcctgtggagtttggacttatgagcaggagttgatgtag

SEQ ID NO: 306967 - DNA, 444 bp, Artificial Sequence
  derived and/or modified sequence
atggcccgggaggacagcgtgaagtgcctgcggtgcctgctgtacgcgctgaacttgttgttttggctcatgagcatctctgtgctggccgtttccgcatggatgcgcgattacctgaacaacgtgttgacactcaccgctgagacacgtgtggaggaagccgtgatcctgacttattttcccgtggtgcatccagtgatgattgctgtgtgctgcttcttaattatcgtcggaatgctcgggtattgtggaacagtgaagcggaatttgctattgttggcttggtacttcgggtctcttctagtgatcttttgcgtggagttggcttgcggcgtgtggacctacgagcaagagttgatggtcccagtccagtggagcgatatggttacacttaaggctcgaatgaccaattacggcctgccaagatatcgatggctgacatag

SEQ ID NO: 306968 - DNA, 918 bp, Artificial Sequence
  derived and/or modified sequence
atggctagagaagacagtgtcaagtgtctgcggtgtttactgtacgccttgaacctgctgttctggctgatgtctatatcagtcctcgccgtctccgcttggatgagggactacctaaataatgtcttgacccttacagctgagacccgcgtggaagaagcagtcatcttgacctatttcccagtcgtccatccagttatgattgctgtctgctgcttcctcattatagtgggcatgttgggttactgtggaactgtaaagaggaatttgctcttactggcctggtattttggttccttgctcgtgatattctgcgtcgaactggcctgcggagtgtggacatacgagcaggagctaatggttcccgtgcagtggtcagacatggtaacactaaaggcgcgtatgacgaattacggcctccctagatacaggtggcttacccatgcgtggaatttcttccagcgcgagttcaagtgctgcggagtcgtgtactttaccgattggctggaaatgaccgagatggattggcctccagacagctgctgtgtccgagagttccctggttgtagcaagcaggcacaccaagaagatctttccgacctgtatcaagagggatgcggaaagaagatgtacagttttctccggggtacaaagcaacttcaggttcttcgattcctgggaattagcattggtgttacccaaatcctagccatgatactgacaataacactgctctgggcgctgtactacgaccgtcgcgagcccggaacagatcagatgatgagtttgaagaacgacaattcacagcacctcagctgtccgtccgtcgaactgctgaaaccctccttgagcaggatttttgagcacacatctatggcaaactcgtttaatacccactttgagatggaagagttatag

SEQ ID NO: 306969 - DNA, 918 bp, Artificial Sequence
  derived and/or modified sequence
atggccagggaggactcagtgaagtgtttgcgttgcctactctacgctctgaacctgctcttctggctgatgtccatctcagtactggcagtgtccgcatggatgcgcgattatttaaataatgtgctgacacttaccgccgagaccagggtcgaagaggcagtcattctcacttattttcccgtcgtccacccagtcatgatcgcagtgtgttgcttcctgatcatcgtgggtatgctgggatactgcggaaccgtgaaacgcaatctcctgctccttgcctggtactttggatccctgctcgtaattttctgtgtggagctggcttgcggagtgtggacttacgagcaagaactgatggtcccagtacaatggtctgacatggttacactgaaagcacgaatgaccaactacggcctgcctcgctatcgttggctgacccatgcatggaatttcttccagagggaatttaaatgctgcggggttgtttactttaccgattggctggaaatgacagaaatggactggcccccagactcttgctgcgtgagggaattcccaggatgcagcaagcaggcccaccaggaggacctcagcgacctgtatcaggagggctgtggtaagaagatgtacagttttctgagaggcacaaaacaattacaggtgctccgcttccttggtatcagtatcggcgtaacacagattctcgccatgatcctcacaatcaccctgttatgggcactatactatgaccgaagggaacccggaaccgatcagatgatgagtctgaagaacgacaactcccaacacttgtcctgtccgtcggtggagctcctcaaaccttctctgtcccgcatcttcgagcatacaagcatggccaactctttcaacacccattttgaaatggaggaactgtag

SEQ ID NO: 306970 - DNA, 339 bp, Artificial Sequence
  derived and/or modified sequence
atggccagggaggacagcgtgaaatgccttcggtgcctcctttacgcgctgaatcttcttttctggctcatgtctatctcggtgctggctgtctcagcgtggatgagggattacctgaacaatgtgttaacgctaaccgccgagactagagttgaagaggcagtgatactgacctacttcccagtcgttcaccctgtaatgatagcagtgtgttgttttcttattatcgttggtatgttaggctactgcggcactgtcaagcggaatctcctgctgctcgcctggtacttcggaagtctgctggtcatcttttgtgttgagcttgcttgtggtgtttag

SEQ ID NO: 306971 - DNA, 288 bp, Artificial Sequence
  derived and/or modified sequence
atggccagagaagattccgtgaagtgtctccgatgtctgctatatgccctgaacctgttgttttggctgatgtctattagcgtactcgctgtcagcgcctggatgcgcgactacctcaataacgtattgaccctaaccgcagaaactcgcgttgaggaagctgttatcctgacttattttcctgtggtacacccggttatgatcgcagtgtgttgcttccttataatagtggggatgctgggatactgcggaacagtgaagcgcaatctcctcctgttggcctggtag

SEQ ID NO: 306972 - DNA, 363 bp, Artificial Sequence
  derived and/or modified sequence
atggcccgagaggacagcgtaaagtgcctgagatgcctgctgtatgcactgaatttgctcttctggttgatgagtatatccgtcctggctgtctccgcgtggatgcgagattacctcaataacgtgctgacactgactgctgaaacacgagtggaggaggctgtgattctgacttactttcctgttgttcatcccgtgatgatcgctgtctgttgcttcctgataatcgtgggcatgctgggctactgcggcactgtcaagcggaacctgctgctgctggcatggtactttggttctctacttgtgattttttgcgtcgagctggcctgcggcgtgtggacatacgaacaggagctcatgtag

SEQ ID NO: 306973 - DNA, 444 bp, Artificial Sequence
  derived and/or modified sequence
atggccagggaagacagcgtaaaatgtttaaggtgcttactgtacgccctcaacttattgttctggctcatgtccatttccgtgctcgctgtctccgcctggatgcgtgactacctgaacaacgtgctgacccttacagccgaaactcgcgtggaggaagccgttatcctcacctactttcctgtggtgcaccccgtcatgatagctgtctgctgctttctcattatcgtcggcatgctcggttattgcgggacagtgaaaaggaatttactcctcctggcctggtatttcggctcattgctggtgattttttgcgttgagttagcgtgcggcgtctggacttacgagcaagagcttatggtccctgtgcagtggagcgatatggtgacactgaaagcccgtatgacaaattacggacttccaagataccggtggcttacttag

SEQ ID NO: 306974 - DNA, 2796 bp, Artificial Sequence
  derived and/or modified sequence
aagcctgcttctctatgcttataacccagcctccattccttcgacgccaccattttaaagggatttactgcacggacttctcccaagttcctaggcattatcttctggaccctatcctgcagaggtgaagcgtccctttggggactctcgctgggtgagagggacaagaaacacccactaggacccaaccccggcagccagcggctcgagcatgcgctgagagtttgtgcagctggccctggctgccgccgctgcctcgtccggactcggagaggacttgggagggacagcggcgctgggaggtggcttagcagagactttccagcaactgctgcccaggacttttttttttttttttctttttcccaggaggcggcgacggcggcggcggggggagaggaagagaaagaagcgtctccagctgaagccaatgcagccctccggctctccgcgaagaagttccctgccccgatgagcccccgccgtgcgtccccgactatccccaggcgggcgtggggcaccgggcccagcgccgacgatcgctgccgttttgcccttgggagtaggatgtggtgaaaggatggggcttctcccttacggggctcacaatggccagagaagattccgtgaagtgtctgcgctgcctgctctacgccctcaatctgctcttttggttaatgtccatcagtgtgttggcagtttctgcttggatgagggactacctaaataatgttctcactttaactgcagaaacgagggtagaggaagcagtcattttgacttactttcctgtggttcatccggtcatgattgctgtttgctgtttccttatcattgtggggatgttaggatattgtggaacggtgaaaagaaatctgttgcttcttgcatggtactttggaagtttgcttgtcattttctgtgtagaactggcttgtggcgtttggacatatgaacaggaacttatggttccagtacaatggtcagatatggtcactttgaaagccaggatgacaaattatggattacctagatatcggtggcttactcatgcttggaatttttttcagagagagtttaagtgctgtggagtagtatatttcactgactggttggaaatgacagagatggactggcccccagattcctgctgtgttagagaattcccaggatgttccaaacaggcccaccaggaagatctcagtgacctttatcaagagggttgtgggaagaaaatgtattcctttttgagaggaaccaaacaactgcaggtgctgaggtttctgggaatctccattggggtgacacaaatcctggccatgattctcaccattactctgctctgggctctgtattatgatagaagggagccggggacagaccaaatgatgtccttgaagaatgacaactctcagcacctgtcatgtccctcagtagaactgttgaaaccaagcctgtcaagaatctttgaacacacatccatggcaaacagctttaatacacactttgagatggaggagttataaaaagaaatgtcacagaagaaaaccacaaacttgttttactggacttgtgaatttttgagtacatactatgtgtttcagaaatatgtagaaataaaaatgttgccataaaataacacctaagcatatactattctatgctttaaaatgaggatggaaaagtttcatgtcataagtcaccacctggacaataattgatgcccttaaaatgctgaagacagatgtcatacccactgtgtagcctgtgtatgacttttactgaacacagttatgttttgaggcagcatggtttgattagcatttccgcatccatgcaaacgagtcacatatggtgggactggagccatagtaaaggttgatttacttctaccaactagtatataaagtactaattaaatgctaacataggaagttagaaaatactaataacttttattactcagcgatctattcttctgatgctaaataaattatatatcagaaaactttcaatattggtgactacctaaatgtgatttttgctggttactaaaatattcttaccacttaaaagagcaagctaacacattgtcttaagctgatcagggattttttgtatataagtctgtgttaaatctgtataattcagtcgatttcagttctgataatgttaagaataaccattatgaaaaggaaaatttgtcctgtatagcatcattatttttagcctttcctgttaataaagctttactattctgtcctgggcttatattacacatataactgttatttaaatacttaaccactaattttgaaaattaccagtgtgatacataggaatcattattcagaatgtagtctggtctttaggaagtattaataagaaaatttgcacataacttagttgattcagaaaggacttgtatgctgtttttctcccaaatgaagactctttttgacactaaacactttttaaaaagcttatctttgccttctccaaacaagaagcaatagtctccaagtcaatataaattctacagaaaatagtgttctttttctccagaaaaatgcttgtgagaatcattaaaacatgtgacaatttagagattctttgttttatttcactgattaatatactgtggcaaattacacagattattaaatttttttacaagagtatagtatatttatttgaaatgggaaaagtgcattttactgtattttgtgtattttgtttatttctcagaatatggaaagaaaattaaaatgtgtcaataaatattttctagagagt

SEQ ID NO: 306975 - DNA, 1495 bp, Artificial Sequence
  derived and/or modified sequence
attccttcgacgccaccattttaaagggatttactgcacggacttctcccaagttcctaggcattatcttctggaccctatcctgcagaggtgaagcgtccctttggggactctcgctgggaggcggcgacggcggcggcggggggagaggaagagaaagaagcgtctccagctgaagccaatgcagccctccggctctccgcgaagaagttccctgccccgatgagcccccgccgtgcgtccccgactatccccaggcgggcgtggggcaccgggcccagcgccgacgatcgctgccgttttgcccttgggagtaggatgtggtgaaaggatggggcttctcccttacggggctcacaatggccagagaagattccgtgaagtgtctgcgctgcctgctctacgccctcaatctgctcttttggttaatgtccatcagtgtgttggcagtttctgcttggatgagggactacctaaataatgttctcactttaactgcagaaacgagggtagaggaagcagtcattttgacttactttcctgtggttcatccggtcatgattgctgtttgctgtttccttatcattgtggggatgttaggatattgtggaacggtgaaaagaaatctgttgcttcttgcatggtactttggaagtttgcttgtcattttctgtgtagaactggcttgtggcgtttggacatatgaacaggaacttatggttccagtacaatggtcagatatggtcactttgaaagccaggatgacaaattatggattacctagatatcggtggcttactcatgcttggaatttttttcagagagagtttaagtgctgtggagtagtatatttcactgactggttggaaatgacagagatggactggcccccagattcctgctgtgttagagaattcccaggatgttccaaacaggcccaccaggaagatctcagtgacctttatcaagagggttgtgggaagaaaatgtattcctttttgagaggaaccaaacaactgcaggtgctgaggtttctgggaatctccattggggtgacacaaatcctggccatgattctcaccattactctgctctgggctctgtattatgatagaagggagccggggacagaccaaatgatgtccttgaagaatgacaactctcagcacctgtcatgtccctcagtagaactgttgaaaccaagcctgtcaagaatctttgaacacacatccatggcaaacagctttaatacacactttgagatggaggagttataaaaagaaatgtcacagaagaaaaccacaaacttgttttactggacttgtgaatttttgagtacatactatgtgtttcagaaatatgtagaaataaaaatgttgccataaaataacacctaagcatatactattctatgctttaaaatgaggatggaaaagtttcatgtcataagtcaccacctggacaataattgatgcccttaaaatgctgaagacag

SEQ ID NO: 306976 - DNA, 569 bp, Artificial Sequence
  derived and/or modified sequence
agtgccgagcacagctgtcctcgaggaggggcgtggagtgagggaggttttcaagagcgtctcatcagaatgcacagggctccgccgcgtgtcccctgagaacgcgagtttactgtgcgacttcattcatccggatagttgctcttttcttttcccagcagatcgctgccgttttgcccttgggagtaggatgtggtgaaaggatggggcttctcccttacggggctcacaatggccagagaagattccgtgaagtgtctgcgctgcctgctctacgccctcaatctgctcttttggttaatgtccatcagtgtgttggcagtttctgcttggatgagggactacctaaataatgttctcactttaactgcagaaacgagggtagaggaagcagtcattttgacttactttcctgtggttcatccggtcatgattgctgtttgctgtttccttatcattgtggggatgttaggatattgtggaacggtgaaaagaaatctgttgcttcttgcatggtactttggaagtttgcttgtcattttctgtgtagaactggcttgtggcgtttg

SEQ ID NO: 306977 - DNA, 693 bp, Artificial Sequence
  derived and/or modified sequence
accccttcaccccccttctcaaacacaaatattatcatataataaaagcctgcttctctatgcttataacccagcctccattccttcgacgccaccattttaaagggatttactgcacggacttctcccaagttcctaggcattatcttctggaccctatcctgcagaggaggcggcgacggcggcggcggggggagaggaagagaaagaagcgtctccagctgaagccaatgcagccctccggctctccgcgaagaagttccctgccccgatgagcccccgccgtgcgtccccgactatccccaggcgggcgtggggcaccgggcccagcgccgacgatcgctgccgttttgcccttgggagtaggatgtggtgaaaggatggggcttctcccttacggggctcacaatggccagagaagattccgtgaagtgtctgcgctgcctgctctacgccctcaatctgctcttttggttaatgtccatcagtgtgttggcagtttctgcttggatgagggactacctaaataatgttctcactttaactgcagaaacgagggtagaggaagcagtcattttgacttactttcctgtggttcatccggtcatgattgctgtttgctgtttccttatcattgtggggatgttaggatattgtggaacggtgaaaagaaatctgttgcttcttgcatgg

SEQ ID NO: 306978 - DNA, 551 bp, Artificial Sequence
  derived and/or modified sequence
attcacacccgagctgcgggacggggtagaggggtgcggagttggagtgcccaggaactgtcctaactagaagggcgctcattctctcgggcttgccggtggcgcctctgacgtgtccgggatcgctgccgttttgcccttgggagtaggatgtggtgaaaggatggggcttctcccttacggggctcacaatggccagagaagattccgtgaagtgtctgcgctgcctgctctacgccctcaatctgctcttttggttaatgtccatcagtgtgttggcagtttctgcttggatgagggactacctaaataatgttctcactttaactgcagaaacgagggtagaggaagcagtcattttgacttactttcctgtggttcatccggtcatgattgctgtttgctgtttccttatcattgtggggatgttaggatattgtggaacggtgaaaagaaatctgttgcttcttgcatggtactttggaagtttgcttgtcattttctgtgtagaactggcttgtggcgtttggacatatgaacaggaacttatg

SEQ ID NO: 306979 - DNA, 551 bp, Artificial Sequence
  derived and/or modified sequence
agggctccgccgcgtgtcccctgagaacgcgagtttactatcgctgccgttttgcccttgggagtaggatgtggtgaaaggatggggcttctcccttacggggctcacaatggccagagaagattccgtgaagtgtctgcgctgcctgctctacgccctcaatctgctcttttggttaatgtccatcagtgtgttggcagtttctgcttggatgagggactacctaaataatgttctcactttaactgcagaaacgagggtagaggaagcagtcattttgacttactttcctgtggttcatccggtcatgattgctgtttgctgtttccttatcattgtggggatgttaggatattgtggaacggtgaaaagaaatctgttgcttcttgcatggtactttggaagtttgcttgtcattttctgtgtagaactggcttgtggcgtttggacatatgaacaggaacttatggttccagtacaatggtcagatatggtcactttgaaagccaggatgacaaattatggattacctagatatcggtggcttactc

SEQ ID NO: 306980 - DNA, 918 bp, Artificial Sequence
  derived and/or modified sequence
atggccagagaggacagcgtgaagtgcctgagatgcctgctgtacgccctgaacctgctgttctggctgatgagcatcagcgtgctggccgtgagcgcctggatgagagactacctgaacaacgtgctgaccctgaccgccgagaccagagtggaggaggccgtgatcctgacctacttccccgtggtgcaccccgtgatgatcgccgtgtgctgcttcctgatcatcgtgggcatgctgggctactgcggcaccgtgaagagaaacctgctgctgctggcctggtacttcggcagcctgctggtgatcttctgcgtggagctggcctgcggcgtgtggacctacgagcaggagctgatggtgcccgtgcagtggagcgacatggtgaccctgaaggccagaatgaccaactacggcctgcccagatacagatggctgacccacgcctggaacttcttccagagagagttcaagtgctgcggcgtggtgtacttcaccgactggctggagatgaccgagatggactggccccccgacagctgctgcgtgagagagttccccggctgcagcaagcaggcccaccaggaggacctgagcgacctgtaccaggagggctgcggcaagaagatgtacagcttcctgagaggcaccaagcagctgcaggtgctgagattcctgggcatcagcatcggcgtgacccagatcctggccatgatcctgaccatcaccctgctgtgggccctgtactacgacagaagagagcccggcaccgaccagatgatgagcctgaagaacgacaacagccagcacctgagctgccccagcgtggagctgctgaagcccagcctgagcagaatcttcgagcacaccagcatggccaacagcttcaacacccacttcgagatggaggagctgtag

SEQ ID NO: 306981 - protein, 216 aa, Artificial Sequence
  derived and/or modified sequence
MELSFAVQRSKDMVCGICMEVVYEKANPSERRFGILSNCNHTYCLKCIRKWRSAKQFESKIIKSCPECRITSNFVIPSEYWVEEKEEKQKLILKYKEAMSNKACRYFDEGRGSCPFGGNCFYKHAYPDGRREEPQRQKVGTSSRYRAQRRNHFWELIEERENSNPFDNDEEEVVTFELGEMLLMLLAAGGDDELTDSEDEWDLFHDELEDFYDLDL

SEQ ID NO: 306982 - protein, 418 aa, Artificial Sequence
  derived and/or modified sequence
MHGVCKEGDNCRYSHDLSDSPYSVVCKYFQRGYCIYGDRCRYEHSKPLKQEEATATELTTKSSLAASSSLSSIVGPLVEMNTGEAESRNSNFATVGAGSEDWVNAIEFVPGQPYCGRTAPSCTEAPLQGSVTKEESEKEQTAVETKKQLCPYAAVGECRYGENCVYLHGDSCDMCGLQVLHPMDAAQRSQHIKSCIEAHEKDMELSFAVQRSKDMVCGICMEVVYEKANPSERRFGILSNCNHTYCLKCIRKWRSAKQFESKIIKSCPECRITSNFVIPSEYWVEEKEEKQKLILKYKEAMSNKACRYFDEGRGSCPFGGNCFYKHAYPDGRREEPQRQKVGTSSRYRAQRRNHFWELIEERENSNPFDNDEEEVVTFELGEMLLMLLAAGGDDELTDSEDEWDLFHDELEDFYDLDL

SEQ ID NO: 306983 - DNA, 651 bp, Artificial Sequence
  derived and/or modified sequence
atggagctgagcttcgccgtgcagagaagcaaggacatggtgtgcggcatctgcatggaggtggtgtacgagaaggccaaccccagcgagagaagattcggcatcctgagcaactgcaaccacacctactgcctgaagtgcatcagaaagtggagaagcgccaagcagttcgagagcaagatcatcaagagctgccccgagtgcagaatcaccagcaacttcgtgatccccagcgagtactgggtggaggagaaggaggagaagcagaagctgatcctgaagtacaaggaggccatgagcaacaaggcctgcagatacttcgacgagggcagaggcagctgccccttcggcggcaactgcttctacaagcacgcctaccccgacggcagaagagaggagccccagagacagaaggtgggcaccagcagcagatacagagcccagagaagaaaccacttctgggagctgatcgaggagagagagaacagcaaccccttcgacaacgacgaggaggaggtggtgaccttcgagctgggcgagatgctgctgatgctgctggccgccggcggcgacgacgagctgaccgacagcgaggacgagtgggacctgttccacgacgagctggaggacttctacgacctggacctgtag

SEQ ID NO: 306984 - DNA, 1257 bp, Artificial Sequence
  derived and/or modified sequence
atgcacggcgtgtgcaaggagggcgacaactgcagatacagccacgacctgagcgacagcccctacagcgtggtgtgcaagtacttccagagaggctactgcatctacggcgacagatgcagatacgagcacagcaagcccctgaagcaggaggaggccaccgccaccgagctgaccaccaagagcagcctggccgccagcagcagcctgagcagcatcgtgggccccctggtggagatgaacaccggcgaggccgagagcagaaacagcaacttcgccaccgtgggcgccggcagcgaggactgggtgaacgccatcgagttcgtgcccggccagccctactgcggcagaaccgcccccagctgcaccgaggcccccctgcagggcagcgtgaccaaggaggagagcgagaaggagcagaccgccgtggagaccaagaagcagctgtgcccctacgccgccgtgggcgagtgcagatacggcgagaactgcgtgtacctgcacggcgacagctgcgacatgtgcggcctgcaggtgctgcaccccatggacgccgcccagagaagccagcacatcaagagctgcatcgaggcccacgagaaggacatggagctgagcttcgccgtgcagagaagcaaggacatggtgtgcggcatctgcatggaggtggtgtacgagaaggccaaccccagcgagagaagattcggcatcctgagcaactgcaaccacacctactgcctgaagtgcatcagaaagtggagaagcgccaagcagttcgagagcaagatcatcaagagctgccccgagtgcagaatcaccagcaacttcgtgatccccagcgagtactgggtggaggagaaggaggagaagcagaagctgatcctgaagtacaaggaggccatgagcaacaaggcctgcagatacttcgacgagggcagaggcagctgccccttcggcggcaactgcttctacaagcacgcctaccccgacggcagaagagaggagccccagagacagaaggtgggcaccagcagcagatacagagcccagagaagaaaccacttctgggagctgatcgaggagagagagaacagcaaccccttcgacaacgacgaggaggaggtggtgaccttcgagctgggcgagatgctgctgatgctgctggccgccggcggcgacgacgagctgaccgacagcgaggacgagtgggacctgttccacgacgagctggaggacttctacgacctggacctgtag

SEQ ID NO: 306985 - DNA, 651 bp, Artificial Sequence
  derived and/or modified sequence
atggaactgtcttttgccgtccagagatcaaaggacatggtgtgcggcatctgtatggaagttgtctacgaaaaagccaatccaagcgaacgaagatttggcatcttgtccaattgcaaccacacgtattgcctgaaatgcattcgcaagtggcgctccgcaaagcaattcgagtccaagatcatcaagtcttgtcctgaatgtcgcatcacctctaatttcgtaattccctcggagtattgggttgaagagaaggaggaaaaacaaaagcttattctgaaatacaaggaggcaatgagtaacaaggcctgtaggtacttcgacgaaggccgggggagttgtccattcgggggcaactgcttctacaaacacgcatatcccgacggcagaagggaagagccccagagacaaaaagtgggcacgagctcccgctaccgcgcccaacgcaggaaccacttctgggagctgatagaggaacgcgagaactctaacccctttgacaatgatgaagaggaagttgtcacatttgaacttggagagatgctgctgatgcttttggccgccggcggggacgacgagctcactgattcagaggacgagtgggatctttttcatgatgaactggaagacttttacgatctagacctgtag

SEQ ID NO: 306986 - DNA, 1257 bp, Artificial Sequence
  derived and/or modified sequence
atgcacggcgtatgtaaggaaggtgataactgcagatattcacatgacttgagtgacagtccatacagcgtcgtctgcaaatatttccaaaggggctattgtatttatggggatagatgtcgatatgaacacagcaagccccttaagcaagaagaggccaccgccactgaactgacaacgaaaagcagcctcgctgcctcctcctcactgtcctctatagtgggccctctggtcgaaatgaataccggcgaagctgaaagcagaaatagtaactttgccaccgtcggggctggaagtgaggattgggtaaatgcgatcgaatttgtaccaggccagccatattgcggcaggacggccccctcatgtactgaggcacctctgcagggctcagttactaaggaggagtcagagaaagaacagacagcggtggaaactaaaaagcagctatgcccctatgccgccgtcggtgagtgcagatacggtgagaattgcgtgtacctgcatggcgactcctgcgatatgtgcggtttgcaggttctgcatccgatggatgcagcccagaggagccagcatataaaatcctgcatagaagcacatgagaaggacatggagctaagttttgcggtgcaaagaagcaaggacatggtctgcggcatctgtatggaggtggtttacgagaaggcaaatccctccgaaagaagattcggcattctcagtaactgtaaccatacatattgcctcaaatgtatccgcaaatggcgatctgccaagcaatttgagtccaagatcatcaagagttgtcccgagtgccggatcacatccaacttcgtgatcccatctgagtattgggtcgaagaaaaagaggaaaagcagaaactgatcctgaagtataaggaagccatgtcgaataaggcctgtcgttattttgacgaggggcgtggaagctgtcctttcggtggaaattgcttctacaagcacgcataccctgatggacgcagggaagagccgcagcgtcagaaggtagggacgagctcccgatacagggcgcaacggcgaaaccacttctgggagttgattgaagagagagaaaatagcaaccccttcgataacgacgaggaagaggtggttacatttgaattaggggagatgctgttgatgctgctggcggcgggaggcgacgatgagttgacagactccgaggacgaatgggacttgtttcacgatgagttggaggatttttacgaccttgacttatag

SEQ ID NO: 306987 - DNA, 651 bp, Artificial Sequence
  derived and/or modified sequence
atggagctgagctttgctgtgcagaggagcaaggacatggtgtgtggcatctgcatggaggtggtgtatgagaaggccaaccccagcgagaggagatttggcatcctgagcaactgcaaccacacctactgcctgaagtgcatcaggaagtggaggtctgccaagcagtttgagagcaagatcatcaagagctgcccagaatgtcgcatcaccagcaacttcgtcatccccagcgagtactgggtggaggagaaggaggagaagcagaagctgatcctgaagtacaaggaggccatgagcaacaaggcctgccgctactttgatgagggccggggcagctgcccctttggaggcaactgcttctacaagcacgcctacccagatggccggcgggaggagccccagaggcagaaggtgggcaccagcagccgctaccgggcccagaggaggaaccacttctgggagctgattgaggagcgggagaacagcaacccctttgacaatgatgaggaggaggtggtgacctttgagctgggggagatgctgctgatgctgctggccgctggaggagatgatgagctgacagattctgaagatgagtgggacctcttccatgatgagctggaggacttctatgacctggacctgtag

SEQ ID NO: 306988 - DNA, 1257 bp, Artificial Sequence
  derived and/or modified sequence
atgcacggcgtgtgcaaggagggggacaactgccgctacagccatgacctgagtgacagcccctacagcgtggtgtgcaagtacttccagaggggctactgcatctacggggaccgctgccgctatgagcacagcaagcccctgaagcaggaggaggccacagccacagagctgaccaccaagagcagcctggccgccagcagcagcctgagcagcatcgtgggccccctggtggagatgaacacaggagaggccgagagcaggaacagcaactttgccaccgtgggcgccggcagcgaggactgggtgaatgccatcgagtttgtgcccggccagccctactgcggccgcacagcccccagctgcacagaggcccccctgcagggctctgtgaccaaggaggagagcgagaaggagcagacagctgtggagaccaagaagcagctgtgcccctatgctgctgtgggagaatgtcgctacggggagaactgtgtgtacctgcacggggacagctgtgacatgtgtggcctgcaggtgctgcaccccatggatgctgcccagaggagccagcacatcaagagctgcatcgaggcccacgagaaggacatggagctgagctttgctgtgcagaggagcaaggacatggtgtgtggcatctgcatggaggtggtgtatgagaaggccaaccccagcgagaggagatttggcatcctgagcaactgcaaccacacctactgcctgaagtgcatcaggaagtggaggtctgccaagcagtttgagagcaagatcatcaagagctgcccagaatgtcgcatcaccagcaacttcgtcatccccagcgagtactgggtggaggagaaggaggagaagcagaagctgatcctgaagtacaaggaggccatgagcaacaaggcctgccgctactttgatgagggccggggcagctgcccctttggaggcaactgcttctacaagcacgcctacccagatggccggcgggaggagccccagaggcagaaggtgggcaccagcagccgctaccgggcccagaggaggaaccacttctgggagctgattgaggagcgggagaacagcaacccctttgacaatgatgaggaggaggtggtgacctttgagctgggggagatgctgctgatgctgctggccgctggaggagatgatgagctgacagattctgaagatgagtgggacctcttccatgatgagctggaggacttctatgacctggacctgtag

SEQ ID NO: 306989 - DNA, 1390 bp, Artificial Sequence
  derived and/or modified sequence
ctttgctgtgtgggataaacagtaatggcggaggctgcaactcccggaacaacagccacaacatcaggagcaggagcggcagcggcgacggcggcagcagcctcccccaccccgatccccacagtcaccgccccgtccctgggggcgggcggagggggcggcggcagcgacggcagcggcggcggctggactaaacaggtcacctgcaggtattttatgcatggggtttgtaaggaaggagacaactgtcgctactcgcatgacctctctgacagtccgtatagtgtagtgtgcaagtattttcagcgagggtactgtatttatggagaccgctgcagtcgtgcattgaggcccatgagaaggacatggagctctcatttgccgtgcagcgcagcaaggacatggtgtgtgggatctgcatggaggtggtctatgagaaagccaaccccagtgagcgccgcttcgggatcctctccaactgcaaccacacctactgtctcaagtgcattcgcaagtggaggagtgctaagcaatttgagagcaagatcataaagtcctgcccagaatgccggatcacatctaactttgtcattccaagtgagtactgggtggaggagaaagaagagaagcagaaactcattctgaaatacaaggaggcaatgagcaacaaggcgtgcaggtattttgatgaaggacgtgggagctgcccatttggagggaactgtttttacaagcatgcgtaccctgatggccgtagagaggagccacagagacagaaagtgggaacatcaagcagataccgggcccaacgaaggaaccacttctgggaactcattgaggaaagagagaacagcaacccctttgacaacgatgaagaagaggttgtcacctttgagctgggcgagatgttgcttatgcttttggctgcaggtggggacgacgaactaacagactctgaagatgagtgggacttgtttcatgatgagctggaagatttttatgacttggatctatagcaaccttgcgtggcgtgtgaactggtctgctgacctcagacagcagctgtcccctgtggtggtgtggcagtgcctgtgttctctcctaggcaggcctctcaactccaggtgctgtcctaagaatttttacccagggcctgtcttctcaacccctcacctttccctgaggagtgtgttgttttccctgttgaaaaaagttacaaaaataaatcttaaagttagttttttgtaacacgaatttaactgtcagacagttagtgtaggtgtgttgcgtcatctgttttcaaccagattgcatttatggacttttcacacactcattttgaggaccccaggttcaaaagtaaaagcagtggccctgctttggggtccaa

SEQ ID NO: 306990 - DNA, 651 bp, Artificial Sequence
  derived and/or modified sequence
atggagctgagcttcgccgtgcagcggagcaaggacatggtgtgcggaatatgtatggaagtggtgtacgagaaggccaatccctccgaaagaagatttggcattttgagcaactgtaaccacacttactgtctgaagtgcattcggaaatggcgaagcgctaaacagttcgaatcgaaaataattaagagctgtcctgaatgtagaatcacctcaaacttcgtgatcccatcagaatattgggtagaagagaaagaggaaaaacagaagctgatcttaaagtacaaggaagctatgtcaaataaggcctgccgttactttgatgaggggcgcgggagctgcccgttcggggggaattgcttttataagcacgcctaccctgacggtcggcgtgaggaaccccagcggcagaaggtcggtacgagctcacgctacagggcacaacgaagaaatcacttctgggagctgatcgaagagagggaaaacagcaacccctttgataacgatgaggaggaggtggtcaccttcgaactcggagaaatgctgctgatgctcctggccgccggcggggatgacgaacttacagactccgaggacgagtgggacttgttccacgacgaactggaagacttttacgacctggatctgtag

SEQ ID NO: 306991 - DNA, 1257 bp, Artificial Sequence
  derived and/or modified sequence
atgcacggcgtgtgcaaggagggcgacaactgccggtacagccacgacctgtcagactccccatactctgttgtgtgtaagtacttccagagggggtactgtatttatggtgataggtgccgctatgagcattccaagcccctgaaacaagaggaggcgacagccaccgaactgacaactaagtctagtcttgccgcatcttcatctctcagtagcatcgttggcccgttggtggaaatgaacaccggggaggccgaaagccgaaactccaatttcgctaccgttggcgccgggtccgaggactgggtaaacgcaattgagttcgtgcccggacaaccttactgtggcaggacagcaccgtcttgtactgaagcccctttacaagggtctgtgaccaaggaggagtccgaaaaggaacaaacagcggtcgaaactaagaagcagctatgcccgtacgccgccgtcggagagtgccggtacggtgagaactgcgtatacttgcatggtgattcctgcgatatgtgcggcctacaggtcctgcatcccatggacgcagcccaaagatcacagcatattaaatcttgtatcgaagcccatgaaaaggacatggaactgagttttgctgtgcagcgttccaaggatatggtgtgtgggatctgtatggaagtcgtctacgaaaaggccaacccaagtgagagacgttttggaattctgtctaattgcaatcatacttactgcttaaagtgtataaggaagtggcgatctgctaagcagtttgagtccaaaatcataaagagttgccccgaatgccggatcacctctaattttgtgatcccatccgagtactgggtggaagaaaaagaggaaaaacagaaactgatcttaaagtataaggaggccatgtccaataaggcgtgcagatatttcgacgaaggccgaggaagttgcccgtttgggggcaactgcttctataagcatgcttaccctgatggtcgcagagaggaaccccagcgccaaaaggtgggcaccagtagtcgttatagggcccagcgccggaatcacttctgggagttgatcgaggagcgggaaaatagcaacccctttgacaacgatgaggaggaggttgtgaccttcgaattaggggagatgcttctcatgcttctggctgcaggcggcgatgacgagctgaccgacagcgaggatgaatgggacttgttccatgatgagctcgaagacttttatgatttggacctgtag

SEQ ID NO: 306992 - DNA, 651 bp, Artificial Sequence
  derived and/or modified sequence
atggagctgagctttgccgtccagcgctctaaagacatggtttgtggcatttgcatggaggtggtgtacgagaaggcaaatcctagcgagagaaggttcggcatcctgtccaattgtaatcacacatactgcctaaaatgcatcaggaagtggcgatccgccaagcaattcgagtccaagatcattaagagttgcccagagtgcaggataacaagcaatttcgtgattccttcggaatattgggtcgaggagaaggaggaaaagcagaagctcattctcaaatacaaagaggcaatgtccaacaaggcctgtcgatactttgacgagggaagggggtcatgtccctttgggggtaactgtttctacaagcacgcataccctgacggcagaagggaagagccacagagacaaaaagtggggacaagttctcgataccgggcacagcgcagaaaccatttttgggaactcatcgaggaaagagagaactcaaatccatttgataacgatgaggaagaagtggtcacttttgaattgggcgaaatgctgcttatgttactcgccgctggtggggatgacgagctaacagactcggaagacgagtgggaccttttccacgatgaactcgaagacttttatgatcttgacctctag

SEQ ID NO: 306993 - DNA, 1257 bp, Artificial Sequence
  derived and/or modified sequence
atgcacggcgtgtgcaaggagggtgataattgtcggtacagtcacgacctttcagattcaccgtactctgtcgtgtgcaaatacttccagcgaggctattgcatatacggtgatcggtgcagatacgagcacagcaaacctttgaaacaggaggaggccaccgctaccgagcttacgactaagagtagcttggctgcatcttctagtctctcatccatcgtggggccattggtggaaatgaatacaggagaagcagagtcgcgcaatagcaacttcgccacggtgggagcgggaagcgaagactgggtgaatgctattgaattcgtgcccggtcagccctactgtgggcgaaccgcacctagttgcaccgaggctccgctgcaggggagtgtgaccaaggaagagtccgagaaggagcagaccgcagtggagactaagaaacaattatgcccatacgccgctgtgggagaatgtcggtatggcgaaaactgcgtgtaccttcatggggactcctgtgacatgtgcggtctgcaggtactgcaccccatggatgccgcacagagatcgcagcatatcaaaagttgtattgaggcacacgaaaaggatatggaattatcctttgcggtacagcggagtaaggacatggtgtgcggcatctgtatggaggtagtctatgaaaaagccaacccctcggagcggaggtttggcattctctcaaactgtaatcatacgtattgtctcaagtgcatccggaagtggcgaagtgctaagcagttcgagagcaaaattataaaaagttgcccggaatgtcgtatcaccagcaatttcgtaattccctccgaatactgggtagaagaaaaggaggaaaagcagaagctgatcttaaagtataaagaagccatgtcaaataaagcatgtcgttacttcgatgaagggaggggttcatgtccattcggcggaaactgtttctacaagcacgcatatcccgatggacgcagagaagagcctcaacggcagaaagtggggacaagtagccggtaccgggcacagcgtcggaaccacttctgggaactcatagaggaaagggagaacagtaatccttttgacaatgacgaggaggaggtcgtaacattcgagcttggggaaatgctgctcatgcttctggcggcaggaggggatgacgaactgactgattcggaagacgaatgggatctcttccacgatgaattggaggatttttacgacctggatctgtag

SEQ ID NO: 306994 - DNA, 1512 bp, Artificial Sequence
  derived and/or modified sequence
atggtggaggccctgagagtgtgggccagcacccacatgagccccagctggaccctgctgaagctgtgcgacgtgcagcccatgcagtacttcgacctgacctgccagctgctgggcaaggccgaggtggacggcgccagcttcctgctgaaggtgtgggacggcaccagaacccccttccccagctggagagtgctgatccaggacctggtgctggagggcgacctgagccacatccacagactgcagaacctgaccatcgacatcctggtgtacgacaaccacgtgcacgtggccagaagcctgaaggtgggcagcttcctgagaatctacagcctgcacaccaagctgcagagcatgaacagcgagaaccagaccatgctgagcctggagttccacctgcacggcggcaccagctacggcagaggcatcagagtgctgcccgagagcaacagcgacgtggaccagctgaagaaggacctggagagcgccaacctgaccgccaaccagcacagcgacgtgatctgccagagcgagcccgacgacagcttccccagcagcggcagcgtgagcctgtacgaggtggagagatgccagcagctgagcgccaccatcctgaccgaccaccagtacctggagagaacccccctgtgcgccatcctgaagcagaaggccccccagcagtacagaatcagagccaagctgagaagctacaagcccagaagactgttccagagcgtgaagctgcactgccccaagtgccacctgctgcaggaggtgccccacgagggcgacctggacatcatcttccaggacggcgccaccaagacccccgacgtgaagctgcagaacaccagcctgtacgacagcaagatctggaccaccaagaaccagaagggcagaaaggtggccgtgcacttcgtgaagaacaacggcatcctgcccctgagcaacgagtgcctgctgctgatcgagggcggcaccctgagcgagatctgcaagctgagcaacaagttcaacagcgtgatccccgtgagaagcggccacgaggacctggagctgctggacctgagcgcccccttcctgatccagggcaccatccaccactacggctgcaagcagtgcagcagcctgagaagcatccagaacctgaacagcctggtggacaagaccagctggatccccagcagcgtggccgaggccctgggcatcgtgcccctgcagtacgtgttcgtgatgaccttcaccctggacgacggcaccggcgtgctggaggcctacctgatggacagcgacaagttcttccagatccccgccagcgaggtgctgatggacgacgacctgcagaagagcgtggacatgatcatggacatgttctgcccccccggcatcaagatcgacgcctacccctggctggagtgcttcatcaagagctacaacgtgaccaacggcaccgacaaccagatctgctaccagatcttcgacaccaccgtggccgaggacgtgatctag

SEQ ID NO: 306995 - DNA, 1512 bp, Artificial Sequence
  derived and/or modified sequence
atggttgaggccctgcgggtgtgggcttctacacacatgagccctagctggacccttctcaagctgtgcgacgtgcaaccgatgcaatactttgaccttacttgccaactcctcgggaaagcagaggtcgatggtgcctcctttctgctgaaggtttgggacgggaccagaacaccttttccatcttggagggtactgatccaggacttggtgcttgagggcgatctgagtcacatccacaggttacaaaacttgaccattgacattctggtatacgataaccatgtgcacgtggccaggtccctgaaagttggcagcttcctgcgcatctactctttgcacacaaagctgcaatctatgaattctgaaaaccagacaatgctgtccctggagtttcacctacacgggggcaccagttatggacgaggcataagagttctcccagaaagtaacagcgacgtggatcagctcaagaaggaccttgaatcggccaacctcacagcaaatcagcattcagacgtgatctgtcaatccgagccggacgacagttttccttccagtgggtctgtctccttgtatgaagtggagcgctgccagcagctgagcgcaacgatactaactgatcatcagtacctggaacggactcccttgtgcgcaattctaaagcaaaaggctccacaacagtataggatacgagcaaagctacgctcatacaagcctagacggctcttccagagcgtgaagctgcattgccctaaatgccatttgttacaggaggtcccccatgagggtgatcttgacataatcttccaggacggggcgactaaaacacccgacgtgaaacttcaaaacacaagcttgtacgactccaaaatttggactacaaagaatcagaaggggcgcaaggttgctgttcactttgtcaaaaataacggcatcctaccacttagcaacgaatgtctcctcctcatcgagggcggaaccctttccgaaatttgtaagctgagcaacaaatttaatagcgtcattccagtccgatcaggacacgaggacctggagcttcttgacctgagcgcccctttcctgatccagggaacgatccaccactatggctgcaagcagtgttcaagcctgcgctcaattcagaatttgaactccctggtggataaaacctcctggatccccagcagcgtagccgaagcgctcggaattgtgcctctccaatatgtattcgtgatgactttcacactcgatgatgggacaggggtgctggaagcatacctgatggacagcgataagtttttccagatcccagcctctgaagttctaatggacgatgatctgcagaagtccgttgacatgatcatggatatgttttgtcccccaggcatcaaaattgacgcttatccttggctggagtgcttcattaagtcctacaacgtgactaacggaactgataaccaaatttgctaccagatctttgacactaccgttgcggaagacgtaatatag

SEQ ID NO: 306996 - DNA, 1512 bp, Artificial Sequence
  derived and/or modified sequence
atggtggaggccctgcgggtgtgggccagcacccacatgagccccagctggaccctgctgaagctgtgtgatgtgcagcccatgcagtactttgacctgacctgccagctgctgggcaaggccgaggtggatggagccagcttcctgctgaaggtgtgggatggcaccaggacccccttccccagctggagggtgctgatccaggacctggtgctggagggggacctgagccacatccaccggctgcagaacctgaccatcgacatcctggtgtatgacaaccacgtgcacgtggcccggagcctgaaggtgggcagcttcctgcgcatctacagcctgcacaccaagctgcagagcatgaacagcgagaaccagaccatgctgagcctggagttccacctgcatggaggcaccagctatggccggggcatccgggtgctgcctgagagcaacagtgatgtggaccagctgaagaaggacctggagagcgccaacctgacagccaaccagcacagtgatgtgatctgccagagcgagccagatgacagcttccccagcagcggctctgtgtccctgtatgaggtggagcgctgccagcagctgagcgccaccatcctgacagaccaccagtacctggagaggacccccctgtgtgccatcctgaagcagaaggccccccagcagtaccgcatccgggccaagctgcggagctacaagcccaggaggctcttccagagcgtgaagctgcactgccccaagtgccacctgctgcaggaggtgccccatgaaggagacctggacatcatcttccaggatggagccaccaagaccccagatgtgaagctgcagaacaccagcctgtatgacagcaagatctggaccaccaagaaccagaagggcaggaaggtggccgtgcactttgtgaagaacaacggcatcctgcccctgagcaatgaatgtctgctgctgattgagggcggcaccctgtctgagatctgcaagctgagcaacaagttcaacagcgtcatccctgtgcgcagcggccacgaggacctggagctgctggacctgagcgcccccttcctgatccagggcaccatccaccactacggctgcaagcagtgcagcagcctgcggagcatccagaacctgaacagcctggtggacaagacctcctggatccccagctctgtggccgaggccctgggcatcgtgcccctgcagtatgtgtttgtgatgaccttcaccctggatgatggcactggagtgctggaggcctacctgatggacagcgacaagttcttccagatcccagccagcgaggtgctgatggatgatgacctgcagaagtctgtggacatgatcatggacatgttctgccccccaggcatcaagattgatgcctacccctggctggagtgcttcatcaagagctacaacgtgaccaatggaacagacaaccagatctgctaccagatctttgacaccaccgtggccgaggatgtgatctag

SEQ ID NO: 306997 - DNA, 1512 bp, Artificial Sequence
  derived and/or modified sequence
atggtggaggccctgcgggtgtgggccagcacccacatgagcccctcatggacattattaaagttatgcgatgtccagccaatgcagtacttcgacctcacttgtcagttattgggcaaggctgaagttgatggagcctcattcctgcttaaagtctgggatgggaccaggaccccattccccagctggcgggtccttatacaagatctcgtcttggaaggcgacctgtctcacatccatcgcttacagaacttgactatcgacatcctcgtttatgataatcacgtccatgttgcaaggagcctgaaggtagggtcctttctccgaatttatagcctccatactaaactgcagtcaatgaacagtgagaatcagacaatgttaagcctggagttccacttgcatggaggcacatcatacggcaggggaattagagtgctccccgagtccaacagtgatgtcgatcaactcaaaaaagacttggaatccgcgaacctgaccgcaaatcagcactcagacgtgatctgtcagagcgagccagatgacagcttcccgagctcaggatcagtgagtttatacgaggtggaaagatgccagcagttatctgctacaattttaactgatcaccagtatctggagcgcaccccgctttgcgctatcctgaagcagaaggcccctcaacagtacagaattcgagcaaaactgagatcatacaaaccaagacggctgttccagagcgtgaagttgcactgccccaagtgccatctactgcaggaagttcctcacgagggcgaccttgacatcatcttccaggacggggcaacaaagacaccagatgtgaagctccagaacacatcattgtacgatagtaagatttggacgacaaaaaaccagaaggggaggaaagtggccgtgcacttcgtcaaaaataacggaatcctccctctgagcaatgagtgtctactgctgattgagggcgggactctaagcgaaatctgtaagctgagcaacaagttcaactccgtgattcctgttcgttccggacatgaagacctcgaactacttgacttatctgcaccattcctaatccagggaacgattcatcattatggctgtaagcagtgtagttcgcttcgctcaattcagaacctcaatagcctggttgataaaactagctggattccttcgagtgtcgcagaggctttgggaatagttccgctgcagtatgtgtttgtgatgacatttaccctggatgacggtaccggagtgttggaggcctacctgatggattctgacaagttcttccagattcccgctagcgaagtgctcatggacgacgacctccagaaatccgtcgacatgatcatggacatgttctgtccccctggtatcaaaattgacgcttatccatggctagagtgctttattaagagttacaatgtgacaaatgggaccgataatcagatctgctaccagatcttcgatacaacagtagctgaggacgtaatatag

SEQ ID NO: 306998 - DNA, 1512 bp, Artificial Sequence
  derived and/or modified sequence
atggtcgaagcgctccgggtctgggccagtacccacatgagcccttcatggaccctgttgaagctctgcgacgtccagcctatgcagtactttgacctgacttgtcagctcctgggcaaagcagaggtcgatggtgcaagcttcctgttaaaggtctgggatggaaccagaaccccttttcctagctggagagttttgatccaggatcttgttttggagggcgatctgtcccatatccatcggctccagaatctcaccatagacatcctagtgtacgacaaccatgttcatgtggccaggtctctcaaagtgggatcctttttgagaatatatagtctgcacacgaagcttcagagcatgaatagtgagaatcagacaatgcttagcctggagttccacctgcacggcggtactagttacggaagagggatcagggtgctgccggaatccaactccgatgttgatcagctgaaaaaagacctggaatcggcaaaccttacagccaaccagcacagtgatgtgatctgccagtcagaacccgacgattccttcccttctagcggaagcgtgagcttgtacgaggtcgagcggtgccagcagctgtcagcaacgatcctaactgaccatcagtatctggagaggacccctctgtgtgccatcctcaaacaaaaggcacctcaacaataccgaatccgggcaaaactgaggagctataaacccaggcgcctatttcagtccgtaaagcttcactgcccaaagtgtcaccttttgcaggaggtcccccatgaaggggatcttgatattatttttcaggacggcgcaacaaaaacgcccgatgtcaaactgcagaatacttcgctgtacgattctaaaatttggacaaccaaaaatcaaaaggggagaaaagtcgctgtgcattttgtgaagaacaatggcatcttgcctctgtccaatgagtgcctgctcttgatagagggcggtacattgtcagagatttgtaagcttagtaacaagttcaatagtgtcattcccgtgcggagcgggcacgaggacttggagctcctcgacctctccgcccctttcctgatccagggtacgattcaccactacggttgcaaacagtgttcaagtttgaggtctatacagaacttgaattccctggtggacaagacaagctggattccaagcagcgtcgctgaagctctgggaattgtacctctccagtatgtttttgtcatgaccttcacgcttgacgacggaacaggagtgctagaagcatacctgatggatagcgataaattcttccaaattccagcttccgaagttctgatggacgacgatcttcagaaatctgtggacatgattatggatatgttctgccctcctggaattaaaatcgacgcctatccttggcttgaatgttttatcaaatcctacaacgttacgaatggaactgataaccagatctgctaccagatctttgataccactgtcgctgaggacgtgatctag

SEQ ID NO: 306999 - protein, 770 aa, Artificial Sequence
  derived and/or modified sequence
MPALGWAVAAILMLQTAMAEPSPGTLPRKAGVFSDLSNQELKAVHSFLWSKKELRLQPSSTTTMAKNTVFLIEMLLPKKYHVLRFLDKGERHPVREARAVIFFGDQEHPNVTEFAVGPLPGPCYMRALSPRPGYQSSWASRPISTAEYALLYHTLQEATKPLHQFFLNTTGFSFQDCHDRCLAFTDVAPRGVASGQRRSWLIIQRYVEGYFLHPTGLELLVDHGSTDAGHWAVEQVWYNGKFYGSPEELARKYADGEVDVVVLEDPLPGGKGHDSTEEPPLFSSHKPRGDFPSPIHVSGPRLVQPHGPRFRLEGNAVLYGGWSFAFRLRSSSGLQVLNVHFGGERIAYEVSVQEAVALYGGHTPAGMQTKYLDVGWGLGSVTHELAPGIDCPETATFLDTFHYYDADDPVHYPRALCLFEMPTGVPLRRHFNSNFKGGFNFYAGLKGQVLVLRTTSTVYNYDYIWDFIFYPNGVMEAKMHATGYVHATFYTPEGLRHGTRLHTHLIGNIHTHLVHYRVDLDVAGTKNSFQTLQMKLENITNPWSPRHRVVQPTLEQTQYSWERQAAFRFKRKLPKYLLFTSPQENPWGHKRTYRLQIHSMADQVLPPGWQEEQAITWARTEGGQPRALSQAASPVPGRYPLAVTKYRESELCSSSIYHQNDPWHPPVVFEQFLHNNENIENEDLVAWVTVGFLHIPHSEDIPNTATPGNSVGFLLRPFNFFPEDPSLASRDTVIVWPRDNGPNYVQRWIPEDRDCSMPPPFSYNGTYRPV

SEQ ID NO: 307000 - protein, 249 aa, Artificial Sequence
  derived and/or modified sequence
MPALGWAVAAILMLQTAMAEPSPGTLPRKAGVFSDLSNQELKAVHSFLWSKKELRLQPSSTTTMAKNTVFLIEMLLPKKYHVLRFLDKGERHPVREARAVIFFGDQEHPNVTEFAVGPLPGPCYMRALSPRPGYQSSWASRPISTAEYALLYHTLQEATKPLHQFFLNTTGFSFQDCHDRCLAFTDVAPRGVASGQRRSWLIIQRYVEGYFLHPTGLELLVDHGSTDAGHWAVEQVWYNGKFYGSPEEL

SEQ ID NO: 307001 - protein, 337 aa, Artificial Sequence
  derived and/or modified sequence
MPALGWAVAAILMLQTAMAEPSPGTLPRKAGVFSDLSNQELKAVHSFLWSKKELRLQPSSTTTMAKNTVFLIEMLLPKKYHVLRFLDKGERHPVREARAVIFFGDQEHPNVTEFAVGPLPGPCYMRALSPRPGYQSSWASRPISTAEYALLYHTLQEATKPLHQFFLNTTGFSFQDCHDRCLAFTDVAPRGVASGQRRSWLIIQRYVEGYFLHPTGLELLVDHGSTDAGHWAVEQVWYNGKFYGSPEELARKYADGEVDVVVLEDPLPGGKGHDSTEEPPLFSSHKPRGDFPSPIHVSGPRLVQPHGPRFRLEGNAVLYGGWSFAFRLRSSSGLQVL

SEQ ID NO: 307002 - DNA, 2313 bp, Artificial Sequence
  derived and/or modified sequence
atgccggcactgggatgggcggtagccgctatacttatgcttcaaacagcgatggcggagccctcccctggcaccctccctagaaaggcaggagtatttagcgatctgtccaaccaggagttgaaggcagtgcattcctttctgtggtctaaaaaggagctgcgcctacagccctctagtaccacaacgatggcgaagaatacagtttttctgatcgagatgctgctccccaagaagtaccatgtactgaggtttttggacaaaggtgaaagacaccccgtccgagaggcccgagcagtcattttctttggcgatcaggaacatcctaatgtaaccgaatttgcagttggaccactgcctggaccttgctacatgagggccttgtccccgcgaccgggctaccagtcaagctgggcatcacggcccatcagcacagctgagtatgctctcttataccatactttacaggaggcaaccaaacccttacaccagttttttctcaatacaactggcttttctttccaggattgtcatgaccggtgcttggcctttaccgatgtggcaccaaggggggtggcgtcggggcagagaagatcctggctgatcatacagcggtacgtcgagggctatttcctgcaccctaccgggctggaattactggtggatcacggatcaacagacgcaggccattgggcagtagaacaggtatggtataatggtaagttctatggctcgccggaagaactagcacgtaagtatgcggacggggaggttgatgtcgtcgtgctggaggaccccctacccggtgggaagggtcacgactcaaccgaagagccccccctgttttcaagccacaaaccccggggcgatttcccatcacccatacacgtgagtggccctcggcttgtgcagccccacggccctaggtttagactggaaggcaatgctgtgctgtatggaggttggtcatttgctttccggctgaggtcctcgtctgggcttcaggtcctcaatgtacacttcgggggggagagaatcgcttacgaggtaagcgtgcaggaggccgttgcgctatacggagggcatactccggccggaatgcagactaaatacttagacgtcggctgggggttaggatccgttactcacgagctggcaccagggattgattgtccagaaacagccaccttcttagacaccttccactattacgatgcagacgatcccgtccactatccaagggccttatgtctgttcgaaatgccaacaggtgtgcccctgcgacgccatttcaactcaaatttcaagggaggcttcaacttttacgccggattaaaggggcaggtcttggtgctgaggaccacttcaaccgtttataattatgattacatatgggatttcattttttaccccaacggggtgatggaggcaaaaatgcatgccacagggtatgtgcatgcgacattctacactcccgagggactgcgacacggaactcgtctgcatacacacctgattgggaatatacacacacatttggtacattaccgagtcgacctggacgtggcaggcactaagaactccttccaaacactacaaatgaaactggagaacatcaccaacccttggagtccgcgtcatagggtggtgcagcccactcttgaacagacccaatacagctgggaaaggcaggctgcttttcgcttcaagagaaaactgcccaagtacctcctgttcacctcgccacaggaaaacccgtggggccacaaacggacttatcgcttacagatccacagcatggcggatcaggttctgcctccgggatggcaggaggagcaggctatcacttgggctaggactgagggggggcagcctcgggccctgtctcaggcggctagccccgtccctgggcgataccctctcgctgtgacgaagtaccgggaatcagaactctgcagctcatcaatctaccaccagaatgatccttggcaccctccggtggtgtttgagcagttcttgcacaacaatgagaacatcgagaacgaggaccttgtagcctgggtgacagtgggctttctgcacatacctcactccgaggacatccctaacactgcaactcctggcaactcagtgggctttttactccgcccctttaatttcttccctgaagatccttccctggcttccagagacacggttatcgtgtggcccagagataatggtcctaattacgttcagagatggataccggaggatagggattgttcaatgccaccgccatttagctataatggcacttatcggccggtttag

SEQ ID NO: 307003 - DNA, 2313 bp, Artificial Sequence
  derived and/or modified sequence
atgcctgccctgggctgggccgtggccgccatcctgatgctgcagacagccatggccgagcccagccctggcaccctgcccaggaaggccggggtcttcagtgacctgagcaaccaggagctgaaggctgtgcacagcttcctgtggagcaagaaggagctgcggctgcagcccagcagcaccaccaccatggccaagaacacagtgttcctgattgagatgctgctgcccaagaagtaccacgtgctgcgcttcctggacaagggggagcggcaccctgtgcgggaggcccgggctgtgatcttctttggagaccaggagcaccccaacgtgacagaatttgctgtgggccccctgcccggcccctgctacatgagggccctgagcccccggcccggctaccagagctcctgggccagccggcccatcagcacagcagaatatgccctgctgtaccacaccctgcaggaggccaccaagcccctgcaccagttcttcctgaacaccaccggcttctccttccaggactgccacgaccgctgcctggccttcacagatgtggccccccggggcgtggccagcggccagaggaggtcctggctgatcatccagcgctacgtggagggctacttcctgcaccccaccggcctggagctgctggtggaccacggcagcacagatgctggccactgggccgtggagcaggtgtggtacaacgggaagttctacggcagccctgaggagctggccaggaaatatgcagatggagaggtggatgtggtggtgctggaggaccccctgcccggcggcaaaggacatgacagcacagaggagcccccactcttcagcagccacaagcccaggggggacttccccagccccatccacgtgtctggcccccggctggtgcagccccacggcccccgcttccggctggagggcaatgctgtgctgtatggaggctggagctttgccttccggctgcggagcagcagcggcctgcaggtgctgaatgtgcactttggaggagagcgcatcgcctatgaggtgtctgtgcaggaggccgtggccctgtatggaggccacaccccagctggcatgcagaccaagtacctggatgtgggctggggcctgggctctgtgacccatgagctggcccctggcatcgactgcccagagacagccaccttcctggacaccttccactactatgatgctgatgatcctgtgcactacccccgggccctgtgcctgtttgagatgcccactggagtgcccctgcggcggcacttcaacagcaacttcaagggcggcttcaacttctacgccggcctgaagggccaggtgctggtgctgcggaccaccagcacagtgtacaactatgactacatctgggacttcatcttctaccccaacggggtgatggaggccaagatgcacgccaccggctacgtgcacgccaccttctacaccccagagggcctgcggcacggcacccggctgcacacccacctgattggcaacatccacacccacctggtgcactacagagtggacctggatgtggccggcaccaagaacagcttccagaccctgcagatgaagctggagaacatcaccaacccctggagccccaggcaccgggtggtgcagcccaccctggagcagacccagtacagctgggagcggcaggccgccttccgcttcaagaggaagctgcccaagtacctgctcttcaccagcccccaggagaacccctggggccacaagaggacctaccgcctgcagatccacagcatggctgaccaggtgctgcccccaggctggcaggaggagcaggccatcacctgggccaggacagagggcggccagccccgggccctgagccaggccgccagccctgtgcccggccgctaccccctggccgtgaccaagtaccgggagagcgagctgtgcagcagcagcatctaccaccagaatgacccctggcacccccctgtggtgtttgagcagttcctgcacaacaatgaaaatattgaaaatgaagacctggtggcctgggtgacagtgggcttcctgcacatcccccacagcgaggacatccccaacacagccaccccaggcaacagcgtgggcttcctgctgcggcccttcaacttcttccctgaggaccccagcctggccagccgggacaccgtcatcgtgtggccccgggacaatggccccaactacgtgcagcgctggatcccagaagatcgggactgcagcatgcccccacccttctcctacaacggcacctacagacctgtgtag

SEQ ID NO: 307004 - DNA, 2453 bp, Artificial Sequence
  derived and/or modified sequence
gggcaaaggctggaagcagagcgaactgggagcagagcacacagagccgtggagcgagagatgccggccctgggctgggccgtggctgccatcctgatgctgcagacggccatggcggagccctccccggggactctgcccaggaaggcaggggtgttttcagacctaagcaaccaagagctgaaggcagtgcacagcttcctctggtccaagaaggagctgaggctgcagccctccagtaccaccaccatggccaagaacaccgtgtttctcatcgagatgctgctgcccaagaagtaccatgtgctgaggtttctggataaaggtgaaaggcatcctgtgcgggaagcccgtgccgtcatcttctttggtgaccaggagcatcccaatgtcaccgagtttgctgtggggcccctgccagggccctgctacatgcgagcactgtcccccaggcctgggtaccagtcctcctgggcatcgaggcccatctccacagcagagtatgccctcctctaccacaccctgcaggaagccaccaagcccctgcatcagttcttcctcaataccacaggcttctcattccaagactgccatgacagatgcctggccttcaccgatgtggccccccggggtgtggcttctggccagcgccgcagttggcttatcatacagcgctatgtagaaggctactttctgcaccccactgggctggagctcctcgtggatcatgggagcacagatgctgggcactgggccgtggagcaggtgtggtacaacgggaagttctatgggagcccagaggaactggctcggaagtatgcagatggagaggtggacgtggtggtcctggaggacccgctgcctgggggcaaggggcatgacagcacagaggagccgcccctcttctcctcccacaagccccgcggggacttccccagccccatccatgtgagcggcccccgcttggtccagccccacggccctcgcttcaggctggagggcaacgctgtgctctacggcggctggagctttgccttccggctgcgctcctcctccgggctgcaggtcctgaacgtgcacttcggcggagagcgcattgcctatgaggtcagcgtgcaagaggcagtggcgctgtatggaggacacacacctgcaggcatgcagaccaagtacctcgatgtcggctggggcctgggcagcgtcactcatgagttagcccccggcatcgactgcccggagaccgccaccttcctggacactttccactactatgatgccgatgacccggtccattatccccgagccctctgcctctttgaaatgcccacaggggtgccccttcggcggcactttaattccaactttaaaggtggcttcaacttctatgcggggctgaagggccaggtgctggtgctgcggacaacttcaactgtctacaattatgattacatttgggactttatcttctaccccaacggggtgatggaggccaagatgcatgccactggctacgtccacgccaccttctacacccccgaggggctgcgccacggcactcgcctgcacacccacctgattggcaacatacacactcacttggtgcactaccgcgtagacctggatgtggcaggcaccaagaacagcttccagacactgcagatgaagctagaaaacatcaccaacccctggagcccaagacaccgcgtggtccagccaactctggagcagacgcagtactcctgggagcgccaggcggccttccgcttcaaaaggaagctgcctaagtacctgctctttaccagcccccaggagaacccctggggccacaagcgcacgtaccgcctgcagatccactccatggccgaccaggtgctgcccccaggctggcaggaggagcaggccatcacctgggcaaggactgaggggggccagcccagggccctgagccaagctgcttcgcctgtgcctggcaggtaccccctggcagtgaccaagtaccgggagtcggagctgtgcagcagcagcatctaccaccagaacgacccctggcacccgcccgtggtctttgagcagtttcttcacaacaacgagaacattgaaaatgaggacctggtggcctgggtgacggtgggcttcctgcacatcccccactcagaggacattcccaacacagccacacctgggaactccgtgggcttcctgctccggccattcaacttcttcccagaggacccctccctggcatccagagacactgtgatcgtgtggcctcgggacaacggccccaactacgtccagcgctggatccctgaggacagggactgctcgatgcctcccccttttagctacaatgggacctatagacctgtgtgaccagcccccagttcctcccccagttcctcccaggaagcccaggagcctcactggggcagacaataaaccctcagagcctc

SEQ ID NO: 307005 - DNA, 2313 bp, Artificial Sequence
  derived and/or modified sequence
atgcccgccctgggctgggccgtggccgccatcctgatgctgcagactgccatggccgagccctcgccgggcaccctgccccgcaaggcgggggtgttttcagatctgagcaaccaggaacttaaggcagtgcattccttcctctggtcaaagaaggaactcagactgcagccatcgagcacgacaacaatggccaagaacacagtttttctcatcgaaatgctcttgccaaagaaataccacgtcctacgatttctcgataagggagagaggcacccagtgagagaggcaagagccgttatcttttttggtgatcaagaacatcctaacgtgactgaatttgctgtgggtccacttcctggcccgtgttatatgagagcgctcagccctagaccaggatatcagagtagctgggcatccaggcccattagtaccgcagagtatgccctgctttatcacaccctccaggaggccactaagcctctacaccagttcttcctgaataccacgggcttttccttccaggactgtcacgatcggtgcctggcctttactgatgtggcacctcgcggggtggcttccggccaacggcgaagctggctaataattcagaggtacgtcgaaggttacttcctgcatccgactggcctagagctcctagtcgatcatggcagcacagacgccggtcactgggccgtggagcaggtttggtacaatggtaagttttatggcagcccagaggagctggcccggaagtatgccgacggggaggtggacgtcgtcgtacttgaggatccactgcctggaggcaagggacatgacagcactgaagaaccaccattattttcctcccataagcccagaggagacttcccttcacctattcatgtgtcaggacccaggttggtgcagccacatggacctaggttcagactagagggaaacgccgtcctctatggtggttggagcttcgctttccgtcttcggtcctcctcggggttacaagtcctgaacgtgcacttcggaggagaacgcatagcctatgaggtctctgtgcaggaggccgtggcactttacgggggtcatacccctgccggtatgcagaccaaataccttgacgtaggttggggactggggtccgtaactcatgaattagccccaggcatcgactgtcctgagacggctacattcctggatactttccactactatgacgccgacgatcctgtgcactacccacgagcactgtgcctgtttgaaatgccaacaggagtcccccttaggcgacattttaactcaaatttcaaaggcgggtttaacttttatgcgggcctcaaaggacaggtgcttgtgctgcgaacgacttctactgtgtataattacgactatatctgggacttcatcttctatcctaacggggtcatggaagcaaagatgcacgccacaggctatgtgcacgcaactttctacacccccgaagggttgcgccacggaacgaggctgcacactcatctgatcggcaacatccatactcatctggtacactaccgagtggatttggatgttgccggtacaaaaaatagcttccagaccctgcagatgaaactcgagaacatcactaacccatggagccctagacatagagtcgtgcaacccaccctggagcaaacccagtactcatgggagagacaagcagcttttagattcaagcgaaagttgcccaaatatctgctctttacatctccccaggaaaacccttggggacataaacgaacgtacaggttgcaaattcactctatggccgatcaggtcctccctcccggatggcaggaagagcaggcaatcacctgggcacgcactgagggcgggcagcctcgagccctctcacaggctgctagtcctgtccctgggcgatatcctctggcagtaacaaaatatcgggaaagcgaactgtgttcctcatccatctatcaccaaaatgatccttggcatccacctgtggtgtttgaacaatttctccataataacgaaaatatcgaaaatgaagatctagttgcatgggttaccgtggggtttctgcatatcccgcactctgaggacatccctaacaccgcaacccccggtaacagtgtcgggttcctgttgcgcccttttaactttttccccgaggatccgtccctcgctagcagagacacagttatcgtgtggcctcgggacaatggccccaactatgtgcagcggtggattcccgaggacagggactgctctatgccgccgccattttcatataatggaacctataggcccgtgtag

SEQ ID NO: 307006 - DNA, 2313 bp, Artificial Sequence
  derived and/or modified sequence
atgcccgcactgggctgggccgtggctgctatattgatgctgcaaactgcaatggccgaaccttcccctggaacattaccccgaaaggccggagtgtttagcgacttgagcaaccaggagcttaaagccgtacactcattcctgtggtccaaaaaggagttgcgcttacagccctcaagcaccactaccatggcgaagaacacagtgttcctaatcgaaatgctgttaccaaagaagtatcatgtcctcaggttcttggacaagggagagcgtcatccagtgcgagaagccagagccgtgatatttttcggcgaccaggaacacccgaatgtcaccgaattcgccgtggggcctctccccggtccttgttacatgcgggctttgagtcctagaccagggtatcagagctcttgggccagcagacccatcagcactgctgaatacgcccttctctaccataccctgcaggaagcgactaagccgcttcaccaattcttcctcaatacaactggattcagctttcaggactgccatgatcgctgcctggccttcactgatgttgcgcctcgcggagtcgcgtctggacagaggcggagctggctgatcatccagcggtacgtagagggatactttttacacccaaccggactagagttgctggtagatcacggcagtactgacgctggccactgggctgtggaacaagtgtggtataatggaaaattttacggatcacccgaagaactggcgagaaagtacgccgatggggaggtcgacgtagtcgttctggaggaccccctgccgggtgggaaaggccatgacagtaccgaggagccacccctgttttcttcacataagcccagaggagattttccatctccgatacatgtgtctgggcctaggctggtacagccccatggccctagattccgcctggaaggcaacgccgtcctgtacggtggttggtcttttgccttccgactgaggtcttcctccggcctgcaagtcttaaatgtgcacttcgggggagaaagaatcgcatatgaggtgtcagtgcaggaagccgttgccttatatggaggccacacacctgcgggtatgcagactaagtatctcgatgttggatggggattgggatctgtcactcacgaattagctcctggaatcgattgccctgagacagccacgtttttggacacattccattattacgacgccgatgatccagtgcactatcctcgagccctttgtcttttcgagatgccaactggcgtccctctgcgaaggcacttcaattctaacttcaaggggggattcaacttttatgcaggtcttaaagggcaggtccttgtgttgcgaactacttccaccgtgtacaattatgattatatctgggatttcattttctatcctaacggagtgatggaggccaaaatgcacgccacaggctacgttcatgccaccttttatacgcctgaggggctgcggcacggcactaggctgcacactcatctgatcggcaatatccacacccatctagtgcattacagggtggacctcgatgttgcgggaaccaaaaactcctttcagactttgcagatgaaactcgaaaatattactaacccctggagccctaggcacagggtggtgcagcccacactggagcagacgcagtattcatgggagcgtcaggccgcatttcggtttaagcggaagctgccgaagtacctgttattcaccagcccacaggagaatccctggggtcacaaacgcacttatcgtctgcaaatccattcgatggctgatcaggttctgcccccaggatggcaagaggagcaggctatcacatgggctcggaccgaagggggacagccacgcgctctgtctcaggccgcttctcccgtgcctggcagatatccactggctgttacgaagtatagagagtccgagctgtgttcttcatccatttaccaccaaaatgacccatggcatccccctgttgtgtttgagcaatttttacataacaatgagaacattgagaatgaagacctggtggcctgggtaacagtaggtttcttgcacatccctcatagcgaagacatacccaacacagccactcccggaaactcagtggggttcttgctgcgaccctttaacttctttccagaggatccatcccttgcatccagggataccgtgattgtgtggccaagagataatgggcctaactatgtccagagatggattccagaggatcgggattgttcaatgccacctcctttcagctataacggaacgtatcgccctgtttag

SEQ ID NO: 307007 - DNA, 2313 bp, Artificial Sequence
  derived and/or modified sequence
atgcccgccctgggctgggccgtggccgccatcctgatgctgcagaccgccatggccgagcccagccccggcaccctgcccagaaaggccggcgtgttcagcgacctgagcaaccaggagctgaaggccgtgcacagcttcctgtggagcaagaaggagctgagactgcagcccagcagcaccaccaccatggccaagaacaccgtgttcctgatcgagatgctgctgcccaagaagtaccacgtgctgagattcctggacaagggcgagagacaccccgtgagagaggccagagccgtgatcttcttcggcgaccaggagcaccccaacgtgaccgagttcgccgtgggccccctgcccggcccctgctacatgagagccctgagccccagacccggctaccagagcagctgggccagcagacccatcagcaccgccgagtacgccctgctgtaccacaccctgcaggaggccaccaagcccctgcaccagttcttcctgaacaccaccggcttcagcttccaggactgccacgacagatgcctggccttcaccgacgtggcccccagaggcgtggccagcggccagagaagaagctggctgatcatccagagatacgtggagggctacttcctgcaccccaccggcctggagctgctggtggaccacggcagcaccgacgccggccactgggccgtggagcaggtgtggtacaacggcaagttctacggcagccccgaggagctggccagaaagtacgccgacggcgaggtggacgtggtggtgctggaggaccccctgcccggcggcaagggccacgacagcaccgaggagccccccctgttcagcagccacaagcccagaggcgacttccccagccccatccacgtgagcggccccagactggtgcagccccacggccccagattcagactggagggcaacgccgtgctgtacggcggctggagcttcgccttcagactgagaagcagcagcggcctgcaggtgctgaacgtgcacttcggcggcgagagaatcgcctacgaggtgagcgtgcaggaggccgtggccctgtacggcggccacacccccgccggcatgcagaccaagtacctggacgtgggctggggcctgggcagcgtgacccacgagctggcccccggcatcgactgccccgagaccgccaccttcctggacaccttccactactacgacgccgacgaccccgtgcactaccccagagccctgtgcctgttcgagatgcccaccggcgtgcccctgagaagacacttcaacagcaacttcaagggcggcttcaacttctacgccggcctgaagggccaggtgctggtgctgagaaccaccagcaccgtgtacaactacgactacatctgggacttcatcttctaccccaacggcgtgatggaggccaagatgcacgccaccggctacgtgcacgccaccttctacacccccgagggcctgagacacggcaccagactgcacacccacctgatcggcaacatccacacccacctggtgcactacagagtggacctggacgtggccggcaccaagaacagcttccagaccctgcagatgaagctggagaacatcaccaacccctggagccccagacacagagtggtgcagcccaccctggagcagacccagtacagctgggagagacaggccgccttcagattcaagagaaagctgcccaagtacctgctgttcaccagcccccaggagaacccctggggccacaagagaacctacagactgcagatccacagcatggccgaccaggtgctgccccccggctggcaggaggagcaggccatcacctgggccagaaccgagggcggccagcccagagccctgagccaggccgccagccccgtgcccggcagataccccctggccgtgaccaagtacagagagagcgagctgtgcagcagcagcatctaccaccagaacgacccctggcacccccccgtggtgttcgagcagttcctgcacaacaacgagaacatcgagaacgaggacctggtggcctgggtgaccgtgggcttcctgcacatcccccacagcgaggacatccccaacaccgccacccccggcaacagcgtgggcttcctgctgagacccttcaacttcttccccgaggaccccagcctggccagcagagacaccgtgatcgtgtggcccagagacaacggccccaactacgtgcagagatggatccccgaggacagagactgcagcatgcccccccccttcagctacaacggcacctacagacccgtgtag

SEQ ID NO: 307008 - protein, 751 aa, Artificial Sequence
  derived and/or modified sequence
MPALGWAVAAILMLQTAMAEPSPGTLPRKAGVFSDLSNQELKAVHSFLWSKKELRLQPSSTTTMAKNTVFLIEMLLPKKYHVLRFLDKGERHPVREARAVIFFGDQEHPNVTEFAVGPLPGPCYMRALSPRPGYQSSWASRPISTAEYALLYHTLQEATKPLHQFFLNTTGFSFQDCHDRCLAFTDVAPRGVASGQRRSWLIIQRYVEGYFLHPTGLELLVDHGSTDAGHWAVEQVWYNGKFYGSPEELARKYADGEVDVVVLEDPLPGGKGHDSTEEPPLFSSHKPRGDFPSPIHVSGPRLVQPHGPRFRLEGNAVLYGGWSFAFRLRSSSGLQVLNVHFGGERIAYEVSVQEAVALYGGHTPAGMQTKYLDVGWGLGSVTHELAPGIDCPETATFLDTFHYYDADDPVHYPRALCLFEMPTGVPLRRHFNSNFKGGFNFYAGLKGQVLVLRTTSTVYNYDYIWDFIFYPNGVMEAKMHATGYVHATFYTPEGLRHGTRLHTHLIGNIHTHLVHYRVDLDVAGTKNSFQTLQMKLENITNPWSPRHRVVQPTLEQTQYSWERQAAFRFKRKLPKYLLFTSPQENPWGHKRTYRLQIHSMADQVLPPGWQEEQAITWARYPLAVTKYRESELCSSSIYHQNDPWHPPVVFEQFLHNNENIENEDLVAWVTVGFLHIPHSEDIPNTATPGNSVGFLLRPFNFFPEDPSLASRDTVIVWPRDNGPNYVQRWIPEDRDCSMPPPFSYNGTYRPV

SEQ ID NO: 307009 - protein, 627 aa, Artificial Sequence
  derived and/or modified sequence
MRALSPRPGYQSSWASRPISTAEYALLYHTLQEATKPLHQFFLNTTGFSFQDCHDRCLAFTDVAPRGVASGQRRSWLIIQRYVEGYFLHPTGLELLVDHGSTDAGHWAVEQVWYNGKFYGSPEELARKYADGEVDVVVLEDPLPGGKGHDSTEEPPLFSSHKPRGDFPSPIHVSGPRLVQPHGPRFRLEGNAVLYGGWSFAFRLRSSSGLQVLNVHFGGERIAYEVSVQEAVALYGGHTPAGMQTKYLDVGWGLGSVTHELAPGIDCPETATFLDTFHYYDADDPVHYPRALCLFEMPTGVPLRRHFNSNFKGGFNFYAGLKGQVLVLRTTSTVYNYDYIWDFIFYPNGVMEAKMHATGYVHATFYTPEGLRHGTRLHTHLIGNIHTHLVHYRVDLDVAGTKNSFQTLQMKLENITNPWSPRHRVVQPTLEQTQYSWERQAAFRFKRKLPKYLLFTSPQENPWGHKRTYRLQIHSMADQVLPPGWQEEQAITWARYPLAVTKYRESELCSSSIYHQNDPWHPPVVFEQFLHNNENIENEDLVAWVTVGFLHIPHSEDIPNTATPGNSVGFLLRPFNFFPEDPSLASRDTVIVWPRDNGPNYVQRWIPEDRDCSMPPPFSYNGTYRPV

SEQ ID NO: 307010 - protein, 193 aa, Artificial Sequence
  derived and/or modified sequence
MEAKMHATGYVHATFYTPEGLRHGTRLHTHLIGNIHTHLVHYRVDLDVAGTKNSFQTLQMKLENITNPWSPRHRVVQPTLEQTQYSWERQAAFRFKRKLPKYLLFTSPQENPWGHKRTYRLQIHSMADQVLPPGWQEEQAITWARYPLAVTKYRESELCSSSIYHQNDPWHPWSLSSFFTTTRTLKMRTWWPG

SEQ ID NO: 307011 - DNA, 2256 bp, Artificial Sequence
  derived and/or modified sequence
atgccagcactggggtgggccgtcgccgctattctaatgctacaaacagctatggccgagccgtctcccggtacccttcctaggaaagcaggcgttttcagcgatctgtcaaaccaggagttgaaggcagttcactccttcctttggtcaaagaaagagctccggctgcagccaagctctaccactacgatggccaagaatactgtttttctgatagagatgctcctccctaagaagtaccacgttcttcgctttctagacaagggcgagcggcaccccgtgcgtgaagctcgggccgtcatcttcttcggagaccaagaacaccctaacgtgactgaattcgccgtgggaccacttccgggaccttgttatatgcgcgcactctccccccgacctggctaccagagcagttgggcaagtagaccaatatcaactgccgagtatgctcttctgtaccatacgctccaggaggccacgaagcctttacaccaattttttctgaatactacaggcttctcatttcaggattgtcatgaccgttgcctggcctttaccgacgtggccccacgcggtgttgcatccggccagcggcgatcttggctgatcatccagcggtatgtggaaggctatttcctccatcctactggattggagctgttagtggaccacggctccactgacgccggacattgggcagttgagcaggtgtggtataatggaaagttttatggaagccctgaagagctggctaggaagtacgccgatggtgaagtggacgtagtcgtgctcgaggacccccttcccggtgggaagggccatgactcaaccgaggagcctcctctgttctcctctcacaagcccaggggagactttccctcacctattcacgtgtcagggcctcggctcgtgcaaccccatggcccacgcttccgactcgagggcaatgccgtactctatggcggatggagtttcgcctttaggcttcggtcctcatccggccttcaggtcctcaatgtgcacttcggcggagagaggatcgcatatgaggtctcagtacaggaggcagttgcgctgtacggcggccataccccagctgggatgcagaccaaataccttgatgtggggtgggggctcggttccgtcacccacgagctggccccggggatcgattgtccagaaacggctacctttctggacaccttccactattatgacgcggacgacccagtgcactatcccagggctttatgcctgttcgaaatgccaactggggtgcccctgcgccggcacttcaactctaatttcaagggagggtttaacttctacgccggacttaagggccaggtgctggtgctaagaacaacctcaaccgtgtataactatgactacatctgggactttatcttctaccccaacggtgtaatggaagcaaaaatgcacgccacaggatatgtgcacgctacattctacacccccgaaggtctaagacacgggacaaggctgcatacgcacctaattgggaatatccacacccatctggtgcactatagagtggatttggatgtggccggtacaaaaaattcctttcaaacccttcagatgaagctggagaatatcaccaatccctggagtccaaggcacagggtggtacagcccaccttggagcagacccaatactcttgggaacgtcaggccgccttccgttttaagaggaaactccctaagtacctgttattcacatccccccaggagaatccatggggccataagcgcacttatcgactgcaaatacacagcatggctgatcaggttcttccacccgggtggcaggaggagcaagccatcacttgggcaagatacccactggccgttacgaagtatcgggagagcgagttgtgttcctcatccatctatcatcagaacgatccatggcatcccccagtagtgtttgagcagtttctgcacaacaacgagaatattgaaaatgaagatctagtggcgtgggttacagtaggctttctgcacattccccactctgaggatatcccaaataccgctactcctggcaattcggtgggattcctcctgagaccctttaacttttttcccgaggacccttcactggctagccgcgacaccgtgatcgtgtggccaagggataacggacccaactatgtccagagatggatcccggaagaccgggattgcagtatgccccccccattttcctataatggtacttacagacctgtttag

SEQ ID NO: 307012 - DNA, 1884 bp, Artificial Sequence
  derived and/or modified sequence
atgcgcgccctttcgcccaggccagggtaccagtctagttgggcttctagacccatttccaccgcagagtacgctctcctctaccatactctccaggaggccacaaagcccctgcatcagtttttcctgaacactaccggcttcagttttcaggactgccacgatcgatgtttggcctttaccgacgtagcccctagaggggtagcttctggacagaggcggagttggctgatcatacaaagatacgttgaggggtattttcttcaccccactggcctggagttactggtcgaccacggatccactgatgccgggcactgggccgtcgaacaggtctggtataatggtaaattctacggctccccagaggaattggctagaaagtacgcagatggcgaggtcgacgtggtggtgctggaggaccctcttccaggcgggaagggacatgactctacagaagaacctcctctgttttcttcgcacaaacctaggggagattttccaagcccgatacatgtgagcggcccgaggctggtgcaaccccacggcccccggtttcgcctcgagggcaacgctgtgctgtatgggggctggagcttcgccttccgtctcagatcttcctccgggctgcaggtcctcaatgtgcactttggcggagaacgaatcgcttatgaagtttcagtgcaagaggctgtagccctctatggaggccacacaccagcaggtatgcagacaaagtatctggatgtcgggtggggcctcgggagtgttacacacgaactcgccccgggaatcgactgccccgagacggctacctttctggacacattccattactacgatgcagatgaccctgttcactatcctcgagccttatgccttttcgagatgcctactggtgtccctctgcgacgtcactttaattcaaacttcaaaggaggattcaacttttatgccggcctgaaaggtcaggttctggtgctgcgcaccacaagcacggtctacaactatgactacatttgggattttatcttctatccgaacggagtcatggaggcaaaaatgcacgccaccgggtacgtccacgccacgttctatacccctgaagggttgcgacacgggacaagactccacactcacctgatcggaaacattcacactcatctggtgcattaccgggtggatctagacgtagctggtacaaagaactcctttcaaactctccagatgaagctggaaaacattacaaacccttggtcaccaaggcaccgggtggtccagccaacactggagcagacccagtacagctgggagagacaggccgccttcaggttcaagagaaaacttccaaagtaccttctcttcacttctccgcaagagaatccgtgggggcacaaaagaacatatagactgcaaatccattcgatggctgaccaggtacttcctcctgggtggcaggaagagcaggctattacttgggcgcgctacccgctggcagtgacaaaatacagggaatcagaattgtgttctagtagtatataccatcagaacgatccttggcatccaccggtagtttttgaacagttcctccacaacaacgagaatattgaaaatgaggacctggttgcctgggtgacagtgggctttctccacatacctcacagcgaggacattccaaatactgcaacccctggaaactccgttggctttctactgcgtcctttcaacttctttcctgaggatcccagtttagcaagccgcgataccgtgattgtttggccacgggataatggcccgaactatgtccagaggtggatcccagaggatcgcgattgctcaatgcccccacccttctcctacaatggaacctaccgacctgtatag

SEQ ID NO: 307013 - DNA, 750 bp, Artificial Sequence
  derived and/or modified sequence
atgccagctctaggctgggccgtagcagccattttgatgctgcagactgcaatggccgagccgtccccggggacccttccccgaaaggctggcgtattcagcgatctgtcaaatcaggaacttaaagccgtgcactcattcctttggagtaaaaaggagttgcggctccagcctagcagtaccacgactatggccaagaatactgtgttcttaatagagatgttgcttccaaaaaaataccatgtgctcaggtttctcgacaaaggagagcggcatccagtgcgcgaagccagagcagtgattttttttggggaccaggaacatccaaatgtgaccgagttcgcagtcggcccccttccaggaccttgctacatgcgggccctgtctccacgacctggataccagtcctcctgggcatcaagaccaatctccacagctgagtacgcgctactatatcatacactgcaagaggccacgaaaccgctgcatcagttcttcctaaataccacaggcttttccttccaagattgtcacgaccgctgccttgcatttacggatgtcgctccacgcggcgttgccagtggtcagcggcggtcatggctgatcatccagcgatatgtcgaggggtactttctccaccccaccggactcgagctactggtcgatcatggctccactgatgcaggccattgggccgttgagcaggtctggtacaacgggaaattttacggctcacctgaggagctatag

SEQ ID NO: 307014 - DNA, 2256 bp, Artificial Sequence
  derived and/or modified sequence
atgcccgcgctgggctgggccgtcgctgccatacttatgctacagaccgccatggctgagccaagtcccggtacgctaccgaggaaagccggtgtctttagcgatttgtctaatcaggagttgaaagccgtgcactctttcctgtggtcaaagaaagaacttagactccaaccaagttccacaacaaccatggcaaagaacacagtgttcctcatagagatgctgctgcccaagaaatatcatgtgttaaggtttctggacaagggagagcggcatcctgtgcgtgaagctcgggccgtgatcttctttggcgaccaggagcatccaaatgttacagagtttgcagtgggccccctcccaggcccctgctacatgcgcgccctgagcccacggcctgggtatcaaagtagctgggcctcccgaccaatctcaactgctgaatatgccctgctgtaccacaccctgcaggaggccacaaagccgctgcaccagtttttcttgaacacaaccggtttcagttttcaggactgtcacgatcggtgcctggcgtttactgacgtggcccctagaggggtcgcaagtggacaacggagaagctggctgatcatccagcggtacgttgagggatacttcctccatccaaccgggctggagctcttggtggaccacggatccacagatgccggacattgggcggtcgaacaggtgtggtacaatggtaaattctatggctcgcctgaagagttggcccggaagtacgccgatggcgaagtagatgtcgtggtgctcgaagaccccttgccaggtggtaaaggccacgatagcacagaggaaccacctctgttctcaagccataagcctagaggagatttcccctctcctattcacgtctctggaccccggctggtgcaaccgcacggaccaagatttcgattagagggcaacgctgttttgtatgggggctggtcctttgctttccggttgcggagttcaagcggtttgcaggtcctgaatgtccattttggaggcgaacgaatcgcatacgaggtatcggtccaagaagccgtagcactgtacggcggccacacaccagcaggaatgcagactaagtatctcgacgtggggtggggattgggttcagtgacccacgaacttgcccccggtatcgactgccccgagacggcaacttttctagacacgttccactattatgatgcagatgaccctgtgcactaccctcgcgctctgtgcctgttcgagatgccaacgggagtacccctgagaaggcacttcaattctaacttcaagggaggttttaacttctatgccggactcaaaggccaggtcctggttctgagaacgacttctactgtgtataactacgactatatctgggattttatcttctatcctaacggggttatggaggccaaaatgcacgcgacaggatatgtccacgccaccttctatacccccgagggcctcagacatggcacgcgtctgcatactcaccttatcggtaatatccacacacacctggtgcactatcgggtggacctggacgtggcgggaacaaaaaacagttttcagactctgcagatgaaactggaaaacataaccaatccatggagcccaagacaccgcgttgtgcagccaaccctcgaacagactcagtattcctgggagagacaggcggcattcaggtttaagcgaaagctgcccaagtacttgctgttcaccagcccccaggagaatccctggggacacaaacgaacgtaccggctccagatccactctatggcggatcaagtgctaccacctggctggcaggaggaacaggcaatcacatgggctcgatatccccttgctgttacaaagtatcgagaaagcgagctgtgttcctcctccatataccaccaaaatgatccttggcatcccccagtggtgtttgaacagttcctccacaacaacgagaatatagaaaacgaggacctggttgcttgggtgactgtgggctttctgcacatccctcactctgaggatatacctaataccgccacccccggcaattcggtcggtttcctcctcaggcccttcaattttttccctgaagatccctctctggcgtcaagggataccgtgatagtgtggccccgcgataacgggcccaactatgtacagcggtggatccctgaagatcgcgactgtagtatgccgccacccttctcttacaacggcacatatagaccagtgtag

SEQ ID NO: 307015 - DNA, 1014 bp, Artificial Sequence
  derived and/or modified sequence
atgccagcgctcgggtgggccgttgcagctatcctcatgctccagaccgcaatggccgagccatcccccgggactttacccaggaaggcgggggtcttcagtgacctgtcgaaccaggagctcaaagctgtgcatagtttcctttggtctaagaaggagctgaggctgcagcctagctcgacaacaaccatggcaaagaacaccgtctttctgattgagatgttactgcccaagaagtaccacgtactgagattcctcgacaaaggggaacggcaccccgtgcgcgaggcacgagccgtgatcttctttggcgatcaggaacatccgaatgttacggaatttgctgtgggccctctgccgggcccctgttacatgcgtgcattatcgcctcggcctggctaccaatcttcctgggcctcccgcccgattagcaccgccgaatacgccctgctgtatcacaccctgcaggaggccacaaagcctctgcatcagttcttcctgaatacaaccggcttcagttttcaagactgccatgatcgctgtctcgctttcacagatgtagcccccaggggggttgcgagcggacagaggcgaagctggctgatcattcaaagatatgtggagggttactttctgcaccctacaggcttagaacttctggtggatcacggctcaactgatgcgggtcactgggctgtcgagcaggtgtggtataacggcaagttttacggctctcctgaggaactggctcgcaagtacgcggacggagaagtggatgtagtcgtcctcgaagatccgctgcctggcggcaaaggacatgattccaccgaggagccacctctcttctcttctcataaaccacgcggagacttcccatcccccatacatgtaagtggacctcggttagttcagccacacggaccccgcttccgtctcgagggcaatgccgtgctgtacggaggttggagcttcgcctttagacttcgaagttcatcaggtctccaggtgttatag

SEQ ID NO: 307016 - DNA, 582 bp, Artificial Sequence
  derived and/or modified sequence
atggaggcaaaaatgcacgccacaggatacgtccacgctactttttacacgcccgagggtctgcgacacggaacaagactgcatacccatttaatcggcaatatccatacccatctcgtacattaccgggtcgatctggatgtggcaggcaccaagaattccttccagacccttcaaatgaagctggagaatattaccaacccatggtctccgagacaccgcgtagtgcaaccaacacttgagcagacacaatacagctgggaacgtcaggcagctttcaggttcaaacggaagctgcctaagtacctcctgtttacgtcgccccaggaaaatccgtggggtcacaaacgaacttacaggctccagattcatagtatggcggatcaggtcttgccccccggctggcaggaggaacaggccattacctgggccaggtacccattggccgtcacgaaataccgcgaatccgagctctgttccagtagcatataccaccagaacgacccttggcatccttggtccctgtcatcttttttcactacgacaagaaccctgaagatgcggacctggtggcccggctag

SEQ ID NO: 307017 - DNA, 2256 bp, Artificial Sequence
  derived and/or modified sequence
atgcctgcactgggatgggctgtagcagcaatactcatgctgcaaacggctatggctgagcccagtccgggcaccctgccgcgaaaagcgggagttttttccgacttgtccaaccaagaactgaaggccgttcactcttttttgtggtccaagaaagaactgcgcctacagccctcctctaccacaactatggctaagaacacggtgtttctcatcgaaatgctgcttcccaaaaagtaccatgtgttaagattcctagacaaaggcgagcggcatcccgtgcgcgaggcccgtgcggtgatcttttttggagatcaggagcaccccaatgttacagagtttgcagtgggacccctgccaggaccctgttatatgcgagctctgagtcccaggcccgggtaccagagctcctgggcgagcaggcctataagtaccgccgaatacgctctgctgtatcatacactacaagaagccaccaaaccactccatcagttcttcctgaataccaccggcttcagcttccaggattgtcacgaccgctgtctagcttttaccgatgttgctccacggggcgtggcaagtgggcagcgaagaagttggctgattatacagcgctacgttgaaggctattttctgcatccgaccgggctggagttactagtggatcacggctccaccgacgccggccattgggcggtcgagcaggtatggtataacggaaaattctacggctcgcccgaggagttggctcggaaatacgcggatggcgaagtcgatgttgtcgtgctcgaagacccgttacccggtggcaagggtcatgacagtacagaagaaccaccactgtttagctcccacaagccacgcggcgatttcccctcacccatccacgtgtcaggccctcgccttgtacagccacacggaccacgcttccgcctagagggtaacgctgtcctatatggcggctggtcattcgcattcagattgcgcagctcctccgggctgcaggtcttgaacgtccatttcggaggcgaaagaatcgcttatgaagtgagcgtacaggaagccgtggcactgtacggcggccacaccccggcgggtatgcagactaaatacctggatgtaggttggggactcgggagcgtcacccatgagctcgcccccggcatcgactgtcccgagaccgctacctttttggatacgttccattactacgacgcagatgatcccgtgcactaccctagggctctgtgtctgttcgaaatgcctacaggcgtccccctacggagacattttaattctaattttaaaggaggatttaacttctacgcggggctgaagggtcaggtgctggtgctcagaaccacgtccactgtctacaactacgattacatctgggactttatcttttatccgaacggcgtgatggaggccaaaatgcacgcaactggatatgtacacgccacattttatacacccgaaggactgcggcatggaactaggctgcatacacatcttatcggtaatatacatacccatttggtgcactacagggtagacctagacgtggccggcactaagaacagcttccagaccttacagatgaagctggagaatataacaaacccctggagtccccgtcacagggttgtgcagcctacgctggagcagacgcagtattcatgggagcggcaggccgctttccgatttaagcggaaactgcctaaatacttgctgttcacatcaccccaggagaatccctggggtcacaagcggacttaccgccttcagatccactccatggcagaccaggtcctaccacctggatggcaggaggagcaggccatcacttgggcacgatatcctctggccgttacaaaatatcgggagtcagaattgtgtagtagttctatctaccaccaaaacgacccctggcacccccctgtggtcttcgagcagtttctgcacaacaatgagaatatcgagaatgaggacctggttgcgtgggtgacagtgggttttctccacatcccacacagtgaggacatccccaatacagcaaccccaggcaatagcgtcgggttcctgttgagaccttttaatttttttccggaggatccatctctggcctctcgggacaccgtgatcgtgtggccgcgggataacgggcccaattacgtccaacgatggatacccgaggaccgagattgctcaatgccccctcccttcagttataacggcacgtaccgaccggtttag

SEQ ID NO: 307018 - DNA, 2256 bp, Artificial Sequence
  derived and/or modified sequence
atgcctgccctgggctgggccgtggccgccatcctgatgctgcagacagccatggccgagcccagccctggcaccctgcccaggaaggccggggtcttcagtgacctgagcaaccaggagctgaaggctgtgcacagcttcctgtggagcaagaaggagctgcggctgcagcccagcagcaccaccaccatggccaagaacacagtgttcctgattgagatgctgctgcccaagaagtaccacgtgctgcgcttcctggacaagggggagcggcaccctgtgcgggaggcccgggctgtgatcttctttggagaccaggagcaccccaacgtgacagaatttgctgtgggccccctgcccggcccctgctacatgagggccctgagcccccggcccggctaccagagctcctgggccagccggcccatcagcacagcagaatatgccctgctgtaccacaccctgcaggaggccaccaagcccctgcaccagttcttcctgaacaccaccggcttctccttccaggactgccacgaccgctgcctggccttcacagatgtggccccccggggcgtggccagcggccagaggaggtcctggctgatcatccagcgctacgtggagggctacttcctgcaccccaccggcctggagctgctggtggaccacggcagcacagatgctggccactgggccgtggagcaggtgtggtacaacgggaagttctacggcagccctgaggagctggccaggaaatatgcagatggagaggtggatgtggtggtgctggaggaccccctgcccggcggcaaaggacatgacagcacagaggagcccccactcttcagcagccacaagcccaggggggacttccccagccccatccacgtgtctggcccccggctggtgcagccccacggcccccgcttccggctggagggcaatgctgtgctgtatggaggctggagctttgccttccggctgcggagcagcagcggcctgcaggtgctgaatgtgcactttggaggagagcgcatcgcctatgaggtgtctgtgcaggaggccgtggccctgtatggaggccacaccccagctggcatgcagaccaagtacctggatgtgggctggggcctgggctctgtgacccatgagctggcccctggcatcgactgcccagagacagccaccttcctggacaccttccactactatgatgctgatgatcctgtgcactacccccgggccctgtgcctgtttgagatgcccactggagtgcccctgcggcggcacttcaacagcaacttcaagggcggcttcaacttctacgccggcctgaagggccaggtgctggtgctgcggaccaccagcacagtgtacaactatgactacatctgggacttcatcttctaccccaacggggtgatggaggccaagatgcacgccaccggctacgtgcacgccaccttctacaccccagagggcctgcggcacggcacccggctgcacacccacctgattggcaacatccacacccacctggtgcactacagagtggacctggatgtggccggcaccaagaacagcttccagaccctgcagatgaagctggagaacatcaccaacccctggagccccaggcaccgggtggtgcagcccaccctggagcagacccagtacagctgggagcggcaggccgccttccgcttcaagaggaagctgcccaagtacctgctcttcaccagcccccaggagaacccctggggccacaagaggacctaccgcctgcagatccacagcatggctgaccaggtgctgcccccaggctggcaggaggagcaggccatcacctgggcccgctaccccctggccgtgaccaagtaccgggagagcgagctgtgcagcagcagcatctaccaccagaatgacccctggcacccccctgtggtgtttgagcagttcctgcacaacaatgaaaatattgaaaatgaagacctggtggcctgggtgacagtgggcttcctgcacatcccccacagcgaggacatccccaacacagccaccccaggcaacagcgtgggcttcctgctgcggcccttcaacttcttccctgaggaccccagcctggccagccgggacacagtgattgtgtggccccgggacaatggccccaactacgtgcagcgctggatccctgaggaccgggactgcagcatgcccccacccttctcctacaacggcacctacagacctgtgtag

SEQ ID NO: 307019 - DNA, 1884 bp, Artificial Sequence
  derived and/or modified sequence
atgagggccctgagcccccggcccggctaccagagctcctgggccagccggcccatcagcacagcagaatatgccctgctgtaccacaccctgcaggaggccaccaagcccctgcaccagttcttcctgaacaccaccggcttctccttccaggactgccacgaccgctgcctggccttcacagatgtggccccccggggcgtggccagcggccagaggaggtcctggctgatcatccagcgctacgtggagggctacttcctgcaccccaccggcctggagctgctggtggaccacggcagcacagatgctggccactgggccgtggagcaggtgtggtacaacgggaagttctacggcagccctgaggagctggccaggaaatatgcagatggagaggtggatgtggtggtgctggaggaccccctgcccggcggcaaaggacatgacagcacagaggagcccccactcttcagcagccacaagcccaggggggacttccccagccccatccacgtgtctggcccccggctggtgcagccccacggcccccgcttccggctggagggcaatgctgtgctgtatggaggctggagctttgccttccggctgcggagcagcagcggcctgcaggtgctgaatgtgcactttggaggagagcgcatcgcctatgaggtgtctgtgcaggaggccgtggccctgtatggaggccacaccccagctggcatgcagaccaagtacctggatgtgggctggggcctgggctctgtgacccatgagctggcccctggcatcgactgcccagagacagccaccttcctggacaccttccactactatgatgctgatgatcctgtgcactacccccgggccctgtgcctgtttgagatgcccactggagtgcccctgcggcggcacttcaacagcaacttcaagggcggcttcaacttctacgccggcctgaagggccaggtgctggtgctgcggaccaccagcacagtgtacaactatgactacatctgggacttcatcttctaccccaacggggtgatggaggccaagatgcacgccaccggctacgtgcacgccaccttctacaccccagagggcctgcggcacggcacccggctgcacacccacctgattggcaacatccacacccacctggtgcactacagagtggacctggatgtggccggcaccaagaacagcttccagaccctgcagatgaagctggagaacatcaccaacccctggagccccaggcaccgggtggtgcagcccaccctggagcagacccagtacagctgggagcggcaggccgccttccgcttcaagaggaagctgcccaagtacctgctcttcaccagcccccaggagaacccctggggccacaagaggacctaccgcctgcagatccacagcatggctgaccaggtgctgcccccaggctggcaggaggagcaggccatcacctgggcccgctaccccctggccgtgaccaagtaccgggagagcgagctgtgcagcagcagcatctaccaccagaatgacccctggcacccccctgtggtgtttgagcagttcctgcacaacaatgaaaatattgaaaatgaagacctggtggcctgggtgacagtgggcttcctgcacatcccccacagcgaggacatccccaacacagccaccccaggcaacagcgtgggcttcctgctgcggcccttcaacttcttccctgaggaccccagcctggccagccgggacacagtgattgtgtggccccgggacaatggccccaactacgtgcagcgctggatccctgaggaccgggactgcagcatgcccccacccttctcctacaacggcacctacagacctgtgtag

SEQ ID NO: 307020 - DNA, 750 bp, Artificial Sequence
  derived and/or modified sequence
atgcctgccctgggctgggccgtggccgccatcctgatgctgcagacagccatggccgagcccagccctggcaccctgcccaggaaggccggggtcttcagtgacctgagcaaccaggagctgaaggctgtgcacagcttcctgtggagcaagaaggagctgcggctgcagcccagcagcaccaccaccatggccaagaacacagtgttcctgattgagatgctgctgcccaagaagtaccacgtgctgcgcttcctggacaagggggagcggcaccctgtgcgggaggcccgggctgtgatcttctttggagaccaggagcaccccaacgtgacagaatttgctgtgggccccctgcccggcccctgctacatgagggccctgagcccccggcccggctaccagagctcctgggccagccggcccatcagcacagcagaatatgccctgctgtaccacaccctgcaggaggccaccaagcccctgcaccagttcttcctgaacaccaccggcttctccttccaggactgccacgaccgctgcctggccttcacagatgtggccccccggggcgtggccagcggccagaggaggtcctggctgatcatccagcgctacgtggagggctacttcctgcaccccaccggcctggagctgctggtggaccacggcagcacagatgctggccactgggccgtggagcaggtgtggtacaacgggaagttctacggcagccctgaggagctgtag

SEQ ID NO: 307021 - DNA, 1014 bp, Artificial Sequence
  derived and/or modified sequence
atgcctgccctgggctgggccgtggccgccatcctgatgctgcagacagccatggccgagcccagccctggcaccctgcccaggaaggccggggtcttcagtgacctgagcaaccaggagctgaaggctgtgcacagcttcctgtggagcaagaaggagctgcggctgcagcccagcagcaccaccaccatggccaagaacacagtgttcctgattgagatgctgctgcccaagaagtaccacgtgctgcgcttcctggacaagggggagcggcaccctgtgcgggaggcccgggctgtgatcttctttggagaccaggagcaccccaacgtgacagaatttgctgtgggccccctgcccggcccctgctacatgagggccctgagcccccggcccggctaccagagctcctgggccagccggcccatcagcacagcagaatatgccctgctgtaccacaccctgcaggaggccaccaagcccctgcaccagttcttcctgaacaccaccggcttctccttccaggactgccacgaccgctgcctggccttcacagatgtggccccccggggcgtggccagcggccagaggaggtcctggctgatcatccagcgctacgtggagggctacttcctgcaccccaccggcctggagctgctggtggaccacggcagcacagatgctggccactgggccgtggagcaggtgtggtacaacgggaagttctacggcagccctgaggagctggccaggaaatatgcagatggagaggtggatgtggtggtgctggaggaccccctgcccggcggcaaaggacatgacagcacagaggagcccccactcttcagcagccacaagcccaggggggacttccccagccccatccacgtgtctggcccccggctggtgcagccccacggcccccgcttccggctggagggcaatgctgtgctgtatggaggctggagctttgccttccggctgcggagcagcagcggcctgcaggtgctgtag

SEQ ID NO: 307022 - DNA, 582 bp, Artificial Sequence
  derived and/or modified sequence
atggaggccaagatgcacgccaccggctacgtgcacgccaccttctacaccccagagggcctgcggcacggcacccggctgcacacccacctgattggcaacatccacacccacctggtgcactacagagtggacctggatgtggccggcaccaagaacagcttccagaccctgcagatgaagctggagaacatcaccaacccctggagccccaggcaccgggtggtgcagcccaccctggagcagacccagtacagctgggagcggcaggccgccttccgcttcaagaggaagctgcccaagtacctgctcttcaccagcccccaggagaacccctggggccacaagaggacctaccgcctgcagatccacagcatggctgaccaggtgctgcccccaggctggcaggaggagcaggccatcacctgggcccgctaccccctggccgtgaccaagtaccgggagagcgagctgtgcagcagcagcatctaccaccagaatgacccctggcacccctggagcctgagcagcttcttcaccaccaccaggaccctgaagatgaggacctggtggccaggatag

SEQ ID NO: 307023 - DNA, 2649 bp, Artificial Sequence
  derived and/or modified sequence
tctgattgacttcaagaaggagtcagagatcagcttaagggcaaaggctggaagcagagcgaactgggagcagagcacacagagccgtggagcgagagatgccggccctgggctgggccgtggctgccatcctgatgctgcagacggccatggcggagccctccccggggactctgcccaggaaggcaggggtgttttcagacctaagcaaccaagagctgaaggcagtgcacagcttcctctggtccaagaaggagctgaggctgcagccctccagtaccaccaccatggccaagaacaccgtgtttctcatcgagatgctgctgcccaagaagtaccatgtgctgaggtttctggataaaggtgaaaggcatcctgtgcgggaagcccgtgccgtcatcttctttggtgaccaggagcatcccaatgtcaccgagtttgctgtggggcccctgccagggccctgctacatgcgagcactgtcccccaggcctgggtaccagtcctcctgggcatcgaggcccatctccacagcagagtatgccctcctctaccacaccctgcaggaagccaccaagcccctgcatcagttcttcctcaataccacaggcttctcattccaagactgccatgacagatgcctggccttcaccgatgtggccccccggggtgtggcttctggccagcgccgcagttggcttatcatacagcgctatgtagaaggctactttctgcaccccactgggctggagctcctcgtggatcatgggagcacagatgctgggcactgggccgtggagcaggtgtggtacaacgggaagttctatgggagcccagaggaactggctcggaagtatgcagatggagaggtggacgtggtggtcctggaggacccgctgcctgggggcaaggggcatgacagcacagaggagccgcccctcttctcctcccacaagccccgcggggacttccccagccccatccatgtgagcggcccccgcttggtccagccccacggccctcgcttcaggctggagggcaacgctgtgctctacggcggctggagctttgccttccggctgcgctcctcctccgggctgcaggtcctgaacgtgcacttcggcggagagcgcattgcctatgaggtcagcgtgcaagaggcagtggcgctgtatggaggacacacacctgcaggcatgcagaccaagtacctcgatgtcggctggggcctgggcagcgtcactcatgagttagcccccggcatcgactgcccggagaccgccaccttcctggacactttccactactatgatgccgatgacccggtccattatccccgagccctctgcctctttgaaatgcccacaggggtgccccttcggcggcactttaattccaactttaaaggtggcttcaacttctatgcggggctgaagggccaggtgctggtgctgcggacaacttcaactgtctacaattatgattacatttgggactttatcttctaccccaacggggtgatggaggccaagatgcatgccactggctacgtccacgccaccttctacacccccgaggggctgcgccacggcactcgcctgcacacccacctgattggcaacatacacactcacttggtgcactaccgcgtagacctggatgtggcaggcaccaagaacagcttccagacactgcagatgaagctagaaaacatcaccaacccctggagcccaagacaccgcgtggtccagccaactctggagcagacgcagtactcctgggagcgccaggcggccttccgcttcaaaaggaagctgcctaagtacctgctctttaccagcccccaggagaacccctggggccacaagcgcacgtaccgcctgcagatccactccatggccgaccaggtgctgcccccaggctggcaggaggagcaggccatcacctgggcaaggtaccccctggcagtgaccaagtaccgggagtcggagctgtgcagcagcagcatctaccaccagaacgacccctggcacccgcccgtggtctttgagcagtttcttcacaacaacgagaacattgaaaatgaggacctggtggcctgggtgacggtgggcttcctgcacatcccccactcagaggacattcccaacacagccacacctgggaactccgtgggcttcctgctccggccattcaacttcttcccagaggacccctccctggcatccagagacactgtgatcgtgtggcctcgggacaacggccccaactacgtccagcgctggatccctgaggacagggactgctcgatgcctcccccttttagctacaatgggacctatagacctgtgtgaccagcccccagttcctcccccagttcctcccaggaagcccaggagcctcactggggcagacaataaaccctcagagcctcgctctgtgtgctgcttcttgcggggaggcacagggccatgtgtgtaggaaacacacgaacagacgtgcacacacacagacgtgcacacacacacagacatgcacacacacacagacgtgcacacacacagacgtgcacgcactcacacggacatgcacacacatggcatgtactttattcacactggtctactgcagtccagaaaagccaccatt

SEQ ID NO: 307024 - DNA, 2249 bp, Artificial Sequence
  derived and/or modified sequence
gcaaaggctggaagcagagcgaactgggagcagagcacacagagccgtggagcgagagatgccggccctgggctgggccgtggctgccatcctgatgctgcagacggccatggcggagccctccccggggactctgcccaggaaggcaggggtgttttcagacctaagcaaccaagaggtgaaaggcatcctgtgcgggaagcccgtgccgtcatcttctttggtgaccaggagcatcccaatgtcaccgagtttgctgtggggcccctgccagggccctgctacatgcgagcactgtcccccaggcctgggtaccagtcctcctgggcatcgaggcccatctccacagcagagtatgccctcctctaccacaccctgcaggaagccaccaagcccctgcatcagttcttcctcaataccacaggcttctcattccaagactgccatgacagatgcctggccttcaccgatgtggccccccggggtgtggcttctggccagcgccgcagttggcttatcatacagcgctatgtagaaggctactttctgcaccccactgggctggagctcctcgtggatcatgggagcacagatgctgggcactgggccgtggagcaggtgtggtacaacgggaagttctatgggagcccagaggaactggctcggaagtatgcagatggagaggtggacgtggtggtcctggaggacccgctgcctgggggcaaggggcatgacagcacagaggagccgcccctcttctcctcccacaagccccgcggggacttccccagccccatccatgtgagcggcccccgcttggtccagccccacggccctcgcttcaggctggagggcaacgctgtgctctacggcggctggagctttgccttccggctgcgctcctcctccgggctgcaggtcctgaacgtgcacttcggcggagagcgcattgcctatgaggtcagcgtgcaagaggcagtggcgctgtatggaggacacacacctgcaggcatgcagaccaagtacctcgatgtcggctggggcctgggcagcgtcactcatgagttagcccccggcatcgactgcccggagaccgccaccttcctggacactttccactactatgatgccgatgacccggtccattatccccgagccctctgcctctttgaaatgcccacaggggtgccccttcggcggcactttaattccaactttaaaggtggcttcaacttctatgcggggctgaagggccaggtgctggtgctgcggacaacttcaactgtctacaattatgattacatttgggactttatcttctaccccaacggggtgatggaggccaagatgcatgccactggctacgtccacgccaccttctacacccccgaggggctgcgccacggcactcgcctgcacacccacctgattggcaacatacacactcacttggtgcactaccgcgtagacctggatgtggcaggcaccaagaacagcttccagacactgcagatgaagctagaaaacatcaccaacccctggagcccaagacaccgcgtggtccagccaactctggagcagacgcagtactcctgggagcgccaggcggccttccgcttcaaaaggaagctgcctaagtacctgctctttaccagcccccaggagaacccctggggccacaagcgcacgtaccgcctgcagatccactccatggccgaccaggtgctgcccccaggctggcaggaggagcaggccatcacctgggcaaggtaccccctggcagtgaccaagtaccgggagtcggagctgtgcagcagcagcatctaccaccagaacgacccctggcacccgcccgtggtctttgagcagtttcttcacaacaacgagaacattgaaaatgaggacctggtggcctgggtgacggtgggcttcctgcacatcccccactcagaggacattcccaacacagccacacctgggaactccgtgggcttcctgctccggccattcaacttcttcccagaggacccctccctggcatccagagacactgtgatcgtgtggcctcgggacaacggccccaactacgtccagcgctggatccctgaggacagggactgctcgatgcctcccccttttagctacaatgggacctatagacctgtgtgaccagcccccagttcctcccccagttcctcccaggaagcccaggagcctcactggggcagacaataaaccctcagagcctc

SEQ ID NO: 307025 - DNA, 945 bp, Artificial Sequence
  derived and/or modified sequence
gaatctggtcagggtctcaaagatcgttaaaaagccgccaaagtttgcaactcgtcttgagtggctgctcctcccaaacggttctgcctctggtgtcttgttctaggagcggttgaattctctgttttgctgtgggtgccagcctctatcagcccctgccctggtccatctgtcagcttcagagccgtggagcgagagatgccggccctgggctgggccgtggctgccatcctgatgctgcagacggccatggcggagccctccccggggactctgcccaggaaggcaggggtgttttcagacctaagcaaccaagagctgaaggcagtgcacagcttcctctggtccaagaaggagctgaggctgcagccctccagtaccaccaccatggccaagaacaccgtgtttctcatcgagatgctgctgcccaagaagtaccatgtgctgaggtttctggataaaggtgaaaggcatcctgtgcgggaagcccgtgccgtcatcttctttggtgaccaggagcatcccaatgtcaccgagtttgctgtggggcccctgccagggccctgctacatgcgagcactgtcccccaggcctgggtaccagtcctcctgggcatcgaggcccatctccacagcagagtatgccctcctctaccacaccctgcaggaagccaccaagcccctgcatcagttcttcctcaataccacaggcttctcattccaagactgccatgacagatgcctggccttcaccgatgtggccccccggggtgtggcttctggccagcgccgcagttggcttatcatacagcgctatgtagaaggctactttctgcaccccactgggctggagctcctcgtggatcatgggagcacagatgctgggcactgggccgtggagcaggtgtggtacaacgggaagttctatgggagcccagaggaactg

SEQ ID NO: 307026 - DNA, 2857 bp, Artificial Sequence
  derived and/or modified sequence
tttggaggagacaagtttgggagcaggaaagccagtaggagtctactgcaggaatttagctttcaaatctgtacctgttgatgagagaacctccaggtttgtcccctactaccaatgatgaggcaaacacagagagaggaacccctttgactaaagctgaattgtaaaggactaaagccctaacttctcttcgaatgacctgcattcaaatcaagagcggttgaattctctgttttgctgtgggtgccagcctctatcagcccctgccctggtccatctgtcagcttcagagccgtggagcgagagatgccggccctgggctgggccgtggctgccatcctgatgctgcagacggccatggcggagccctccccggggactctgcccaggaaggcaggggtgttttcagacctaagcaaccaagagctgaaggcagtgcacagcttcctctggtccaagaaggagctgaggctgcagccctccagtaccaccaccatggccaagaacaccgtgtttctcatcgagatgctgctgcccaagaagtaccatgtgctgaggtttctggataaaggtgaaaggcatcctgtgcgggaagcccgtgccgtcatcttctttggtgaccaggagcatcccaatgtcaccgagtttgctgtggggcccctgccagggccctgctacatgcgagcactgtcccccaggcctgggtaccagtcctcctgggcatcgaggcccatctccacagcagagtatgccctcctctaccacaccctgcaggaagccaccaagcccctgcatcagttcttcctcaataccacaggcttctcattccaagactgccatgacagatgcctggccttcaccgatgtggccccccggggtgtggcttctggccagcgccgcagttggcttatcatacagcgctatgtagaaggctactttctgcaccccactgggctggagctcctcgtggatcatgggagcacagatgctgggcactgggccgtggagcaggtgtggtacaacgggaagttctatgggagcccagaggaactggctcggaagtatgcagatggagaggtggacgtggtggtcctggaggacccgctgcctgggggcaaggggcatgacagcacagaggagccgcccctcttctcctcccacaagccccgcggggacttccccagccccatccatgtgagcggcccccgcttggtccagccccacggccctcgcttcaggctggagggcaacgctgtgctctacggcggctggagctttgccttccggctgcgctcctcctccgggctgcaggtcctgaacgtgcacttcggcggagagcgcattgcctatgaggtcagcgtgcaagaggcagtggcgctgtatggaggacacacacctgcaggcatgcagaccaagtacctcgatgtcggctggggcctgggcagcgtcactcatgagttagcccccggcatcgactgcccggagaccgccaccttcctggacactttccactactatgatgccgatgacccggtccattatccccgagccctctgcctctttgaaatgcccacaggggtgccccttcggcggcactttaattccaactttaaaggtggcttcaacttctatgcggggctgaagggccaggtgctggtgctgcggacaacttcaactgtctacaattatgattacatttgggactttatcttctaccccaacggggtgatggaggccaagatgcatgccactggctacgtccacgccaccttctacacccccgaggggctgcgccacggcactcgcctgcacacccacctgattggcaacatacacactcacttggtgcactaccgcgtagacctggatgtggcaggcaccaagaacagcttccagacactgcagatgaagctagaaaacatcaccaacccctggagcccaagacaccgcgtggtccagccaactctggagcagacgcagtactcctgggagcgccaggcggccttccgcttcaaaaggaagctgcctaagtacctgctctttaccagcccccaggagaacccctggggccacaagcgcacgtaccgcctgcagatccactccatggccgaccaggtgctgcccccaggctggcaggaggagcaggccatcacctgggcaaggtaccccctggcagtgaccaagtaccgggagtcggagctgtgcagcagcagcatctaccaccagaacgacccctggcacccgcccgtggtctttgagcagtttcttcacaacaacgagaacattgaaaatgaggacctggtggcctgggtgacggtgggcttcctgcacatcccccactcagaggacattcccaacacagccacacctgggaactccgtgggcttcctgctccggccattcaacttcttcccagaggacccctccctggcatccagagacactgtgatcgtgtggcctcgggacaacggccccaactacgtccagcgctggatccctgaggacagggactgctcgatgcctcccccttttagctacaatgggacctatagacctgtgtgaccagcccccagttcctcccccagttcctcccaggaagcccaggagcctcactggggcagacaataaaccctcagagcctcgctctgtgtgctgcttcttgcggggaggcacagggccatgtgtgtaggaaacacacgaacagacgtgcacacacacagacgtgcacacacacacagacatgcacacacacacagacgtgcacacacacagacgtgcacgcactcacacggacatgcacacacatggcatgtactttattcacactggtctactgcagtccagaaaagccaccatt

SEQ ID NO: 307027 - DNA, 1314 bp, Artificial Sequence
  derived and/or modified sequence
aaaggctggaagcagagcgaactgggagcagagcacacagaggctgaggcaggagaattgcttgaacctgggaggcagaggtagcagtgagccaagatcgcatcactgcactccagcctgggctacagagcaagactgtctcaggaaaaagaaaaaatagtctatttaaagaagaaaaaaaagaggcctggccaatatttaataggagaacacaagaactcacctcatatccttcctgctggctctgggttccgcctgcagcccctgcctcacctgctccctccagagccgtggagcgagagatgccggccctgggctgggccgtggctgccatcctgatgctgcagacggccatggcggagccctccccggggactctgcccaggaaggcaggggtgttttcagacctaagcaaccaagagctgaaggcagtgcacagcttcctctggtccaagaaggagctgaggctgcagccctccagtaccaccaccatggccaagaacaccgtgtttctcatcgagatgctgctgcccaagaagtaccatgtgctgaggtttctggataaaggtgaaaggcatcctgtgcgggaagcccgtgccgtcatcttctttggtgaccaggagcatcccaatgtcaccgagtttgctgtggggcccctgccagggccctgctacatgcgagcactgtcccccaggcctgggtaccagtcctcctgggcatcgaggcccatctccacagcagagtatgccctcctctaccacaccctgcaggaagccaccaagcccctgcatcagttcttcctcaataccacaggcttctcattccaagactgccatgacagatgcctggccttcaccgatgtggccccccggggtgtggcttctggccagcgccgcagttggcttatcatacagcgctatgtagaaggctactttctgcaccccactgggctggagctcctcgtggatcatgggagcacagatgctgggcactgggccgtggagcaggtgtggtacaacgggaagttctatgggagcccagaggaactggctcggaagtatgcagatggagaggtggacgtggtggtcctggaggacccgctgcctgggggcaaggggcatgacagcacagaggagccgcccctcttctcctcccacaagccccgcggggacttccccagccccatccatgtgagcggcccccgcttggtccagccccacggccctcgcttcaggctggagggcaacgctgtgctctacggcggctggagctttgccttccggctgcgctcctcctccgggctgcaggtcctga

SEQ ID NO: 307028 - DNA, 2424 bp, Artificial Sequence
  derived and/or modified sequence
acttcaagaaggagtcagagatcagcttaagggcaaaggctggaagcagagcgaactgggagcagagcacacagagccgtggagcgagagatgccggccctgggctgggccgtggctgccatcctgatgctgcagacggccatggcggagccctccccggggactctgcccaggaaggcaggggtgttttcagacctaagcaaccaagagctgaaggcagtgcacagcttcctctggtccaagaaggagctgaggctgcagccctccagtaccaccaccatggccaagaacaccgtgtttctcatcgagatgctgctgcccaagaagtaccatgtgctgaggtttctggataaaggtgaaaggcatcctgtgcgggaagcccgtgccgtcatcttctttggtgaccaggagcatcccaatgtcaccgagtttgctgtggggcccctgccagggccctgctacatgcgagcactgtcccccaggcctgggtaccagtcctcctgggcatcgaggcccatctccacagcagagtatgccctcctctaccacaccctgcaggaagccaccaagcccctgcatcagttcttcctcaataccacaggcttctcattccaagactgccatgacagatgcctggccttcaccgatgtggccccccggggtgtggcttctggccagcgccgcagttggcttatcatacagcgctatgtagaaggctactttctgcaccccactgggctggagctcctcgtggatcatgggagcacagatgctgggcactgggccgtggagcaggtgtggtacaacgggaagttctatgggagcccagaggaactggctcggaagtatgcagatggagaggtggacgtggtggtcctggaggacccgctgcctgggggcaaggggcatgacagcacagaggagccgcccctcttctcctcccacaagccccgcggggacttccccagccccatccatgtgagcggcccccgcttggtccagccccacggccctcgcttcaggctggagggcaacgctgtgctctacggcggctggagctttgccttccggctgcgctcctcctccgggctgcaggtcctgaacgtgcacttcggcggagagcgcattgcctatgaggtcagcgtgcaagaggcagtggcgctgtatggaggacacacacctgcaggcatgcagaccaagtacctcgatgtcggctggggcctgggcagcgtcactcatgagttagcccccggcatcgactgcccggagaccgccaccttcctggacactttccactactatgatgccgatgacccggtccattatccccgagccctctgcctctttgaaatgcccacaggggtgccccttcggcggcactttaattccaactttaaaggtggcttcaacttctatgcggggctgaagggccaggtgctggtgctgcggacaacttcaactgtctacaattatgattacatttgggactttatcttctaccccaacggggtgatggaggccaagatgcatgccactggctacgtccacgccaccttctacacccccgaggggctgcgccacggcactcgcctgcacacccacctgattggcaacatacacactcacttggtgcactaccgcgtagacctggatgtggcaggcaccaagaacagcttccagacactgcagatgaagctagaaaacatcaccaacccctggagcccaagacaccgcgtggtccagccaactctggagcagacgcagtactcctgggagcgccaggcggccttccgcttcaaaaggaagctgcctaagtacctgctctttaccagcccccaggagaacccctggggccacaagcgcacgtaccgcctgcagatccactccatggccgaccaggtgctgcccccaggctggcaggaggagcaggccatcacctgggcaaggtaccccctggcagtgaccaagtaccgggagtcggagctgtgcagcagcagcatctaccaccagaacgacccctggcacccgtggtctttgagcagtttcttcacaacaacgagaacattgaaaatgaggacctggtggcctgggtgacggtgggcttcctgcacatcccccactcagaggacattcccaacacagccacacctgggaactccgtgggcttcctgctccggccattcaacttcttcccagaggacccctccctggcatccagagacactgtgatcgtgtggcctcgggacaacggccccaactacgtccagcgctggatccctgaggacagggactgctcgatgcctcccccttttagctacaatgggacctatagacctgtgtgaccagcccccagttcctcccccagttcctcccaggaagcccaggagcctcactggggcagacaataaaccctcagagcctcgc

SEQ ID NO: 307029 - DNA, 3135 bp, Artificial Sequence
  derived and/or modified sequence
gactgggaagacatgaccttacacaccttggttctttaacttgaccttgggaagacagggccagccagcaaggtggctggggagaaggccgaggtccccgggccgcagacgggaattgagggtcaggagccgaagtgaaactggagccggcgccacgagatgcagccctgaagggcacctccacccagtggccctcccccaccccactcccggggccctcctggcccagcgtcaccctgctgcgctaggacctacaagggcggcctctgggagccctctgctttacctcctctcctgggtcaggctgcagaaagaacaagctcctccaccctgcctgctttcaaatctgtacctgttgatgagagaacctccaggtttgtcccctactaccaatgatgaggcaaacacagagagaggaacccctttgactaaagctgaattgtaaaggactaaagccctaacttctcttcgaatgacctgcattcaaatcaagagcggttgaattctctgttttgctgtgggtgccagcctctatcagcccctgccctggtccatctgtcagcttcagagccgtggagcgagagatgccggccctgggctgggccgtggctgccatcctgatgctgcagacggccatggcggagccctccccggggactctgcccaggaaggcaggggtgttttcagacctaagcaaccaagagctgaaggcagtgcacagcttcctctggtccaagaaggagctgaggctgcagccctccagtaccaccaccatggccaagaacaccgtgtttctcatcgagatgctgctgcccaagaagtaccatgtgctgaggtttctggataaaggtgaaaggcatcctgtgcgggaagcccgtgccgtcatcttctttggtgaccaggagcatcccaatgtcaccgagtttgctgtggggcccctgccagggccctgctacatgcgagcactgtcccccaggcctgggtaccagtcctcctgggcatcgaggcccatctccacagcagagtatgccctcctctaccacaccctgcaggaagccaccaagcccctgcatcagttcttcctcaataccacaggcttctcattccaagactgccatgacagatgcctggccttcaccgatgtggccccccggggtgtggcttctggccagcgccgcagttggcttatcatacagcgctatgtagaaggctactttctgcaccccactgggctggagctcctcgtggatcatgggagcacagatgctgggcactgggccgtggagcaggtgtggtacaacgggaagttctatgggagcccagaggaactggctcggaagtatgcagatggagaggtggacgtggtggtcctggaggacccgctgcctgggggcaaggggcatgacagcacagaggagccgcccctcttctcctcccacaagccccgcggggacttccccagccccatccatgtgagcggcccccgcttggtccagccccacggccctcgcttcaggctggagggcaacgctgtgctctacggcggctggagctttgccttccggctgcgctcctcctccgggctgcaggtcctgaacgtgcacttcggcggagagcgcattgcctatgaggtcagcgtgcaagaggcagtggcgctgtatggaggacacacacctgcaggcatgcagaccaagtacctcgatgtcggctggggcctgggcagcgtcactcatgagttagcccccggcatcgactgcccggagaccgccaccttcctggacactttccactactatgatgccgatgacccggtccattatccccgagccctctgcctctttgaaatgcccacaggggtgccccttcggcggcactttaattccaactttaaaggtggcttcaacttctatgcggggctgaagggccaggtgctggtgctgcggacaacttcaactgtctacaattatgattacatttgggactttatcttctaccccaacggggtgatggaggccaagatgcatgccactggctacgtccacgccaccttctacacccccgaggggctgcgccacggcactcgcctgcacacccacctgattggcaacatacacactcacttggtgcactaccgcgtagacctggatgtggcaggcaccaagaacagcttccagacactgcagatgaagctagaaaacatcaccaacccctggagcccaagacaccgcgtggtccagccaactctggagcagacgcagtactcctgggagcgccaggcggccttccgcttcaaaaggaagctgcctaagtacctgctctttaccagcccccaggagaacccctggggccacaagcgcacgtaccgcctgcagatccactccatggccgaccaggtgctgcccccaggctggcaggaggagcaggccatcacctgggcaaggtaccccctggcagtgaccaagtaccgggagtcggagctgtgcagcagcagcatctaccaccagaacgacccctggcacccgcccgtggtctttgagcagtttcttcacaacaacgagaacattgaaaatgaggacctggtggcctgggtgacggtgggcttcctgcacatcccccactcagaggacattcccaacacagccacacctgggaactccgtgggcttcctgctccggccattcaacttcttcccagaggacccctccctggcatccagagacactgtgatcgtgtggcctcgggacaacggccccaactacgtccagcgctggatccctgaggacagggactgctcgatgcctcccccttttagctacaatgggacctatagacctgtgtgaccagcccccagttcctcccccagttcctcccaggaagcccaggagcctcactggggcagacaataaaccctcagagcctcgctctgtgtgctgcttcttgcggggaggcacagggccatgtgtgtaggaaacacacgaacagacgtgcacacacacagacgtgcacacacacacagacatgcacacacacacagacgtgcacacacacagacgtgcacgcactcacacggacatgcacacacatggcatgtactttattcacactggtctactgcagtccagaaaagccaccatt

SEQ ID NO: 307030 - DNA, 2256 bp, Artificial Sequence
  derived and/or modified sequence
atgcccgccctgggctgggccgtggccgccatcctgatgctgcagacagccatggccgagccctcacccggcactctccctcgtaaagctggagttttcagtgacctgagtaatcaagaacttaaagccgtccactccttcctctggtcgaagaaggaactcaggctacaaccaagctcaacaacaaccatggctaaaaacacagtatttttgattgagatgttactcccaaaaaagtatcatgtgctgagattcttggacaagggtgaacggcaccccgttcgcgaagctcgagcagtgattttcttcggcgaccaggaacacccaaatgtgacggagttcgccgtgggcccattgcctgggccatgttacatgcgggctctgtcaccaaggcccggatatcagtcctcttgggccagtcgccccatcagcaccgctgagtacgctctgctataccacaccctccaggaagccaccaagccacttcaccagttttttttaaacaccaccggattctccttccaggattgccatgatcgatgtctggcatttaccgatgtagcaccgaggggagtggcctccggccagaggcggtcttggctaattatacagcggtatgtcgagggatactttctgcatccaaccgggctagaactgctggtcgatcatggctctaccgacgcaggccactgggcagtggaacaagtgtggtacaatgggaaattctatggatccccagaagagttggcccgcaaatacgccgatggagaggtggacgtggtcgtactggaggatcccctccctggcggcaagggacacgactctacggaagagcccccactcttcagtagccataagccaagaggagatttcccatctccaattcatgtctcgggccctaggctggtgcaacctcacggtcccagatttcggctggagggaaacgctgtgctgtatgggggatggagcttcgctttccggctgcggagttctagtgggttacaggtgcttaatgttcacttcgggggcgaacgaatagcctacgaggtcagtgttcaggaggcagtggccttatacggaggccataccccagccggcatgcagactaaatacctcgatgtcggttggggactagggtctgttacccacgaactggccccgggcatcgactgcccagagaccgccacctttctcgacacttttcactactatgacgccgacgatcccgtgcactacccacgtgctctgtgtctattcgagatgcctaccggggtgccgctgcggagacatttcaactctaattttaaaggcgggttcaatttctacgcagggctgaagggccaggtcctagtcctgcggacgacaagtaccgtgtacaactatgattacatctgggactttattttctatccaaacggcgtgatggaggcaaagatgcatgctaccggttatgtgcacgccactttttacactccggaggggctacgacacggcacaagactgcacacacacctcatcgggaacattcacacccacctggttcattatcgggtagacctcgacgtggccgggacaaaaaactcgttccagacactccagatgaaacttgagaacattacaaacccctggtcccctaggcacagagtggtgcagcccacactcgaacagacccagtactcttgggagcgtcaagcagccttcaggttcaaacggaagctgccaaaatacctgctcttcaccagccctcaggagaatccgtgggggcataagcgcacctacaggctacagattcactctatggctgaccaagtcctcccccctggctggcaggaggagcaggctatcacatgggctcgatatccactggccgtcaccaagtaccgggaatctgagctttgcagttcctcgatctaccaccaaaacgacccttggcaccctccagttgtgttcgaacagtttttgcataataacgaaaatatcgagaacgaggatctggttgcttgggtgaccgtggggttcttacacataccacacagtgaagacattcccaacacggcaacacctgggaactcggtgggattcctattacggccatttaactttttccctgaagacccatccttggcgagtcgtgatacggtaatcgtgtggccacgggacaatgggcccaattatgttcaacgatggatccccgaagaccgcgattgttctatgccgccacctttctcttacaacggcacataccgcccagtgtag

SEQ ID NO: 307031 - DNA, 1884 bp, Artificial Sequence
  derived and/or modified sequence
atgcgggccctgagcccccggcccggctaccagagcagctgggcctctagacctatttccactgcggagtacgctctcctgtaccataccttgcaggaagctacgaagccgctccaccagttttttctgaacacgacaggtttctccttccaggattgtcacgataggtgcctggccttcaccgatgttgctcccagaggtgtagcaagcggacagagaaggagctggctgatcattcagaggtatgttgagggctactttctccatcccacaggtctcgagctgctggtcgaccacgggtcaaccgatgccggccactgggcagtggagcaagtatggtacaacgggaaattttacgggagtcccgaggaactcgcacggaaatatgcagatggggaggtggacgtggtcgttcttgaggatcctctgccgggagggaaagggcacgactccaccgaagagcctcctttattcagcagtcacaagcccagaggggactttccttcgccaatacatgtgagcgggcctcggctggttcagccacacgggcctcggttccggcttgaagggaacgcagtgctctacgggggatggtctttcgcctttagactccgaagttccagcggcctgcaggtgctgaatgtgcatttcgggggagagcggatcgcttatgaagtatccgtccaggaggctgtcgccctgtacggtgggcatacccccgctgggatgcaaactaagtacctggacgtggggtggggactcggttccgttactcatgagctagcgcctggcatcgactgtcccgagactgccaccttcttagatacctttcattattatgatgcagatgatccagtacattacccccgcgccctgtgccttttcgagatgccaactggagtgcctttgcgtcgtcacttcaactccaatttcaagggcggttttaacttttacgctggcctgaagggccaagtactggtgctgcggaccacctcgactgtgtataattatgattacatctgggatttcattttttatcccaatggtgtaatggaggccaaaatgcatgcgaccggctacgttcatgcaacattttacacacccgagggtcttcggcatgggacccgcttacatacacaccttattggcaacatccacacacatttggtccattaccgcgtggacctagatgtggctggcacaaaaaattcgttccaaacgctacaaatgaaattggaaaacatcaccaatccatggagtccccggcatcgagtggttcagcccaccctggaacagactcagtactcctgggaaaggcaggccgcttttaggttcaaaaggaagttgccaaagtatttgctctttacaagcccccaggagaacccctggggacataagcgaacttacaggttgcagatccattcaatggctgaccaggtcctgccacccggctggcaggaggaacaggctattacatgggctcgttatcctctagcagtgactaaatatcgtgaatccgagctgtgcagctcatccatctaccaccagaatgatccttggcaccctcccgtggtgtttgaacagttcctgcataacaacgaaaatatagagaacgaagatctggtcgcctgggttacagttgggtttttacacattcctcactcagaggatattccaaatacggccactcccggcaactccgtagggttccttctgagaccgttcaatttttttccagaggacccctccctggctagcagggataccgtaatagtgtggccccgagataatgggcctaactacgttcaacgctggatcccggaggatcgagactgcagtatgccgccgccgtttagctataacgggacttacaggcccgtgtag

SEQ ID NO: 307032 - DNA, 750 bp, Artificial Sequence
  derived and/or modified sequence
atgcccgccctgggctgggccgtggccgccatcctgatgctgcagaccgccatggctgaaccttctcctggaactctgccacgaaaagccggtgtgttctcagatctttctaatcaggagttgaaagctgtgcacagtttcctgtggtcgaagaaagagcttcgactgcaacccagcagtaccacaacaatggctaagaacacagtgtttctgattgagatgctcctacccaaaaagtatcatgtcttgcgattcctggataaaggcgagaggcaccctgtgagagaggctagggccgtcatcttcttcggagatcaagaacaccctaacgtgacagagttcgccgtcgggcctctccctggcccttgttatatgcgcgcactgtccccgagacctggttaccagtctagttgggctagtcgtccaatttccaccgcagagtatgccctgttatatcatactcttcaggaagccaccaagccgctccatcagttttttctgaatacgaccggcttcagcttccaggattgtcacgatcggtgcctagctttcaccgacgtggccccccgaggcgtagcgagcggccaaagaaggtcatggctcataattcagcggtatgtcgagggatattttctgcaccctactggcttggagctgctcgtggaccacggaagcaccgacgccggccattgggccgttgagcaagtgtggtacaatggtaagttctacggttccccagaggagctgtag

SEQ ID NO: 307033 - DNA, 2256 bp, Artificial Sequence
  derived and/or modified sequence
atgcccgccctgggctgggccgtggccgccatcctgatgctgcagacagctatggcagagccatcaccaggtacactgcctagaaaagccggcgtgttctctgatctgtcaaaccaggagctgaaagccgtgcactcctttctgtggtctaagaaagagctccggctccaacctagcagcacaactactatggcaaagaacaccgtgttccttatcgaaatgttattgcccaagaaatatcacgtgctgcgctttcttgacaaaggcgagcgccatcctgtccgagaggctagagcagtcatcttctttggagaccaggagcatcccaacgtcaccgagtttgccgtgggcccgctcccaggaccctgctatatgcgggccctaagtccaaggccggggtatcagtcaagttgggcctctaggcctatcagtacggcagagtatgccctgctgtatcataccctgcaggaagccaccaagccactccaccagttctttttgaatacgactggcttctcctttcaggattgccacgaccggtgtctcgcattcacggatgtagcacctcggggagtagcctctgggcagcgcagatcctggcttatcattcaacgatatgttgaaggttattttttacatccaaccgggcttgaactcctggtggaccatggtagtactgatgcaggacactgggcggtggagcaggtttggtacaatggcaaattttacggtagccctgaagagctggcccgcaagtacgccgatggggaagtggatgtggttgtgctggaggaccccttacctggaggcaagggacacgattctaccgaggagccaccactgttctcttctcacaagcctcgcggagactttccgagcccaatccacgtatcaggtccacgattggttcagccacacggacctagattcagactggaaggaaacgctgtactgtacggagggtggtcatttgcatttaggctccgtagcagctctggtctgcaggtgctcaacgtgcacttcgggggagagaggattgcatatgaggtcagcgttcaggaagctgtggcgctttacgggggccacactcccgccggaatgcagaccaaatatttagacgttggatgggggctaggaagcgtgacacatgagctcgcgcctgggatagattgtcctgagactgccaccttcctagacaccttccactactatgacgcagatgaccccgtccactaccccagggccctgtgcttatttgagatgccgaccggtgtgcccctgaggcgtcactttaatagcaattttaaggggggttttaacttctacgcgggtctcaaaggtcaggttctggtactgcggactacgtcaaccgtctataactacgactacatatgggactttatattttacccgaacggcgtaatggaggccaagatgcacgcaacagggtacgttcatgccacattttacacgcctgaaggattacggcacggtactcgtctccacacacacttgattggcaatatacacactcatctggtacactacagggtggacctggacgttgcagggactaaaaacagcttccagacgttgcagatgaagctggagaacataacaaacccttggagccccagacatagggttgtgcagcctaccctggaacagacacagtactcctgggagcggcaggcagctttcaggtttaaacgaaagctgcctaagtatctcttgtttacctcccctcaggagaacccatggggccataaaaggacttaccgcctgcagatacacagcatggcggatcaagtgttgcctccaggttggcaggaggagcaagcaattacatgggcccgctatccccttgctgtcactaaatacagagagtcagagctgtgttcgtcgagcatctatcaccaaaatgacccttggcacccaccagtggtgttcgagcagtttctgcataacaacgagaacatagagaatgaggatcttgtggcgtgggtgactgtcggtttcctgcacatcccccacagcgaggatatcccaaacactgccacccctggcaattccgtggggttcttgttgcggcctttcaatttttttccggaggacccctctctggcatcgcgtgatacggtcatcgtttggcccagggacaatggacccaactatgtccagaggtggatcccagaggatagagattgcagcatgccccccccattttcatacaatgggacctatcgtccggtgtag

SEQ ID NO: 307034 - DNA, 1014 bp, Artificial Sequence
  derived and/or modified sequence
atgcccgccctgggctgggccgtggccgccatcctgatgctgcagactgcgatggcagagccctctcccggcacgctgccccgcaaggctggagtgttcagcgatctctcaaaccaggagctgaaagcagtgcacagttttctctggtctaagaaggagcttaggctgcaaccctcaagtacaaccactatggctaagaatacagttttcctcatcgagatgttgctgccgaaaaaataccacgtgctgaggtttctggataagggcgaacgacaccctgttcgcgaagcccgggctgtgatcttttttggggatcaggaacaccctaatgttactgaattcgcggtgggtcccctccctggcccatgttatatgcgcgccctttccccgagacctgggtatcagtcaagttgggcctcgagacctatctccaccgccgagtatgcgctcctataccatacgttacaagaggcaacaaaaccattgcaccagttcttcctaaacactaccggattcagtttccaggattgtcatgatcgctgcctcgccttcaccgacgtggccccccgaggagtcgcctcagggcagaggcgtagctggcttataattcagcggtacgtagaaggatacttcctgcaccccacaggactggagctgttagtcgatcacggttctaccgacgccgggcactgggccgttgaacaggtctggtataacggaaagttctacggctcccccgaggaattggcccgcaagtacgccgacggcgaagtcgatgtcgttgtgctggaagatcctctgccagggggcaagggacacgattccaccgaggagccaccattgttcagtagccacaaaccacgcggggactttccttcacctattcatgtcagtgggcccagactcgtgcagccccacggccctagattcagattggaagggaatgctgtgctgtacgggggatggtcctttgcttttcggcttcggagctccagcggcttacaagtgttgtag

SEQ ID NO: 307035 - DNA, 582 bp, Artificial Sequence
  derived and/or modified sequence
atggaggccaagatgcacgccaccggctacgtgcacgccaccttctacactccagagggcctgcggcacggtactagactccatacacacttgattgggaacatccatacccacctggtgcactatcgtgtggatctggatgtagctggcacaaaaaattcattccagacgctccagatgaaactcgagaacattaccaatccgtggtctccccgccacagagtggtgcagcctaccttagagcagacgcagtactcatgggagcggcaagctgctttcaggtttaagcgaaagctccccaaatacttgctcttcacttcccctcaggaaaatccctggggccacaagcggacataccgtctgcaaattcactcgatggcggaccaggttttgccccctggatggcaagaggagcaggcaatcacctgggctagatacccgcttgccgtcaccaaataccgtgagtctgagttgtgtagcagctccatatatcatcagaatgatccgtggcatccttggagcctctcaagtttttttaccacaactagaactctgaaaatgaggacttggtggcccggatag

SEQ ID NO: 307036 - DNA, 2256 bp, Artificial Sequence
  derived and/or modified sequence
atgcccgccctgggctgggccgtggccgccatcctgatgctgcagactgcaatggctgagccctcccctggtactctgcctcggaaagctggtgtcttctctgacctgagcaaccaggagctcaaggctgtgcattcattcctgtggtcaaaaaaagaactacggctgcagccgtcgtcgacgactacaatggcaaaaaacacagtatttcttatcgaaatgctgctgccaaaaaagtaccacgtgctgagattcctggacaagggcgagcgccatccagttagagaagcccgggccgtgattttcttcggggaccaggagcaccccaacgtgaccgagtttgctgttggtcccctgccaggcccctgttacatgcgtgccctatcccccagacctggataccaatccagctgggcttcccgaccaataagtaccgcggaatacgcactgctgtaccatactcttcaagaggcaacaaaacccctacaccagtttttcctcaacacaacaggtttttcttttcaggattgccacgaccgctgcctggcttttaccgatgtggcccccaggggtgtcgcgagcggacagagacgaagctggcttataattcagcggtacgtggaaggctacttcctccaccctacaggactggagctgctggtagatcacggtagtacagacgccgggcactgggcagtagagcaagtgtggtacaatgggaaattttacgggtccccagaggagctggcccggaagtacgccgatggagaggtggacgtagtggttcttgaagaccctcttccaggaggaaagggccatgactccacagaagaaccccccctattctcctcgcataagccaaggggggacttccctagccccatccacgttagtggtccccgcttagtgcagccccacggcccccggtttagactcgaggggaatgccgtgctctacggcggctggagtttcgcctttcgccttcggtcgagctctggcctgcaggtgttgaatgttcactttggaggcgaacgcatcgcctatgaggtctccgtgcaggaggccgtggcactgtatggagggcacactccagcaggcatgcagacaaaatatctggacgtggggtgggggctaggcagtgtaacgcatgagttggctccaggaattgactgtccagagacagcaacctttcttgacacttttcactactatgacgcagacgacccagtccattatccacgtgctctctgcctgttcgaaatgccaaccggagtgcccctacgcagacacttcaattcaaacttcaaagggggctttaacttctacgctggactgaagggccaggttttagtattgcggactacaagtacagtttataattatgattatatttgggactttattttttatcccaacggcgtgatggaggccaaaatgcatgctacaggctatgtccacgcgaccttttatactcctgagggactgagacacggcactcgattgcatactcacctgattgggaacatccacactcacctggtgcactatcgcgtagatctggatgtcgcagggactaagaatagcttccagaccctgcagatgaagttagaaaacattaccaatccatggtcacccaggcatcgcgtggtgcagccaactctggaacagactcagtactcgtgggagcgacaggccgcatttaggttcaagcgaaaactcccaaaatatctgttgttcaccagcccccaagaaaatccctgggggcataagcggacctatagacttcagatacacagtatggccgaccaagtcctacctcctggctggcaggaagagcaagccattacatgggcccggtatcccctggctgtaaccaagtatagggaatcagaattgtgctcaagctcgatctaccatcagaacgacccgtggcaccctccagtggtctttgaacaattcttgcataacaacgaaaacatcgaaaacgaggacctggtggcttgggtgacagtcggattcttgcacattccccactcagaagatattcctaataccgctactcccggtaattctgttggcttccttcttagacccttcaactttttccctgaagatcccagcctggcttcacgggataccgtcatcgtatggccccgcgataatggacccaattacgttcaaaggtggattccagaagatcgagactgctcaatgcccccgccttttagttataatggcacttatagacctgtatag

SEQ ID NO: 307037 - DNA, 2256 bp, Artificial Sequence
  derived and/or modified sequence
atgccagctctggggtgggctgtggcagctatcctcatgctgcaaactgccatggctgagccttctccaggaactcttcctagaaaagcgggtgttttttccgatttatcgaaccaagagctgaaagcggtgcatagcttcttatggagcaaaaaagagcttcgcctccagccctcctccacaaccactatggccaagaacaccgtattcctgatcgaaatgctgcttcccaagaagtaccacgtcttaaggtttcttgacaaaggagagcgccaccccgttcgggaggcgcgtgccgtgatttttttcggcgatcaggaacatccaaacgtcaccgagtttgctgtgggaccactgcccggaccctgttacatgcgggcattgtctcctcgaccaggctatcaatcgtcctgggctagtagaccaatctcgactgccgaatatgccctcctctaccacacgctgcaagaagcgaccaagccactgcatcaattttttctgaacacaacgggcttttcttttcaagattgtcatgatagatgtctggccttcacggatgtcgcccctagaggcgtggcaagtggtcaaagaaggtcctggctgattattcagagatatgtagaaggctatttcctgcacccgacgggcctcgagcttttggtcgatcatggcagcactgatgctggccactgggcagtggagcaggtctggtacaatgggaagttttacggcagtcccgaggagctcgcgagaaaatacgcagatggggaggtggatgtggtggtattggaagaccctttgcccggaggtaagggacacgacagtactgaggagcctcctctgtttagttcacacaagccaaggggggacttcccttccccgatccacgtctccggcccacgccttgtgcagcctcatgggcctaggttccgacttgagggcaacgcagtgctgtacggcggttggtccttcgctttcagactccgcagttcctccgggctgcaggtacttaacgtccacttcgggggagagcgtatagcctatgaggtgtctgttcaggaggccgtggccttgtacggcggtcacacccccgctgggatgcagacgaagtatcttgacgtgggctggggattgggatcagtcacccacgaattggcacccggaattgactgccctgagactgccaccttcctggacacttttcattattatgacgccgacgatccagtccattatcccagggcactttgcctgtttgaaatgcccactggagtgcctctgcgcagacacttcaactccaacttcaagggcggattcaatttctacgcaggtcttaaggggcaggtgctggtactacggactacttctaccgtgtataactacgattacatttgggactttatcttctaccctaatggcgtgatggaggccaagatgcacgccacgggttacgtgcacgcgactttctacaccccagaaggcctgcgtcatggaacgaggctccacacacacctaattgggaacatccatacacacctcgtccattacagagtggatttggacgttgctggaactaagaattcctttcagacactgcagatgaagctggaaaatatcacaaacccatggtctccaaggcacagagttgtgcagcccacactcgagcaaacacagtactcctgggaaaggcaagctgctttccggtttaagagaaagctccccaaatacttacttttcacaagtcctcaggagaatccctggggacacaagcgcacttatcggctacaaatacatagcatggcagatcaggtgctgcctcccggatggcaggaggaacaggccattacatgggcgaggtacccactggctgtgacaaagtatcgcgagtcagaactgtgttcctcctcaatttaccaccagaatgacccatggcatccccctgtagtgtttgagcaatttctgcacaataatgaaaatatcgagaatgaggatcttgtggcgtgggttaccgtgggcttccttcacattcctcactccgaagatatccctaacacagccacgcccggaaactccgtggggttcctgctgagaccgtttaatttctttcccgaagacccatccctggcaagccgggatactgtaatcgtttggccaagagacaacggtcccaattatgtgcagaggtggatccctgaagatcgcgattgttctatgcccccaccttttagctataacgggacttataggcccgtgtag

SEQ ID NO: 307038 - DNA, 1884 bp, Artificial Sequence
  derived and/or modified sequence
atgcgggctctgtcacctcggcctggctaccagagctcctgggcctcgcgaccaatttccaccgctgagtacgcgctcttatatcatacactccaggaagccacaaagccattacaccagttcttcctgaacaccactggattttccttccaggattgccacgaccgctgcctggccttcacagacgtggccccaagaggggtggcgtctggccagcggcgaagttggctcatcatccagagatatgttgaaggctacttcctccatcctactggccttgagctcctcgtggaccacggtagcaccgatgctgggcactgggctgtagagcaagtctggtataatggcaagttttatggctctcctgaggagcttgccagaaaatacgccgatggagaggtcgacgtggtcgtccttgaagaccctctgccgggtggcaaagggcatgacagtacagaagaacctcctctgttcagtagccataagccaagaggcgatttcccctcacccatccacgtttctggaccccgtttggtgcaaccgcatggcccacggtttcggctggaaggcaatgctgtactatatggcggatggtcattcgctttccggctacggtcttcgagtggcttgcaggtgctgaacgttcacttcggcggagagcgcattgcctacgaagtcagcgttcaggaggccgtggcactttatggcggacacacacccgcaggtatgcagaccaaatacctcgatgtaggctgggggttgggaagtgtgacgcacgagctcgcgccaggaatagactgcccagagacagcgacattcttagacacatttcattactatgatgctgatgatccggttcactaccctcgggcactgtgtctgttcgagatgcctacgggagtgcccttgcggagacactttaactccaacttcaaaggtggcttcaatttttacgcgggacttaaggggcaggtcttggtcctgcgaaccacctccacagtttataactatgattacatctgggatttcatcttttatcctaatggagtgatggaggcgaagatgcatgctacagggtatgttcacgccactttctacacgccagaaggtttgcggcacgggaccagactgcacactcatctaattggaaatattcacacacaccttgtccactatcgcgtcgatttggatgtcgcaggcactaagaattccttccagactcttcagatgaaactcgagaatatcaccaatccttggtctcctagacacagagtggtacaaccaacgctggagcagacacaatacagctgggaacgccaagcagcctttaggttcaaacggaagctgcccaagtacctgttgttcacaagtccacaggagaacccctggggacataagaggacctaccgcctgcagatccacagcatggctgatcaggtcctcccccctggctggcaggaagagcaggcaattacatgggcaaggtatcccctggccgtcactaagtatcgggaatccgagttatgctctagcagtatataccaccagaatgatccctggcatccacctgtggttttcgagcaatttctgcacaataacgagaatatagagaacgaagatctggtggcttgggtaacagtagggttccttcacattcctcattctgaggatattccaaacacagcaacccccggaaactccgttgggttcctcctgagaccattcaatttcttcccagaggatccttctctggcctcacgggacacagtcatcgtctggcccagagataacggacctaactacgttcagagatggatccccgaggaccgggactgctctatgccccctccctttagttacaatggaacataccggcctgtctag

SEQ ID NO: 307039 - DNA, 750 bp, Artificial Sequence
  derived and/or modified sequence
atgcctgctctggggtgggccgtggcagcaattttaatgcttcaaacagcgatggccgagccttcgccagggactctgccgcgtaaagccggagtattttctgatctatctaaccaagagctgaaggctgtgcattcttttctttggtccaagaaagagcttcgcctacagccttctagcactaccacaatggcaaagaataccgtgttcctgatagaaatgctcctgcctaagaagtatcacgttcttcgattcttggacaagggcgaaagacacccagtgagggaagcacgtgccgttatatttttcggcgatcaggaacacccaaacgtgactgagtttgccgtcggacccttacccggtccttgttacatgagagctctgtctccccgacccggataccagagtagctgggccagcaggccaattagcaccgccgaatatgccctcctttatcatactttgcaggaggccaccaagccccttcatcaatttttcttgaatacaacaggtttctcgtttcaagactgtcatgatagatgtctcgctttcacagacgtagcacctagaggtgtggcaagcgggcagcgccgatcttggttgatcattcaaaggtacgttgagggttacttcctgcacccaacaggcctagagctccttgtggatcacgggtccaccgatgcgggacactgggcagtggagcaggtctggtacaacggaaagttttacggatcaccggaggaattatag

SEQ ID NO: 307040 - DNA, 2256 bp, Artificial Sequence
  derived and/or modified sequence
atgcctgcgctcggatgggctgtggcagccatactgatgcttcagacagccatggccgagccctcacccggaacactgcccagaaaggccggagttttttctgacttatcaaaccaggaattaaaagcggtgcattccttcctctggtctaagaaagagctgcgtctgcagcctagcagcactaccacaatggctaagaatacagtgtttctcattgagatgctgctccctaagaaataccacgttctaaggttcctggataagggagaaagacatccagtcagagaggcaagggctgtgatctttttcggcgaccaggagcacccaaacgtcactgagtttgccgtgggccctttgccgggtccgtgctatatgagagcactgtccccacgccctggataccagtcatcatgggcttcgcgcccaatctccacagccgagtatgccttgctgtatcacacactacaggaggccaccaagcctctgcaccagttcttcctgaacaccacaggtttctccttccaagactgtcatgaccgttgcctggctttcacggacgtcgcaccaaggggagtggcctctggacagcgcaggtcctggctgatcattcagcggtatgtagaaggatattttttacacccaacaggtctagagctcctcgtggaccacggttcaaccgacgccggacattgggctgtggagcaagtgtggtacaacggcaagttctatggctctcccgaggagctggccaggaagtatgcagacggtgaggttgacgtggtcgtattggaggatccgcttcccggtgggaaggggcacgatagtacagaagaaccccctctgttcagctcccataagccccgaggcgactttccgtccccaatccacgtttctggacccagacttgtgcagcctcacggtcctcgctttcggcttgaaggcaacgccgtgctctacggtggctggagtttcgcatttcgattaaggtcctcttctggcctgcaagtgctgaacgtgcactttggcggtgagagaattgcgtacgaggtaagtgtgcaggaggccgttgctctttatggcggacacacccccgctggaatgcagactaaatatctggacgtaggttggggtttgggttctgtaactcacgagcttgccccaggaattgactgccccgaaactgcaacctttctggatacttttcattattatgatgcagacgaccctgtccattacccacgagccctctgccttttcgaaatgcccaccggagttcctttgaggagacacttcaacagtaattttaagggcggatttaatttttacgccggactgaagggacaggtgcttgtactcagaacaacctccaccgtgtataactacgattatatctgggatttcatcttttaccctaacggggtgatggaggcgaagatgcatgcaaccggctacgtgcatgcgactttctatacaccagagggtttgcgccatggtactagactgcacacacacctgatcggcaatatccacacccatctggtgcactatcgcgtggaccttgatgtcgccggtactaagaacagctttcagaccttgcagatgaagcttgagaacattaccaatccctggagccccagacaccgtgtcgtccagccaactctcgagcagacccaatactcttgggaacggcaggctgctttccggtttaagaggaagttacctaagtacttgctattcacgtccccacaggagaacccctggggtcataaaaggacttaccgactgcaaattcattccatggccgaccaggtgctgccacccggatggcaggaagagcaagccatcacctgggccagataccccctcgccgtgaccaaatatagagagtcagagctttgcagctcaagcatctatcaccagaacgacccctggcatcctcctgtggtctttgagcagtttctgcacaataacgaaaacatcgagaatgaagacctcgtggcatgggtgaccgtgggttttctgcacatacctcattctgaggatattcccaacaccgccacacccggtaactctgtgggattcctcctgcgcccattcaacttcttccccgaagatccttctctcgcaagcagagatactgtcatagtttggcccagagacaacggcccaaactacgtccaacggtggataccggaagacagagactgtagcatgccccctccattctcatataacggcacctataggccagtgtag

SEQ ID NO: 307041 - DNA, 1014 bp, Artificial Sequence
  derived and/or modified sequence
atgccggcattgggttgggccgtggctgcaattctgatgctccagaccgcaatggcagagcctagcccaggcactctgccgaggaaagctggggtctttagtgacttgtctaaccaggagctgaaagcagttcactcatttttgtggtctaagaaagaacttaggcttcagccgtcctccacgacaactatggccaagaacaccgtgtttctaatcgaaatgctgctcccaaagaagtatcacgtgttgaggttccttgacaagggcgaacgacatcccgtgagggaagcccgagccgtgatattttttggcgaccaggaacaccccaatgtcactgagtttgcagttggccctctcccgggaccctgttacatgagggctctgtcccctaggcccggataccagtcctcttgggctagtcgccctatctcaaccgcggagtatgcactgctctatcacactctccaagaggctaccaaacccctgcatcagttttttctgaacacaacaggattcagcttccaggactgccacgaccgctgtctcgcttttacagacgtagccccaaggggggttgcctcaggccaacgcaggtcttggctgattattcagaggtacgtcgaggggtactttttacacccaactggcttagagctgctcgtggatcacggtagcacagatgccggtcattgggcagttgagcaagtctggtataatggcaaattctatgggtcccctgaggaactggctcgtaagtatgcagacggggaggtagacgttgtggtgctggaagatccgttgccaggcggaaaagggcacgatagtacagaagagccccctctattttcgtctcacaagccaagaggcgacttcccgagcccaattcacgtatccggaccacgcttggtgcagccacatggacctaggttcagactcgaaggaaatgcagttctgtatggtgggtggtccttcgcattccggctgagaagctcttccggcctgcaagtgctgtag

SEQ ID NO: 307042 - DNA, 582 bp, Artificial Sequence
  derived and/or modified sequence
atggaggccaaaatgcacgccaccggctacgtgcacgccactttttacacccctgagggattgcgtcatgggaccaggctgcacacacatttgatcggaaacatccacactcacttggttcactatcgggtcgatctggacgttgccggaacaaaaaactcattccagaccttacagatgaagctggaaaacatcacaaacccttggagccccaggcacagagtcgttcaaccaaccctcgagcaaacccagtactcctgggagcggcaggcggctttcagattcaaaaggaagcttcccaaatatttgctcttcacctccccgcaggaaaatccttggggccacaaacgcacatatcggctgcaaatccattccatggccgaccaggtgctgcccccaggatggcaggaggagcaagctatcacgtgggcacgctatcctttggccgtgaccaagtacagggagagtgaactgtgcagcagttccatctatcaccagaacgacccctggcacccgtggtcactgagttctttcttcactaccacgcgcacgctcaaaatgaggacgtggtggcctggctag

SEQ ID NO: 307043 - DNA, 2256 bp, Artificial Sequence
  derived and/or modified sequence
atgcccgcattgggttgggcagtagccgctattcttatgcttcagactgcaatggcagaaccatccccgggtactctgcctagaaaggctggagtttttagcgacttgagcaaccaggagctgaaagccgtccattcatttctgtggtctaagaaagaattaaggcttcagccgtcctctactacaacaatggctaaaaataccgtgtttcttatcgagatgctgctgccgaagaagtaccacgtgctgcgctttctcgataaaggcgagcgccacccagttagagaggcaagggccgttatttttttcggcgatcaagagcaccccaacgtgaccgagtttgccgttggccctttgcctgggccatgttacatgcgcgctttgagcccccgtccgggttaccagagctcgtgggcatcccgcccaattagcacggccgagtatgccctgctctaccacaccctgcaggaggctactaaaccactgcaccagttcttccttaacaccaccggtttcagtttccaggattgccacgacaggtgtttggcctttaccgatgttgctccccgtggggtggctagcggtcagcggcgatcgtggctcataatccagcgctatgtcgagggttactttctgcaccccaccggcctcgagctgttagtcgatcacggttccacggacgccggtcactgggcggtggagcaggtctggtacaacggcaaattttatggctcgccagaagagctcgcgaggaagtatgcggacggcgaggttgatgtggtagtgctggaagatccactccccggagggaaaggacacgacagcaccgaagagccccctctgttcagtagccacaagccccgaggtgactttccctctccgattcatgtaagcggcccacggctggtgcaacctcatggaccccgattcagactcgaagggaacgccgtgttgtacggcggttggagtttcgcattcaggctcagaagctcctctggtcttcaggtacttaacgtccacttcggaggggaacgtattgcctatgaagtatcagtacaggaggccgtggccctatatggtggccatacccctgcgggaatgcaaacaaaatatctcgatgtaggctggggcctgggctccgtgacgcatgagctggctccaggtatcgactgccccgagacagcaacgttcctcgacactttccattattatgatgcagatgatccagtccactatccacgcgctttatgtctgtttgaaatgccaacaggcgtgcctctgcgtaggcacttcaactctaattttaagggtgggtttaacttttacgcaggtcttaagggccaagtcctggtgttgcgcacaacttccacagtgtacaattatgattatatctgggactttatcttttatcccaatggggtgatggaggccaaaatgcacgcaaccggctatgtgcacgccacgttctataccccagaaggtctgcggcatggcactcgattgcacacccacttgatcgggaacattcatacccaccttgttcactaccgggtcgatctggacgttgcaggtactaaaaacagcttccaaacactacaaatgaagctagaaaacattaccaatccttggtcaccaaggcatcgagtggttcagccaacactggaacagacacagtactcctgggaaagacaggctgcgttccgttttaaacggaagctccctaaatatctgctcttcactagcccacaggagaatccttgggggcacaaacgtacatataggctgcagatacacagcatggcggatcaagtgttgcctcccggatggcaggaggagcaggcgatcacatgggcccgttatcctctggccgttaccaaatatcgagagagtgaactgtgtagctcaagtatttaccatcagaacgatccctggcacccccctgtggtgttcgaacagtttttgcataataatgagaatatagaaaacgaagacctggtggcgtgggtgacagtgggcttcttgcacatccctcactcagaggacatccctaataccgctaccccaggaaacagcgtgggatttctgctgcgccctttcaatttcttcccagaagacccctctctcgcgagcagggatacagtgatagtatggcctagagataatggtcccaactacgtgcagagatggatccccgaagatagggactgttcaatgcctccacctttttcctacaatgggacttataggccagtatag

SEQ ID NO: 307044 - DNA, 2256 bp, Artificial Sequence
  derived and/or modified sequence
atgcccgccctgggctgggccgtggccgccatcctgatgctgcagaccgccatggccgagcccagccccggcaccctgcccagaaaggccggcgtgttcagcgacctgagcaaccaggagctgaaggccgtgcacagcttcctgtggagcaagaaggagctgagactgcagcccagcagcaccaccaccatggccaagaacaccgtgttcctgatcgagatgctgctgcccaagaagtaccacgtgctgagattcctggacaagggcgagagacaccccgtgagagaggccagagccgtgatcttcttcggcgaccaggagcaccccaacgtgaccgagttcgccgtgggccccctgcccggcccctgctacatgagagccctgagccccagacccggctaccagagcagctgggccagcagacccatcagcaccgccgagtacgccctgctgtaccacaccctgcaggaggccaccaagcccctgcaccagttcttcctgaacaccaccggcttcagcttccaggactgccacgacagatgcctggccttcaccgacgtggcccccagaggcgtggccagcggccagagaagaagctggctgatcatccagagatacgtggagggctacttcctgcaccccaccggcctggagctgctggtggaccacggcagcaccgacgccggccactgggccgtggagcaggtgtggtacaacggcaagttctacggcagccccgaggagctggccagaaagtacgccgacggcgaggtggacgtggtggtgctggaggaccccctgcccggcggcaagggccacgacagcaccgaggagccccccctgttcagcagccacaagcccagaggcgacttccccagccccatccacgtgagcggccccagactggtgcagccccacggccccagattcagactggagggcaacgccgtgctgtacggcggctggagcttcgccttcagactgagaagcagcagcggcctgcaggtgctgaacgtgcacttcggcggcgagagaatcgcctacgaggtgagcgtgcaggaggccgtggccctgtacggcggccacacccccgccggcatgcagaccaagtacctggacgtgggctggggcctgggcagcgtgacccacgagctggcccccggcatcgactgccccgagaccgccaccttcctggacaccttccactactacgacgccgacgaccccgtgcactaccccagagccctgtgcctgttcgagatgcccaccggcgtgcccctgagaagacacttcaacagcaacttcaagggcggcttcaacttctacgccggcctgaagggccaggtgctggtgctgagaaccaccagcaccgtgtacaactacgactacatctgggacttcatcttctaccccaacggcgtgatggaggccaagatgcacgccaccggctacgtgcacgccaccttctacacccccgagggcctgagacacggcaccagactgcacacccacctgatcggcaacatccacacccacctggtgcactacagagtggacctggacgtggccggcaccaagaacagcttccagaccctgcagatgaagctggagaacatcaccaacccctggagccccagacacagagtggtgcagcccaccctggagcagacccagtacagctgggagagacaggccgccttcagattcaagagaaagctgcccaagtacctgctgttcaccagcccccaggagaacccctggggccacaagagaacctacagactgcagatccacagcatggccgaccaggtgctgccccccggctggcaggaggagcaggccatcacctgggccagataccccctggccgtgaccaagtacagagagagcgagctgtgcagcagcagcatctaccaccagaacgacccctggcacccccccgtggtgttcgagcagttcctgcacaacaacgagaacatcgagaacgaggacctggtggcctgggtgaccgtgggcttcctgcacatcccccacagcgaggacatccccaacaccgccacccccggcaacagcgtgggcttcctgctgagacccttcaacttcttccccgaggaccccagcctggccagcagagacaccgtgatcgtgtggcccagagacaacggccccaactacgtgcagagatggatccccgaggacagagactgcagcatgcccccccccttcagctacaacggcacctacagacccgtgtag

SEQ ID NO: 307045 - DNA, 1884 bp, Artificial Sequence
  derived and/or modified sequence
atgagagccctgagccccagacccggctaccagagcagctgggccagcagacccatcagcaccgccgagtacgccctgctgtaccacaccctgcaggaggccaccaagcccctgcaccagttcttcctgaacaccaccggcttcagcttccaggactgccacgacagatgcctggccttcaccgacgtggcccccagaggcgtggccagcggccagagaagaagctggctgatcatccagagatacgtggagggctacttcctgcaccccaccggcctggagctgctggtggaccacggcagcaccgacgccggccactgggccgtggagcaggtgtggtacaacggcaagttctacggcagccccgaggagctggccagaaagtacgccgacggcgaggtggacgtggtggtgctggaggaccccctgcccggcggcaagggccacgacagcaccgaggagccccccctgttcagcagccacaagcccagaggcgacttccccagccccatccacgtgagcggccccagactggtgcagccccacggccccagattcagactggagggcaacgccgtgctgtacggcggctggagcttcgccttcagactgagaagcagcagcggcctgcaggtgctgaacgtgcacttcggcggcgagagaatcgcctacgaggtgagcgtgcaggaggccgtggccctgtacggcggccacacccccgccggcatgcagaccaagtacctggacgtgggctggggcctgggcagcgtgacccacgagctggcccccggcatcgactgccccgagaccgccaccttcctggacaccttccactactacgacgccgacgaccccgtgcactaccccagagccctgtgcctgttcgagatgcccaccggcgtgcccctgagaagacacttcaacagcaacttcaagggcggcttcaacttctacgccggcctgaagggccaggtgctggtgctgagaaccaccagcaccgtgtacaactacgactacatctgggacttcatcttctaccccaacggcgtgatggaggccaagatgcacgccaccggctacgtgcacgccaccttctacacccccgagggcctgagacacggcaccagactgcacacccacctgatcggcaacatccacacccacctggtgcactacagagtggacctggacgtggccggcaccaagaacagcttccagaccctgcagatgaagctggagaacatcaccaacccctggagccccagacacagagtggtgcagcccaccctggagcagacccagtacagctgggagagacaggccgccttcagattcaagagaaagctgcccaagtacctgctgttcaccagcccccaggagaacccctggggccacaagagaacctacagactgcagatccacagcatggccgaccaggtgctgccccccggctggcaggaggagcaggccatcacctgggccagataccccctggccgtgaccaagtacagagagagcgagctgtgcagcagcagcatctaccaccagaacgacccctggcacccccccgtggtgttcgagcagttcctgcacaacaacgagaacatcgagaacgaggacctggtggcctgggtgaccgtgggcttcctgcacatcccccacagcgaggacatccccaacaccgccacccccggcaacagcgtgggcttcctgctgagacccttcaacttcttccccgaggaccccagcctggccagcagagacaccgtgatcgtgtggcccagagacaacggccccaactacgtgcagagatggatccccgaggacagagactgcagcatgcccccccccttcagctacaacggcacctacagacccgtgtag

SEQ ID NO: 307046 - DNA, 750 bp, Artificial Sequence
  derived and/or modified sequence
atgcccgccctgggctgggccgtggccgccatcctgatgctgcagaccgccatggccgagcccagccccggcaccctgcccagaaaggccggcgtgttcagcgacctgagcaaccaggagctgaaggccgtgcacagcttcctgtggagcaagaaggagctgagactgcagcccagcagcaccaccaccatggccaagaacaccgtgttcctgatcgagatgctgctgcccaagaagtaccacgtgctgagattcctggacaagggcgagagacaccccgtgagagaggccagagccgtgatcttcttcggcgaccaggagcaccccaacgtgaccgagttcgccgtgggccccctgcccggcccctgctacatgagagccctgagccccagacccggctaccagagcagctgggccagcagacccatcagcaccgccgagtacgccctgctgtaccacaccctgcaggaggccaccaagcccctgcaccagttcttcctgaacaccaccggcttcagcttccaggactgccacgacagatgcctggccttcaccgacgtggcccccagaggcgtggccagcggccagagaagaagctggctgatcatccagagatacgtggagggctacttcctgcaccccaccggcctggagctgctggtggaccacggcagcaccgacgccggccactgggccgtggagcaggtgtggtacaacggcaagttctacggcagccccgaggagctgtag

SEQ ID NO: 307047 - DNA, 1014 bp, Artificial Sequence
  derived and/or modified sequence
atgcccgccctgggctgggccgtggccgccatcctgatgctgcagaccgccatggccgagcccagccccggcaccctgcccagaaaggccggcgtgttcagcgacctgagcaaccaggagctgaaggccgtgcacagcttcctgtggagcaagaaggagctgagactgcagcccagcagcaccaccaccatggccaagaacaccgtgttcctgatcgagatgctgctgcccaagaagtaccacgtgctgagattcctggacaagggcgagagacaccccgtgagagaggccagagccgtgatcttcttcggcgaccaggagcaccccaacgtgaccgagttcgccgtgggccccctgcccggcccctgctacatgagagccctgagccccagacccggctaccagagcagctgggccagcagacccatcagcaccgccgagtacgccctgctgtaccacaccctgcaggaggccaccaagcccctgcaccagttcttcctgaacaccaccggcttcagcttccaggactgccacgacagatgcctggccttcaccgacgtggcccccagaggcgtggccagcggccagagaagaagctggctgatcatccagagatacgtggagggctacttcctgcaccccaccggcctggagctgctggtggaccacggcagcaccgacgccggccactgggccgtggagcaggtgtggtacaacggcaagttctacggcagccccgaggagctggccagaaagtacgccgacggcgaggtggacgtggtggtgctggaggaccccctgcccggcggcaagggccacgacagcaccgaggagccccccctgttcagcagccacaagcccagaggcgacttccccagccccatccacgtgagcggccccagactggtgcagccccacggccccagattcagactggagggcaacgccgtgctgtacggcggctggagcttcgccttcagactgagaagcagcagcggcctgcaggtgctgtag

SEQ ID NO: 307048 - DNA, 582 bp, Artificial Sequence
  derived and/or modified sequence
atggaggccaagatgcacgccaccggctacgtgcacgccaccttctacacccccgagggcctgagacacggcaccagactgcacacccacctgatcggcaacatccacacccacctggtgcactacagagtggacctggacgtggccggcaccaagaacagcttccagaccctgcagatgaagctggagaacatcaccaacccctggagccccagacacagagtggtgcagcccaccctggagcagacccagtacagctgggagagacaggccgccttcagattcaagagaaagctgcccaagtacctgctgttcaccagcccccaggagaacccctggggccacaagagaacctacagactgcagatccacagcatggccgaccaggtgctgccccccggctggcaggaggagcaggccatcacctgggccagataccccctggccgtgaccaagtacagagagagcgagctgtgcagcagcagcatctaccaccagaacgacccctggcacccctggagcctgagcagcttcttcaccaccaccagaaccctgaagatgagaacctggtggcccggctag

SEQ ID NO: 307049 - protein, 124 aa, Artificial Sequence
  derived and/or modified sequence
MVDVIVTLGGLAGRFDQIMASVNTLFQATHITPFPIIIIQEESLIYLLQPGKHRLHVDTGMEGDWCGLIPVGQPCMQVTTTGLKWNLRTCDYTRTTWIAKDNPVPRLIRLIRLNHICKVPLAIK

SEQ ID NO: 307050 - DNA, 375 bp, Artificial Sequence
  derived and/or modified sequence
atggtggacgtgatcgtgaccctgggcggcctggccggcagattcgaccagatcatggccagcgtgaacaccctgttccaggccacccacatcacccccttccccatcatcatcatccaggaggagagcctgatctacctgctgcagcccggcaagcacagactgcacgtggacaccggcatggagggcgactggtgcggcctgatccccgtgggccagccctgcatgcaggtgaccaccaccggcctgaagtggaacctgagaacctgcgactacaccagaaccacctggatcgccaaggacaaccccgtgcccagactgatcagactgatcagactgaaccacatctgcaaggtgcccctggccatcaagtag

SEQ ID NO: 307051 - DNA, 375 bp, Artificial Sequence
  derived and/or modified sequence
atggtggatgtcatcgtgaccctgggaggtctggcgggtcggtttgaccagattatggcgtctgtaaacacactcttccaggccactcacattaccccctttccaatcatcatcattcaagaggagagcttgatctatcttttgcagccaggaaaacataggttgcacgtggatactggaatggagggagactggtgtggactgattcctgtgggacagccatgcatgcaagtgacgactaccggcttgaagtggaaccttcggacctgtgattacacgaggactacctggatagctaaagacaaccctgtccctcggctaatccgtctcatccgactgaaccacatctgtaaggtacccctcgcaatcaaatag

SEQ ID NO: 307052 - DNA, 375 bp, Artificial Sequence
  derived and/or modified sequence
atggtggatgtgattgtgaccctgggcggcctggccggccgctttgaccagatcatggcctctgtgaacaccctcttccaggccacccacatcacccccttccccatcatcatcatccaggaggagagcctcatctacctgctgcagcccgggaagcaccggctgcacgtggacaccggcatggagggggactggtgtggcctcatccctgtgggccagccctgcatgcaggtgaccaccaccggcctgaagtggaacctgcggacctgtgactacaccaggaccacctggatcgccaaggacaaccctgtgcccaggctcatccgcctcatccggctgaaccacatctgcaaggtgcccctggccatcaagtag

SEQ ID NO: 307053 - DNA, 375 bp, Artificial Sequence
  derived and/or modified sequence
atggtggacgtgatcgtgaccctgggcggcctggccggccggttcgatcagattatggccagcgtgaataccctgttccaggccacacacatcaccccgttccccatcataatcatacaagaggaaagccttatctacttactgcagcctggcaagcatcgcctgcacgtggacactggtatggaaggcgattggtgtggcctgatcccagtggggcagccttgcatgcaagttaccacaacagggctgaagtggaacttaagaacttgcgattacactaggactacctggatcgccaaggataaccctgtcccacgtctgatccggctgattcgactgaaccacatatgcaaggttccgctggcaatcaagtag

SEQ ID NO: 307054 - DNA, 375 bp, Artificial Sequence
  derived and/or modified sequence
atggtggacgtgatagtcacgctggggggtctggctggtcgcttcgaccaaattatggcttccgtgaacacgctcttccaggcgacacatatcacacccttcccgatcattataattcaggaggagagcttgatctacctcctccagccaggaaaacatcgtctccacgtagacactggaatggaaggggattggtgcgggctgattccggttggccagccgtgtatgcaggtgacaaccacagggcttaagtggaacttacggacatgcgactacacccgcactacatggatcgccaaggacaatccagtccccaggttgatccggttgatacggctgaaccacatttgcaaggtgcccctagcgatcaagtag

SEQ ID NO: 307055 - DNA, 2806 bp, Artificial Sequence
  derived and/or modified sequence
ggcagttaactgccaccaagtggtggttgtatgccatagctctgtaacatgaacagtgtttccaataaactgtccaccgcaaaacccgttaaaaaatgagtgagctccatgagctgaggagctagcagattgccgggattacaaagacaacgagacaggaccctttccttagcaggatttacaatctctcttttaagagcctgtgccgatggaggtgccaaccgcttatatgatatcaccgaaggagagagagaaagattcctctgacagtatcctccaagacctgacatggacaatgtgtgaaaaagcgctcaacctccaacttgaaactctcctcgaggcccccagccaccagtcatctcatcaggacaccgaaagacacccattactgtggagcttccaagggtcttggcaactcttttatcggaaacgagagctttttgcctgaattcatcaatggagactttgattctattaggcctgaagtcagagaatactatgctactaagggatgtgagctcatttcaactcctgatcaagaccacactgactttactaagtgccttaaaatgctccaaaagaagatagaagaaaaagacttaaagaagaaacagtgaaaggaatactgttcaattccaacatcagctgtgtaaccgaggcatcgtaatacttttatgacaagtttcactacctttttgcctgtgccagtgtacctcaaagggatatggttgatgtgatcgtgacactgggaggccttgctgggcgttttgaccagattatggcatctgtgaataccttgttccaagcgactcacatcactccttttccaattataataatccaagaggaatcgctgatctacctgctccaaccaggaaagcacaggttgcatgtagacactggaatggagggtgattggtgtggccttattcctgttggacagccttgtatgcaggttacaaccacaggcctcaagtggaacctcagaacttgtgactacactaggaccacctggatagccaaggataatcccgtcccaagactaatcagattaatcagacttaatcacatctgtaaagttcctcttgccatcaaatgatgtgcttgcttttggaacattggtcagtacttccaatacctacgacgggtctggtgttgtgactgtggaaactgaccacccactcctctggaccatggccatcaaaagctaacctgttgactggcatccataagtgtgcctctgccttatctcatttctcaacagttcattgctcaacaagaacgattcacctgggtttgcaagaatctaaacctctctaggggaagcccactgggtttaaagatgttagtgtttagataatacaggtaacattataaatgacagatctcaattttatagtagtgggaaagatacatgctaagaaagcaaataagctctattatattcggttggaacctaatgggaatcattccactatacaattcagtactgattattcttcttacattattaatcattccatttatcctagaaaattgtttttaatttgaatcagagaaaactgttgaggttcctcttggagtctagaacatccttaaatgtctaacaacaagggctacctctgagtaccttttagtattagttttctgtatatgatatatattatcttatactgaaaaaaaattcctttcagattggggtgttagaagtgcaccaggtcactctgaccttattactgtctttggtattgtcttaaataaatcaagaatcattgacctaattgttaaatttaaaaataggtagttagcaataggtggaaagagaaatgatgtgaaagataaatgatgattcgtggagccctactcacacattaacccccaaattcaaaagtaagaatgcaaaagtctagagggggtaacagtctgcatcatcatcacaacctaaatggagaaagctgtgcagaggaaacttaagcataaaaattgaattcgtttctgacataccttagactgaaaaactgttggttcatccagaagtgtattcatattaccagaaaatgagtttgtctatggggatacatgaacttcatatactaaggagcctaactccaaagcctgcgttctcatcccagtctgatattcacctaagtttccggacccttttccttagctgtaaaatggaagcggttggactgatggtgtctgaggttctttcccacactgaaattctaaatattgacacttagcagtcatagggctgataatacacacagttactgacttagcctaaacaacctggtgcatcgaaatgtattcacctttcttttgtaaagagaccatcttctatcttctttccacctttctctgttttatgaaaccaactgttgacatacaaaccatgattgaaggagaacctgtccaacatgttttatgtacacaaatccctatgttgctataagaaaagtgaaagtaactgttttcttcttggtgctatgacagtgtgagactcaggttgtctgtagagaatgaaaggagcagtggcccgcgtgattgtggcatttaaggagcagtggcccatgtgactgtggcattttcggcacttttcattactttctgcttgaccggaagttgaggcttagctatgtttccatcttcagtttctgaagactagttatatattccttactagaaatatattcataatatataaaagaaatatatctgtgattttaaaattttgctaccaaagaatgcatgttctgtgtgccctgaaaatgttaccagtgttaataaatggatacttatc

SEQ ID NO: 307056 - protein, 90 aa, Artificial Sequence
  derived and/or modified sequence
MDMFSLDMIISDPAAEASRAGKKQLRGVQNPCPSARARPRHKSLNIKDKISEWEGKKEVPTPAPSRRADGQEDYLPSSTVERRSSDGVRT

SEQ ID NO: 307057 - protein, 433 aa, Artificial Sequence
  derived and/or modified sequence
MCFSPILEINMQSESNITVRDDIDDINTNMYQPLSYPLSFQVSLTGFLMLEIVLGLGSNLTVLVLYCMKSNLINSVSNIITMNLHVLDVIICVGCIPLTIVILLLSLESNTALICCFHEACVSFASVSTAINVFAITLDRYDISVKPANRILTMGRAVMLMISIWIFSFFSFLIPFIEVNFFSLQSGNTWENKTLLCVSTNEYYTELGMYYHLLVQIPIFFFTVVVMLITYTKILQALNIRIGTRFSTGQKKKARKKKTISLTTQHEATDMSQSSGGRNVVFGVRTSVSVIIALRRAVKRHRERRERQKRVFRMSLLIISTFLLCWTPISVLNTTILCLGPSDLLVKLRLCFLVMAYGTTIFHPLLYAFTRQKFQKVLKSKMKKRVVSIVEADPLPNNAVIHNSWIDPKRNKKITFEDSEIREKCLVPQVVTD

SEQ ID NO: 307058 - DNA, 2936 bp, Artificial Sequence
  derived and/or modified sequence
attctgcaaaagctgcccgaacaggctttcctctgaaaagcagtgccgttcctttttagaaagactgaatctaaatgttgtctctggagacaagaagccttcagtatgttaaattactttcattatgtattttcagatgcttattgattccacagtaggaagagtgagagactgcagcagcctctaagcagcactacatgttccatacattagcagtactgctgaaacaatggcacactacagacacatattttcattaaggtcattttcgaagagatgtttatgaccctcttcccccagtcctctactaacaagtgaacaaaatgaatcaatccaaactggaaatgcttcaactacatcaagaatttatcaaatctttagcagagggccaatagcagctaattcagtatttacaactgacaatatgaagaatgcaattgactgagcatctccctagctgtctgaactacgaactgcaagatgttcttgtaacacgactttaagacattaaggagttaaaaccagggaataggtctacattactgatggaatataaaaaatcaactgtatcctaagaagatgctacataaaataaccacaaaaagaaaaacaatataactgtaaaagcctgaaaagaatttttaaaaggggaagtttatactttcatataccagaattgtggaagttactgattctggaagacataatgaaacatgaatttccaaaaagaaaagaaaatactttatcagcacacaaaaggaagatttaggaagtgttttctgcactaaatattcagatattcatatcaattggtatgactaatggatttttctatctgacttttatgaccaattatgtatcctcttctaatgaaaacaaacaaaattaaacagcagatggtttttatcaaaaggacatggcctggatttataatataaagcaagttatgtgatcaagaaatcatttcaaaatagtgagcactgctattaaaaacagatttacaatggtaacaaaaggatgtctaaatatattttagaagctacaaacgttatgtttccttttttgttttcacatattctggaaaataaagaaatattatcatgtactccatcaaagggaaacataattcctatcatctgaggaaattcctcttggccgtgactttttaaagcaaaacaaatacaaatattatgtactgttctttagaaatccatcagccaactaaatctcataatgcatgcagttgaagtattggagagaaaacgaaagaattcctacaagacatgaaataaaacacagctacttcactgttgtcagggaaaaaaaccaactgctccaaaagaatgtgtttttctcccattctggaaatcaacatgcagtctgaatctaacattacagtgcgagatgacattgatgacatcaacaccaatatgtaccaaccactatcatatccgttaagctttcaagtgtctctcaccggatttcttatgttagaaattgtgttgggacttggcagcaacctcactgtattggtactttactgcatgaaatccaacttaatcaactctgtcagtaacattattacaatgaatcttcatgtacttgatgtaataatttgtgtgggatgtattcctctaactatagttatccttctgctttcactggagagtaacactgctctcatttgctgtttccatgaggcttgtgtatcttttgcaagtgtctcaacagcaatcaacgtttttgctatcactttggacagatatgacatctctgtaaaacctgcaaaccgaattctgacaatgggcagagctgtaatgttaatgatatccatttggattttttcttttttctctttcctgattccttttattgaggtaaattttttcagtcttcaaagtggaaatacctgggaaaacaagacacttttatgtgtcagtacaaatgaatactacactgaactgggaatgtattatcacctgttagtacagatcccaatattctttttcactgttgtagtaatgttaatcacatacaccaaaatacttcaggctcttaatattcgaataggcacaagattttcaacagggcagaagaagaaagcaagaaagaaaaagacaatttctctaaccacacaacatgaggctacagacatgtcacaaagcagtggtgggagaaatgtagtctttggtgtaagaacttcagtttctgtaataattgccctccggcgagctgtgaaacgacaccgtgaacgacgagaaagacaaaagagagtcttcaggatgtctttattgattatttctacatttcttctctgctggacaccaatttctgttttaaataccaccattttatgtttaggcccaagtgaccttttagtaaaattaagattgtgttttttagtcatggcttatggaacaactatatttcaccctctattatatgcattcactagacaaaaatttcaaaaggtcttgaaaagtaaaatgaaaaagcgagttgtttctatagtagaagctgatcccctgcctaataatgctgtaatacacaactcttggatagatcctaaaagaaacaaaaaaattacctttgaagatagtgaaataagagaaaaatgtttagtgcctcaggttgtcacagactagagaaaagtctcagtttcaccaaatccacattcaaatgagttttaaatttaaattgtaaaaactgatattactgccaaatataagaaaaatattttaagtattggttatgttgtaaattttcaatgtgaatgtcaattagataggtcatatatattcaatttcttcattacttaatgtatttgttgcatggcagtttgttaaagtactatcatgtgtatattttgtcaatattatgtccaacagaaaatattcatgtaagtcatattttttaaggaataaatacatagcctt

SEQ ID NO: 307059 - DNA, 1302 bp, Artificial Sequence
  derived and/or modified sequence
atgtgcttcagcccaatcctcgagataaatatgcagagcgagtcaaatataacggttcgcgatgacatcgatgacattaatacaaatatgtaccagcccctctcatacccactgagcttccaggtttcgcttactggttttcttatgctggagatcgttttgggacttggttcaaatctaaccgtcttggtgttgtactgtatgaagagtaaccttatcaactcagtgtcaaatatcatcacgatgaacctccacgtgctcgatgtcattatctgcgtaggatgtattccactgaccatcgtgatcttactcctgtcactggagtccaacaccgcactgatttgttgcttccatgaagcctgtgtttccttcgcctctgtgtctactgcaatcaatgtgtttgctatcacgcttgatcgctacgacatttccgtgaaacccgctaacaggatattgacgatgggacgggccgtgatgttgatgatctcaatctggattttttcctttttcagctttctgattccatttatcgaagtaaacttcttcagcctgcagtcagggaacacctgggagaacaagacactgctgtgtgtgagtacgaatgagtattataccgaacttggcatgtattaccatcttctagtacagatcccgatcttctttttcaccgttgttgtgatgctgattacctacacgaaaattctgcaggcactgaatatccgcattggtactaggttcagcaccggacagaagaagaaagcccgaaaaaagaagacaatctctctaaccacacagcatgaagccacggacatgagccagagttctgggggtcgcaacgtcgtctttggtgttaggacatccgtttccgttatcatcgccttgagacgggcagtcaaacgtcaccgcgagcggagggagagacagaaacgggtgttcaggatgtcacttctcatcatttccacatttctactgtgctggacccccattagcgtgctaaacacaacaattctgtgcctcggcccctccgacctgttggtaaagcttcgcctgtgctttcttgtcatggcctatggcacaaccatattccacccccttctgtatgcatttactaggcagaagttccaaaaagtgctcaagtctaagatgaagaagcgcgtggtttccatcgtggaggccgatccactgcccaacaatgcagtgatacataattcatggattgaccccaagcgtaacaaaaagattacgttcgaggactcggagattcgtgaaaagtgcttagtaccacaggtggtgacagactag

SEQ ID NO: 307060 - DNA, 1302 bp, Artificial Sequence
  derived and/or modified sequence
atgtgcttcagccccatcctggagatcaacatgcagagcgagagcaacatcaccgtgagagatgacattgatgacatcaacaccaacatgtaccagcccctgagctaccccctgtccttccaggtgtccctgaccggcttcctgatgctggagatcgtgctgggcctgggcagcaacctgactgtgctggtgctgtactgcatgaagagcaacctgatcaacagcgtgagcaacatcatcaccatgaacctgcacgtgctggatgtgatcatctgtgtgggctgcatccccctgaccatcgtcatcctgctgctgagcctggagagcaacacagccctgatctgctgcttccacgaggcctgtgtgtcctttgcctctgtgtccacagccatcaacgtgtttgccatcaccctggacagatatgacatctctgtgaagccagccaaccgcatcctgaccatgggccgggctgtgatgctgatgatcagcatctggatcttctccttcttctccttcctgatccccttcatcgaggtgaacttcttcagcctgcagagcggcaacacctgggagaacaagaccctgctgtgtgtgtccaccaatgagtactacacagagctgggcatgtactaccacctgctggtgcagatccccatcttcttcttcaccgtggtggtgatgctgatcacctacaccaagatcctgcaggccctgaacatccgcatcggcacccgcttcagcacaggccagaagaagaaggccaggaagaagaagaccatcagcctgaccacccagcacgaggccacagacatgagccagagcagcggcggcagaaatgtggtgtttggagtgaggacctctgtgtctgtcatcatcgccctgcggcgggctgtgaagaggcaccgggagcggcgggagcggcagaagagggtcttcaggatgagcctgctgatcatcagcaccttcctgctgtgctggacccccatctctgtgctgaacaccaccatcctgtgcctgggccccagcgacctgctggtgaagctgcggctgtgcttcctggtgatggcctacggcaccaccatcttccaccccctgctgtatgccttcacccggcagaagttccagaaggtgctgaagagcaagatgaagaagagggtggtgtccatcgtggaggccgaccccctgcccaacaatgctgtgatccacaacagctggattgaccccaagaggaacaagaagatcacctttgaagattctgagatccgggagaagtgcctggtgccccaggtggtgacagactag

SEQ ID NO: 307061 - DNA, 1302 bp, Artificial Sequence
  derived and/or modified sequence
atgtgcttcagccccatcctggagatcaacatgcagagcgagagcaatattacagtgcgggacgatattgacgacatcaatacgaatatgtaccagcctttgagctacccgctgtctttccaggtgtctctgactggttttttgatgctcgagatcgttcttggcctagggagtaacctgacagtgctagtattatattgcatgaagtccaacctcatcaacagcgtgagcaatatcattaccatgaatctgcatgtcctcgatgtcatcatttgtgtcggatgcattcctctcacaattgttatcttactactctctctagagtccaatacagcccttatctgttgtttccacgaagcgtgcgtatccttcgcttctgtgtcgactgccattaatgtcttcgcaatcaccctcgatagatacgacatctccgtaaagcccgccaatcgcattctgaccatgggcagagcagtgatgttgatgatcagtatctggattttttccttttttagctttttaatcccattcatcgaggtgaactttttttccctccaatccggcaatacatgggagaacaaaacactcttgtgtgtgtccacaaacgagtactatacagaattgggcatgtactaccacctgcttgtgcagattcctatcttcttttttacagttgtagtaatgctcataacatacacgaagatcctgcaggcacttaatatacgaattggcactcggtttagtaccgggcagaagaaaaaagctagaaagaagaaaaccatttccctgactacacaacacgaggccacagatatgagtcagtcatctggcggcaggaatgttgtcttcggagtgcggacctctgtcagcgttatcatcgctctccgacgggccgtgaaacgccaccgcgaacggcgtgagcgacagaagagagttttcagaatgtctctactgatcatctctactttcctcctttgctggaccccgattagcgtgctgaatacgactatcctgtgtcttggcccttctgatctgctggtcaaactcaggctgtgttttttagttatggcatatggtaccactattttccatcccctactctacgcttttactagacagaagttccagaaagtgctgaaatcaaaaatgaagaagcgcgtggtcagtattgtggaggctgacccactccctaataatgccgtcatccacaactcttggattgatcctaaacggaataaaaagataacttttgaggattccgagatccgcgagaaatgcctggtgccccaggtagtcactgactag

SEQ ID NO: 307062 - DNA, 1302 bp, Artificial Sequence
  derived and/or modified sequence
atgtgcttctccccaattctagagatcaatatgcagtctgaaagtaacatcacagttagggatgacattgacgacattaacacaaacatgtatcaacctctgtcataccccttgtcttttcaggtgtccctgaccggctttctgatgctggaaatcgttcttggtcttgggtctaaccttacagtactagtcctgtactgcatgaagtccaacctcatcaattctgtgtccaacattattaccatgaatttgcatgtgctggacgttataatctgtgtagggtgcatccctctaacgattgtcatcctcctgctcagcttagagtctaacaccgcactcatttgctgttttcacgaagcgtgtgtgagtttcgcatccgtatcgactgccattaacgtcttcgccatcaccttggatcgctacgatatctctgtgaagcctgcgaaccgtatcttgaccatggggcgagctgtgatgcttatgatctccatttggatattttcctttttctcgttcctgatcccctttatcgaggtcaacttcttcagtctgcagtctgggaacacctgggagaacaagacgctgctgtgtgtttctactaatgaatattatacggaactgggcatgtattatcacctgcttgtgcagatcccaatttttttcttcacggtggtagtgatgctcattacttacaccaagattttacaggcattgaatattagaattgggactcgattctccactggtcaaaagaaaaaagccagaaaaaaaaagacaatcagtttaactactcagcacgaggccaccgatatgtcacaatctagcgggggaagaaacgtggtctttggggtgcgcacgagcgtctccgttatcatagctctgcgacgagctgtaaaaagacatagggaacgacgagagcgtcagaagcgggtctttcgaatgtctctgctgataatttcaacatttctgctttgctggacccctatatccgtcttaaatacaaccattctgtgtctgggacccagtgacctcctcgtaaaactgcgactgtgctttctcgtaatggcatacggtactaccatcttccatccgctgttgtatgcttttactaggcaaaaattccagaaggtcctgaagagcaaaatgaagaagcgtgtcgtgagtatcgttgaggccgatccactgccgaataacgccgtcatccacaatagttggattgacccaaagagaaataaaaaaatcaccttcgaggatagcgagatccgggagaagtgcctggtgccacaagtcgtcacggactag

SEQ ID NO: 307063 - DNA, 1302 bp, Artificial Sequence
  derived and/or modified sequence
atgtgcttcagccccatcctggagatcaacatgcagagcgagagcaacatcaccgtgagagacgacatcgacgacatcaacaccaacatgtaccagcccctgagctaccccctgagcttccaggtgagcctgaccggcttcctgatgctggagatcgtgctgggcctgggcagcaacctgaccgtgctggtgctgtactgcatgaagagcaacctgatcaacagcgtgagcaacatcatcaccatgaacctgcacgtgctggacgtgatcatctgcgtgggctgcatccccctgaccatcgtgatcctgctgctgagcctggagagcaacaccgccctgatctgctgcttccacgaggcctgcgtgagcttcgccagcgtgagcaccgccatcaacgtgttcgccatcaccctggacagatacgacatcagcgtgaagcccgccaacagaatcctgaccatgggcagagccgtgatgctgatgatcagcatctggatcttcagcttcttcagcttcctgatccccttcatcgaggtgaacttcttcagcctgcagagcggcaacacctgggagaacaagaccctgctgtgcgtgagcaccaacgagtactacaccgagctgggcatgtactaccacctgctggtgcagatccccatcttcttcttcaccgtggtggtgatgctgatcacctacaccaagatcctgcaggccctgaacatcagaatcggcaccagattcagcaccggccagaagaagaaggccagaaagaagaagaccatcagcctgaccacccagcacgaggccaccgacatgagccagagcagcggcggcagaaacgtggtgttcggcgtgagaaccagcgtgagcgtgatcatcgccctgagaagagccgtgaagagacacagagagagaagagagagacagaagagagtgttcagaatgagcctgctgatcatcagcaccttcctgctgtgctggacccccatcagcgtgctgaacaccaccatcctgtgcctgggccccagcgacctgctggtgaagctgagactgtgcttcctggtgatggcctacggcaccaccatcttccaccccctgctgtacgccttcaccagacagaagttccagaaggtgctgaagagcaagatgaagaagagagtggtgagcatcgtggaggccgaccccctgcccaacaacgccgtgatccacaacagctggatcgaccccaagagaaacaagaagatcaccttcgaggacagcgagatcagagagaagtgcctggtgccccaggtggtgaccgactag

SEQ ID NO: 307064 - protein, 535 aa, Artificial Sequence
  derived and/or modified sequence
MLTRLQVLTLALFSKGFLLSLGDHNFLRREIKIEGDLVLGGLFPINEKGTGTEECGRINEDRGIQRLEAMLFAIDEINKDDYLLPGVKLGVHILDTCSRDTYALEQSLEFVRASLTKVDEAEYMCPDGSYAIQENIPLLIAGVIGGSYSSVSIQVANLLRLFQIPQISYASTSAKLSDKSRYDYFARTVPPDFYQAKAMAEILRFFNWTYVSTVASEGDYGETGIEAFEQEARLRNICIATAEKVGRSNIRKSYDSVIRELLQKPNARVVVLFMRSDDSRELIAAASRANASFTWVASDGWGAQESIIKGSEHVAYGAITLELASQPVRQFDRYFQSLNPYNNHRNPWFRDFWEQKFQCSLQNKRNHRRVCDKHLAIDSSNYEQESKIMFVVNAVYAMAHALHKMQRTLCPNTTKLCDAMKILDGKKLYKDYLLKINFTGADDNHVHLCQPEWLCGLGLFVCTQGSHHPVSTPEECCHTQTAPQQVQCQWNWDHILSVLCKHVCANGVQWAGSPRLHHLISVIVNCSSVLVFLDC

SEQ ID NO: 307065 - protein, 537 aa, Artificial Sequence
  derived and/or modified sequence
MKMLTRLQVLTLALFSKGFLLSLGDHNFLRREIKIEGDLVLGGLFPINEKGTGTEECGRINEDRGIQRLEAMLFAIDEINKDDYLLPGVKLGVHILDTCSRDTYALEQSLEFVRASLTKVDEAEYMCPDGSYAIQENIPLLIAGVIGGSYSSVSIQVANLLRLFQIPQISYASTSAKLSDKSRYDYFARTVPPDFYQAKAMAEILRFFNWTYVSTVASEGDYGETGIEAFEQEARLRNICIATAEKVGRSNIRKSYDSVIRELLQKPNARVVVLFMRSDDSRELIAAASRANASFTWVASDGWGAQESIIKGSEHVAYGAITLELASQPVRQFDRYFQSLNPYNNHRNPWFRDFWEQKFQCSLQNKRNHRRVCDKHLAIDSSNYEQESKIMFVVNAVYAMAHALHKMQRTLCPNTTKLCDAMKILDGKKLYKDYLLKINFTGADDNHVHLCQPEWLCGLGLFVCTQGSHHPVSTPEECCHTQTAPQQVQCQWNWDHILSVLCKHVCANGVQWAGSPRLHHLISVIVNCSSVLVFLDC

SEQ ID NO: 307066 - protein, 81 aa, Artificial Sequence
  derived and/or modified sequence
MKMLTRLQVLTLALFSKGFLLSLGDHNFLRREIKIEGDLVLGGLFPINEKGTGTEECGRINEDRGIQRLEAMLFAIDEINK

SEQ ID NO: 307067 - DNA, 1608 bp, Artificial Sequence
  derived and/or modified sequence
atgctgacccgcctacaggtcctcacactggcgttgttttcaaaagggttcctcctaagtctcggggaccacaactttctacgccgcgaaataaaaatagagggagacttagttctggggggactgtttcccatcaatgaaaagggtaccgggacggaagagtgtgggcggattaacgaggatagaggcattcagagactcgaggctatgctgttcgccatcgatgaaatcaacaaggatgactatttgctgcccggcgtgaaattgggtgtccacatcctcgatacctgttcccgcgacacatatgcattggagcagtctcttgagttcgtgagggcatccctgacaaaagtggatgaagctgagtacatgtgcccagacggcagctacgcgatacaggagaacatcccgttgcttatcgcgggcgtgatcggcggttcgtattcctctgtgagtatacaagtggccaacctgctcagactcttccagattccgcagatctcctacgccagcacttcagcgaaactgagcgacaagagccgttatgactacttcgctagaacagttccgcccgatttctaccaagccaaagccatggcagagatcttacggttcttcaactggacgtatgtgtctactgtcgccagcgaaggtgattacggagaaacgggaatcgaggcatttgagcaggaggcccggctccggaatatttgcattgcgacagcggaaaaagtgggcaggtctaatattcgcaagagttacgattcagttatcagggagctcttgcagaagcccaatgccagggttgtcgtattgtttatgagaagcgacgatagtagggagcttattgcagccgccagtcgcgccaacgccagcttcacctgggtggcatcagacgggtggggagcgcaggagagcatcattaagggtagcgaacacgtcgcctacggtgccatcaccttggagttggcaagccagcccgttcggcagttcgatagatactttcagagtcttaatccttacaataatcatcgcaatccctggttccgagacttttgggagcagaagttccagtgcagtttgcagaataagcgtaaccatagacgtgtttgcgacaaacatctggcaatcgacagctccaactatgagcaggagtcaaaaatcatgtttgttgtgaatgctgtgtatgccatggctcatgccctccataaaatgcagcgaacactttgccccaacactactaagctctgcgacgctatgaagatcctcgatggcaagaagctgtacaaagactatcttttaaagatcaacttcacaggagctgatgacaatcatgtccatctgtgccaacccgagtggctatgtggactgggcctctttgtgtgtacccagggcagccaccatccagtctctaccccggaggaatgttgtcatacccaaacggccccccagcaggtacaatgccagtggaactgggaccatatactctctgtcctttgtaaacatgtgtgtgccaacggtgttcaatgggccggaagtccgagactgcaccacttaatttctgtcattgttaattgcagcagcgtccttgtttttttggactgctag

SEQ ID NO: 307068 - DNA, 1614 bp, Artificial Sequence
  derived and/or modified sequence
atgaagatgttgacacgcctgcaggtgcttactttggccctcttcagcaagggtttccttctgagtctgggcgaccacaactttctgagacgagaaatcaaaatagagggcgaccttgtcctcggaggcttatttcctatcaatgagaaaggaacgggtaccgaggagtgtggcaggattaacgaggaccgcggtattcagaggttggaagccatgctcttcgctattgatgaaattaacaaagatgactatttactgccaggagtcaagcttggcgtgcacatcctggacacctgctcccgggacacatatgcactggaacagtccctggaattcgtgcgggcctccttaactaaggtagacgaggccgagtatatgtgccccgacggatcgtatgctatccaggagaatatacccctgctgatagctggggtcatcggcggttcatacagcagcgttagtatacaggtagccaacctcctgcggctttttcagatcccccagatttcatacgcaagtacctccgctaagcttagcgacaaaagccggtatgactatttcgctcggactgtgccaccagatttctaccaggcaaaggcaatggctgagatcctacgcttctttaactggacttatgtgtccacagtggcttcggaaggcgattacggcgagactggcatcgaagctttcgagcaggaggcacgcctgcgaaacatttgcattgccaccgcggaaaaggtcggtcgtagcaatataaggaaatcgtacgattcagtcatcagagagctgctgcaaaagcccaacgctcgagtcgtggtactttttatgcgttccgacgatagcagggaattgatcgctgctgctagccgggccaatgcctcgtttacctgggttgcctcagatggctggggggcccaggaatctatcattaaaggcagtgaacatgtggcttacggtgctatcacccttgagctagcctcacagcccgttagacagtttgacagatacttccagtcactgaacccctataacaaccaccgcaatccctggtttcgcgacttctgggaacagaaattccagtgctcccttcagaataagcggaaccatagacgggtttgcgacaaacatcttgccatagattctagcaactacgagcaggagtctaaaattatgtttgtcgtgaacgccgtgtacgctatggctcatgccctgcataagatgcagaggacactgtgtccgaatactaccaagctgtgcgacgccatgaagattttggatgggaagaaactgtataaggactatttactgaaaattaatttcacaggggcggacgacaaccacgtccatctctgccagcccgagtggctgtgcgggctgggcttgttcgtctgcacacaagggtctcatcacccagtgagcacacccgaagaatgctgtcatacccagaccgcaccccagcaagtacaatgtcagtggaattgggaccacatcctgtccgtcttgtgtaaacatgtatgcgcaaacggcgtgcagtgggcgggcagtccccgtctgcaccatttgatttcagtgattgtcaattgttcttccgtgctcgtgttcctcgattgttag

SEQ ID NO: 307069 - DNA, 1811 bp, Artificial Sequence
  derived and/or modified sequence
tccagttcctgccaggagttgtcggtgcgaggaattttgtgacaggctctgttagtctgttcctcccttatttgaaggacaggccaaagatccagtttggaaatgagagaggactagcatgacacattggctccaccattgatatctcccagaggtacagaaacaggattcatgaagatgttgacaagactgcaagttcttaccttagctttgttttcaaagggatttttactctctttaggggaccataactttctaaggagagagattaaaatagaaggtgaccttgttttagggggcctgtttcctattaacgaaaaaggcactggaactgaagaatgtgggcgaatcaatgaagaccgagggattcaacgcctggaagccatgttgtttgctattgatgaaatcaacaaagatgattacttgctaccaggagtgaagttgggtgttcacattttggatacatgttcaagggatacctatgcattggagcaatcactggagtttgtcagggcatctttgacaaaagtggatgaagctgagtatatgtgtcctgatggatcctatgccattcaagaaaacatcccacttctcattgcaggggtcattggtggctcttatagcagtgtttccatacaggtggcaaacctgctgcggctcttccagatccctcagatcagctacgcatccaccagcgccaaactcagtgataagtcgcgctatgattactttgccaggaccgtgccccccgacttctaccaggccaaagccatggctgagatcttgcgcttcttcaactggacctacgtgtccacagtagcctccgagggtgattacggggagacagggatcgaggccttcgagcaggaagcccgcctgcgcaacatctgcatcgctacggcggagaaggtgggccgctccaacatccgcaagtcctacgacagcgtgatccgagaactgttgcagaagcccaacgcgcgcgtcgtggtcctcttcatgcgcagcgacgactcgcgggagctcattgcagccgccagccgcgccaatgcctccttcacctgggtggccagcgacggctggggcgcgcaggagagcatcatcaagggcagcgagcatgtggcctacggcgccatcaccctggagctggcctcccagcctgtccgccagttcgaccgctacttccagagcctcaacccctacaacaaccaccgcaacccctggttccgggacttctgggagcaaaagtttcagtgcagcctccagaacaaacgcaaccacaggcgcgtctgcgacaagcacctggccatcgacagcagcaactacgagcaagagtccaagatcatgtttgtggtgaacgcggtgtatgccatggcccacgctttgcacaaaatgcagcgcaccctctgtcccaacactaccaagctttgtgatgctatgaagatcctggatgggaagaagttgtacaaggattacttgctgaaaatcaacttcacgggtgcagacgacaaccatgtgcatctctgtcagcctgagtggctttgtggtcttgggctgtttgtttgcacccaaggttcacatcatcctgtttcaaccccagaagaatgttgtcacacacagactgcacctcaacaggttcagtgtcagtggaactgggaccacatactctcagtcctctgcaagcacgtatgtgccaacggtgtgcaatgggcgggaagtcctcgactccaccacctcatctctgtgattgtgaattgcagttcagttcttgtgtttttagactgttagacaaaagtgctcacgtgcagctccag

SEQ ID NO: 307070 - DNA, 1608 bp, Artificial Sequence
  derived and/or modified sequence
atgctgacccggctgcaggtgctgaccctggccctcttcagcaagggcttcctgctgagcctgggggaccacaacttcctgcggcgggagatcaagattgaaggagacctggtgctgggcggcctcttccccatcaatgagaagggcaccggcacagaggagtgtggccgcatcaatgaagatcggggcatccagaggctggaggccatgctgtttgccattgatgagatcaacaaggatgactacctgctgcccggggtgaagctgggcgtgcacatcctggacacctgcagccgggacacctacgccctggagcagagcctggagtttgtgcgggccagcctgaccaaggtggatgaagctgagtacatgtgcccagatggcagctatgccatccaggagaacatccccctgctgattgctggggtcatcggcggcagctacagctctgtgtccatccaggtggccaacctgctgcggctcttccagatcccccagatctcctatgccagcaccagcgccaagctgagtgacaagagccgctatgactactttgccaggacagtgcccccagacttctaccaggccaaggccatggccgagatcctgcgcttcttcaactggacctacgtgtccacagtggccagcgagggggactatggagaaacaggaattgaggcctttgagcaggaggcccggctgaggaacatctgcatcgccacagctgagaaggtgggccgcagcaacatcaggaagagctatgacagcgtcatccgggagctgctgcagaagcccaatgcccgggtggtggtgctcttcatgagaagtgatgacagccgggagctgattgctgctgccagccgggccaatgccagcttcacctgggtggccagtgatggctggggcgcccaggagagcatcatcaagggcagcgagcacgtggcctacggggccatcaccctggagctggccagccagcctgtgcggcagtttgaccgctacttccagagcctgaacccctacaacaaccacaggaacccctggttccgggacttctgggagcagaagttccagtgcagcctgcagaacaagaggaaccaccggcgggtgtgtgacaagcacctggccatcgacagcagcaactatgagcaggagagcaagatcatgtttgtggtgaatgctgtgtatgccatggcccacgccctgcacaagatgcagaggaccctgtgccccaacaccaccaagctgtgtgatgccatgaagatcctggatggcaagaagctgtacaaggactacctgctgaagatcaacttcaccggggctgatgacaaccacgtgcacctgtgccagcctgagtggctgtgtggcctgggcctgtttgtgtgcacccagggcagccaccaccctgtgtccaccccagaggagtgctgccacacccagacagccccccagcaggtgcagtgccagtggaactgggaccacatcctgtctgtgctgtgcaagcacgtgtgtgccaacggggtgcagtgggccggcagcccccggctgcaccacctgatctctgtgattgtgaactgcagctctgtgctggtgttcctggactgctag

SEQ ID NO: 307071 - DNA, 1614 bp, Artificial Sequence
  derived and/or modified sequence
atgaagatgctgacccggctgcaggtgctgaccctggccctcttcagcaagggcttcctgctgagcctgggggaccacaacttcctgcggcgggagatcaagattgaaggagacctggtgctgggcggcctcttccccatcaatgagaagggcaccggcacagaggagtgtggccgcatcaatgaagatcggggcatccagaggctggaggccatgctgtttgccattgatgagatcaacaaggatgactacctgctgcccggggtgaagctgggcgtgcacatcctggacacctgcagccgggacacctacgccctggagcagagcctggagtttgtgcgggccagcctgaccaaggtggatgaagctgagtacatgtgcccagatggcagctatgccatccaggagaacatccccctgctgattgctggggtcatcggcggcagctacagctctgtgtccatccaggtggccaacctgctgcggctcttccagatcccccagatctcctatgccagcaccagcgccaagctgagtgacaagagccgctatgactactttgccaggacagtgcccccagacttctaccaggccaaggccatggccgagatcctgcgcttcttcaactggacctacgtgtccacagtggccagcgagggggactatggagaaacaggaattgaggcctttgagcaggaggcccggctgaggaacatctgcatcgccacagctgagaaggtgggccgcagcaacatcaggaagagctatgacagcgtcatccgggagctgctgcagaagcccaatgcccgggtggtggtgctcttcatgagaagtgatgacagccgggagctgattgctgctgccagccgggccaatgccagcttcacctgggtggccagtgatggctggggcgcccaggagagcatcatcaagggcagcgagcacgtggcctacggggccatcaccctggagctggccagccagcctgtgcggcagtttgaccgctacttccagagcctgaacccctacaacaaccacaggaacccctggttccgggacttctgggagcagaagttccagtgcagcctgcagaacaagaggaaccaccggcgggtgtgtgacaagcacctggccatcgacagcagcaactatgagcaggagagcaagatcatgtttgtggtgaatgctgtgtatgccatggcccacgccctgcacaagatgcagaggaccctgtgccccaacaccaccaagctgtgtgatgccatgaagatcctggatggcaagaagctgtacaaggactacctgctgaagatcaacttcaccggggctgatgacaaccacgtgcacctgtgccagcctgagtggctgtgtggcctgggcctgtttgtgtgcacccagggcagccaccaccctgtgtccaccccagaggagtgctgccacacccagacagccccccagcaggtgcagtgccagtggaactgggaccacatcctgtctgtgctgtgcaagcacgtgtgtgccaacggggtgcagtgggccggcagcccccggctgcaccacctgatctctgtgattgtgaactgcagctctgtgctggtgttcctggactgctag

SEQ ID NO: 307072 - DNA, 1608 bp, Artificial Sequence
  derived and/or modified sequence
atgctgacccggctgcaggtgctgaccctggccctgttcagcaagggttttctgctgtccctgggcgatcataacttcctgcgtagagaaatcaagatcgagggagatctggtattaggtggactatttcctatcaatgagaagggcacaggtaccgaggagtgtggaagaatcaatgaggataggggtatccagcgactcgaagccatgttgttcgcaattgatgaaattaataaggacgattatctcctccccggcgtgaaactgggagtgcatattctggacacgtgcagcagagatacgtacgccttagaacagtccctggaatttgtccgggcatcattgacaaaagtggatgaagccgagtatatgtgccctgacggtagctacgcaattcaggagaatatccctctgctaatcgcgggagtcatcggaggaagctatagcagcgtgtcaattcaggtggctaaccttctccgtcttttccagatcccccaaatttcctacgcgagcacttctgcaaaactgtctgacaagtctaggtatgactacttcgcaaggactgtaccccccgatttctaccaagcaaaagctatggccgagatccttaggttcttcaattggacctacgtctctactgtggcttccgaaggcgactatggtgagacaggtattgaggcctttgaacaggaggcacgtcttcgaaatatttgtattgctactgcagagaaggtgggccgtagcaatatccgaaagtcttacgacagtgttatccgtgagttattgcagaaaccgaatgctagggtcgtcgtgttgtttatgaggtcagatgattcccgcgagctgatcgccgctgctagcagagctaacgcctccttcacatgggtggccagcgatggctggggcgcccaagagtctatcataaaagggtcagagcacgtggcctacggtgccatcacccttgagctggctagtcagcctgtgagacagtttgacaggtacttccagtcgctgaacccctacaataatcatagaaatccctggttcagagatttctgggagcagaagttccagtgctcattgcaaaacaaaaggaaccatagaagagtctgcgacaaacacctggccatagactcctctaattatgagcaggaaagtaaaattatgtttgtcgtgaatgctgtgtatgccatggctcacgccctgcacaagatgcagaggaccctttgtcctaacactaccaagctctgtgatgcaatgaaaatattagatggaaagaaactctacaaggattacttgctgaaaatcaatttcaccggggccgatgataatcacgttcacctgtgccagcctgagtggctgtgcggtctgggcttgtttgtctgtacccaggggagtcaccatcctgtctcaacacccgaggagtgctgccacactcaaacggccccgcagcaagtacagtgccagtggaattgggaccatatcctgagtgtcttgtgtaaacacgtctgtgcaaacggtgttcagtgggcaggcagtccgaggctgcaccacctgattagcgtcatcgtgaactgtagttccgtgctagtgttcctggactgttag

SEQ ID NO: 307073 - DNA, 1614 bp, Artificial Sequence
  derived and/or modified sequence
atgaagatgctgacccggctgcaggtgctgaccctggccctgttctccaaaggattccttctgtccctgggtgaccacaacttcctccggcgcgaaatcaaaatcgaaggggacctagtgctgggaggattgtttcccatcaatgagaagggcaccgggaccgaggaatgtggccgcatcaatgaagatcgggggatccagcgcttggaggctatgctgtttgcgatcgatgagattaataaggacgactacttattacccggcgtgaagttaggagtgcacatcctcgatacttgctcccgtgatacttatgccctggaacaatccctggaattcgtgcgtgcgagcctgacaaaagtagatgaggcggagtatatgtgtcctgatggttcttacgccatacaggaaaacatccccctcctaattgctggcgtcattggagggagttacagttcagtgtctatccaggtggctaatttacttcgactgtttcagatccctcagatctcttacgcctctacatcggcgaaactatccgataagagccgttatgactacttcgccaggaccgtgccacctgacttttaccaagccaaagcaatggccgagatccttaggtttttcaactggacctatgtgagtacagtggctagcgaaggcgattatggggagacagggattgaggctttcgagcaggaagcccgcctgcggaacatctgcatcgccactgctgagaaggtggggagatctaacatcagaaagtcctatgactcggttatcagagaactcttgcaaaagccaaacgctcgagtggtggtgctcttcatgcgtagcgacgacagtagagaactgatagcagccgcgtcgagggcaaacgcctcctttacatgggttgcatcagacggttggggggcccaggagagtattatcaaagggtccgagcatgtagcctatggggccataaccctcgagctcgccagccaacctgtacgacagttcgatcgctattttcagtccttgaacccctataataaccatcgaaacccgtggttcagggatttttgggagcagaagtttcaatgttcgctgcagaataaaaggaaccaccgccgtgtttgcgataagcatctcgccatcgattcttcaaattacgagcaagagtccaagataatgtttgtcgtgaatgcagtatatgccatggcacatgccctgcacaaaatgcagagaaccttgtgtcctaacaccactaaactgtgcgacgctatgaaaattctcgatggtaagaagctgtacaaggattatctactgaaaattaacttcaccggcgccgacgataaccacgtgcatttgtgccaacccgaatggctctgtggcctcggactctttgtatgcacccaaggctctcaccatcctgtctccacgccagaggagtgctgtcacacacagaccgccccccagcaggtacagtgccaatggaattgggatcatatcctgtccgtgctgtgcaagcacgtgtgcgcaaacggggtccaatgggccggatcccctagactccaccacctaataagcgtgattgtcaattgctccagcgtgctcgtctttctggactgttag

SEQ ID NO: 307074 - DNA, 1608 bp, Artificial Sequence
  derived and/or modified sequence
atgctgaccagactccaagtgctgacactcgccctgtttagcaagggatttcttttaagtctgggggaccataacttcctccggcgagaaattaagatagaaggtgacctcgtgcttggaggccttttccccatcaacgagaaggggactggaacagaagagtgcgggaggatcaatgaggatagggggatccagcgtctggaggctatgctgtttgctatagacgaaattaataaagacgattaccttcttccaggcgtgaaactcggtgtgcatattcttgacacttgttccagagatacatacgccctcgagcagtcgcttgagtttgtaagggccagtttaacaaaagtggatgaagcagagtatatgtgccctgatggatcatacgcaatacaggaaaatatcccattactgatagctggggtgattggaggctcctattcaagtgtttccattcaggtcgccaacttgttgaggctttttcaaatcccgcagatctcgtacgcatcaacttctgccaaactgtctgataagagtaggtatgattatttcgccaggaccgtgccacctgatttctaccaggcaaaggcgatggctgagatactaagattcttcaactggacctacgtctctactgtggcttctgaaggagactatggagaaactggaatagaagcctttgaacaggaggctaggttgagaaacatttgcatcgctaccgctgagaaggtgggaagaagcaacatccgaaagagttatgactcagttattagagagctgctgcaaaagcctaacgccagagtggtggttttattcatgcggtccgacgactccagagagctcattgccgctgcttcaagggcaaacgcttcattcacgtgggtggcctctgacggatggggggctcaggagtccatcattaagggctccgaacacgttgcttatggggctataaccttggagctggccagtcagccagtgcgacagttcgatcggtacttccagtcactcaacccatataacaaccacaggaatccgtggtttcgcgacttctgggagcagaaatttcagtgctccttgcagaataaaaggaatcatcgccgagtgtgcgacaagcatctcgccattgacagtagcaattacgaacaggaatccaagattatgttcgtggtgaacgctgtctacgccatggcacacgcgctccacaagatgcagaggactttgtgcccaaacaccaccaagttgtgcgacgctatgaagatcttggatggaaaaaagctttataaagattatctgttaaagattaatttcactggcgctgatgacaaccatgttcacctgtgccagccagagtggctgtgcggactcgggttattcgtttgtacccaggggagtcatcatcccgtttctacccccgaggagtgttgccatacacagacggcaccgcagcaggtgcagtgccagtggaactgggaccatatcctgtctgttctgtgtaagcacgtatgcgccaatggagtgcagtgggctggaagtcccagattgcaccatctaatctctgttatagtgaattgtagtagcgtgctggtcttcttggattgctag

SEQ ID NO: 307075 - DNA, 1614 bp, Artificial Sequence
  derived and/or modified sequence
atgaagatgctgaccaggctccaggtcctcactttagcgctgttcagtaaaggctttttgctttctcttggtgatcacaattttctgcggagagaaatcaagatcgaaggtgatctggtcctggggggtcttttccccattaatgaaaaaggtacaggtacagaagagtgcggtcggataaatgaggaccgcggaatccagcgcctggaagccatgctgttcgcaattgatgagatcaataaagacgactacttactgcctggggtaaagttgggcgtgcacatcctagatacctgtagccgggatacctacgctctggagcagtcattggaatttgtgagggcgtcgctgactaaggtggatgaagcggaatacatgtgccccgacgggagttacgcaattcaagagaacattcccttgctcatcgccggagtgatcggaggctcttactcttccgtttccatccaagtggcgaacctgctgagactgtttcaaatcccacagatcagctacgcatcaaccagtgccaaattgtccgataagtctaggtacgactacttcgctcgcacagttccaccagatttttatcaggccaaggctatggctgagatactgcgcttcttcaactggacttatgtcagtacagtggccagcgagggtgactacggagagaccggcattgaggcttttgagcaggaggctaggctgcgtaatatctgtattgctaccgccgaaaaagtagggcgatccaacatccggaagtcctacgattccgtgattcgggagctgctgcagaagcctaatgccagagtggttgtgttattcatgcgctctgacgactccagagagcttatagctgctgcaagcagggctaatgcatccttcacttgggtagcatccgacggctggggggcacaagaatcaatcatcaaaggcagcgaacacgtggcatatggcgcaatcacactggagctggcctcgcagccggttcgtcagtttgaccgatactttcagtcattgaacccgtacaataaccacagaaacccctggttccgagatttctgggagcagaaatttcagtgttccttgcaaaataaaagaaaccaccggcgtgtgtgtgacaaacatctggcaatcgactcttcaaactacgagcaagagtcaaaaattatgtttgttgtgaacgccgtgtatgcaatggcccacgccttgcataaaatgcagaggacattgtgtccaaatactacaaaactctgcgacgcaatgaaaatcctagacggtaagaaactgtataaagactacctgttgaagattaattttacaggggctgatgacaatcacgtgcatctgtgtcagcctgaatggctgtgtgggttgggcctcttcgtctgtacccaaggctcccatcacccagtgtctactccggaggagtgttgtcacacccagacagccccacagcaagtacagtgccagtggaattgggaccacattctgtcggtgttgtgtaagcatgtatgtgccaatggggtgcaatgggcgggttccccgaggttgcatcatctcatctctgtgattgtcaactgtagttccgtccttgtgttcctcgattgctag

SEQ ID NO: 307076 - DNA, 1608 bp, Artificial Sequence
  derived and/or modified sequence
atgctgaccagactgcaggtgctgaccctggccctgttcagcaagggcttcctgctgagcctgggcgaccacaacttcctgagaagagagatcaagatcgagggcgacctggtgctgggcggcctgttccccatcaacgagaagggcaccggcaccgaggagtgcggcagaatcaacgaggacagaggcatccagagactggaggccatgctgttcgccatcgacgagatcaacaaggacgactacctgctgcccggcgtgaagctgggcgtgcacatcctggacacctgcagcagagacacctacgccctggagcagagcctggagttcgtgagagccagcctgaccaaggtggacgaggccgagtacatgtgccccgacggcagctacgccatccaggagaacatccccctgctgatcgccggcgtgatcggcggcagctacagcagcgtgagcatccaggtggccaacctgctgagactgttccagatcccccagatcagctacgccagcaccagcgccaagctgagcgacaagagcagatacgactacttcgccagaaccgtgccccccgacttctaccaggccaaggccatggccgagatcctgagattcttcaactggacctacgtgagcaccgtggccagcgagggcgactacggcgagaccggcatcgaggccttcgagcaggaggccagactgagaaacatctgcatcgccaccgccgagaaggtgggcagaagcaacatcagaaagagctacgacagcgtgatcagagagctgctgcagaagcccaacgccagagtggtggtgctgttcatgagaagcgacgacagcagagagctgatcgccgccgccagcagagccaacgccagcttcacctgggtggccagcgacggctggggcgcccaggagagcatcatcaagggcagcgagcacgtggcctacggcgccatcaccctggagctggccagccagcccgtgagacagttcgacagatacttccagagcctgaacccctacaacaaccacagaaacccctggttcagagacttctgggagcagaagttccagtgcagcctgcagaacaagagaaaccacagaagagtgtgcgacaagcacctggccatcgacagcagcaactacgagcaggagagcaagatcatgttcgtggtgaacgccgtgtacgccatggcccacgccctgcacaagatgcagagaaccctgtgccccaacaccaccaagctgtgcgacgccatgaagatcctggacggcaagaagctgtacaaggactacctgctgaagatcaacttcaccggcgccgacgacaaccacgtgcacctgtgccagcccgagtggctgtgcggcctgggcctgttcgtgtgcacccagggcagccaccaccccgtgagcacccccgaggagtgctgccacacccagaccgccccccagcaggtgcagtgccagtggaactgggaccacatcctgagcgtgctgtgcaagcacgtgtgcgccaacggcgtgcagtgggccggcagccccagactgcaccacctgatcagcgtgatcgtgaactgcagcagcgtgctggtgttcctggactgctag

SEQ ID NO: 307077 - DNA, 1614 bp, Artificial Sequence
  derived and/or modified sequence
atgaagatgctgaccagactgcaggtgctgaccctggccctgttcagcaagggcttcctgctgagcctgggcgaccacaacttcctgagaagagagatcaagatcgagggcgacctggtgctgggcggcctgttccccatcaacgagaagggcaccggcaccgaggagtgcggcagaatcaacgaggacagaggcatccagagactggaggccatgctgttcgccatcgacgagatcaacaaggacgactacctgctgcccggcgtgaagctgggcgtgcacatcctggacacctgcagcagagacacctacgccctggagcagagcctggagttcgtgagagccagcctgaccaaggtggacgaggccgagtacatgtgccccgacggcagctacgccatccaggagaacatccccctgctgatcgccggcgtgatcggcggcagctacagcagcgtgagcatccaggtggccaacctgctgagactgttccagatcccccagatcagctacgccagcaccagcgccaagctgagcgacaagagcagatacgactacttcgccagaaccgtgccccccgacttctaccaggccaaggccatggccgagatcctgagattcttcaactggacctacgtgagcaccgtggccagcgagggcgactacggcgagaccggcatcgaggccttcgagcaggaggccagactgagaaacatctgcatcgccaccgccgagaaggtgggcagaagcaacatcagaaagagctacgacagcgtgatcagagagctgctgcagaagcccaacgccagagtggtggtgctgttcatgagaagcgacgacagcagagagctgatcgccgccgccagcagagccaacgccagcttcacctgggtggccagcgacggctggggcgcccaggagagcatcatcaagggcagcgagcacgtggcctacggcgccatcaccctggagctggccagccagcccgtgagacagttcgacagatacttccagagcctgaacccctacaacaaccacagaaacccctggttcagagacttctgggagcagaagttccagtgcagcctgcagaacaagagaaaccacagaagagtgtgcgacaagcacctggccatcgacagcagcaactacgagcaggagagcaagatcatgttcgtggtgaacgccgtgtacgccatggcccacgccctgcacaagatgcagagaaccctgtgccccaacaccaccaagctgtgcgacgccatgaagatcctggacggcaagaagctgtacaaggactacctgctgaagatcaacttcaccggcgccgacgacaaccacgtgcacctgtgccagcccgagtggctgtgcggcctgggcctgttcgtgtgcacccagggcagccaccaccccgtgagcacccccgaggagtgctgccacacccagaccgccccccagcaggtgcagtgccagtggaactgggaccacatcctgagcgtgctgtgcaagcacgtgtgcgccaacggcgtgcagtgggccggcagccccagactgcaccacctgatcagcgtgatcgtgaactgcagcagcgtgctggtgttcctggactgctag

SEQ ID NO: 307078 - protein, 87 aa, Artificial Sequence
  derived and/or modified sequence
MKMLTRLQVLTLALFSKGFLLSLGDHNFLRREIKIEGDLVLGGLFPINEKGTGTEECGRINEDRGIQRLEAMLFAIDEINKDDYLLP

SEQ ID NO: 307079 - DNA, 264 bp, Artificial Sequence
  derived and/or modified sequence
atgaaaatgcttacaaggctgcaagtactgaccctggccctcttctctaagggcttcctcctgtcgctaggtgatcacaatttcctgaggcgtgaaattaagatcgaaggcgacctggtcttgggcggcttgttccctattaatgagaagggaaccgggacagaagagtgtgggcgcatcaatgaggatcgcggtattcagcgccttgaagccatgctgtttgctattgacgaaatcaataaggatgattatctcctgccctag

SEQ ID NO: 307080 - DNA, 246 bp, Artificial Sequence
  derived and/or modified sequence
atgaaaatgcttacaagactgcaagtgctcacactggcgctctttagcaaaggattcctgctgtcattgggagaccataatttcctgcggcgtgaaatcaaaatcgagggcgacctggttctcgggggtctgtttcctattaatgagaaaggcacaggaacagaagaatgcgggagaatcaacgaggatcgaggcatccagaggctcgaagctatgctgtttgctatcgatgagattaacaaatag

SEQ ID NO: 307081 - DNA, 528 bp, Artificial Sequence
  derived and/or modified sequence
agttcctgccaggagttgtcggtgcgaggtaagggtcccagaggaggacgtgtccctctggagggcgcccagccagggcgcggaagctcgggtgccgcgtggggcaggcgcagccgggaaagttgaggaattttgtgacaggctctgttagtctgttcctcccttatttgaaggacaggccaaagatccagtttggaaatgagagaggactagcatgacacattggctccaccattgatatctcccagaggtacagaaacaggattcatgaagatgttgacaagactgcaagttcttaccttagctttgttttcaaagggatttttactctctttaggggaccataactttctaaggagagagattaaaatagaaggtgaccttgttttagggggcctgtttcctattaacgaaaaaggcactggaactgaagaatgtgggcgaatcaatgaagaccgagggattcaacgcctggaagccatgttgtttgctattgatgaaatcaacaaagatgattacttgctacca

SEQ ID NO: 307082 - DNA, 491 bp, Artificial Sequence
  derived and/or modified sequence
acaataatcaagagactacttgttcataagaagaataggctgcaaatgtaacttctattgtcttatcttttcattttttcataatgcaaatatgaccaattaaaaatgaattttgtgacaggctctgttagtctgttcctcccttatttgaaggacaggccaaagatccagtttggaaatgagagaggactagcatgacacattggctccaccattgatatctcccagaggtacagaaacaggattcatgaagatgttgacaagactgcaagttcttaccttagctttgttttcaaagggatttttactctctttaggggaccataactttctaaggagagagattaaaatagaaggtgaccttgttttagggggcctgtttcctattaacgaaaaaggcactggaactgaagaatgtgggcgaatcaatgaagaccgagggattcaacgcctggaagccatgttgtttgctattgatgaaatcaacaaag

SEQ ID NO: 307083 - DNA, 264 bp, Artificial Sequence
  derived and/or modified sequence
atgaagatgctgacccggctgcaggtgctgaccctggccctcttcagcaagggcttcctgctgagcctgggggaccacaacttcctgcggcgggagatcaagattgaaggagacctggtgctgggcggcctcttccccatcaatgagaagggcaccggcacagaggagtgtggccgcatcaatgaagatcggggcatccagaggctggaggccatgctgtttgccattgatgagatcaacaaggatgactacctgctgccctag

SEQ ID NO: 307084 - DNA, 246 bp, Artificial Sequence
  derived and/or modified sequence
atgaagatgctgacccggctgcaggtgctgaccctggccctcttcagcaagggcttcctgctgagcctgggggaccacaacttcctgcggcgggagatcaagattgaaggagacctggtgctgggcggcctcttccccatcaatgagaagggcaccggcacagaggagtgtggccgcatcaatgaagatcggggcatccagaggctggaggccatgctgtttgccattgatgagatcaacaagtag

SEQ ID NO: 307085 - DNA, 264 bp, Artificial Sequence
  derived and/or modified sequence
atgaagatgctgacccggctgcaggtgctgaccctggccctgttctctaaggggttcctgctgtccctaggagatcataactttcttaggcgggaaattaagatcgaaggcgacctggtgcttggaggcctgttcccaatcaacgaaaaggggactggtactgaggaatgtggccgtatcaatgaagatcgcggcattcagcgcctggaggcgatgttgtttgcgatcgatgagataaataaggacgattatttgctgccttag

SEQ ID NO: 307086 - DNA, 246 bp, Artificial Sequence
  derived and/or modified sequence
atgaagatgctgacccggctgcaggtgctgaccctggccctgttcagcaaaggatttctcctgtcactgggggatcacaactttctccgccgagagattaagatcgagggtgatttagtgctgggaggactcttcccaatcaatgaaaaaggcaccggcacagaagagtgtggcaggatcaacgaggatagaggcattcagcgactggaggccatgctttttgcaatcgacgagatcaacaagtag

SEQ ID NO: 307087 - DNA, 264 bp, Artificial Sequence
  derived and/or modified sequence
atgaagatgttgactagactgcaagttcttactctggccctgttcagcaagggctttttgctcagcttgggagatcataatttcttaaggagggagataaagatcgaaggcgacttggttctggggggtctctttccgattaacgagaagggcactggtactgaagagtgcgggcgtattaatgaggaccgcggaattcaacgactcgaggctatgcttttcgccatagacgaaataaataaagatgactacctcctcccttag

SEQ ID NO: 307088 - DNA, 246 bp, Artificial Sequence
  derived and/or modified sequence
atgaaaatgctgactagactccaggttctcactttagctttattctctaagggctttctcctgagtctgggggaccataattttctgcgccgtgagatcaagatcgagggagacttagttctggggggtctgttccccattaatgagaaggggacggggacggaggagtgtggtagaatcaacgaagatagaggtattcagaggctcgaagcgatgcttttcgcaattgacgagataaacaaatag

SEQ ID NO: 307089 - DNA, 264 bp, Artificial Sequence
  derived and/or modified sequence
atgaagatgctgaccagactgcaggtgctgaccctggccctgttcagcaagggcttcctgctgagcctgggcgaccacaacttcctgagaagagagatcaagatcgagggcgacctggtgctgggcggcctgttccccatcaacgagaagggcaccggcaccgaggagtgcggcagaatcaacgaggacagaggcatccagagactggaggccatgctgttcgccatcgacgagatcaacaaggacgactacctgctgccctag

SEQ ID NO: 307090 - DNA, 246 bp, Artificial Sequence
  derived and/or modified sequence
atgaagatgctgaccagactgcaggtgctgaccctggccctgttcagcaagggcttcctgctgagcctgggcgaccacaacttcctgagaagagagatcaagatcgagggcgacctggtgctgggcggcctgttccccatcaacgagaagggcaccggcaccgaggagtgcggcagaatcaacgaggacagaggcatccagagactggaggccatgctgttcgccatcgacgagatcaacaagtag

SEQ ID NO: 307091 - protein, 908 aa, Artificial Sequence
  derived and/or modified sequence
MVCEGKRSASCPCFFLLTAKFYWILTMMQRTHSQEYAHSIRVDGDIILGGLFPVHAKGERGVPCGELKKEKGIHRLEAMLYAIDQINKDPDLLSNITLGVRILDTCSRDTYALEQSLTFVQALIEKDASDVKCANGDPPIFTKPDKISGVIGAAASSVSIMVANILRLFKIPQISYASTAPELSDNTRYDFFSRVVPPDSYQAQAMVDIVTALGWNYVSTLASEGNYGESGVEAFTQISREIGGVCIAQSQKIPREPRPGEFEKIIKRLLETPNARAVIMFANEDDIRRILEAAKKLNQSGHFLWIGSDSWGSKIAPVYQQEEIAEGAVTILPKRASIDGFDRYFRSRTLANNRRNVWFAEFWEENFGCKLGSHGKRNSHIKKCTGLERIARDSSYEQEGKVQFVIDAVYSMAYALHNMHKDLCPGYIGLCPRMSTIDGKELLGYIRAVNFNGSAGTPVTFNENGDAPGRYDIFQYQITNKSTEYKVIGHWTNQLHLKVEDMQWAHREHTHPASVCSLPCKPGERKKTVKGVPCCWHCERCEGYNYQVDELSCELCPLDQRPNMNRTGCQLIPIIKLEWHSPWAVVPVFVAILGIIATTFVIVTFVRYNDTPIVRASGRELSYVLLTGIFLCYSITFLMIAAPDTIICSFRRVFLGLGMCFSYAALLTKTNRIHRIFEQGKKSVTAPKFISPASQLVITFSLISVQLLGVFVWFVVDPPHIIIDYGEQRTLDPEKARGVLKCDISDLSLICSLGYSILLMVTCTVYAIKTRGVPETFNEAKPIGFTMYTTCIIWLAFIPIFFGTAQSAEKMYIQTTTLTVSMSLSASVSLGMLYMPKVYIIIFHPEQNVQKRKRSFKAVVTAATMQSKLIQKGNDRPNGEVKSELCESLETNSKSSVEFPMVKSGSTS

SEQ ID NO: 307092 - protein, 501 aa, Artificial Sequence
  derived and/or modified sequence
MVCEGKRSASCPCFFLLTAKFYWILTMMQRTHSQEYAHSIRVDGDIILGGLFPVHAKGERGVPCGELKKEKGIHRLEAMLYAIDQINKDPDLLSNITLGVRILDTCSRDTYALEQSLTFVQALIEKDASDVKCANGDPPIFTKPDKISGVIGAAASSVSIMVANILRLFKIPQISYASTAPELSDNTRYDFFSRVVPPDSYQAQAMVDIVTALGWNYVSTLASEGNYGESGVEAFTQISREIGGVCIAQSQKIPREPRPGEFEKIIKRLLETPNARAVIMFANEDDIRRILEAAKKLNQSGHFLWIGSDSWGSKIAPVYQQEEIAEGAVTILPKRASIDGFDRYFRSRTLANNRRNVWFAEFWEENFGCKLGSHGKRNSHIKKCTGLERIARDSSYEQEGKVQFVIDAVYSMAYALHNMHKDLCPGYIGLCPRMSTIDGKELLGYIRAVNFNGCRRGIQMSLPWPTLFTPSFSSSWAVLALLSLLMKTEMLLDVMISSSIK

SEQ ID NO: 307093 - DNA, 2727 bp, Artificial Sequence
  derived and/or modified sequence
atggtttgcgaagggaagcggagcgcaagttgtccatgtttctttctcttaactgctaaattctactggatcttgaccatgatgcagcgcacgcactcacaggaatatgcccactctatccgcgttgatggagatatcatactgggcggcttgttcccagttcacgccaagggtgaacggggcgtaccttgcggggaactgaaaaaggagaaggggattcacaggctagaggcaatgctgtacgccattgaccagattaataaggatccagacctgctgagcaatataaccctcggcgtgcggatccttgatacttgctcccgggacacctatgcccttgaacagtccctgactttcgttcaggctctcattgagaaagacgcttccgacgtgaagtgtgcaaacggtgacccacccatctttacgaagcccgacaagattagcggagttatcggcgctgctgcaagctcagtgagcataatggttgcgaatatcctcagactcttcaaaatcccccagattagctacgccagcactgctcctgaactgtctgataatacgcgctacgatttcttctcacgggtcgtgccgcctgactcgtatcaggcccaggccatggtggatatcgttaccgcgctaggctggaactacgtatccacattggcctccgagggcaattatggtgaaagcggtgtggaggcctttactcagattagtcgggagatcggaggggtgtgcatcgcccagtcccagaaaattccgcgcgagccgcgtccaggagagttcgaaaagatcatcaagcggttgctggagactcctaatgctagggccgttatcatgtttgctaatgaggacgatattaggagaattctagaggcagctaagaagctgaaccagagtggacattttctttggattggctccgattcctggggatccaaaatagcacccgtttaccaacaggaggaaatcgccgagggcgctgtcacaattctcccaaagcgcgcctcaatcgatggctttgaccgatatttccgttcacggactttagcaaataatcggcgcaatgtatggttcgccgaattctgggaggagaattttgggtgtaaactggggtcccatggcaaacggaattcccacataaaaaagtgcacgggattggagcggatcgcccgggactcctcatacgagcaagaggggaaggtacagtttgttattgatgcagtgtacagtatggcatatgcgctgcacaatatgcataaagatctatgcccaggctatatcggtttgtgccctagaatgtcaactatcgacgggaaggaattgctgggttacattcgggccgtgaatttcaatggatcggctgggactccagttaccttcaatgagaatggggatgcccccggcagatacgacattttccagtatcagatcacaaacaaatcaaccgaatataaagtgatcggacattggaccaatcaacttcacctcaaagtggaggatatgcaatgggctcatcgggagcacactcatcctgcctccgtgtgttctctgccttgtaagccgggagagcgcaagaaaacggtgaaaggagtcccatgttgttggcattgcgagcgctgcgaaggatacaactatcaggtggatgaattgagttgcgagttatgtccactcgaccagagacctaacatgaatcggaccggctgtcagctgatccccatcataaaactcgagtggcacagtccatgggccgtagttcctgtttttgtcgcaatcctgggcattatagctactacctttgtgattgtcacttttgtaagatataatgacacacctatagtcagggcttctgggcgcgagctttcgtacgtgctcctaactggtatcttcctctgctattcaatcacattcctgatgatcgctgccccagacacaataatatgtagctttcgccgagtgttcctcggtctgggtatgtgcttctcatatgctgcactccttactaaaactaaccggatccaccgtattttcgaacagggaaagaaaagtgtaacagctcccaaattcatcagccctgcttctcagctagtaataacgttttctctgattagcgtgcagctgctgggagtatttgtttggttcgtggttgatcctcctcacattataatcgactacggtgagcagcgtacgctggatcccgaaaaagcccggggcgttctgaaatgcgatataagcgacctgagcttaatatgttctttagggtactcaatcttgctgatggtgacctgcactgtctatgcgattaaaaccaggggcgttcctgagacctttaatgaagcaaagccgataggttttacaatgtacacaacgtgcatcatctggctcgcattcatccctatcttttttggcaccgcacaatccgccgagaagatgtatattcaaactacaaccctgaccgtatctatgtctctcagcgctagcgttagtctagggatgctgtacatgcctaaggtctacatcatcattttccatccagaacaaaacgttcagaagaggaagcgcagttttaaagcagtggtcacagccgctactatgcaatctaaactgatccagaagggcaatgaccgtcctaatggggaggttaagagcgagctctgtgagagtcttgagactaacaccagctcaaccaaaacgacctacatttcttacagcaatcactctatatag

SEQ ID NO: 307094 - DNA, 2727 bp, Artificial Sequence
  derived and/or modified sequence
atggtgtgcgagggaaagcgctcagcatcttgtccttgctttttcctgctgaccgccaaattctattggatcctgactatgatgcagcggacccatagccaggaatacgcacactccatccgggttgacggggatattatcctgggggggctgtttccagttcacgcaaaaggggagcgaggtgtaccttgtggtgaattgaagaaggagaagggtattcatcggctcgaggctatgctgtacgcgatcgatcaaatcaataaggatcccgatttgctttccaatattactctaggagtgcgcatcctagacacctgttctcgggacacctatgcgctggaacaaagtctgactttcgtacaggcactcatcgaaaaggacgcttctgatgtgaagtgcgctaacggggatccacccatctttacaaagcctgataaaatatcgggggtgatcggggccgcagcttcatcagtgtccatcatggtggccaatatacttcggctgtttaaaatcccacagatttcctacgcctccaccgcccccgaactaagcgacaacacacgctatgattttttcagcagggtggtgcctcctgactcctaccaggcccaggcaatggtggatatagtaaccgctctcggctggaactatgtgtctacactggcctctgaggggaattatggcgagtcaggggtcgaggcttttacccagatttctcgggaaatcggaggggtgtgtattgcccaaagccagaagatccctagggagcccagacccggcgaattcgagaaaatcatcaagcgactgttagaaactccaaacgcgcgcgctgtgatcatgtttgccaatgaggatgacatacgaagaattttagaagccgcaaaaaaactcaatcagagcggacacttcctgtggatcggctcagactcatggggaagcaaaatagcacccgtgtatcagcaggaggagatcgccgagggagcagtcactatattgcccaagcgggcttccatcgacggttttgataggtacttccggagtcgcacactcgcaaataacaggagaaatgtttggtttgccgaattttgggaagagaatttcggctgcaagttagggagccacggaaagaggaacagccatattaagaagtgcactggcctagagaggattgctagggacagtagctatgaacaagaaggcaaggtgcagttcgttattgatgcggtctattctatggcttatgccttacataatatgcacaaggacctatgtccaggctatatcggcctgtgtccaagaatgtcgaccatagatggaaaagagcttctaggctacataagggcggtcaattttaacggatctgccggcaccccagtcacttttaatgagaacggcgatgcccccggcaggtatgacatttttcagtatcaaatcaccaataagtccaccgagtacaaagtaatcggacactggaccaatcagctgcacctgaaagtggaggatatgcagtgggcacacagggaacacacacaccctgcatccgtgtgttcactgccatgcaagcccggtgagcgcaagaagactgtcaaaggggtgccctgttgttggcattgtgaacgatgcgaggggtataattatcaggtggatgagctgagttgcgagctctgcccgctcgatcagagacctaacatgaataggactgggtgccaacttatacccataattaaactggagtggcattcaccatgggctgtggtgcccgtcttcgtggctattctgggtattatcgcgacaacatttgtgatagtgacatttgtgcggtacaacgatacacctatagtcagggctagcggcagggagctgtcatatgtcctgctgacaggcattttcctatgctattctattacctttctgatgatagctgcacccgataccattatctgctccttccgccgtgttttcctcggccttgggatgtgcttttcctatgcagctctgttgaccaagacgaataggatccacagaatcttcgaacagggcaagaaatcagttaccgctcccaagtttatcagccctgcttctcagctggttatcaccttctctctgatctccgtgcaactgctgggcgttttcgtatggtttgtcgtggatccaccccacattattatcgactacggcgagcagcgaacgctcgatcctgagaaagctcggggggtcttaaagtgtgacatttccgatctttctctgatttgttcgctcggctacagtatacttctaatggtcacctgtactgtatacgccataaagactcggggcgtcccagagactttcaacgaggcaaagcccatcggctttactatgtacactacgtgcatcatctggctcgccttcattcctatctttttcggtaccgctcagagcgccgaaaagatgtatatccagactacaactctcacagttagtatgtccctttctgcatccgtttcactcggtatgctgtacatgccaaaggtgtatattatcatctttcatcctgagcaaaacgtacaaaagagaaaaaggagctttaaagcggttgttactgcagccaccatgcagtccaaattgatccagaagggaaatgaccgtccaaatggcgaagtcaagagcgagctttgcgaatcacttgagacaaattctaagtcctccgtagaatttccgatggtgaagtcaggcagtacttcttag

SEQ ID NO: 307095 - DNA, 63 bp, Artificial Sequence
  derived and/or modified sequence
atggtttgtgagggcaagcgaagcgcatcttgcccttgtttcttccttctcaccgccaagtag

SEQ ID NO: 307096 - DNA, 2727 bp, Artificial Sequence
  derived and/or modified sequence
atggtgtgtgaagggaaaagaagcgctagttgcccatgtttctttctgctaacagccaagttttattggattcttaccatgatgcagcgcacacactctcaggaatatgcccactccatccgcgtcgatggggatatcatcctagggggtctgttcccagttcatgccaagggagagcggggcgtgccttgcggagaactgaagaaggaaaaaggaattcataggctagaggcaatgttgtatgctattgaccagatcaataaggaccctgatctgctgtccaatatcacgctgggagttaggatcttagacacatgtagtagagatacatacgccctggagcagtctctcaccttcgtacaggctctcattgagaaggatgccagcgatgtcaaatgcgcaaacggcgaccccccaatcttcacaaagccagataagatttctggggttattggtgccgctgcctctagcgttagtataatggtggccaacatcctcagactgttcaaaataccacagatctcgtacgcatcaacagctcccgaactttcagataatactcggtatgattttttctctcgcgtggtgcctcccgatagctatcaggcccaggcaatggtggacattgtgacagccctaggctggaactacgtgtctaccctggcctctgaaggtaattacggtgagtccggcgtcgaggccttcacacagattagcagggaaatcggaggcgtgtgcatcgcacagagtcagaagatcccacgcgagcccagacctggggaattcgaaaaaattattaagaggctgcttgagactcctaacgctagggctgtcatcatgttcgcgaatgaggacgacattcgacgcatactcgaggccgcaaaaaagctgaatcagtccggccatttcttgtggatcgggtctgactcttggggaagtaaaatcgcacctgtatatcagcaggaagaaatcgcagagggcgccgtgaccattcttcctaaacgtgctagtatcgacggattcgatcggtacttccggagtcggactctcgcgaataatcgacgtaacgtgtggttcgcagaattctgggaggagaactttggttgcaaactaggatcccacggtaagaggaacagccacattaaaaagtgcacggggctggaaagaatcgcacgggatagctcctacgaacaggaggggaaggtgcagtttgtaattgatgctgtgtattctatggcgtatgccctgcataacatgcataaggacctgtgtccaggctatatcggtctttgccctcggatgtcgaccattgacggaaaggaattgcttggttatatacgtgcagtgaactttaacggatccgcgggtaccccagtgacgttcaacgagaacggggatgcaccggggcgatacgatatttttcagtaccagattaccaataagtcaactgaatataaagtaatcgggcattggactaatcagcttcacctaaaggtggaggacatgcagtgggcacaccgggaacacacccatcccgcctcagtgtgctcactgccatgcaaacccggcgaacgaaaaaagaccgtgaagggtgtcccctgttgttggcattgtgaacgctgcgaaggttataactatcaggtcgatgagcttagctgcgagctctgcccactagaccagcgccccaacatgaaccgcacggggtgtcagctgattcccattatcaagctcgagtggcacagcccatgggcagtcgtgcctgtttttgtcgccatacttgggatcatcgcaaccacattcgtcatcgttacttttgttcgctacaatgatacgcctatcgttcgtgcaagcggtcgggagctctcgtatgtgcttctcactggcatctttctgtgctacagtattaccttcttgatgatagctgctccagacacaattatatgctcctttcggcgggttttcttgggcctgggcatgtgcttttcctacgccgcactcctgaccaaaacgaacagaatccataggatctttgaacaaggtaagaaatccgttaccgcccccaagtttatctcacctgcttcccagcttgtgattaccttcagtctgatcagcgtacaactcctgggagtgtttgtgtggtttgtggtcgaccctccacatatcatcattgattatggcgaacagcgtacactggaccccgaaaaagcacggggagtcctgaaatgcgatatatccgacctctccctcatttgctctttgggatactccatcctgttaatggtcacctgtacggtgtatgcaattaagacccggggagtcccagagacctttaacgaggccaagccaatagggtttaccatgtataccacctgcattatctggctggcctttatccccatctttttcggaacagcacagtctgccgaaaagatgtacatccaaacaacaaccttgactgtgagcatgtctctgtcagccagcgtgtctctcgggatgctgtatatgccaaaggtctacataattatctttcatcccgagcagaatgtccagaaaagaaagagatccttcaaagcagtggtaaccgctgcaacgatgcaatccaaactgattcagaaagggaatgatagacccaacggcgaggtgaagagcgaactgtgcgagtccttagagacaaatacctcatctaccaagaccacctacattagctacagcaaccacagtatatag

SEQ ID NO: 307097 - DNA, 4057 bp, Artificial Sequence
  derived and/or modified sequence
gatttttaaaaatcagaactattgacatttctggtctcctcgtcgcttcaggctgaagagcggagggggatccgcgggccgagggtccccctccctgcccgcgccagggccgctgggtgacaccgaaatccagaggctcccgcccctcgggggttcctcctcccgcttcccgaggtgactggttggcgcgaagcgattggcgatcccgggcgcgatcctggccgcggctccccgcgccgcgccgggtgaatggccgcgggcggaggatcgggaggcgccgggcgcagaccaatcgcggccgccggtgggagtatttgttattcacatggaagagacttggcgcctgctaggccagctcagccccctcagcccagagatcagccacaagtgcggccgctgtgctcgcctcacgcggcggcggcggcggcggcggcggcgctgacatggagctgcgggcccccggcgggcttcctcaccgcgccctctgcggggagcagggaataattctgctacaaggctgatttcaaggacatgaattgttgacctcatcccaacatcagaacctcagatgttctaatttttgcaccattccaggcaagttgatcttataaggaaataaaattgaaccttaggggtctgatggaaattcactgtgacattcaaatcaagaaaacttgctaatgcccacagagccttttccccatgggccctgatggtagcctccagaaggtgcagcctcaggtggtgccctttcttctgtggcaagaataaactttgggtcttggattgcaataccacctgtggagaaaatggtatgcgagggaaagcgatcagcctcttgcccttgtttcttcctcttgaccgccaagttctactggatcctcacaatgatgcaaagaactcacagccaggagtatgcccattccatacgggtggatggggacattattttggggggtctcttccctgtccacgcaaagggagagagaggggtgccttgtggggagctgaagaaggaaaaggggattcacagactggaggccatgctttatgcaattgaccagattaacaaggaccctgatctcctttccaacatcactctgggtgtccgcatcctcgacacgtgctctagggacacctatgctttggagcagtctctaacattcgtgcaggcattaatagagaaagatgcttcggatgtgaagtgtgctaatggagatccacccattttcaccaagcccgacaagatttctggcgtcataggtgctgcagcaagctccgtgtccatcatggttgctaacattttaagactttttaagatacctcaaatcagctatgcatccacagccccagagctaagtgataacaccaggtatgactttttctctcgagtggttccgcctgactcctaccaagcccaagccatggtggacatcgtgacagcactgggatggaattatgtttcgacactggcttctgaggggaactatggtgagagcggtgtggaggccttcacccagatctcgagggagattggtggtgtttgcattgctcagtcacagaaaatcccacgtgaaccaagacctggagaatttgaaaaaattatcaaacgcctgctagaaacacctaatgctcgagcagtgattatgtttgccaatgaggatgacatcaggaggatattggaagcagcaaaaaaactaaaccaaagtgggcattttctctggattggctcagatagttggggatccaaaatagcacctgtctatcagcaagaggagattgcagaaggggctgtgacaattttgcccaaacgagcatcaattgatggatttgatcgatactttagaagccgaactcttgccaataatcgaagaaatgtgtggtttgcagaattctgggaggagaattttggctgcaagttaggatcacatgggaaaaggaacagtcatataaagaaatgcacagggctggagcgaattgctcgggattcatcttatgaacaggaaggaaaggtccaatttgtaattgatgctgtatattccatggcttacgccctgcacaatatgcacaaagatctctgccctggatacattggcctttgtccacgaatgagtaccattgatgggaaagagctacttggttatattcgggctgtaaattttaatggcagtgctggcactcctgtcacttttaatgaaaacggagatgctcctggacgttatgatatcttccagtatcaaataaccaacaaaagcacagagtacaaagtcatcggccactggaccaatcagcttcatctaaaagtggaagacatgcagtgggctcatagagaacatactcacccggcgtctgtctgcagcctgccgtgtaagccaggggagaggaagaaaacggtgaaaggggtcccttgctgctggcactgtgaacgctgtgaaggttacaactaccaggtggatgagctgtcctgtgaactttgccctctggatcagagacccaacatgaaccgcacaggctgccagcttatccccatcatcaaattggagtggcattctccctgggctgtggtgcctgtgtttgttgcaatattgggaatcatcgccaccacctttgtgatcgtgacctttgtccgctataatgacacacctatcgtgagggcttcaggacgcgaacttagttacgtgctcctaacggggatttttctctgttattcaatcacgtttttaatgattgcagcaccagatacaatcatatgctccttccgacgggtcttcctaggacttggcatgtgtttcagctatgcagcccttctgaccaaaacaaaccgtatccaccgaatatttgagcaggggaagaaatctgtcacagcgcccaagttcattagtccagcatctcagctggtgatcaccttcagcctcatctccgtccagctccttggagtgtttgtctggtttgttgtggatcccccccacatcatcattgactatggagagcagcggacactagatccagagaaggccaggggagtgctcaagtgtgacatttctgatctctcactcatttgttcacttggatacagtatcctcttgatggtcacttgtactgtttatgccattaaaacgagaggtgtcccagagactttcaatgaagccaaacctattggatttaccatgtataccacctgcatcatttggttagctttcatccccatcttttttggtacagcccagtcagcagaaaagatgtacatccagacaacaacacttactgtctccatgagtttaagtgcttcagtatctctgggcatgctctatatgcccaaggtttatattataatttttcatccagaacagaatgttcaaaaacgcaagaggagcttcaaggctgtggtgacagctgccaccatgcaaagcaaactgatccaaaaaggaaatgacagaccaaatggcgaggtgaaaagtgaactctgtgagagtcttgaaaccaacacttcctctaccaagacaacatatatcagttacagcaatcattcaatctgaaacagggaaatggcacaatctgaagagatgtggtatatgatcttaaatgatgaacatgagaccgcaaaaattcactcctggagatctccgtagactacaatcaatcaaatcaatagtcagtcttgtaaggaacaaaaattagccatgagccaaaagtatcaataaacggggagtgaagaaacccgttttatacaataaaaccaatgagtgtcaagctaaagtattgcttattcatgagcagttaaaacaaatcacaaaaggaaaactaatgttagctcgtgaaaaaaaatgctgttgaaataaataatgtctgatgttattcttgtatttttctgtgattgtgagaactcccgttcctgtcccacattgtttaacttgtataagacaatgagtctgtttcttgtaatggctgaccagattgaagccctgggttgtgctaaaaataaatgcaatgattgatgcatgcaattttttatacaaataatttatttctaataataaaggaatgttttgcaaatgtt

SEQ ID NO: 307098 - DNA, 3850 bp, Artificial Sequence
  derived and/or modified sequence
acattacagtaaagaggttcagaaaagagggagactttacccggaactcccaaggcttggagatgtgatcccccaaaagtttagtcggcgaatgggagactgaagggtgacgggaagggggcaggcgcgctcggcgctctgactgggcgtgcggcggcaggattttaaagcgctctgcctcggatcgtctgccctgggtgacctcccggacctgccctggtggaatccggacttgccccgccgagatgacgaggaataattctgctacaaggctgatttcaaggacatgaattgttgacctcatcccaacatcagaacctcagatgttctaatttttgcaccattccaggcaagttgatcttataaggaaataaaattgaaccttaggggtctgatggaaattcactgtgacattcaaatcaagaaaacttgctaatgcccacagagccttttccccatgggccctgatggtagcctccagaaggtgcagcctcaggtggtgccctttcttctgtggcaagaataaactttgggtcttggattgcaataccacctgtggagaaaatggtatgcgagggaaagcgatcagcctcttgcccttgtttcttcctcttgaccgccaagttctactggatcctcacaatgatgcaaagaactcacagccaggagtatgcccattccatacgggtggatggggacattattttggggggtctcttccctgtccacgcaaagggagagagaggggtgccttgtggggagctgaagaaggaaaaggggattcacagactggaggccatgctttatgcaattgaccagattaacaaggaccctgatctcctttccaacatcactctgggtgtccgcatcctcgacacgtgctctagggacacctatgctttggagcagtctctaacattcgtgcaggcattaatagagaaagatgcttcggatgtgaagtgtgctaatggagatccacccattttcaccaagcccgacaagatttctggcgtcataggtgctgcagcaagctccgtgtccatcatggttgctaacattttaagactttttaagatacctcaaatcagctatgcatccacagccccagagctaagtgataacaccaggtatgactttttctctcgagtggttccgcctgactcctaccaagcccaagccatggtggacatcgtgacagcactgggatggaattatgtttcgacactggcttctgaggggaactatggtgagagcggtgtggaggccttcacccagatctcgagggagattggtggtgtttgcattgctcagtcacagaaaatcccacgtgaaccaagacctggagaatttgaaaaaattatcaaacgcctgctagaaacacctaatgctcgagcagtgattatgtttgccaatgaggatgacatcaggaggatattggaagcagcaaaaaaactaaaccaaagtgggcattttctctggattggctcagatagttggggatccaaaatagcacctgtctatcagcaagaggagattgcagaaggggctgtgacaattttgcccaaacgagcatcaattgatggatttgatcgatactttagaagccgaactcttgccaataatcgaagaaatgtgtggtttgcagaattctgggaggagaattttggctgcaagttaggatcacatgggaaaaggaacagtcatataaagaaatgcacagggctggagcgaattgctcgggattcatcttatgaacaggaaggaaaggtccaatttgtaattgatgctgtatattccatggcttacgccctgcacaatatgcacaaagatctctgccctggatacattggcctttgtccacgaatgagtaccattgatgggaaagagctacttggttatattcgggctgtaaattttaatggcagtgctggcactcctgtcacttttaatgaaaacggagatgctcctggacgttatgatatcttccagtatcaaataaccaacaaaagcacagagtacaaagtcatcggccactggaccaatcagcttcatctaaaagtggaagacatgcagtgggctcatagagaacatactcacccggcgtctgtctgcagcctgccgtgtaagccaggggagaggaagaaaacggtgaaaggggtcccttgctgctggcactgtgaacgctgtgaaggttacaactaccaggtggatgagctgtcctgtgaactttgccctctggatcagagacccaacatgaaccgcacaggctgccagcttatccccatcatcaaattggagtggcattctccctgggctgtggtgcctgtgtttgttgcaatattgggaatcatcgccaccacctttgtgatcgtgacctttgtccgctataatgacacacctatcgtgagggcttcaggacgcgaacttagttacgtgctcctaacggggatttttctctgttattcaatcacgtttttaatgattgcagcaccagatacaatcatatgctccttccgacgggtcttcctaggacttggcatgtgtttcagctatgcagcccttctgaccaaaacaaaccgtatccaccgaatatttgagcaggggaagaaatctgtcacagcgcccaagttcattagtccagcatctcagctggtgatcaccttcagcctcatctccgtccagctccttggagtgtttgtctggtttgttgtggatcccccccacatcatcattgactatggagagcagcggacactagatccagagaaggccaggggagtgctcaagtgtgacatttctgatctctcactcatttgttcacttggatacagtatcctcttgatggtcacttgtactgtttatgccattaaaacgagaggtgtcccagagactttcaatgaagccaaacctattggatttaccatgtataccacctgcatcatttggttagctttcatccccatcttttttggtacagcccagtcagcagaaaagatgtacatccagacaacaacacttactgtctccatgagtttaagtgcttcagtatctctgggcatgctctatatgcccaaggtttatattataatttttcatccagaacagaatgttcaaaaacgcaagaggagcttcaaggctgtggtgacagctgccaccatgcaaagcaaactgatccaaaaaggaaatgacagaccaaatggcgaggtgaaaagtgaactctgtgagagtcttgaaaccaacagtaagtcatctgtagagtttccgatggtcaagagcgggagcacttcctaatagatcttcctctaccaagacaacatatatcagttacagcaatcattcaatctgaaacagggaaatggcacaatctgaagagatgtggtatatgatcttaaatgatgaacatgagaccgcaaaaattcactcctggagatctccgtagactacaatcaatcaaatcaatagtcagtcttgtaaggaacaaaaattagccatgagccaaaagtatcaataaacggggagtgaagaaacccgttttatacaataaaaccaatgagtgtcaagctaaagtattgcttattcatgagcagttaaaacaaatcacaaaaggaaaactaatgttagctcgtgaaaaaaaatgctgttgaaataaataatgtctgatgttattcttgtatttttctgtgattgtgagaactcccgttcctgtcccacattgtttaacttgtataagacaatgagtctgtttcttgtaatggctgaccagattgaagccctgggttgtgctaaaaataaatgcaatgattgatgcatgcaattttttatacaaataatttatttctaataataaagg

SEQ ID NO: 307099 - DNA, 3559 bp, Artificial Sequence
  derived and/or modified sequence
gaataattctgctacaaggctgatttcaaggacatgaattgttgacctcatcccaacatcagaacctcagatgttctaatttttgcaccattccaggcaagttgatcttataaggaaataaaattgaaccttaggggtctgatggaaattcactgtgacattcaaatcaagaaaacttgctaatgcccacagagccttttccccatgggccctgatggtagcctccagaaggtgcagcctcaggtggtgccctttcttctgtggcaagaataaactttgggtcttggattgcaataccacctgtggagaaaatggtatgcgagggaaagcgatcagcctcttgcccttgtttcttcctcttgaccgccaagttctactggatcctcacaatgatgcaaagaactcacagccaggagtatgcccattccatacgggtggatggggacattattttggggggtctcttccctgtccacgcaaagggagagagaggggtgccttgtggggagctgaagaaggaaaaggggattcacagactggaggccatgctttatgcaattgaccagattaacaaggaccctgatctcctttccaacatcactctgggtgtccgcatcctcgacacgtgctctagggacacctatgctttggagcagtctctaacattcgtgcaggcattaatagagaaagatgcttcggatgtgaagtgtgctaatggagatccacccattttcaccaagcccgacaagatttctggcgtcataggtgctgcagcaagctccgtgtccatcatggttgctaacattttaagactttttaagatacctcaaatcagctatgcatccacagccccagagctaagtgataacaccaggtatgactttttctctcgagtggttccgcctgactcctaccaagcccaagccatggtggacatcgtgacagcactgggatggaattatgtttcgacactggcttctgaggggaactatggtgagagcggtgtggaggccttcacccagatctcgagggagattggtggtgtttgcattgctcagtcacagaaaatcccacgtgaaccaagacctggagaatttgaaaaaattatcaaacgcctgctagaaacacctaatgctcgagcagtgattatgtttgccaatgaggatgacatcaggaggatattggaagcagcaaaaaaactaaaccaaagtgggcattttctctggattggctcagatagttggggatccaaaatagcacctgtctatcagcaagaggagattgcagaaggggctgtgacaattttgcccaaacgagcatcaattgatggatttgatcgatactttagaagccgaactcttgccaataatcgaagaaatgtgtggtttgcagaattctgggaggagaattttggctgcaagttaggatcacatgggaaaaggaacagtcatataaagaaatgcacagggctggagcgaattgctcgggattcatcttatgaacaggaaggaaaggtccaatttgtaattgatgctgtatattccatggcttacgccctgcacaatatgcacaaagatctctgccctggatacattggcctttgtccacgaatgagtaccattgatgggaaagagctacttggttatattcgggctgtaaattttaatggcagtgctggcactcctgtcacttttaatgaaaacggagatgctcctggacgttatgatatcttccagtatcaaataaccaacaaaagcacagagtacaaagtcatcggccactggaccaatcagcttcatctaaaagtggaagacatgcagtgggctcatagagaacatactcacccggcgtctgtctgcagcctgccgtgtaagccaggggagaggaagaaaacggtgaaaggggtcccttgctgctggcactgtgaacgctgtgaaggttacaactaccaggtggatgagctgtcctgtgaactttgccctctggatcagagacccaacatgaaccgcacaggctgccagcttatccccatcatcaaattggagtggcattctccctgggctgtggtgcctgtgtttgttgcaatattgggaatcatcgccaccacctttgtgatcgtgacctttgtccgctataatgacacacctatcgtgagggcttcaggacgcgaacttagttacgtgctcctaacggggatttttctctgttattcaatcacgtttttaatgattgcagcaccagatacaatcatatgctccttccgacgggtcttcctaggacttggcatgtgtttcagctatgcagcccttctgaccaaaacaaaccgtatccaccgaatatttgagcaggggaagaaatctgtcacagcgcccaagttcattagtccagcatctcagctggtgatcaccttcagcctcatctccgtccagctccttggagtgtttgtctggtttgttgtggatcccccccacatcatcattgactatggagagcagcggacactagatccagagaaggccaggggagtgctcaagtgtgacatttctgatctctcactcatttgttcacttggatacagtatcctcttgatggtcacttgtactgtttatgccattaaaacgagaggtgtcccagagactttcaatgaagccaaacctattggatttaccatgtataccacctgcatcatttggttagctttcatccccatcttttttggtacagcccagtcagcagaaaagatgtacatccagacaacaacacttactgtctccatgagtttaagtgcttcagtatctctgggcatgctctatatgcccaaggtttatattataatttttcatccagaacagaatgttcaaaaacgcaagaggagcttcaaggctgtggtgacagctgccaccatgcaaagcaaactgatccaaaaaggaaatgacagaccaaatggcgaggtgaaaagtgaactctgtgagagtcttgaaaccaacacttcctctaccaagacaacatatatcagttacagcaatcattcaatctgaaacagggaaatggcacaatctgaagagatgtggtatatgatcttaaatgatgaacatgagaccgcaaaaattcactcctggagatctccgtagactacaatcaatcaaatcaatagtcagtcttgtaaggaacaaaaattagccatgagccaaaagtatcaataaacggggagtgaagaaacccgttttatacaataaaaccaatgagtgtcaagctaaagtattgcttattcatgagcagttaaaacaaatcacaaaaggaaaactaatgttagctcgtgaaaaaaaatgctgttgaaataaataatgtctgatgttattcttgtatttttctgtgattgtgagaactcccgttcctgtcccacattgtttaacttgtataagacaatgagtctgtttcttgtaatggctgaccagattgaagccctgggttgtgctaaaaataaatgcaatgattgatgcatgcaattttttatacaaataatttatttctaataataaaggaatgttttgcaaatgtt

SEQ ID NO: 307100 - DNA, 2727 bp, Artificial Sequence
  derived and/or modified sequence
atggtgtgtgagggcaagaggtctgccagctgcccctgcttcttcctgctgacagccaagttctactggatcctgaccatgatgcagaggacccacagccaggagtatgcccacagcatccgggtggatggagacatcatcctgggcggcctcttccctgtgcacgccaagggggagcggggcgtgccctgtggggagctgaagaaggagaagggcatccaccggctggaggccatgctgtatgccatcgaccagatcaacaaggaccctgacctgctgagcaacatcaccctgggcgtgcgcatcctggacacctgcagccgggacacctacgccctggagcagagcctgacctttgtgcaggccctgattgagaaggatgccagtgatgtgaagtgtgccaatggagacccccccatcttcaccaagccagacaagatcagcggcgtgattggagctgctgccagctctgtgtccatcatggtggccaacatcctgcggctcttcaagatcccccagatctcctatgccagcacagcccctgagctgagtgacaacaccaggtatgacttcttcagccgggtggtgcccccagacagctaccaggcccaggccatggtggacatcgtgacagccctgggctggaactacgtgtccaccctggccagcgagggcaactatggagagagcggcgtggaggccttcacccagatcagccgggagatcggcggcgtgtgcatcgcccagagccagaagatcccccgggagcccaggcctggagaatttgagaagatcatcaagaggctgctggagaccccaaatgcccgggctgtgatcatgtttgccaatgaagatgacatccgccgcatcctggaggccgccaagaagctgaaccagagcggccacttcctgtggattggaagtgacagctggggcagcaagatcgcccctgtgtaccagcaggaggagattgctgagggcgctgtgaccatcctgcccaagagggccagcattgatggctttgaccgctacttccgcagcaggaccctggccaacaacagaagaaatgtgtggtttgctgagttctgggaggagaactttggctgcaagctgggcagccacggcaagaggaacagccacatcaagaagtgcaccggcctggagcgcatcgcccgggacagcagctatgagcaggagggcaaggtgcagtttgtgattgatgctgtgtacagcatggcctatgccctgcacaacatgcacaaggacctgtgccccggctacatcggcctgtgccccaggatgagcaccattgatggcaaggagctgctgggctacatccgggctgtgaacttcaacggcagcgctggcacccctgtgaccttcaatgaaaatggagatgcccctggccgctatgacatcttccagtaccagatcaccaacaagagcacagagtacaaggtgattggccactggaccaaccagctgcacctgaaggtggaggacatgcagtgggcccaccgggagcacacccacccagcctctgtgtgcagcctgccctgcaagccaggagagaggaagaagacagtgaagggcgtgccctgctgctggcactgtgagcgctgtgagggctacaactaccaggtggatgagctgagctgtgagctgtgccccctggaccagaggcccaacatgaacagaacaggctgccagctgatccccatcatcaagctggagtggcacagcccctgggccgtggtgcctgtgtttgtggccatcctgggcatcatcgccaccaccttcgtcatcgtgacctttgtgcgctacaatgacacccccatcgtgcgggccagcggccgggagctgtcctatgtgctgctgaccggcatcttcctgtgctacagcatcaccttcctgatgattgctgccccagacaccatcatctgcagcttcagaagagtcttcctgggcctgggcatgtgcttctcctatgctgccctgctgaccaagaccaaccgcatccaccgcatctttgagcagggcaagaagtctgtgacagcccccaagttcatcagccctgccagccagctggtgatcaccttcagcctcatctctgtgcagctgctgggcgtgtttgtgtggtttgtggtggaccccccccacatcatcattgattatggagagcagaggaccctggaccctgagaaggcccggggcgtgctgaagtgtgacatcagtgacctgagcctcatctgcagcctgggctacagcatcctgctgatggtgacctgcaccgtgtatgccatcaagacccggggcgtgcctgagaccttcaatgaggccaagcccatcggcttcaccatgtacaccacctgcatcatctggctggccttcatccccatcttcttcggcacagcccagagcgctgagaagatgtacatccagaccaccaccctgactgtgtccatgagcctgagcgcctctgtgtccctgggcatgctgtacatgcccaaggtgtacatcatcatcttccaccctgagcagaatgtgcagaagaggaagaggagcttcaaggctgtggtgacagctgccaccatgcagagcaagctgatccagaagggaaatgaccggcccaacggggaggtgaagtctgagctgtgtgagagcctggagaccaacaccagcagcaccaagaccacctacatctcctacagcaaccacagcatctag

SEQ ID NO: 307101 - DNA, 2727 bp, Artificial Sequence
  derived and/or modified sequence
atggtgtgtgagggcaagaggtctgccagctgcccctgcttcttcctgctgacagccaagttctactggatcctgaccatgatgcagaggacccacagccaggagtatgcccacagcatccgggtggatggagacatcatcctgggcggcctcttccctgtgcacgccaagggggagcggggcgtgccctgtggggagctgaagaaggagaagggcatccaccggctggaggccatgctgtatgccatcgaccagatcaacaaggaccctgacctgctgagcaacatcaccctgggcgtgcgcatcctggacacctgcagccgggacacctacgccctggagcagagcctgacctttgtgcaggccctgattgagaaggatgccagtgatgtgaagtgtgccaatggagacccccccatcttcaccaagccagacaagatcagcggcgtgattggagctgctgccagctctgtgtccatcatggtggccaacatcctgcggctcttcaagatcccccagatctcctatgccagcacagcccctgagctgagtgacaacaccaggtatgacttcttcagccgggtggtgcccccagacagctaccaggcccaggccatggtggacatcgtgacagccctgggctggaactacgtgtccaccctggccagcgagggcaactatggagagagcggcgtggaggccttcacccagatcagccgggagatcggcggcgtgtgcatcgcccagagccagaagatcccccgggagcccaggcctggagaatttgagaagatcatcaagaggctgctggagaccccaaatgcccgggctgtgatcatgtttgccaatgaagatgacatccgccgcatcctggaggccgccaagaagctgaaccagagcggccacttcctgtggattggaagtgacagctggggcagcaagatcgcccctgtgtaccagcaggaggagattgctgagggcgctgtgaccatcctgcccaagagggccagcattgatggctttgaccgctacttccgcagcaggaccctggccaacaacagaagaaatgtgtggtttgctgagttctgggaggagaactttggctgcaagctgggcagccacggcaagaggaacagccacatcaagaagtgcaccggcctggagcgcatcgcccgggacagcagctatgagcaggagggcaaggtgcagtttgtgattgatgctgtgtacagcatggcctatgccctgcacaacatgcacaaggacctgtgccccggctacatcggcctgtgccccaggatgagcaccattgatggcaaggagctgctgggctacatccgggctgtgaacttcaacggcagcgctggcacccctgtgaccttcaatgaaaatggagatgcccctggccgctatgacatcttccagtaccagatcaccaacaagagcacagagtacaaggtgattggccactggaccaaccagctgcacctgaaggtggaggacatgcagtgggcccaccgggagcacacccacccagcctctgtgtgcagcctgccctgcaagccaggagagaggaagaagacagtgaagggcgtgccctgctgctggcactgtgagcgctgtgagggctacaactaccaggtggatgagctgagctgtgagctgtgccccctggaccagaggcccaacatgaacagaacaggctgccagctgatccccatcatcaagctggagtggcacagcccctgggccgtggtgcctgtgtttgtggccatcctgggcatcatcgccaccaccttcgtcatcgtgacctttgtgcgctacaatgacacccccatcgtgcgggccagcggccgggagctgtcctatgtgctgctgaccggcatcttcctgtgctacagcatcaccttcctgatgattgctgccccagacaccatcatctgcagcttcagaagagtcttcctgggcctgggcatgtgcttctcctatgctgccctgctgaccaagaccaaccgcatccaccgcatctttgagcagggcaagaagtctgtgacagcccccaagttcatcagccctgccagccagctggtgatcaccttcagcctcatctctgtgcagctgctgggcgtgtttgtgtggtttgtggtggaccccccccacatcatcattgattatggagagcagaggaccctggaccctgagaaggcccggggcgtgctgaagtgtgacatcagtgacctgagcctcatctgcagcctgggctacagcatcctgctgatggtgacctgcaccgtgtatgccatcaagacccggggcgtgcctgagaccttcaatgaggccaagcccatcggcttcaccatgtacaccacctgcatcatctggctggccttcatccccatcttcttcggcacagcccagagcgctgagaagatgtacatccagaccaccaccctgactgtgtccatgagcctgagcgcctctgtgtccctgggcatgctgtacatgcccaaggtgtacatcatcatcttccaccctgagcagaatgtgcagaagaggaagaggagcttcaaggctgtggtgacagctgccaccatgcagagcaagctgatccagaagggaaatgaccggcccaacggggaggtgaagtctgagctgtgtgagagcctggagaccaacagcaagagctctgtggagttccccatggtgaagagcggcagcaccagctag

SEQ ID NO: 307102 - DNA, 63 bp, Artificial Sequence
  derived and/or modified sequence
atggtgtgtgagggcaagaggtctgccagctgcccctgcttcttcctgctgacagccaagtag

SEQ ID NO: 307103 - DNA, 2727 bp, Artificial Sequence
  derived and/or modified sequence
atggtgtgcgagggcaagcggagcgccagctgcccctgcttcttcctgctgactgctaagttctattggatcctcacaatgatgcagagaacccactcccaagagtacgcacacagcatcagggtggacggcgacatcattcttggcggtttgttccccgtacatgctaagggagagcgcggggtgccatgcggcgagctcaagaaagagaaaggaatccaccgcctggaagcgatgctctatgcgatcgaccagattaataaggaccccgatctcctaagcaacatcaccctgggagtcagaatcttagatacctgctcacgcgacacttacgctctcgaacaaagcctgaccttcgtgcaggcgttgatcgaaaaggatgcttccgatgtcaagtgcgcaaatggcgaccccccaatcttcacaaaacctgacaaaatcagtggggtgataggagcagccgcctcgagcgtatctataatggtagccaacatcctgagactgttcaagataccccagattagttacgcttcaaccgcccccgaactgagcgataatacccgctacgacttcttcagtagggttgtgcctcctgacagctaccaggcccaggcgatggttgacattgtcactgcattgggttggaattatgttagcacattagcctcagaggggaactatggggaatcgggcgtcgaggctttcacacagatcagccgcgagattggaggcgtctgtattgcacaaagccagaagatccccagggagcccagacctggcgagtttgaaaagataattaaacggctgctcgagactcctaatgccagggccgtgatcatgttcgccaacgaggacgacattaggagaatcctggaagccgccaagaaactgaatcaatccggtcacttcttatggattgggtccgactcatggggcagtaagatcgcacctgtgtaccagcaggaggaaattgcggaaggtgctgtaactatcctgccgaagagggcctccattgacggtttcgatcgatattttagatcgcggaccctggccaataaccggcggaatgtgtggtttgccgagttctgggaagagaattttggctgcaaactcggttctcacggcaagcgtaacagccacattaagaagtgtactggcttggagcgcatcgcgcgagattctagctatgagcaggaaggcaaagttcagtttgtcatcgatgctgtgtactctatggcctatgcattgcacaacatgcataaggacctgtgcccaggctatatcgggctgtgcccgcggatgagtaccatcgacggcaaagagctgctcggatacattcgagcggtcaacttcaatggctccgctggtacccccgtcaccttcaatgagaacggtgatgcaccagggcgatatgatatttttcagtaccagataactaacaagagcaccgaatataaggttattggtcactggactaaccagctgcatttgaaggtagaggacatgcagtgggcacaccgggagcacacacaccctgccagtgtttgctcacttccttgtaaacctggagagcggaagaagaccgtcaagggcgtgccatgttgctggcattgcgaacggtgtgagggctacaactaccaggtcgacgagctgtcgtgtgagctgtgcccattagaccagcgacctaacatgaaccgcacagggtgtcaactgattcccataatcaagctggagtggcactccccatgggccgtggtgcccgtgttcgttgcaatcctgggtatcattgccaccacttttgtcatcgtgactttcgttaggtataatgacacaccaatcgttagggcatctggtcgcgaactctcatatgtgctgctcaccggtatcttcttatgctactccattactttccttatgattgccgcacctgatactattatctgctcctttcgaagagttttcctcggcctcggcatgtgtttttcctacgctgccctgctgacaaagactaatcggattcataggatctttgagcagggcaaaaaatccgtcaccgcccccaaattcatcagtccggccagtcaactggtcattacgttctctcttatcagtgtgcagcttttgggggtattcgtttggttcgtggtggatcccccacacattataattgattacggtgaacaacgaactttggaccccgagaaggccaggggggtgttgaagtgtgacatttccgacttgtctctgatttgctccttagggtactccatcttgctcatggtcacctgtacggtttacgctattaaaacccggggagtgcccgaaactttcaatgaagccaagccgatcggattcaccatgtacactacgtgtataatatggttagcattcatccctatctttttcggcactgcacagtcagctgaaaagatgtatatccagacgacaactctgacggtaagcatgtcactctccgcttccgtttctctcgggatgctttacatgcctaaagtctatataataatcttccacccagagcaaaatgtccagaagcggaaacgttccttcaaggcagtagtgaccgctgcaacgatgcagtcaaaattgatccagaagggaaacgaccgccccaatggtgaagttaagtctgaactttgtgagtccctggagacaaacacatcctccaccaagactacctacatctcttatagtaaccactctatttag

SEQ ID NO: 307104 - DNA, 2727 bp, Artificial Sequence
  derived and/or modified sequence
atggtgtgcgagggcaagcggagcgccagctgcccctgcttcttcctgcttacagctaagttttattggatcctcaccatgatgcaacgaactcacagccaggagtatgcgcatagcatccgcgttgacggcgatatcattctgggcggtttattccccgtgcacgccaagggagagaggggggtgccatgcggggaactgaaaaaagagaagggaatacaccggttagaggctatgttatacgcaatcgaccaaatcaacaaggaccctgacctcctcagcaatataacactaggcgtccgaatcttagatacttgttcccgtgatacctacgcactcgagcagagcctgacatttgtgcaggccttgatcgaaaaggacgcgtcagacgtgaagtgtgcaaatggggacccacccattttcaccaaaccagacaaaatatccggggtgatcggcgccgctgcttctagtgtctccatcatggtcgcgaacattctgaggctgtttaaaatcccccagatctcatatgcatctacagcccccgaactgtccgacaacacaagatatgacttcttctctagagtcgtgcctcctgactcctatcaggcccaggcaatggtggacatcgtcaccgccctcggctggaattatgtgtccacattggccagcgaaggcaactatggagagtcaggcgtggaagcatttacacaaattagccgggagattggaggagtgtgcatagcacaaagccaaaagatcccaagagagcccagacccggcgaatttgaaaagataatcaaacgcctgctcgagacacctaacgcccgggctgtcataatgtttgcaaatgaggacgacattcggcgcatccttgaggcggctaagaaactgaatcagagcggacattttctctggataggaagcgacagttggggctcaaaaatcgccccagtctaccagcaagaggaaatagccgagggcgcagttacaatcctgccaaaacgcgcctcaattgatggttttgaccgctatttccgctcaaggacactggccaacaaccgtcgaaatgtctggtttgctgaattttgggaggagaatttcggctgcaagctaggcagtcatggaaaacgtaactcacatatcaagaagtgcactggactggaacgcatcgccagagactcaagctacgagcaggaggggaaagttcagtttgtgatagatgccgtatactccatggcttacgcgctgcataatatgcacaaagatctgtgtccaggttatattggtctgtgtccaagaatgtctacgatcgacgggaaagaactgctggggtacattcgcgccgtgaatttcaacgggtccgcaggtacccctgtcactttcaatgaaaatggagacgccccaggtaggtatgatattttccagtaccagataaccaataagagcaccgagtataaggtaatcggacactggaccaatcagttgcatctgaaagtggaagatatgcagtgggcccacagagaacatactcacccagcttctgtgtgtagcttaccctgcaagccaggagagaggaagaaaactgtgaaaggtgttccttgctgttggcattgcgaacggtgcgagggctacaactaccaggttgacgaacttagctgtgaattgtgcccattagaccaaaggccgaacatgaacaggaccggatgccagctgatacccattatcaagctagaatggcattctccatgggcagtcgtgcccgtgttcgtggccatccttgggatcatcgctactacatttgttattgtcaccttcgtccggtacaacgacacacccatcgtgagggccagtggcagggagctcagctatgtactgctgactggcattttcctttgctactctatcacgtttttgatgatcgccgcaccagatacaataatttgttcttttaggagggttttcttaggattaggaatgtgcttctcgtacgcggcactcctgacaaagacaaataggatacatcggatttttgagcaaggcaaaaagtcagttaccgcaccaaagtttatttccccggcttcgcagctggtaatcacctttagcttaatttccgttcagcttctcggggtctttgtctggtttgtcgtcgaccctccccacatcataattgattacggcgaacagagaacgctggatcccgagaaggcacgcggagtactgaaatgcgacatctctgacctctctcttatctgcagtcttgggtatagtatcctcctcatggttacgtgcacagtctatgctatcaagacccggggcgtcccagaaacatttaacgaagcaaaacccatcggattcacaatgtataccacctgcattatctggctagccttcattcctattttcttcggaaccgcacagtccgcagaaaagatgtatattcagaccacaacattgacggtttcaatgtcactttccgcttccgtgtccctgggtatgctatacatgccaaaagtctacatcatcatctttcacccagagcagaacgtgcaaaaaagaaagcggtcctttaaggccgtggtgaccgcagcgaccatgcagagcaaactcatccaaaaggggaatgaccgaccaaacggtgaggtgaaaagcgagctgtgtgagtcattggagacaaactcaaagtcaagtgtggaattccctatggtgaagagtggcagtacctcatag

SEQ ID NO: 307105 - DNA, 63 bp, Artificial Sequence
  derived and/or modified sequence
atggtgtgcgagggcaagcggagcgccagctgcccctgcttcttcctgctgaccgccaagtag

SEQ ID NO: 307106 - DNA, 2727 bp, Artificial Sequence
  derived and/or modified sequence
atggtgtgcgagggcaagcggagcgccagctgcccctgcttcttcttgcttacagccaaattctattggatattgaccatgatgcaaagaacccatagccaggaatatgcgcattccatcagggttgacggggacataatcctgggcggacttttccccgtgcatgctaagggggagcgcggcgtgccctgtggcgagctgaaaaaggaaaagggcatccatagattggaggctatgctgtacgctattgatcagataaacaaggaccctgatctgctgtccaatatcacccttggcgttaggattctcgatacctgctcccgtgacacatacgctttagagcagtccttaacttttgtccaagcactcattgaaaaggacgccagtgacgtgaaatgtgcaaacggcgatcccccaatcttcacgaagcctgacaagatttcaggagtgattggggccgccgcctcttcagtgtccatcatggtggcaaatattttgcggctgttcaagataccccagatttcctatgccagcaccgcaccagagctttcggacaatacacggtacgacttcttctcccgggtggtacctccggactcatatcaggcgcaagcgatggtggacatcgtcaccgccctcggctggaattacgtgtcgacacttgcctccgagggcaactacggggagagcggagtggaagcatttactcaaatatctcgggagatcggaggggtctgtattgcccagtcgcaaaagattccaagagagccccggcctggggagtttgaaaagattattaaacggctcctggaaactcctaacgcccgtgctgtgataatgttcgcaaatgaggatgacattcggaggatcttagaggccgctaagaagcttaaccagtctggccacttcctgtggattggatcagattcatggggaagtaagatcgcccccgtttatcagcaagaggagatcgcggagggagccgtgactatcctgcctaagcgagcgagtattgacggattcgatcgctattttaggagtaggaccttggccaacaaccgacgaaatgtctggttcgcagaattctgggaagagaacttcgggtgtaagctaggtagccacggtaagaggaatagccacatcaagaaatgtacaggattggaaagaatagccagagactctagttatgaacaggaaggcaaggtccaatttgtgattgatgcagtgtactccatggcgtatgccctgcataacatgcataaggacctctgtccaggctacattgggctgtgtcctcgcatgtcgacaatcgatggcaaagaactcttagggtatattcgggcagttaacttcaacggatccgccgggacaccagtgacatttaatgaaaatggcgatgcacctggcagatacgatatttttcagtaccaaattacgaataaaagcacagagtataaagtcatcgggcattggacaaaccaactccacctcaaagtcgaagacatgcagtgggcacatcgcgagcacacccatcccgcaagtgtgtgttccttgccatgcaaacccggcgagcgcaaaaagaccgtcaaaggggtgccttgctgctggcattgcgagcgctgcgaaggatataattaccaagtggacgagctgtcttgcgaactctgtcctctggatcaaaggccaaatatgaaccgcaccggttgtcagctgattcctatcatcaagctggaatggcactcaccttgggccgtggttcccgtgtttgtcgcgattctgggcattattgccacgacctttgtgatcgtgacgtttgtccggtataacgatactcccatagtccgggcatcaggtcgggagctttcttatgtcttactgacgggtatctttttgtgttactcaattacattccttatgattgcagctccggacacaatcatctgtagctttaggagggtgtttctcggtctggggatgtgcttcagttacgcggccctgctgaccaagacaaacaggatccatcgaatctttgaacaaggcaaaaagtctgtgaccgcgcctaaatttataagccccgcctcacaactggtgattacatttagcctaatttctgtgcagctactgggagtcttcgtgtggttcgtggtggatcctccccacataattatcgactacggtgagcagaggaccttagatcctgagaaggctaggggagtcctgaagtgcgatatcagtgacctgagtctgatctgctctctgggctacagcattctcctgatggtgacgtgcaccgtctacgccataaaaaccaggggggtgcccgaaacctttaacgaagctaaaccaattggattcacgatgtacacgacctgcatcatctggctggccttcatcccaattttctttggcactgctcaaagtgccgaaaaaatgtacatccagactacaacacttacagtgtccatgtcactgagcgcctcggtatctcttgggatgctctacatgcccaaagtttatatcattattttccatccggagcagaatgtgcagaaaaggaagcggagcttcaaggccgttgtgacagccgccaccatgcagtctaaacttattcagaagggcaacgaccggcctaatggagaagtgaagagtgagctgtgcgagtctctggagaccaacacttccagtactaagaccacttacatttcgtattcaaatcactcaatctag

SEQ ID NO: 307107 - DNA, 2727 bp, Artificial Sequence
  derived and/or modified sequence
atggtgtgcgaaggaaaaaggtcggcgagctgtccttgtttcttcttactaactgctaaattttattggattctgacgatgatgcagaggacacacagccaggagtacgctcactcaatcagggtggatggtgacatcatactcggcggtttgttcccggtgcacgccaagggggaaaggggcgtgccctgcggagagcttaagaaggagaaagggatccacagactagaggctatgttatacgctattgaccagattaataaagatcctgatctcctgtctaacattactctgggagtgcgcattctggacacatgcagccgcgatacatacgcattggagcagagtttgacatttgtgcaagcactgatcgaaaaagacgcatccgatgtgaaatgcgcgaacggtgacccgccaatatttacgaagcccgacaagatatcaggggtcatcggagccgctgcaagcagtgtgtcaattatggtcgctaatatattgcggctctttaagataccccagatcagttacgcgtcaaccgcccctgagctcagcgataacacaaggtacgacttcttcagccgtgtagtccccccagattcctatcaggctcaggccatggtggacattgtcaccgcgttaggctggaattatgtgtcaacactggccagcgaaggcaattacggagaatctggtgtagaggctttcacccaaatctcccgcgagattgggggagtttgcattgctcagagccagaagattccgcgagaacccagacccggagagtttgagaagatcatcaagaggctgcttgaaactccaaacgcgcgagcggtgatcatgttcgccaacgaggacgatatacgcaggatcttggaagctgcaaaaaaactgaaccagagcggccatttcttatggatcgggagtgattcatgggggtctaaaatcgcacctgtctatcagcaggaggagatagcagagggagccgtcacaattctccctaaacgggcttccatagatgggtttgatagatattttagatctcgcacactggccaacaacaggaggaacgtctggttcgctgaattctgggaggaaaatttcggttgtaagcttgggagccatggaaaacggaactcccacattaaaaagtgcacagggcttgagcgcatagctcgtgactcaagctacgagcaagaaggcaaggtgcagtttgtgatcgacgccgtttattctatggcctatgctctgcacaacatgcataaagatctgtgccccggatatatcgggctttgccctaggatgtcaacaatcgatggcaaagagttgctcggttacatccgcgcagtcaattttaatggctccgcaggcactcctgtgaccttcaacgaaaatggagacgccccaggaagatacgacatcttccagtatcagataacaaacaagtctaccgagtataaagtgattggtcattggaccaatcagctccacttaaaggttgaagatatgcagtgggcgcatagggagcatacacaccccgctagtgtatgctccctgccttgtaaacccggtgagagaaagaagacggtcaagggagtaccatgttgttggcactgtgaacgctgtgagggttacaactatcaggtagatgaactttcctgtgagctgtgccctttagatcagagaccaaacatgaaccgtaccggatgccagcttatccctatcattaaattagaatggcattcgccttgggccgtcgttcctgtgttcgtggcaatcctgggaatcatcgccactaccttcgttattgtcacatttgtgcgctacaacgacacaccaatcgtaagagctagcggcagagaactttcgtacgtcctgctaaccggcatatttctatgctattccattacctttctaatgatcgcggctcctgataccattatctgttcttttaggagggtatttctcggtctgggtatgtgcttctcatatgcggctctgttgaccaagaccaatcgaatccaccgcatctttgaacagggcaagaaaagtgtcacagcccctaaattcattagtccagccagccaacttgtaataacattcagcctgatttccgtgcagctgcttggcgtgtttgtatggtttgtggtggacccgcctcacatcatcatcgattacggagaacaaagaacgctggacccagagaaagcaaggggcgtgctcaagtgtgacattagcgacctttccctgatctgcagtctggggtacagtatcttgcttatggtcacctgcacagtgtacgccataaagactcgcggagtgcctgaaactttcaatgaggccaagccaatcggtttcaccatgtataccacgtgtataatatggctcgcctttatccctatattcttcgggacagcacaatccgccgaaaagatgtacatccagaccaccaccctcaccgtttcaatgtccttatcagcctccgtttctctcggcatgctctacatgccaaaagtatacattataatctttcaccctgagcagaatgtgcagaaaaggaagcgttcttttaaggctgttgtgaccgcagccactatgcaaagcaaactcatacagaagggcaatgatcggcctaatggggaggtcaaatccgaactctgcgaatcactggagaccaacacctcctctactaaaactacttacatcagttattccaaccacagtatctag

SEQ ID NO: 307108 - DNA, 2727 bp, Artificial Sequence
  derived and/or modified sequence
atggtctgcgaaggaaagcgctctgcctcatgcccatgcttttttcttcttaccgctaagttctattggatcctcaccatgatgcagcgaacacactcccaggaatacgctcactctattagggtggacggggatataattcttggcggactgtttccggtgcatgcaaagggcgagcgtggtgtgccatgcggcgaactgaaaaaagagaagggaatacacagactagaagccatgctgtacgcaatcgaccagattaataaggacccagaccttttgagtaatattacactgggagtgcgcattcttgacacctgttctcgggacacttatgctctggagcaaagcctcaccttcgtccaggcactgatcgaaaaagatgcctctgacgtcaagtgtgcgaatggcgatccccctatttttaccaaacccgacaagatatccggcgtgatcggcgcagcagccagctcggtctccatcatggttgcaaatatattgcgcctgtttaaaattccgcaaatttcctacgcttctaccgcccctgagctgtccgacaatactcgttacgattttttctcccgggtggtcccccctgattcttatcaggctcaagccatggtagatattgtgacagccttaggatggaactacgttagcactctcgcctcagagggcaattatggggagtcaggtgtcgaagcctttacgcagatatctcgagagattgggggtgtgtgcatagctcagtcccagaagataccacgagagccacgccctggtgagttcgaaaaaatcatcaagcgactgctggagactcctaacgccagagccgtcattatgtttgccaacgaggatgacatcagacggatccttgaagctgcaaagaaactaaaccagagtggccacttcctgtggatagggagcgactcgtggggatctaaaattgctcccgtataccagcaggaggagattgcagagggtgccgttacaattctgccaaagagagcctcaatcgacggtttcgataggtatttcagaagcaggacacttgctaataacaggagaaatgtgtggttcgcggagttttgggaagagaatttcggctgtaagctcggttcacatggcaaacggaatagccacataaaaaagtgtacgggactggagagaatcgctcgcgactcatcctatgaacaggagggaaaggtccagttcgtgattgatgccgtctattcaatggcctacgcactgcacaacatgcataaagacttgtgtcctggctatattggactgtgcccacgaatgagcactatcgatgggaaggagttactggggtacattagagcggtgaattttaatggctctgccggaactccagtgacctttaacgagaatggggatgccccagggaggtacgacatctttcaataccagattaccaataaatccacagaatataaagtaatcggccactggaccaatcagctgcatcttaaagtggaagacatgcaatgggctcaccgcgaacatactcatcccgcatccgtgtgcagtttaccatgcaagccaggcgaacggaagaagaccgtcaaaggtgttccgtgttgctggcactgcgagcgctgcgaaggatacaattatcaagtagacgagctgagctgcgaactctgtcctttagatcagcgacccaatatgaacaggactgggtgccaactcatcccaatcatcaaactggaatggcactccccctgggccgtcgtgcctgtgttcgtagcaatcctcggaattatagcaacgactttcgtgattgtcacttttgtgcgctacaacgacactcccatcgtgcgggctagcgggagggaactgtcatacgtgcttttgaccggtattttcctgtgttattcgatcacgtttttaatgatcgcagcaccagataccatcatttgcagctttcgtcgcgtatttctgggactagggatgtgcttttcttacgcagccctgcttaccaaaactaaccggatccaccggattttcgagcaggggaaaaagtccgtgacggcccctaagttcatttcaccagcttcccagctggtgatcaccttctctctgatctcagttcagcttcttggagttttcgtttggtttgtagtggacccgcctcatatcataatagattacggggagcaaagaaccctggaccccgaaaaggccagaggggttctgaagtgtgatatttctgatctttcactgatctgctcactgggttacagcatacttttgatggtgacctgcacagtgtacgccattaagacacgtggagtgcccgagacttttaacgaggccaaaccaatcggtttcaccatgtacaccacctgtatcatctggctggcgttcatccccatctttttcgggacagctcagtccgctgagaagatgtacatccagaccacaactctgaccgtgagtatgtccctaagcgctagcgtatccctggggatgttgtacatgcccaaagtgtatataattatcttccacccggagcagaatgtgcaaaaacgcaagcgatccttcaaggctgttgtaactgcagccactatgcagagcaagctcatacagaagggtaacgaccgtccaaacggtgaggtgaaatccgagttatgcgagagtttagaaaccaattcgaagagctcagtcgaattccccatggtgaaatccggttctacatcttag

SEQ ID NO: 307109 - DNA, 63 bp, Artificial Sequence
  derived and/or modified sequence
atggtatgcgagggtaaaagaagcgcgagttgcccttgcttcttcctgctgacagccaagtag

SEQ ID NO: 307110 - DNA, 2727 bp, Artificial Sequence
  derived and/or modified sequence
atggtgtgcgaaggaaagcggagtgcctcatgtccttgcttctttttgctgacggccaaattttattggatcctgactatgatgcagcgcacacatagtcaggaatatgcccatagcatccgcgtcgacggggatataattctggggggactgtttcccgttcacgccaagggagagcggggagtaccctgtggagagttgaaaaaagaaaaagggatccaccgattggaggctatgttgtatgcgatcgaccaaataaataaggaccctgatcttctgtctaatatcactctcggagtgcgaatcctagacacttgttctcgagacacctatgcactagagcagtcactgaccttcgttcaggccctgatcgagaaagacgcatcggatgttaagtgcgccaacggtgacccccctatcttcactaagcctgataaaatcagcggagtgatcggagcagccgctagctctgtttcaattatggtggcaaacatcctccggttatttaaaatcccccagatttcctatgccagtactgcgcctgagctcagcgacaatacaaggtacgactttttcagtcgcgttgtgccaccagactcatatcaggcccaggcaatggtggacattgttactgcccttggttggaattatgtcagcaccctcgcctcagagggtaattacggcgagtcaggcgtcgaagctttcacccagatctctagggaaatcgggggtgtgtgtatagcacaaagtcagaagatccctagagaacccaggcctggcgagttcgagaaaataatcaaacgtcttttagaaactcccaatgccagggcagtcattatgtttgcaaacgaagatgatataaggcgtatactggaggcagccaaaaaactgaaccaatcagggcactttttatggattgggtcagactcatggggaagcaagattgccccagtctatcagcaagaggagattgccgaaggcgcagtgactatccttcccaaaagagcctcaattgatggatttgatcggtacttcagatcgagaactttggccaacaaccgaaggaatgtctggttcgctgaattttgggaagaaaacttcggatgcaaacttggctcacatggtaagcgcaactctcatatcaaaaagtgtactgggttagaacgcatcgcacgagattccagctacgaacaggaaggcaaagttcagttcgtcatagacgccgtttattccatggcttacgcactgcacaacatgcacaaggatctgtgtccaggatatataggcctctgcccacgcatgtcaacaattgatggcaaagaactcctggggtatattcgggctgttaacttcaacggatctgcaggcacccccgttaccttcaatgaaaacggcgatgctccaggccgttacgacatcttccagtaccagattacgaacaaaagcacggaatacaaggttatcggacactggacgaatcaattacacctgaaggtagaagacatgcagtgggcccatcgggaacacactcaccctgcctccgtatgttccctaccctgcaaaccgggtgagcgcaaaaaaaccgtgaagggcgtgccctgttgctggcactgcgaaaggtgcgaggggtacaattaccaggtggacgagctgagttgcgagttatgtccactggaccagagaccaaacatgaatcggaccggttgccagctgatccctataatcaaactcgagtggcacagtccctgggccgttgtccccgtattcgtggctattttgggaattattgccaccacattcgtgatcgtcacttttgtgcggtataacgatacccccatcgttagggctagcggtagggagctctcttatgttctcctcacagggatctttctttgctacagtatcactttcctgatgatcgcggctcctgacaccatcatctgctcatttagacgggtgtttcttggattgggaatgtgttttagttacgctgctctccttaccaaaacgaaccgaatacaccgtatattcgagcagggaaaaaagtctgttaccgctcctaaatttatttcaccagccagccagctcgttataacattcagtttgatttcagtccagctgctgggcgtgttcgtttggttcgtggtcgatcctccacacatcattatcgactacggagaacagcgaacccttgacccagagaaggctaggggagttctgaagtgcgacatctccgacctgagtttaatttgcagccttggttactcgatcttattgatggtaacctgcactgtgtatgctattaaaacccgaggagttccagaaacgtttaacgaggcgaagcccatcggattcacaatgtacactacatgcattatatggctggcatttatccctatctttttcgggacggcccagtcggctgagaagatgtatattcagactaccaccctgacagtaagtatgtcacttagtgccagtgtgtccctcgggatgctgtacatgcccaaagtttatatcatcattttccatccagagcaaaatgtgcagaagcgtaaaagatcttttaaggcagttgtgactgccgctacaatgcagagtaagctcatacaaaagggtaacgaccgtcctaacggagaggtgaagagtgaactgtgcgaatcactggagaccaacacctcctccaccaagactacctacatttcttattccaatcactcgatctag

SEQ ID NO: 307111 - DNA, 2727 bp, Artificial Sequence
  derived and/or modified sequence
atggtgtgcgagggcaagagaagcgccagctgcccctgcttcttcctgctgaccgccaagttctactggatcctgaccatgatgcagagaacccacagccaggagtacgcccacagcatcagagtggacggcgacatcatcctgggcggcctgttccccgtgcacgccaagggcgagagaggcgtgccctgcggcgagctgaagaaggagaagggcatccacagactggaggccatgctgtacgccatcgaccagatcaacaaggaccccgacctgctgagcaacatcaccctgggcgtgagaatcctggacacctgcagcagagacacctacgccctggagcagagcctgaccttcgtgcaggccctgatcgagaaggacgccagcgacgtgaagtgcgccaacggcgacccccccatcttcaccaagcccgacaagatcagcggcgtgatcggcgccgccgccagcagcgtgagcatcatggtggccaacatcctgagactgttcaagatcccccagatcagctacgccagcaccgcccccgagctgagcgacaacaccagatacgacttcttcagcagagtggtgccccccgacagctaccaggcccaggccatggtggacatcgtgaccgccctgggctggaactacgtgagcaccctggccagcgagggcaactacggcgagagcggcgtggaggccttcacccagatcagcagagagatcggcggcgtgtgcatcgcccagagccagaagatccccagagagcccagacccggcgagttcgagaagatcatcaagagactgctggagacccccaacgccagagccgtgatcatgttcgccaacgaggacgacatcagaagaatcctggaggccgccaagaagctgaaccagagcggccacttcctgtggatcggcagcgacagctggggcagcaagatcgcccccgtgtaccagcaggaggagatcgccgagggcgccgtgaccatcctgcccaagagagccagcatcgacggcttcgacagatacttcagaagcagaaccctggccaacaacagaagaaacgtgtggttcgccgagttctgggaggagaacttcggctgcaagctgggcagccacggcaagagaaacagccacatcaagaagtgcaccggcctggagagaatcgccagagacagcagctacgagcaggagggcaaggtgcagttcgtgatcgacgccgtgtacagcatggcctacgccctgcacaacatgcacaaggacctgtgccccggctacatcggcctgtgccccagaatgagcaccatcgacggcaaggagctgctgggctacatcagagccgtgaacttcaacggcagcgccggcacccccgtgaccttcaacgagaacggcgacgcccccggcagatacgacatcttccagtaccagatcaccaacaagagcaccgagtacaaggtgatcggccactggaccaaccagctgcacctgaaggtggaggacatgcagtgggcccacagagagcacacccaccccgccagcgtgtgcagcctgccctgcaagcccggcgagagaaagaagaccgtgaagggcgtgccctgctgctggcactgcgagagatgcgagggctacaactaccaggtggacgagctgagctgcgagctgtgccccctggaccagagacccaacatgaacagaaccggctgccagctgatccccatcatcaagctggagtggcacagcccctgggccgtggtgcccgtgttcgtggccatcctgggcatcatcgccaccaccttcgtgatcgtgaccttcgtgagatacaacgacacccccatcgtgagagccagcggcagagagctgagctacgtgctgctgaccggcatcttcctgtgctacagcatcaccttcctgatgatcgccgcccccgacaccatcatctgcagcttcagaagagtgttcctgggcctgggcatgtgcttcagctacgccgccctgctgaccaagaccaacagaatccacagaatcttcgagcagggcaagaagagcgtgaccgcccccaagttcatcagccccgccagccagctggtgatcaccttcagcctgatcagcgtgcagctgctgggcgtgttcgtgtggttcgtggtggaccccccccacatcatcatcgactacggcgagcagagaaccctggaccccgagaaggccagaggcgtgctgaagtgcgacatcagcgacctgagcctgatctgcagcctgggctacagcatcctgctgatggtgacctgcaccgtgtacgccatcaagaccagaggcgtgcccgagaccttcaacgaggccaagcccatcggcttcaccatgtacaccacctgcatcatctggctggccttcatccccatcttcttcggcaccgcccagagcgccgagaagatgtacatccagaccaccaccctgaccgtgagcatgagcctgagcgccagcgtgagcctgggcatgctgtacatgcccaaggtgtacatcatcatcttccaccccgagcagaacgtgcagaagagaaagagaagcttcaaggccgtggtgaccgccgccaccatgcagagcaagctgatccagaagggcaacgacagacccaacggcgaggtgaagagcgagctgtgcgagagcctggagaccaacaccagcagcaccaagaccacctacatcagctacagcaaccacagcatctag

SEQ ID NO: 307112 - DNA, 2727 bp, Artificial Sequence
  derived and/or modified sequence
atggtgtgcgagggcaagagaagcgccagctgcccctgcttcttcctgctgaccgccaagttctactggatcctgaccatgatgcagagaacccacagccaggagtacgcccacagcatcagagtggacggcgacatcatcctgggcggcctgttccccgtgcacgccaagggcgagagaggcgtgccctgcggcgagctgaagaaggagaagggcatccacagactggaggccatgctgtacgccatcgaccagatcaacaaggaccccgacctgctgagcaacatcaccctgggcgtgagaatcctggacacctgcagcagagacacctacgccctggagcagagcctgaccttcgtgcaggccctgatcgagaaggacgccagcgacgtgaagtgcgccaacggcgacccccccatcttcaccaagcccgacaagatcagcggcgtgatcggcgccgccgccagcagcgtgagcatcatggtggccaacatcctgagactgttcaagatcccccagatcagctacgccagcaccgcccccgagctgagcgacaacaccagatacgacttcttcagcagagtggtgccccccgacagctaccaggcccaggccatggtggacatcgtgaccgccctgggctggaactacgtgagcaccctggccagcgagggcaactacggcgagagcggcgtggaggccttcacccagatcagcagagagatcggcggcgtgtgcatcgcccagagccagaagatccccagagagcccagacccggcgagttcgagaagatcatcaagagactgctggagacccccaacgccagagccgtgatcatgttcgccaacgaggacgacatcagaagaatcctggaggccgccaagaagctgaaccagagcggccacttcctgtggatcggcagcgacagctggggcagcaagatcgcccccgtgtaccagcaggaggagatcgccgagggcgccgtgaccatcctgcccaagagagccagcatcgacggcttcgacagatacttcagaagcagaaccctggccaacaacagaagaaacgtgtggttcgccgagttctgggaggagaacttcggctgcaagctgggcagccacggcaagagaaacagccacatcaagaagtgcaccggcctggagagaatcgccagagacagcagctacgagcaggagggcaaggtgcagttcgtgatcgacgccgtgtacagcatggcctacgccctgcacaacatgcacaaggacctgtgccccggctacatcggcctgtgccccagaatgagcaccatcgacggcaaggagctgctgggctacatcagagccgtgaacttcaacggcagcgccggcacccccgtgaccttcaacgagaacggcgacgcccccggcagatacgacatcttccagtaccagatcaccaacaagagcaccgagtacaaggtgatcggccactggaccaaccagctgcacctgaaggtggaggacatgcagtgggcccacagagagcacacccaccccgccagcgtgtgcagcctgccctgcaagcccggcgagagaaagaagaccgtgaagggcgtgccctgctgctggcactgcgagagatgcgagggctacaactaccaggtggacgagctgagctgcgagctgtgccccctggaccagagacccaacatgaacagaaccggctgccagctgatccccatcatcaagctggagtggcacagcccctgggccgtggtgcccgtgttcgtggccatcctgggcatcatcgccaccaccttcgtgatcgtgaccttcgtgagatacaacgacacccccatcgtgagagccagcggcagagagctgagctacgtgctgctgaccggcatcttcctgtgctacagcatcaccttcctgatgatcgccgcccccgacaccatcatctgcagcttcagaagagtgttcctgggcctgggcatgtgcttcagctacgccgccctgctgaccaagaccaacagaatccacagaatcttcgagcagggcaagaagagcgtgaccgcccccaagttcatcagccccgccagccagctggtgatcaccttcagcctgatcagcgtgcagctgctgggcgtgttcgtgtggttcgtggtggaccccccccacatcatcatcgactacggcgagcagagaaccctggaccccgagaaggccagaggcgtgctgaagtgcgacatcagcgacctgagcctgatctgcagcctgggctacagcatcctgctgatggtgacctgcaccgtgtacgccatcaagaccagaggcgtgcccgagaccttcaacgaggccaagcccatcggcttcaccatgtacaccacctgcatcatctggctggccttcatccccatcttcttcggcaccgcccagagcgccgagaagatgtacatccagaccaccaccctgaccgtgagcatgagcctgagcgccagcgtgagcctgggcatgctgtacatgcccaaggtgtacatcatcatcttccaccccgagcagaacgtgcagaagagaaagagaagcttcaaggccgtggtgaccgccgccaccatgcagagcaagctgatccagaagggcaacgacagacccaacggcgaggtgaagagcgagctgtgcgagagcctggagaccaacagcaagagcagcgtggagttccccatggtgaagagcggcagcaccagctag

SEQ ID NO: 307113 - DNA, 63 bp, Artificial Sequence
  derived and/or modified sequence
atggtgtgcgagggcaagagaagcgccagctgcccctgcttcttcctgctgaccgccaagtag

SEQ ID NO: 307114 - DNA, 1506 bp, Artificial Sequence
  derived and/or modified sequence
atggtgtgcgaagggaagagatcggcaagctgcccatgcttctttctactgaccgctaaattctattggattctgaccatgatgcagagaacccattcccaggaatacgcccattcaattagggtggatggggacatcatactgggtggactcttccctgtgcacgccaagggagaacggggtgtgccttgtggagagctgaaaaaggagaagggaattcacaggctggaagcaatgctatacgccattgatcagatcaacaaggaccctgatctactgtccaatatcaccttaggtgtaaggattctggatacctgctctagggacacgtatgcattggagcaatcactgacctttgtccaagcattaatagagaaagacgcatcggatgttaaatgcgctaatggggacccccccatattcacaaaacccgacaaaatctccggcgtcattggggccgcagcctcctccgtctctataatggtggccaatattctgagactgtttaaaattcctcagatctcatatgcttctaccgccccagagttgtccgacaacaccagatacgattttttttctagggtggtcccacccgactcctatcaggctcaagcgatggtggatatagtgacagcattgggctggaactatgtgagcacacttgcgtcagagggcaattacggcgaatccggagtggaggcctttacccagatctcacgagaaatcggcggcgtgtgtatcgcacaatcccagaagatcccccgagagcctaggccaggcgaatttgaaaagatcatcaagcgacttctggaaaccccaaatgctcgagctgtgattatgttcgccaatgaggacgacattcgaaggattctggaagcagccaaaaagttgaaccagtctggacactttctgtggatcgggagcgactcgtggggatctaaaatcgcccctgtgtatcaacaggaggagatcgccgaaggtgcggttaccatccttccaaaaagagctagcatcgacggattcgacaggtatttcaggtctagaacattggctaataacagacgtaatgtttggttcgcagaattctgggaggagaacttcggctgcaagctcggatctcacggaaagcggaattcacatatcaagaagtgcaccggcctggagagaatcgcaagggactcaagttacgagcaggaagggaaagttcagttcgtcatagatgcagtttacagtatggcctatgcactgcacaatatgcacaaggacctttgccctgggtacattggtctgtgccctcgaatgtccaccattgatggcaaagaactccttggctacatccgggccgtcaactttaatggctgccgaagaggtatccagatgtcactgccatggccaacacttttcacacccagcttctccagctcatgggccgtactggcactactgtcattgttgatgaagacggaaatgctgctggacgtgatgatctctagctccatcaagtag

SEQ ID NO: 307115 - DNA, 885 bp, Artificial Sequence
  derived and/or modified sequence
atggtctgtgagggaaagaggagcgcatcttgcccgtgtttctttcttctaacagctaagttttattggatcttaacaatgatgcagcgtacacactcccaggagtatgcccacagcatcagggttgatggcgatattattctgggaggtttgttcccagttcacgccaagggcgaaagaggggtcccatgcggtgaactaaagaaagagaaaggcatccacagactggaggccatgctgtatgccatcgaccagattaataaagatccagacctactaagcaacataactctgggcgtgcgaatcttagatacctgtagcagagatacctacgccttagagcagtccctgacctttgtgcaggcacttattgaaaaagacgcatccgacgtaaagtgcgctaatggcgatccacctatattcacaaaaccggacaaaatctctggcgtgataggcgctgccgcctctagcgttagcatcatggtcgccaacattctccgactctttaagattcctcagatttcatatgccagcacagccccggagctcagtgacaatactagatacgactttttctctcgggttgtaccaccagattcgtaccaggcccaggcaatggttgacatcgtcacagccttaggctggaattatgtcagcaccctcgcctctgagggcaattatggcgagagtggcgtagaagcattcacacaaatctcacgtgaaattgggggtgtgtgcatcgctcagagccaaaagatcccaagggagccgcggccaggtgaatttgagaaaatcattaaacgtctcctcgaaaccccgaacgccagggccgtgatcatgttcgccaacgaagatgatattcgcagaattctggaggcagcttag

SEQ ID NO: 307116 - DNA, 1506 bp, Artificial Sequence
  derived and/or modified sequence
atggtatgcgagggaaagcgatcagcctcttgcccttgtttcttcctcttgaccgccaagttctactggatcctcacaatgatgcaaagaactcacagccaggagtatgcccattccatacgggtggatggggacattattttggggggtctcttccctgtccacgcaaagggagagagaggggtgccttgtggggagctgaagaaggaaaaggggattcacagactggaggccatgctttatgcaattgaccagattaacaaggaccctgatctcctttccaacatcactctgggtgtccgcatcctcgacacgtgctctagggacacctatgctttggagcagtctctaacattcgtgcaggcattaatagagaaagatgcttcggatgtgaagtgtgctaatggagatccacccattttcaccaagcccgacaagatttctggcgtcataggtgctgcagcaagctccgtgtccatcatggttgctaacattttaagactttttaagatacctcaaatcagctatgcatccacagccccagagctaagtgataacaccaggtatgactttttctctcgagtggttccgcctgactcctaccaagcccaagccatggtggacatcgtgacagcactgggatggaattatgtttcgacactggcttctgaggggaactatggtgagagcggtgtggaggccttcacccagatctcgagggagattggtggtgtttgcattgctcagtcacagaaaatcccacgtgaaccaagacctggagaatttgaaaaaattatcaaacgcctgctagaaacacctaatgctcgagcagtgattatgtttgccaatgaggatgacatcaggaggatattggaagcagcaaaaaaactaaaccaaagtgggcattttctctggattggctcagatagttggggatccaaaatagcacctgtctatcagcaagaggagattgcagaaggggctgtgacaattttgcccaaacgagcatcaattgatggatttgatcgatactttagaagccgaactcttgccaataatcgaagaaatgtgtggtttgcagaattctgggaggagaattttggctgcaagttaggatcacatgggaaaaggaacagtcatataaagaaatgcacagggctggagcgaattgctcgggattcatcttatgaacaggaaggaaaggtccaatttgtaattgatgctgtatattccatggcttacgccctgcacaatatgcacaaagatctctgccctggatacattggcctttgtccacgaatgagtaccattgatgggaaagagctacttggttatattcgggctgtaaattttaatggttgccgaagagggatccagatgtctctaccctggccaactctttttactccttcattttccagtagttgggcagtgctggcactcctgtcacttttaatgaaaacggagatgctcctggacgttatgatatcttccagtatcaaataa

SEQ ID NO: 307117 - DNA, 551 bp, Artificial Sequence
  derived and/or modified sequence
aagaatacactagagtctgggctactaccgcgattgaatacaaatcctgccaactgacagaactggaaaacagggttggtggtggagatacaagaaaaatcatgaacgggagaaaagcattcctatggtagcttgtattttgcttgaaagaaaaatagagaaaaagagccaccagcaggaataattctgctacaaggctgatttcaaggacatgaattgttgacctcatcccaacatcagaacctcagatgttctaatttttgcaccattccaggcaagttgatcttataaggaaataaaattgaaccttaggggtctgatggaaattcactgtgacattcaaatcaagaaaacttgctaatgcccacagagccttttccccatgggccctgatggtagcctccagaaggtgcagcctcaggtggtgccctttcttctgtggcaagaataaactttgggtcttggattgcaataccacctgtggagaaaatggtatgcgagggaaagcgatcagcctcttgcccttgtttcttcctcttgaccgccaagtt

SEQ ID NO: 307118 - DNA, 1247 bp, Artificial Sequence
  derived and/or modified sequence
gcccaaactgtgaagcctggtgtcagagagtgtctgcgcacccaagatagcgggggaataattctgctacaaggctgatttcaaggacatgaattgttgacctcatcccaacatcagaacctcagatgttctaatttttgcaccattccaggcaagttgatcttataaggaaataaaattgaaccttaggggtctgatggaaattcactgtgacattcaaatcaagaaaacttgctaatgcccacagagccttttccccatgggccctgatggtagcctccagaaggtgcagcctcaggtggtgccctttcttctgtggcaagaataaactttgggtcttggattgcaataccacctgtggagaaaatggtatgcgagggaaagcgatcagcctcttgcccttgtttcttcctcttgaccgccaagttctactggatcctcacaatgatgcaaagaactcacagccaggagtatgcccattccatacgggtggatggggacattattttggggggtctcttccctgtccacgcaaagggagagagaggggtgccttgtggggagctgaagaaggaaaaggggattcacagactggaggccatgctttatgcaattgaccagattaacaaggaccctgatctcctttccaacatcactctgggtgtccgcatcctcgacacgtgctctagggacacctatgctttggagcagtctctaacattcgtgcaggcattaatagagaaagatgcttcggatgtgaagtgtgctaatggagatccacccattttcaccaagcccgacaagatttctggcgtcataggtgctgcagcaagctccgtgtccatcatggttgctaacattttaagactttttaagatacctcaaatcagctatgcatccacagccccagagctaagtgataacaccaggtatgactttttctctcgagtggttccgcctgactcctaccaagcccaagccatggtggacatcgtgacagcactgggatggaattatgtttcgacactggcttctgaggggaactatggtgagagcggtgtggaggccttcacccagatctcgagggagattggtggtgtttgcattgctcagtcacagaaaatcccacgtgaaccaagacctggagaatttgaaaaaattatcaaacgcctgctagaaacacctaatgctcgagcagtgattatgtttgccaatgaggatgacatcaggaggatattggaagcagc

SEQ ID NO: 307119 - DNA, 1506 bp, Artificial Sequence
  derived and/or modified sequence
atggtgtgtgagggcaagaggtctgccagctgcccctgcttcttcctgctgacagccaagttctactggatcctgaccatgatgcagaggacccacagccaggagtatgcccacagcatccgggtggatggagacatcatcctgggcggcctcttccctgtgcacgccaagggggagcggggcgtgccctgtggggagctgaagaaggagaagggcatccaccggctggaggccatgctgtatgccatcgaccagatcaacaaggaccctgacctgctgagcaacatcaccctgggcgtgcgcatcctggacacctgcagccgggacacctacgccctggagcagagcctgacctttgtgcaggccctgattgagaaggatgccagtgatgtgaagtgtgccaatggagacccccccatcttcaccaagccagacaagatcagcggcgtgattggagctgctgccagctctgtgtccatcatggtggccaacatcctgcggctcttcaagatcccccagatctcctatgccagcacagcccctgagctgagtgacaacaccaggtatgacttcttcagccgggtggtgcccccagacagctaccaggcccaggccatggtggacatcgtgacagccctgggctggaactacgtgtccaccctggccagcgagggcaactatggagagagcggcgtggaggccttcacccagatcagccgggagatcggcggcgtgtgcatcgcccagagccagaagatcccccgggagcccaggcctggagaatttgagaagatcatcaagaggctgctggagaccccaaatgcccgggctgtgatcatgtttgccaatgaagatgacatccgccgcatcctggaggccgccaagaagctgaaccagagcggccacttcctgtggattggaagtgacagctggggcagcaagatcgcccctgtgtaccagcaggaggagattgctgagggcgctgtgaccatcctgcccaagagggccagcattgatggctttgaccgctacttccgcagcaggaccctggccaacaacagaagaaatgtgtggtttgctgagttctgggaggagaactttggctgcaagctgggcagccacggcaagaggaacagccacatcaagaagtgcaccggcctggagcgcatcgcccgggacagcagctatgagcaggagggcaaggtgcagtttgtgattgatgctgtgtacagcatggcctatgccctgcacaacatgcacaaggacctgtgccccggctacatcggcctgtgccccaggatgagcaccattgatggcaaggagctgctgggctacatccgggctgtgaacttcaacggctgcagaagaggcatccagatgagcctgccctggcccaccctcttcacccccagcttcagcagctcctgggccgtgctggccctgctgagcctgctgatgaagacagagatgctgctggatgtgatgatcagcagcagcatcaagtag

SEQ ID NO: 307120 - DNA, 885 bp, Artificial Sequence
  derived and/or modified sequence
atggtgtgtgagggcaagaggtctgccagctgcccctgcttcttcctgctgacagccaagttctactggatcctgaccatgatgcagaggacccacagccaggagtatgcccacagcatccgggtggatggagacatcatcctgggcggcctcttccctgtgcacgccaagggggagcggggcgtgccctgtggggagctgaagaaggagaagggcatccaccggctggaggccatgctgtatgccatcgaccagatcaacaaggaccctgacctgctgagcaacatcaccctgggcgtgcgcatcctggacacctgcagccgggacacctacgccctggagcagagcctgacctttgtgcaggccctgattgagaaggatgccagtgatgtgaagtgtgccaatggagacccccccatcttcaccaagccagacaagatcagcggcgtgattggagctgctgccagctctgtgtccatcatggtggccaacatcctgcggctcttcaagatcccccagatctcctatgccagcacagcccctgagctgagtgacaacaccaggtatgacttcttcagccgggtggtgcccccagacagctaccaggcccaggccatggtggacatcgtgacagccctgggctggaactacgtgtccaccctggccagcgagggcaactatggagagagcggcgtggaggccttcacccagatcagccgggagatcggcggcgtgtgcatcgcccagagccagaagatcccccgggagcccaggcctggagaatttgagaagatcatcaagaggctgctggagaccccaaatgcccgggctgtgatcatgtttgccaatgaagatgacatccgccgcatcctggaggccgcctag

SEQ ID NO: 307121 - DNA, 1506 bp, Artificial Sequence
  derived and/or modified sequence
atggtgtgcgagggcaagcggagcgccagctgcccctgcttcttcttactgacagctaagttctactggatcctcaccatgatgcaacgtacccactcccaggagtacgcccactctatacgggtagatggtgatattattctcggaggtctttttcccgtccatgcgaagggtgagcggggcgttccgtgtggagagctgaagaaggaaaagggtattcataggctcgaggccatgctgtatgccatcgatcagatcaacaaagatcccgatctcctgtccaacatcacactcggagtgaggatcctggacacctgctcacgggacacctacgccttagagcagagtctgacctttgtgcaagctctgatcgagaaggacgcatcagacgttaagtgcgctaacggtgacccccccatctttacaaagccagacaagatcagcggagtgataggggccgccgcgtcttcagtgagcatcatggttgccaacatcctgcgactgttcaaaattcctcagataagctacgcttcaacagcccccgagctgagcgacaatacccgctatgacttcttttctcgagttgtcccccctgacagctaccaggcccaagccatggtcgatatcgtaacagctctagggtggaattatgtctcaactctagcttcagagggcaactacggggagtccggggtggaagcatttacgcaaatttctcgcgagattggaggggtgtgcatagctcagagccagaagatccccagggaacccagacccggagagttcgagaagatcattaaaagactgctcgagaccccgaatgcccgagccgtaatcatgtttgccaatgaagatgatataagaagaattctcgaagcggccaagaagcttaaccagtcaggccatttcctgtggatcgggtctgattcttggggtagtaagatcgccccagtgtatcagcaggaagaaattgctgagggcgccgtgaccattctccctaaaagagccagtatcgacggatttgatcgatattttcggtctcgcaccctagcgaataatcggagaaatgtttggtttgctgagttttgggaggagaacttcgggtgcaagttgggatcacacgggaaacgtaacagtcatatcaaaaaatgtactggattagagcggatcgcacgcgacagctcctacgagcaggaggggaaggtgcagtttgtgattgatgctgtgtactctatggcctacgctctccataacatgcacaaagatctgtgccctggatacataggtctgtgtccacgcatgtcaaccattgatggaaaagaacttttgggctatatccgcgcagttaatttcaacggatgtagacgcggaatccagatgagcctgccttggccaactttatttactccctccttctcatcttcctgggcggtcctcgccctcctgtccctgctgatgaaaacagaaatgttacttgatgtgatgatttcatccagcatcaaatag

SEQ ID NO: 307122 - DNA, 885 bp, Artificial Sequence
  derived and/or modified sequence
atggtgtgcgagggcaagcggagcgccagctgcccctgcttcttcctgcttaccgctaagttttactggatccttacaatgatgcagcgcacacatagtcaggagtatgctcactctattcgtgttgacggggatattatcctcggggggttattcccagtgcacgcaaaaggggaacggggcgtgccatgcggggagctcaagaaggaaaaggggatccaccggcttgaggcaatgctgtatgccattgaccagattaacaaggacccagatcttttaagtaacatcactctgggcgtacgcattctcgatacctgttcacgcgatacctacgctctggagcagagccttaccttcgtacaggcactcatcgaaaaggacgcatctgacgtcaagtgcgccaacggagatccgccgattttcacaaagcctgataaaatctctggcgtaattggcgccgcagcctcgtccgtgtctatcatggttgctaatatcctgcgcctattcaaaattcctcagatatcctatgcgtcaaccgcaccagagttatcggacaacacccgatacgatttttttagtagagtggtacctcctgactcgtatcaagctcaggccatggttgatattgtaacggccttggggtggaattacgtttcaactctagcaagcgaaggaaattacggagaatcgggggtggaagcatttacgcagataagtagggaaattgggggtgtctgtatcgctcagtcccagaagattcccagggagccaaggcccggagaatttgagaagatcatcaagcgcctcttggagacgccaaacgcccgagctgtgattatgttcgcaaacgaagacgacattcggaggatcctcgaggccgcatag

SEQ ID NO: 307123 - DNA, 1506 bp, Artificial Sequence
  derived and/or modified sequence
atggtgtgtgaaggcaagcggtctgcatcttgtccctgcttctttcttttaacagccaagttttattggatactaacaatgatgcaaagaacgcactctcaagagtatgctcattccataagggttgacggtgatataattctggggggtctgtttcccgtgcacgcgaagggtgagcgtggagtgccttgcggggaactcaaaaaagagaagggcatccataggttagaggccatgttgtatgcaattgaccagatcaacaaagatccggacctcctaagcaacattacccttggcgttcgtatcctggacacgtgttcacgcgatacttacgcattggaacagtcccttacctttgttcaggcgctgatcgagaaagacgccagtgacgtcaagtgcgcaaacggtgatcctcccatttttactaagcctgacaaaattagcggcgtcattggagccgcagcaagtagcgtaagtatcatggtggctaacatcctccgtctattcaaaattcctcagatttcctacgcaagcacagctcctgaactgtctgacaatacacgctacgactttttcagtcgagtggtacctccagattcctaccaagcccaggccatggtggacatcgttactgctctcggatggaactatgtctcgacactagctagtgaaggtaattatggtgagtctggcgtggaggcgttcacacaaatctctagggagattggaggcgtctgcattgctcagtcacaaaaaatccccagagagcccagacccggtgaatttgaaaaaatcataaagcgactcctagaaacacctaatgccagagccgttatcatgttcgccaatgaggatgatattcgaaggatcttggaagctgccaaaaaactgaatcagagcgggcattttctttggataggcagtgacagttgggggtctaagattgcaccagtgtaccaacaggaggagatcgccgagggggctgtgacaatccttccaaagcgcgctagtattgacggattcgataggtactttagaagccgcacactggccaacaaccgcagaaatgtttggttcgcggagttctgggaagaaaactttgggtgtaaactcggctcccatgggaagaggaactctcatataaagaagtgcaccggactcgaacgaattgcacgagattccagttatgagcaggaaggtaaagtgcaatttgtgatcgacgcagtttacagtatggcctacgccctacataacatgcacaaggatctgtgccccggttatatcgggctctgcccgaggatgagtacaatcgatggcaaggagctgttgggttatataagagcggttaacttcaacggctgtcgtcgcggtattcaaatgagccttccttggcccaccttattcacacccagttttagcagtagctgggccgtactggccctgttgtccctgctgatgaaaacagagatgctcctggacgtaatgatttcctcatcaatcaaatag

SEQ ID NO: 307124 - DNA, 885 bp, Artificial Sequence
  derived and/or modified sequence
atggtttgcgaaggaaaaaggagcgcctcatgtccttgcttctttttgctgacagcaaagttttattggatccttacaatgatgcaaagaacccactcacaggagtatgctcatagcatacgagtagacggtgacataattctggggggactgtttcctgtgcatgctaagggagagcgcggagtcccatgcggcgaactgaagaaggagaaagggattcacagacttgaggccatgctgtacgcgattgaccagattaataaagaccccgatttgctttctaatattactctgggagtgagaatcttagacacctgctctagggacacttatgccttagagcagtctcttacttttgttcaggcgctcattgagaaggacgcctcagacgtcaaatgcgcaaacggggatccgcctatctttacaaaacccgacaaaatttccggcgtgatcggcgcagcagcaagtagcgtctctattatggtggccaatatcctgcggcttttcaaaatacctcagattagttatgcatcaacagccccagaactatcagataacaccaggtatgacttcttctctagagtggtgccaccagacagctatcaagcccaggctatggtagacattgtgactgccctagggtggaattacgtgtctacactcgcctctgaaggaaattacggtgaatctggtgtagaggcatttacccagatctctcgtgagatagggggagtctgtatcgctcaatcccagaagatcccacgagagcctaggccaggtgaatttgagaagatcattaagcgcttgctcgagacaccaaatgcacgtgccgtcattatgttcgctaatgaagacgacataaggcggattttagaggccgcttag

SEQ ID NO: 307125 - DNA, 1506 bp, Artificial Sequence
  derived and/or modified sequence
atggtgtgcgagggcaagagaagcgccagctgcccctgcttcttcctgctgaccgccaagttctactggatcctgaccatgatgcagagaacccacagccaggagtacgcccacagcatcagagtggacggcgacatcatcctgggcggcctgttccccgtgcacgccaagggcgagagaggcgtgccctgcggcgagctgaagaaggagaagggcatccacagactggaggccatgctgtacgccatcgaccagatcaacaaggaccccgacctgctgagcaacatcaccctgggcgtgagaatcctggacacctgcagcagagacacctacgccctggagcagagcctgaccttcgtgcaggccctgatcgagaaggacgccagcgacgtgaagtgcgccaacggcgacccccccatcttcaccaagcccgacaagatcagcggcgtgatcggcgccgccgccagcagcgtgagcatcatggtggccaacatcctgagactgttcaagatcccccagatcagctacgccagcaccgcccccgagctgagcgacaacaccagatacgacttcttcagcagagtggtgccccccgacagctaccaggcccaggccatggtggacatcgtgaccgccctgggctggaactacgtgagcaccctggccagcgagggcaactacggcgagagcggcgtggaggccttcacccagatcagcagagagatcggcggcgtgtgcatcgcccagagccagaagatccccagagagcccagacccggcgagttcgagaagatcatcaagagactgctggagacccccaacgccagagccgtgatcatgttcgccaacgaggacgacatcagaagaatcctggaggccgccaagaagctgaaccagagcggccacttcctgtggatcggcagcgacagctggggcagcaagatcgcccccgtgtaccagcaggaggagatcgccgagggcgccgtgaccatcctgcccaagagagccagcatcgacggcttcgacagatacttcagaagcagaaccctggccaacaacagaagaaacgtgtggttcgccgagttctgggaggagaacttcggctgcaagctgggcagccacggcaagagaaacagccacatcaagaagtgcaccggcctggagagaatcgccagagacagcagctacgagcaggagggcaaggtgcagttcgtgatcgacgccgtgtacagcatggcctacgccctgcacaacatgcacaaggacctgtgccccggctacatcggcctgtgccccagaatgagcaccatcgacggcaaggagctgctgggctacatcagagccgtgaacttcaacggctgcagaagaggcatccagatgagcctgccctggcccaccctgttcacccccagcttcagcagcagctgggccgtgctggccctgctgagcctgctgatgaagaccgagatgctgctggacgtgatgatcagcagcagcatcaagtag

SEQ ID NO: 307126 - DNA, 885 bp, Artificial Sequence
  derived and/or modified sequence
atggtgtgcgagggcaagagaagcgccagctgcccctgcttcttcctgctgaccgccaagttctactggatcctgaccatgatgcagagaacccacagccaggagtacgcccacagcatcagagtggacggcgacatcatcctgggcggcctgttccccgtgcacgccaagggcgagagaggcgtgccctgcggcgagctgaagaaggagaagggcatccacagactggaggccatgctgtacgccatcgaccagatcaacaaggaccccgacctgctgagcaacatcaccctgggcgtgagaatcctggacacctgcagcagagacacctacgccctggagcagagcctgaccttcgtgcaggccctgatcgagaaggacgccagcgacgtgaagtgcgccaacggcgacccccccatcttcaccaagcccgacaagatcagcggcgtgatcggcgccgccgccagcagcgtgagcatcatggtggccaacatcctgagactgttcaagatcccccagatcagctacgccagcaccgcccccgagctgagcgacaacaccagatacgacttcttcagcagagtggtgccccccgacagctaccaggcccaggccatggtggacatcgtgaccgccctgggctggaactacgtgagcaccctggccagcgagggcaactacggcgagagcggcgtggaggccttcacccagatcagcagagagatcggcggcgtgtgcatcgcccagagccagaagatccccagagagcccagacccggcgagttcgagaagatcatcaagagactgctggagacccccaacgccagagccgtgatcatgttcgccaacgaggacgacatcagaagaatcctggaggccgcctag

SEQ ID NO: 307127 - DNA, 534 bp, Artificial Sequence
  derived and/or modified sequence
atgagcgaggacagcgagaaggaggactacagcgacagaaccatcagcgacgaggacgagagcgacgaggacatgttcatgaagttcgtgagcgaggacctgcacagatgcgccctgctgaccgccgacagcttcggcgaccccttcttccccagaaccacccagatcctgctggagtaccagctgggcagatgggtgcccagactgagagagcccagagacctgtacggcgtgagcagcagcggccccctgagccccaccagatggccctaccactgcgaggtgatcgacgagaaggtgcagcacatcgacggcgtgagctgctggagcgagagccaccaggccggcgcccagtggtgcgacctgggcagcctgcagccccccccccccagattcaagagattcgcctgcttcagcctgctgagcagcagagactacagaagagtgccccccagaagcgccaacttcgtgttcctggtggagaccggcttccaccacgtgggccaggacggcctgagactgctgaccagctag

SEQ ID NO: 307128 - DNA, 787 bp, Artificial Sequence
  derived and/or modified sequence
gttgcctgatgacgagagttgggagtgtggctggggctgcggatctccagcagtggcgttacttctagcggctggataccgggttctccgcgagatcgcgagatcccgagatattctccccgcacggaagcgacgactggcctggccagaggactcgcgtgggagcgaggtgccggccccgacaggacggtgagaaattgttttacagcctacccgtatattacaagaaatctcaagtcaaacactggaaaagatgtcagaagattcagaaaaggaagactattcagacagaacaatcagtgatgaagatgaatcggatgaggatatgttcatgaaatttgtaagtgaagatcttcatcggtgtgcacttttaacagctgactcttttggtgatcccttcttcccccggactacacagatactattagaatatcagctagggagatgggtgccacgtcttcgtgaaccaagggatttatatggtgtctcttcttctggtccattgagcccaacacggtggccataccattgtgaagtcatcgatgaaaaagtccagcatattgatggagtctcatgctggagtgagtctcaccaggctggagcgcagtggtgcgatctcggctcactgcaacctccacctcccaggttcaagcgattcgcctgcttcagcctcctgagtagcagagactacaggcgcgtgccaccacgctcagctaattttgtatttttagtagagacggggtttcaccatgttggccaggatggtctccgtctcttgacctcgtga

SEQ ID NO: 307129 - DNA, 534 bp, Artificial Sequence
  derived and/or modified sequence
atgtctgaagattcagagaaggaggattacagcgaccgcacgatttccgacgaggacgagagcgatgaagacatgttcatgaaatttgtcagcgaagatctgcacagatgcgcattactgacagcggactcatttggcgatcccttctttccccgcacaactcagattctccttgagtatcagttgggacgttgggtgcccagactccgcgagcccagggatctttatggcgtgtcatcctccggcccattgtctccaacaaggtggccttaccattgcgaagtgatcgatgaaaaggtccagcacatcgatggggtatcatgctggagtgagagccaccaagccggagcacaatggtgcgacctcggatcgctccagccccctccaccgcgattcaaaagattcgcttgcttcagtctgctctcgtcacgagattataggcgtgtacctccgaggtcagcaaacttcgttttcttggtggagaccggctttcatcatgtgggccaagacgggctgcgccttctcacaagttag

SEQ ID NO: 307130 - DNA, 534 bp, Artificial Sequence
  derived and/or modified sequence
atgtctgaagattctgagaaggaggactacagcgacaggaccatcagtgatgaagatgaaagtgatgaggacatgttcatgaagtttgtgtctgaggacctgcaccgctgtgccctgctgacagctgacagctttggagaccccttcttccccaggaccacccagatcctgctggagtaccagctgggccgctgggtgccccggctgcgggagccccgggacctgtatggagtgagcagcagcggccccctgagccccacccgctggccctaccactgtgaggtgattgatgagaaggtgcagcacattgatggagtgtcctgctggagcgagagccaccaggccggggcccagtggtgtgacctgggcagcctgcagcccccaccaccccgcttcaagagatttgcctgcttcagcctgctgagcagccgggactacagaagagtgccccccaggtctgccaactttgtgttcctggtggagaccggcttccaccacgtgggccaggacggcctgcggctgctgaccagctag

SEQ ID NO: 307131 - DNA, 534 bp, Artificial Sequence
  derived and/or modified sequence
atgagcgaggacagcgagaaggaggactacagcgaccggaccatctcagatgaggatgagtcagacgaggatatgttcatgaagtttgtgtcagaggacctgcatcgctgtgctcttctcactgcggatagtttcggtgacccattctttcctagaacaacccagattctgctggagtaccagctggggcggtgggtgccccgactgagggagccacgagacctgtacggagtgtcctctagcggccccctgtcccccacccgctggccgtaccactgcgaggtgatcgacgaaaaggtgcaacatatagacggcgtcagttgctggagcgagtcccaccaggcaggggctcaatggtgcgacttggggagcctgcagcccccgcccccacgctttaaacgcttcgcatgtttcagcctgctgagctccagggactaccgccgggtcccaccccgcagcgcgaactttgtgtttcttgtggagacagggttccatcacgtgggacaggatgggcttcggttactgacctcctag

SEQ ID NO: 307132 - DNA, 534 bp, Artificial Sequence
  derived and/or modified sequence
atgagcgaagatagcgagaaggaggattactctgatagaacaatctccgacgaagacgagagcgatgaagatatgttcatgaaatttgtgagtgaggatctacacagatgtgcactcctcacggccgattccttcggagacccctttttcccaagaacaacccagattctcctcgagtatcagttgggccgatgggttccacggttgagggaacctagagacctgtatggcgtatcttcatccggtcctctcagcccgactcgctggccataccactgtgaagtaattgatgagaaagttcagcacatagatggggtcagctgttggtccgagagccaccaggccggtgcgcagtggtgtgacctgggatccctccagccacctccgccaaggttcaagaggtttgcatgcttctcactgctgagttcaagagattaccgtagagtcccccctcggtcagcaaattttgtatttctggtagagaccgggtttcaccatgttggacaggacggactgagattgctgactagctag

SEQ ID NO: 307133 - protein, 314 aa, Artificial Sequence
  derived and/or modified sequence
MEESWEAAPGGQAGAELPMEPVGSLVPTLEQPQVPAKVRQPEGPESSPSPAGAVEKAAGAGLEPSSKKKPPSPRPGSPRVPPLSLGYGVCPEPPSPGPALVKLPRNGEAPGAEPAPSAWAPMELQVDVRVKPVGAAGGSSTPSPRPSTRFLKVPVPESPAFSRHADPAHQLLLRAPSQGGTWGRRSPLAAARTESGCDAEGRASPAEGSAGSPGSPTCCRCKELGLEKEDAALLPRAGLDGDEKLPRAVTLTDSLRTARTIWISTVGPWRKARWWLQTAALQDPGSVPRGPSDLGSAWSSACQADAAPPTGEAS

SEQ ID NO: 307134 - protein, 18 aa, Artificial Sequence
  derived and/or modified sequence
MPKNKKRNTPHRGSSAGG

SEQ ID NO: 307135 - protein, 31 aa, Artificial Sequence
  derived and/or modified sequence
MPKNKKRNTPHRGSSAGGGGSGAAAATAATA

SEQ ID NO: 307136 - protein, 62 aa, Artificial Sequence
  derived and/or modified sequence
MPKNKKRNTPHRGSSAGGGGSGAAAATAATAGGQHRNVQPFSDEDASIETMSHCSGYSDPSS

SEQ ID NO: 307137 - DNA, 57 bp, Artificial Sequence
  derived and/or modified sequence
atgcccaagaataagaaaagaaataccccacatcgagggagctctgctgggggttag

SEQ ID NO: 307138 - DNA, 96 bp, Artificial Sequence
  derived and/or modified sequence
atgcccaagaacaagaagaggaacaccccacacagaggcagttcagccggcgggggcggttctggagcagctgcagcgacagccgcaaccgcctag

SEQ ID NO: 307139 - DNA, 57 bp, Artificial Sequence
  derived and/or modified sequence
atgcccaagaacaagaagaggaacaccccccaccggggcagcagcgctgggggctag

SEQ ID NO: 307140 - DNA, 96 bp, Artificial Sequence
  derived and/or modified sequence
atgcccaagaacaagaagaggaacaccccccaccggggcagcagcgctgggggcggcggcagcggggctgctgctgccacagctgccacagcctag

SEQ ID NO: 307141 - DNA, 57 bp, Artificial Sequence
  derived and/or modified sequence
atgcccaagaacaagaagcggaacaccccccaccggggcagcagcgcgggcggatag

SEQ ID NO: 307142 - DNA, 96 bp, Artificial Sequence
  derived and/or modified sequence
atgcccaagaacaagaagcggaacaccccccaccggggcagcagcgctggcgggggcggaagtggtgctgccgccgcaactgctgctacagcttag

SEQ ID NO: 307143 - DNA, 57 bp, Artificial Sequence
  derived and/or modified sequence
atgcccaagaacaagaaacgtaacaccccccaccgaggatcttccgctggaggctag

SEQ ID NO: 307144 - DNA, 96 bp, Artificial Sequence
  derived and/or modified sequence
atgccaaaaaacaagaagaggaacactcctcacaggggctccagtgccggaggagggggttccggagctgccgctgccaccgctgccacagcatag

SEQ ID NO: 307145 - DNA, 57 bp, Artificial Sequence
  derived and/or modified sequence
atgcccaagaacaagaagagaaacaccccccacagaggcagcagcgccggcggctag

SEQ ID NO: 307146 - DNA, 96 bp, Artificial Sequence
  derived and/or modified sequence
atgcccaagaacaagaagagaaacaccccccacagaggcagcagcgccggcggcggcggcagcggcgccgccgccgccaccgccgccaccgcctag

SEQ ID NO: 307147 - protein, 514 aa, Artificial Sequence
  derived and/or modified sequence
MNQSIPVAPTPPRRVRLKPWLVAQVNSCQYPGLQWVNGEKKLFCIPWRHATRHGPSQDGDNTIFKAWAKETGKYTEGVDEADPAKWKANLRCALNKSRDFRLIYDGPRDMPPQPYKIYEVCSNGPAPTDSQPPEDYSFGAGEEEEEEEELQRMLPSLSLTDAVQSGPHMTPYSLLKEDVKWPPTLQPPTLRPPTLQPPTLQPPVVLGPPAPDPSPLAPPPGNPAGFRELLSEVLEPGPLPASLPPAGEQLLPDLLISPHMLPLTDLEIKFQYRGRPPRALTISNPHGCRLFYSQLEATQEQVELFGPISLEQVRFPSPEDIPSDKQRFYTNQLLDVLDRGLILQLQGQDLYAIRLCQCKVFWSGPCASAHDSCPNPIQREVKTKLFSLEHFLNELILFQKGQTNTPPPFEIFFCFGEEWPDRKPREKKLITVQVVPVAARLLLEMFSGELSWSADSIRLQISNPDLKDRMVEQFKELHHIWQSQQRLQPVAQAPPGAGLGVGQGPWPMHPAGMQ

SEQ ID NO: 307148 - protein, 157 aa, Artificial Sequence
  derived and/or modified sequence
MNQSIPVAPTPPRRVRLKPWLVAQVNSCQYPGLQWVNGEKKLFCIPWRHATRHGPSQDGDNTIFKAWAKETGKYTEGVDEADPAKWKANLRCALNKSRDFRLIYDGPRDMPPQPYKIYEVCSNGPAPTDSQPPEDYSFGAGEEEEEEEEMQCSLAPT

SEQ ID NO: 307149 - protein, 106 aa, Artificial Sequence
  derived and/or modified sequence
MNQSIPVAPTPPRRVRLKPWLVAQVNSCQYPGLQWVNGEKKLFCIPWRHATRHGPSQDGDNTIFKAWAKETGKYTEGVDEADPAKWKANLRCALNKSRDFRLIYDG

SEQ ID NO: 307150 - DNA, 1545 bp, Artificial Sequence
  derived and/or modified sequence
atgaaccagagcatccccgtggcccccaccccccccagaagagtgagactgaagccctggctggtggcccaggtgaacagctgccagtaccccggcctgcagtgggtgaacggcgagaagaagctgttctgcatcccctggagacacgccaccagacacggccccagccaggacggcgacaacaccatcttcaaggcctgggccaaggagaccggcaagtacaccgagggcgtggacgaggccgaccccgccaagtggaaggccaacctgagatgcgccctgaacaagagcagagacttcagactgatctacgacggccccagagacatgcccccccagccctacaagatctacgaggtgtgcagcaacggccccgcccccaccgacagccagccccccgaggactacagcttcggcgccggcgaggaggaggaggaggaggaggagctgcagagaatgctgcccagcctgagcctgaccgacgccgtgcagagcggcccccacatgaccccctacagcctgctgaaggaggacgtgaagtggccccccaccctgcagccccccaccctgagaccccccaccctgcagccccccaccctgcagccccccgtggtgctgggcccccccgcccccgaccccagccccctggcccccccccccggcaaccccgccggcttcagagagctgctgagcgaggtgctggagcccggccccctgcccgccagcctgccccccgccggcgagcagctgctgcccgacctgctgatcagcccccacatgctgcccctgaccgacctggagatcaagttccagtacagaggcagaccccccagagccctgaccatcagcaacccccacggctgcagactgttctacagccagctggaggccacccaggagcaggtggagctgttcggccccatcagcctggagcaggtgagattccccagccccgaggacatccccagcgacaagcagagattctacaccaaccagctgctggacgtgctggacagaggcctgatcctgcagctgcagggccaggacctgtacgccatcagactgtgccagtgcaaggtgttctggagcggcccctgcgccagcgcccacgacagctgccccaaccccatccagagagaggtgaagaccaagctgttcagcctggagcacttcctgaacgagctgatcctgttccagaagggccagaccaacacccccccccccttcgagatcttcttctgcttcggcgaggagtggcccgacagaaagcccagagagaagaagctgatcaccgtgcaggtggtgcccgtggccgccagactgctgctggagatgttcagcggcgagctgagctggagcgccgacagcatcagactgcagatcagcaaccccgacctgaaggacagaatggtggagcagttcaaggagctgcaccacatctggcagagccagcagagactgcagcccgtggcccaggccccccccggcgccggcctgggcgtgggccagggcccctggcccatgcaccccgccggcatgcagtag

SEQ ID NO: 307151 - DNA, 1545 bp, Artificial Sequence
  derived and/or modified sequence
atgaaccaatccatcccagttgcccctactcctcctaggagagtgaggctgaagccatggttggttgcccaggtgaattcttgccagtacccaggcctgcagtgggtcaacggcgaaaaaaagttgttctgcattccctggaggcacgccacacggcacggcccgtcccaggacggcgacaatacgattttcaaagcttgggctaaagagacagggaaatacacagagggcgttgacgaagccgatccggccaaatggaaggccaacctgcgatgcgcattgaataagtcaagagattttcggcttatttacgatggaccccgggatatgccgcctcagccatataagatttatgaagtgtgctcaaatggacccgcccctactgacagtcagccccctgaagactactccttcggagcaggcgaagaggaggaggaggaggaggaactccaacggatgcttccatcactgtctctcaccgacgccgtgcagtctggtccacacatgactccctattctctcctgaaggaggacgtaaaatggccccccacgctccagcccccaacccttagaccgcctacgcttcagccaccgactctgcagcccccagtagtgctgggcccaccagctccagacccatccccgctggccccacctccaggcaacccagccgggttccgagaactgctgtcggaggtgctcgaaccaggcccactgccggctagtctgccaccagctggcgagcagctactcccggacctgcttatatctcctcatatgctgccacttacagatttagagatcaaattccagtatcgggggaggccaccacgggctttaaccatttcaaacccgcatggatgcaggctgttttactcccagctggaggcgacgcaggaacaggttgaattgttcggacctatttcattagaacaggtgcgtttccctagtccagaggacatccctagcgataagcagaggttttacacaaatcaactccttgatgtgctggaccgcggcctgatccttcagctgcaggggcaagacctgtatgcaataaggctatgtcagtgtaaggtgttttggtccggaccttgcgccagcgcccacgatagctgtccgaatccaatccagcgggaagttaaaacaaagttgtttagtttggaacactttcttaacgagctgatcctatttcaaaaagggcaaaccaatacaccacctcccttcgagatattcttctgttttggggaggagtggcctgacaggaagccacgggagaagaagctgatcacagtacaggtcgttcctgttgcagcacgcttgcttctggagatgttctccggtgagttatcttggtctgccgactccataaggcttcagatctccaatcctgaccttaaagacaggatggttgagcagtttaaggaacttcaccacatctggcagtcacagcagaggctccaacctgtagcccaggctccacccggggcaggtctgggagtgggccaggggccatggcctatgcatcccgctggcatgcagtag

SEQ ID NO: 307152 - DNA, 1545 bp, Artificial Sequence
  derived and/or modified sequence
atgaaccagagcatccctgtggcccccaccccaccaagaagagtgcggctgaagccctggctggtggcccaggtgaacagctgccagtacccaggcctgcagtgggtgaatggagagaagaagctgttctgcatcccctggaggcatgccaccaggcatggccccagccaggatggagacaacaccatcttcaaggcctgggccaaggagaccgggaagtacacagaaggagtggatgaagctgaccctgccaagtggaaggccaacctgcgctgtgccctgaacaagagccgggacttccgcctcatctatgatggcccccgggacatgccaccccagccctacaagatctatgaggtgtgcagcaatggacctgcccccacagacagccagcccccagaggactacagctttggagctggggaggaggaggaggaggaggaggagctgcagaggatgctgcccagcctgagcctgacagatgctgtgcagagcggcccccacatgaccccctacagcctgctgaaggaggatgtgaagtggccacccaccctgcagccccccaccctgcggccccccaccctgcagccccccaccctgcagccccctgtggtgctgggccccccagccccagaccccagccccctggcccctcctcctggcaacccagctggcttccgggagctgctgtctgaggtgctggagcccggccccctgcctgccagcctgcccccagctggggagcagctgctgcctgacctgctgatcagcccccacatgctgcccctgacagacctggagatcaagttccagtaccggggccggcccccccgggccctgaccatcagcaacccccacggctgccgcctcttctacagccagctggaggccacccaggagcaggtggagctgtttggccccatcagcctggagcaggtgcgcttccccagccctgaggacatccccagcgacaagcagcgcttctacaccaaccagctgctggatgtgctggaccggggcctcatcctgcagctgcagggccaggacctgtatgccatccggctgtgccagtgcaaggtgttctggagcggcccctgtgccagcgcccatgacagctgccccaaccccatccagcgggaggtgaagaccaagctgttcagcctggagcacttcctgaatgaactcatcctcttccagaagggccagaccaacaccccacctccatttgagatcttcttctgctttggagaggagtggccagacaggaagccccgggagaagaagctgatcaccgtgcaggtggtgcctgtggccgcccggctgctgctggagatgttttctggagagctgtcctggagcgctgacagcatccggctgcagatcagcaacccagacctgaaggacaggatggtggagcagttcaaggagctgcaccacatctggcagagccagcagaggctgcagcctgtggcccaggcccctcctggagctggcctgggcgtgggccagggcccctggcccatgcaccctgctggcatgcagtag

SEQ ID NO: 307153 - DNA, 1680 bp, Artificial Sequence
  derived and/or modified sequence
gcccggcaggttggcggaccggcgggaggcgcagcctgggcagagctcagcttggtcccgccgcccggccggtgctccctggcgcagccacgcaggcgcaccgcagacagacccctctgccatgaaccagtccatcccagtggctcccaccccaccccgccgcgtgcggctgaagccctggctggtggcccaggtgaacagctgccagtacccagggcttcaatgggtcaacggggaaaagaaattattctgcatcccctggaggcatgccacaaggcatggtcccagccaggacggagataacaccatcttcaaggcctgggccaaggagacagggaaatacaccgaaggcgtggatgaagccgatccggccaagtggaaggccaacctgcgctgtgcccttaacaagagccgggacttccgcctcatctacgacgggccccgggacatgccacctcagccctacaagatctacgaggtctgctccaatggccctgctcccacagactcccagccccctgaggattactcttttggtgcaggagaggaggaggaagaagaggaagagctgcagaggatgttgccaagcctgagcctcacagatgcagtgcagtctggcccccacatgacaccctattctttactcaaagaggatgtcaagtggccgcccactctgcagccgcccactctgcggccgcctactctgcagccgcccactctgcagccgcccgtggtgctgggtccccctgctccagaccccagccccctggctcctccccctggcaaccctgctggcttcagggagcttctctctgaggtcctggagcctgggcccctgcctgccagcctgccccctgcaggcgaacagctcctgccagacctgctgatcagcccccacatgctgcctctgaccgacctggagatcaagtttcagtaccgggggcggccaccccgggccctcaccatcagcaacccccatggctgccggctcttctacagccagctggaggccacccaggagcaggtggaactcttcggccccataagcctggagcaagtgcgcttccccagccctgaggacatccccagtgacaagcagcgcttctacacgaaccagctgctggatgtcctggaccgcgggctcatcctccagctacagggccaggacctttatgccatccgcctgtgtcagtgcaaggtgttctggagcgggccttgtgcctcagcccatgactcatgccccaaccccatccagcgggaggtcaagaccaagcttttcagcctggagcattttctcaatgagctcatcctgttccaaaagggccagaccaacaccccaccacccttcgagatcttcttctgctttggggaagaatggcctgaccgcaaaccccgagagaagaagctcattactgtacaggtggtgcctgtagcagctcgactgctgctggagatgttctcaggggagctatcttggtcagctgatagtatccggctacagatctcaaacccagacctcaaagaccgcatggtggagcaattcaaggagctccatcacatctggcagtcccagcagcggttgcagcctgtggcccaggcccctcctggagcaggccttggtgttggccaggggccctggcctatgcacccagctggcatgcaataacaaggctgcagacg

SEQ ID NO: 307154 - DNA, 1545 bp, Artificial Sequence
  derived and/or modified sequence
atgaaccagagcatccccgtggcccccacccccccccggcgggtgagactcaaaccatggctggttgcccaggtaaacagctgccaataccctgggctgcagtgggtgaatggggaaaaaaaactgttctgcattccatggcgtcatgcaacccgccacggacctagccaggacggggataatacaatttttaaggcctgggcgaaggagacggggaaatatactgagggggtagatgaagctgatcctgccaagtggaaggcaaatttgagatgcgccttaaataagtcacgcgacttcaggcttatttacgacgggccacgcgatatgccacctcagccttataaaatatacgaggtgtgttctaacggacccgccccgaccgacagccagccccccgaagactattccttcggggctggcgaggaagaggaagaggaagaggaactccagagaatgcttccgtcactcagtctgaccgatgcagtccaatccggcccccacatgacaccttactctctgctgaaagaggacgtgaagtggccaccaacacttcagcctcccaccctgagacctcctacattgcaaccccctaccctacagcctcccgtcgtgctgggccctcctgcacccgaccccagtcctctggcacctccccccggcaacccggccggatttcgagagttgctctctgaggtgctggagccaggccctctgccagcgtctttacctcccgccggcgagcagctcctccctgatttactcatctcaccacatatgcttccgctaacggatcttgaaatcaaattccaatatcgcgggaggcctccccgggcattgacgatatccaacccacacggctgccgccttttctatagtcagctcgaagccacccaggaacaggtcgaactgtttggtccaattagtctggagcaggtaagattcccctcccctgaagatatcccgtctgataaacagcgcttttacacgaatcagctgctagacgtcctggacagaggactcatcttgcagctccagggtcaagacctctatgccatccgactttgccagtgcaaggtgttttggagcggtccatgcgcatcagcacacgacagctgtccaaacccaatccagagggaggttaaaaccaaactcttctcactggaacactttcttaacgaacttatcctgtttcagaaaggtcagacaaacacccctccgccttttgagattttcttctgtttcggtgaggagtggcctgatagaaagccacgcgagaagaagcttatcaccgttcaggtagtcccagttgcagcgcgacttctgctggagatgttcagtggggagctgtcctggtcagcggactcaatccggcttcaaatctctaatccggacctgaaggatcgaatggttgagcagttcaaagagttgcaccacatctggcagtcccagcaacgactgcagcctgttgctcaagccccccctggcgctgggcttggggttgggcagggcccctggcccatgcaccctgccggaatgcagtag

SEQ ID NO: 307155 - DNA, 1545 bp, Artificial Sequence
  derived and/or modified sequence
atgaaccagagcattcccgtggcccctacaccaccacgaagggttagattgaagccttggctcgtggcacaggtgaatagctgccagtatcccggactgcagtgggtgaatggggagaagaaactcttttgcataccttggagacatgccacacggcatgggccttctcaagatggagacaatactatttttaaggcttgggcaaaggagacggggaaatatacggaaggagttgatgaggccgatccagcaaaatggaaagcgaatctgcgctgcgccctgaacaagtcccgggactttcgtctgatttacgatggcccaagggacatgcccccacagccctataaaatctatgaagtctgcagcaacggacctgcaccgactgactctcaacctcccgaagattattcttttggcgcaggggaggaggaggaggaggaggaggagctgcaacggatgctgccgtccctgtcgctgactgatgctgtgcagtcaggaccccatatgactccctacagcttgctcaaagaagacgtgaaatggcctcctacactccagccacctactctccggcctcctacgttgcaaccccctacactgcagcctccagtcgtgttaggccctcccgctcccgaccctagtcctcttgctcctccacctggcaaccccgctggctttagagaattgctttctgaagtactggaaccgggtccgctgcccgcatcactgccccctgctggcgagcaattactccccgacttgctgatcagccctcatatgttgcctctcacggacctggaaatcaagttccagtaccgcggacgccctcctcgagctcttaccatatccaatccgcacggttgcaggcttttttacagtcagcttgaggccacgcaggaacaggtcgaactgtttggcccaataagtctagaacaggtccgtttcccttcccccgaagacattccatccgacaaacaacgattttatactaaccaactgctcgacgttttggatcgtggtttaatcctccagctgcagggccaggatttatacgccatccgattatgccagtgcaaagtattctggtcaggaccatgcgctagcgcacatgatagttgcccgaatccgatacaaagggaggtgaaaactaaactgttcagcctcgaacactttctcaatgagctgatcctgtttcaaaaaggtcaaacgaatacaccaccaccttttgagattttcttttgcttcggcgaggagtggcctgacaggaaacctagggagaaaaagctgatcacagttcaagttgttcccgtggctgccagactgctgctcgaaatgttttctggcgagttgtcatggagcgccgacagtattcgactgcagatctccaaccctgacctgaaagatagaatggtggaacagttcaaagaactccaccacatttggcagtctcagcaacgcctccaaccagttgctcaggctcctcctggcgctggcctcggggtcgggcagggaccctggcccatgcaccccgctggaatgcagtag

SEQ ID NO: 307156 - protein, 152 aa, Artificial Sequence
  derived and/or modified sequence
MNQSIPVAPTPPRRVRLKPWLVAQVNSCQYPGLQWVNGEKKLFCIPWRHATRHGPSQDGDNTIFKAWAKETGKYTEGVDEADPAKWKANLRCALNKSRDFRLIYDGPRDMPPQPYKIYEVCSNGPAPTDSQPPEDYSFGAGEEEEEEEEVSV

SEQ ID NO: 307157 - DNA, 2870 bp, Artificial Sequence
  derived and/or modified sequence
gcccggcaggttggcggaccggcgggaggcgcagcctgggcagagctcagcttggtcccgccgcccggccggtgctccctggcgcagccacgcaggcgcaccgcagacagacccctctgccatgaaccagtccatcccagtggctcccaccccaccccgccgcgtgcggctgaagccctggctggtggcccaggtgaacagctgccagtacccagggcttcaatgggtcaacggggaaaagaaattattctgcatcccctggaggcatgccacaaggcatggtcccagccaggacggagataacaccatcttcaaggcctgggccaaggagacagggaaatacaccgaaggcgtggatgaagccgatccggccaagtggaaggccaacctgcgctgtgcccttaacaagagccgggacttccgcctcatctacgacgggccccgggacatgccacctcagccctacaagatctacgaggtctgctccaatggccctgctcccacagactcccagccccctgaggattactcttttggtgcaggagaggaggaggaagaagaggaagagctgcagaggatgttgccaagcctgagcctcacagatgcagtgcagtctggcccccacatgacaccctattctttactcaaagaggatgtcaagtggccgcctactctgcagccgcccactctgcagccgcccgtggtgctgggtccccctgctccagaccccagccccctggctcctccccctggcaaccctgctggcttcagggagcttctctctgaggtcctggagcctgggcccctgcctgccagcctgccccctgcaggcgaacagctcctgccagacctgctgatcagcccccacatgctgcctctgaccgacctggagatcaagtttcagtaccgggggcggccaccccgggccctcaccatcagcaacccccatggctgccggctcttctacagccagctggaggccacccaggagcaggtggaactcttcggccccataagcctggagcaagtgcgcttccccagccctgaggacatccccagtgacaagcagcgcttctacacgaaccagctgctggatgtcctggaccgcgggctcatcctccagctacagggccaggacctttatgccatccgcctgtgtcagtgcaaggtgttctggagcgggccttgtgcctcagcccatgactcatgccccaaccccatccagcgggaggtcaagaccaagcttttcagcctggagcattttctcaatgagctcatcctgttccaaaagggccagaccaacaccccaccacccttcgagatcttcttctgctttggggaagaatggcctgaccgcaaaccccgagagaagaagctcattactgtacaggtggtgcctgtagcagctcgactgctgctggagatgttctcaggggagctatcttggtcagctgatagtatccggctacagatctcaaacccagacctcaaagaccgcatggtggagcaattcaaggagctccatcacatctggcagtcccagcagcggttgcagcctgtggcccaggcccctcctggagcaggccttggtgttggccaggggccctggcctatgcacccagctggcatgcaataacaaggctgcagacggtgactggccctggcttcctgggtggcggtgcggactgatgtggagatgtgacagccccgatgagcacctggctggctgcagggtcctacctctgggtttcctggaagtggatttgggccaagaaggagagggagaaaggcccgagcccctgccttcccgggcctttctctcctgggctgtctctggtctggtcagcctggctctcgggaaattcagccatgagcagggaaagaactctcccaaccctggggcctagctgtataggaggaattgcctaagggtggcccactcttgtgattgccccatttcctctggcaacaaaagccagagtgttgtgggccaagtccccccacagggcctctgcagggcatggccctgatttccctggtttgagactcacttcctcatctccctgtcctctgagataatatgagtgagcacttaggtatcatatcagatgctcaaggctggcagctacccccttcttgagagtccaagaacctggagcagaaataatttttatgtatttttggattaatgaatgttaaaaacagactcagctgtttctttccttttactactaccagttgctcccatgctgctccaccaggccctgtttcggatgccaactggcccactccccaagcacttgcccccagcttgcgaccattggcactgggagggcctggcttctgggctgatgggtcagttgggccttcataaacactcacctggctggctttgccttccaggaggaagctggctgaagcaagggtgtggaattttaaatgtgtgcacagtctggaaaactgtcagaatcagttttcccataaaagggtgggctagcattgcagctgcatttgggaccattcaaatctgtcactctcttgtgtatattcctgtgctattaaatatatcagggcagtgcatgtaaatcatcctgatatatttaatatatttattatattgtcccccgaggtggggacagtgagtgagttctcttagtccccccagagctggttgttaaagagcctggcacctacccgctctcacttcatctgtgtcatctctgcacactccagcccactttctgccttcagccattgagtggaagctgccccaggcccttaccaggtgcagatgcccaatcttgatgcccagccatcagaactgtgagccaaataaacctttttctgtataaaaaaaaaaaaaaaaaaaa

SEQ ID NO: 307158 - protein, 488 aa, Artificial Sequence
  derived and/or modified sequence
MNQSIPVAPTPPRRVRLKPWLVAQVNSCQYPGLQWVNGEKKLFCIPWRHATRHGPSQDGDNTIFKAWAKETGKYTEGVDEADPAKWKANLRCALNKSRDFRLIYDGPRDMPPQPYKIYEVCSNGPAPTDSQPPEDYSFGAGEEEEEEEELQRMLPSLSLTEDVKWPPTLQPPTLQPPVVLGPPAPDPSPLAPPPGNPAGFRELLSEVLEPGPLPASLPPAGEQLLPDLLISPHMLPLTDLEIKFQYRGRPPRALTISNPHGCRLFYSQLEATQEQVELFGPISLEQVRFPSPEDIPSDKQRFYTNQLLDVLDRGLILQLQGQDLYAIRLCQCKVFWSGPCASAHDSCPNPIQREVKTKLFSLEHFLNELILFQKGQTNTPPPFEIFFCFGEEWPDRKPREKKLITVQVVPVAARLLLEMFSGELSWSADSIRLQISNPDLKDRMVEQFKELHHIWQSQQRLQPVAQAPPGAGLGVGQGPWPMHPAGMQ

SEQ ID NO: 307159 - DNA, 1467 bp, Artificial Sequence
  derived and/or modified sequence
atgaaccagagcatccccgtggcccccaccccccccagaagagtgagactgaagccctggctggtggcccaggtgaacagctgccagtaccccggcctgcagtgggtgaacggcgagaagaagctgttctgcatcccctggagacacgccaccagacacggccccagccaggacggcgacaacaccatcttcaaggcctgggccaaggagaccggcaagtacaccgagggcgtggacgaggccgaccccgccaagtggaaggccaacctgagatgcgccctgaacaagagcagagacttcagactgatctacgacggccccagagacatgcccccccagccctacaagatctacgaggtgtgcagcaacggccccgcccccaccgacagccagccccccgaggactacagcttcggcgccggcgaggaggaggaggaggaggaggagctgcagagaatgctgcccagcctgagcctgaccgaggacgtgaagtggccccccaccctgcagccccccaccctgcagccccccgtggtgctgggcccccccgcccccgaccccagccccctggcccccccccccggcaaccccgccggcttcagagagctgctgagcgaggtgctggagcccggccccctgcccgccagcctgccccccgccggcgagcagctgctgcccgacctgctgatcagcccccacatgctgcccctgaccgacctggagatcaagttccagtacagaggcagaccccccagagccctgaccatcagcaacccccacggctgcagactgttctacagccagctggaggccacccaggagcaggtggagctgttcggccccatcagcctggagcaggtgagattccccagccccgaggacatccccagcgacaagcagagattctacaccaaccagctgctggacgtgctggacagaggcctgatcctgcagctgcagggccaggacctgtacgccatcagactgtgccagtgcaaggtgttctggagcggcccctgcgccagcgcccacgacagctgccccaaccccatccagagagaggtgaagaccaagctgttcagcctggagcacttcctgaacgagctgatcctgttccagaagggccagaccaacacccccccccccttcgagatcttcttctgcttcggcgaggagtggcccgacagaaagcccagagagaagaagctgatcaccgtgcaggtggtgcccgtggccgccagactgctgctggagatgttcagcggcgagctgagctggagcgccgacagcatcagactgcagatcagcaaccccgacctgaaggacagaatggtggagcagttcaaggagctgcaccacatctggcagagccagcagagactgcagcccgtggcccaggccccccccggcgccggcctgggcgtgggccagggcccctggcccatgcaccccgccggcatgcagtag

SEQ ID NO: 307160 - DNA, 1467 bp, Artificial Sequence
  derived and/or modified sequence
atgaaccagtctatcccagtcgccccaaccccgcctaggagggtgcggcttaaaccttggcttgtcgctcaggtcaatagttgccagtacccaggccttcagtgggtgaacggcgaaaagaaattgttttgcatcccatggcgccacgccacgcgtcatggcccatctcaggacggggataatactatcttcaaagcttgggctaaagaaaccgggaaatacacagagggcgtagatgaggcggatcccgccaagtggaaggccaacctacgatgtgcattgaacaagtctcgagacttcaggctgatatatgacggtccacgagacatgcccccacagccttataagatctatgaggtttgctcaaacgggcctgctcctaccgactcccaacccccagaagattactcttttggcgcaggggaggaggaagaggaagaagaagagctgcagcgcatgctcccttcactgtccctaaccgaggacgtaaagtggccgcccactttacaaccacccaccctacaaccacccgtggttctgggaccccctgcccccgatccgagccccctcgcccctccaccagggaaccctgccggtttcagagagttactatcagaagtgttggagcctgggcccctgccagctagtctgccccctgcgggcgagcagctcttgccagatttactgatttcaccccacatgctccctctgaccgatctggagataaagttccagtatcgcggcaggcctcctcgcgccctgaccatttctaaccctcacggctgtcgtttgttttacagtcagctggaagcaacacaggaacaggtcgagctgttcggacccatttctctggagcaagtccggttccctagcccagaggacatccctagtgacaagcagaggttttacactaatcaacttctggacgtcctagataggggactgattctgcagctgcagggccaggacctctatgctataagattgtgtcaatgcaaggtcttttggagcggtccatgcgcctcagcccacgattcctgcccgaatcccatacagcgcgaggtcaagactaaactgttttcactggaacattttctaaacgagttgattctgttccagaagggccagacgaacacaccaccgccttttgagatattcttttgctttggcgaagaatggccagacagaaagccaagagagaaaaagcttatcacagtgcaggtcgtgccggtggccgcccgcctgctcttagagatgttttcaggcgagctttcctggtccgcagactctatcaggctgcagattagcaatccggatctgaaagatcggatggttgaacagttcaaggagctgcatcatatctggcagtctcagcagaggctacagccagtggcacaggctccgccgggggcagggctaggagtcggacagggcccatggcctatgcacccagctggaatgcagtag

SEQ ID NO: 307161 - DNA, 1467 bp, Artificial Sequence
  derived and/or modified sequence
atgaaccagagcatccctgtggcccccaccccaccaagaagagtgcggctgaagccctggctggtggcccaggtgaacagctgccagtacccaggcctgcagtgggtgaatggagagaagaagctgttctgcatcccctggaggcatgccaccaggcatggccccagccaggatggagacaacaccatcttcaaggcctgggccaaggagaccgggaagtacacagaaggagtggatgaagctgaccctgccaagtggaaggccaacctgcgctgtgccctgaacaagagccgggacttccgcctcatctatgatggcccccgggacatgccaccccagccctacaagatctatgaggtgtgcagcaatggacctgcccccacagacagccagcccccagaggactacagctttggagctggggaggaggaggaggaggaggaggagctgcagaggatgctgcccagcctgagcctgacagaagatgtgaagtggccacccaccctgcagccccccaccctgcagccccctgtggtgctgggccccccagccccagaccccagccccctggcccctcctcctggcaacccagctggcttccgggagctgctgtctgaggtgctggagcccggccccctgcctgccagcctgcccccagctggggagcagctgctgcctgacctgctgatcagcccccacatgctgcccctgacagacctggagatcaagttccagtaccggggccggcccccccgggccctgaccatcagcaacccccacggctgccgcctcttctacagccagctggaggccacccaggagcaggtggagctgtttggccccatcagcctggagcaggtgcgcttccccagccctgaggacatccccagcgacaagcagcgcttctacaccaaccagctgctggatgtgctggaccggggcctcatcctgcagctgcagggccaggacctgtatgccatccggctgtgccagtgcaaggtgttctggagcggcccctgtgccagcgcccatgacagctgccccaaccccatccagcgggaggtgaagaccaagctgttcagcctggagcacttcctgaatgaactcatcctcttccagaagggccagaccaacaccccacctccatttgagatcttcttctgctttggagaggagtggccagacaggaagccccgggagaagaagctgatcaccgtgcaggtggtgcctgtggccgcccggctgctgctggagatgttttctggagagctgtcctggagcgctgacagcatccggctgcagatcagcaacccagacctgaaggacaggatggtggagcagttcaaggagctgcaccacatctggcagagccagcagaggctgcagcctgtggcccaggcccctcctggagctggcctgggcgtgggccagggcccctggcccatgcaccctgctggcatgcagtag

SEQ ID NO: 307162 - DNA, 2077 bp, Artificial Sequence
  derived and/or modified sequence
agctcagaggcggcactaggcaggtgcaaccccaaaagacccctctgccatgaaccagtccatcccagtggctcccaccccaccccgccgcgtgcggctgaagccctggctggtggcccaggtgaacagctgccagtacccagggcttcaatgggtcaacggggaaaagaaattattctgcatcccctggaggcatgccacaaggcatggtcccagccaggacggagataacaccatcttcaaggcctgggccaaggagacagggaaatacaccgaaggcgtggatgaagccgatccggccaagtggaaggccaacctgcgctgtgcccttaacaagagccgggacttccgcctcatctacgacgggccccgggacatgccacctcagccctacaagatctacgaggtctgctccaatggccctgctcccacagactcccagccccctgaggattactcttttggtgcaggagaggaggaggaagaagaggaagagctgcagaggatgttgccaagcctgagcctcacagaggatgtcaagtggccgcccactctgcagccgcccactctgcagccgcccgtggtgctgggtccccctgctccagaccccagccccctggctcctccccctggcaaccctgctggcttcagggagcttctctctgaggtcctggagcctgggcccctgcctgccagcctgccccctgcaggcgaacagctcctgccagacctgctgatcagcccccacatgctgcctctgaccgacctggagatcaagtttcagtaccgggggcggccaccccgggccctcaccatcagcaacccccatggctgccggctcttctacagccagctggaggccacccaggagcaggtggaactcttcggccccataagcctggagcaagtgcgcttccccagccctgaggacatccccagtgacaagcagcgcttctacacgaaccagctgctggatgtcctggaccgcgggctcatcctccagctacagggccaggacctttatgccatccgcctgtgtcagtgcaaggtgttctggagcgggccttgtgcctcagcccatgactcatgccccaaccccatccagcgggaggtcaagaccaagcttttcagcctggagcattttctcaatgagctcatcctgttccaaaagggccagaccaacaccccaccacccttcgagatcttcttctgctttggggaagaatggcctgaccgcaaaccccgagagaagaagctcattactgtacaggtggtgcctgtagcagctcgactgctgctggagatgttctcaggggagctatcttggtcagctgatagtatccggctacagatctcaaacccagacctcaaagaccgcatggtggagcaattcaaggagctccatcacatctggcagtcccagcagcggttgcagcctgtggcccaggcccctcctggagcaggccttggtgttggccaggggccctggcctatgcacccagctggcatgcaataacaaggctgcagacggtgactggccctggcttcctgggtggcggtgcggactgatgtggagatgtgacagccccgatgagcacctggctggctgcagggtcctacctctgggtttcctggaagtggatttgggccaagaaggagagggagaaaggcccgagcccctgccttcccgggcctttctctcctgggctgtctctggtctggtcagcctggctctcgggaaattcagccatgagcagggaaagaactctcccaaccctggggcctagctgtataggaggaattgcctaagggtggcccactcttgtgattgccccatttcctctggcaacaaaagccagagtgttgtgggccaagtccccccacagggcctctgcagggcatggccctgatttccctggtttgagactcacttcctcatctccctgtcctctgagataatatgagtgagcacttaggtatcatatcagatgctcaaggctggcagctacccccttcttgagagtccaagaacctggagcagaaataatttttatgtatttttggattaatgaatgtt

SEQ ID NO: 307163 - DNA, 2796 bp, Artificial Sequence
  derived and/or modified sequence
gcccggcaggttggcggaccggcgggaggcgcagcctgggcagagctcagcttggtcccgccgcccggccggtgctccctggcgcagccacgcaggcgcaccgcagacagacccctctgccatgaaccagtccatcccagtggctcccaccccaccccgccgcgtgcggctgaagccctggctggtggcccaggtgaacagctgccagtacccagggcttcaatgggtcaacggggaaaagaaattattctgcatcccctggaggcatgccacaaggcatggtcccagccaggacggagataacaccatcttcaaggcctgggccaaggagacagggaaatacaccgaaggcgtggatgaagccgatccggccaagtggaaggccaacctgcgctgtgcccttaacaagagccgggacttccgcctcatctacgacgggccccgggacatgccacctcagccctacaagatctacgaggtctgctccaatggccctgctcccacagactcccagccccctgaggattactcttttggtgcaggagaggaggaggaagaagaggaagagaggatgtcaagtggccgcccactctgcagccgcccactctgcggccgcctactctgcagccgcccactctgcagccgcccgtggtgctgggtccccctgctccagaccccagccccctggctcctccccctggcaaccctgctggcttcagggagcttctctctgaggtcctggagcctgggcccctgcctgccagcctgccccctgcaggcgaacagctcctgccagacctgctgatcagcccccacatgctgcctctgaccgacctggagatcaagtttcagtaccgggggcggccaccccgggccctcaccatcagcaacccccatggctgccggctcttctacagccagctggaggccacccaggagcaggtggaactcttcggccccataagcctggagcaagtgcgcttccccagccctgaggacatccccagtgacaagcagcgcttctacacgaaccagctgctggatgtcctggaccgcgggctcatcctccagctacagggccaggacctttatgccatccgcctgtgtcagtgcaaggtgttctggagcgggccttgtgcctcagcccatgactcatgccccaaccccatccagcgggaggtcaagaccaagcttttcagcctggagcattttctcaatgagctcatcctgttccaaaagggccagaccaacaccccaccacccttcgagatcttcttctgctttggggaagaatggcctgaccgcaaaccccgagagaagaagctcattactgtacaggtggtgcctgtagcagctcgactgctgctggagatgttctcaggggagctatcttggtcagctgatagtatccggctacagatctcaaacccagacctcaaagaccgcatggtggagcaattcaaggagctccatcacatctggcagtcccagcagcggttgcagcctgtggcccaggcccctcctggagcaggccttggtgttggccaggggccctggcctatgcacccagctggcatgcaataacaaggctgcagacggtgactggccctggcttcctgggtggcggtgcggactgatgtggagatgtgacagccccgatgagcacctggctggctgcagggtcctacctctgggtttcctggaagtggatttgggccaagaaggagagggagaaaggcccgagcccctgccttcccgggcctttctctcctgggctgtctctggtctggtcagcctggctctcgggaaattcagccatgagcagggaaagaactctcccaaccctggggcctagctgtataggaggaattgcctaagggtggcccactcttgtgattgccccatttcctctggcaacaaaagccagagtgttgtgggccaagtccccccacagggcctctgcagggcatggccctgatttccctggtttgagactcacttcctcatctccctgtcctctgagataatatgagtgagcacttaggtatcatatcagatgctcaaggctggcagctacccccttcttgagagtccaagaacctggagcagaaataatttttatgtatttttggattaatgaatgttaaaaacagactcagctgtttctttccttttactactaccagttgctcccatgctgctccaccaggccctgtttcggatgccaactggcccactccccaagcacttgcccccagcttgcgaccattggcactgggagggcctggcttctgggctgatgggtcagttgggccttcataaacactcacctggctggctttgccttccaggaggaagctggctgaagcaagggtgtggaattttaaatgtgtgcacagtctggaaaactgtcagaatcagttttcccataaaagggtgggctagcattgcagctgcatttgggaccattcaaatctgtcactctcttgtgtatattcctgtgctattaaatatatcagggcagtgcatgtaaatcatcctgatatatttaatatatttattatattgtcccccgaggtggggacagtgagtgagttctcttagtccccccagagctggttgttaaagagcctggcacctacccgctctcacttcatctgtgtcatctctgcacactccagcccactttctgccttcagccattgagtggaagctgccccaggcccttaccaggtgcagatgcccaatcttgatgcccagccatcagaactgtgagccaaataaacctttttctgt

SEQ ID NO: 307164 - DNA, 1467 bp, Artificial Sequence
  derived and/or modified sequence
atgaaccagagcatccccgtggcccccacccccccccggcgggtgagactgaaaccatggctcgttgcgcaggtgaacagctgccagtatcctggtctccagtgggtgaatggggaaaagaaactgttctgcatcccttggcggcacgcgactaggcatggcccaagccaggacggcgacaatacaatctttaaagcctgggctaaagaaaccggcaagtataccgagggcgttgatgaagccgacccggccaagtggaaagcaaatcttcggtgcgccctgaacaaatccagggactttcgactgatctatgacggcccgcgtgacatgccaccccagccatataagatctatgaggtttgcagtaatggacccgcccccactgattctcagccgccggaagattactcatttggtgccggcgaggaagaggaagaggaggaagagctgcagcgaatgttgccttccctttctcttactgaggacgttaagtggcccccgactctgcagccacctacccttcagcctcccgtggtgctcggcccaccagccccggacccaagcccactagcccctcccccaggtaacccagccgggtttcgcgaattactctcagaggtgctcgagccaggacccttgccagcctctctgcctcctgccggagagcaactgctcccggacctgctgataagtccccacatgcttccgctcacagacttagaaatcaaattccaatacaggggccggccaccccgtgcgctaaccatctcgaacccacacggatgccgtctgttttactcccagttagaggccacccaggagcaggtcgagcttttcgggcctatatcgctggagcaggtaagatttccctctcctgaagacattccatccgataagcagcgcttttacaccaaccagctcctcgacgtgcttgatagaggactgattctgcagcttcaaggccaggatttgtacgcgattaggctgtgccagtgcaaggtcttttggtccggaccctgtgcctcggctcatgatagttgccccaaccccattcagcgagaggtcaaaacgaagctattcagccttgagcactttctgaacgagttgatcttatttcagaagggccaaaccaatactccgccaccgttcgagatctttttctgcttcggcgaggaatggcctgataggaagccgcgagaaaaaaaactcattactgtccaggttgtgccggtggctgctagactgctgttggagatgttcagcggcgagctttcatggagcgcagactccattaggcttcagatcagcaacccggatttgaaggacagaatggtggagcagttcaaggagctgcatcatatttggcagagccagcagcgcctacagccagtggcacaggcccctcctggagcggggctgggcgtagggcagggtccatggcccatgcatcctgcaggcatgcaatag

SEQ ID NO: 307165 - DNA, 1467 bp, Artificial Sequence
  derived and/or modified sequence
atgaaccagagcattcctgttgcacctactcccccacgcagggtgcgtttaaaaccttggcttgttgcgcaggtgaatagctgccagtatccaggtctccagtgggtgaatggggagaaaaagctgttctgcattccatggcggcacgcgacacggcacgggccatctcaggatggggacaataccatcttcaaggcatgggccaaagagaccggcaagtacacagagggagtagacgaggcagatcctgccaagtggaaagctaatctccgttgcgcattaaacaaaagccgcgacttccgcctcatctatgatgggcctcgcgacatgccaccccagccttacaaaatttatgaggtgtgtagcaacggccctgcacccaccgattctcagccccctgaggattactcttttggggcaggcgaagaggaggaggaggaagaggagctgcagcgtatgctgccttctctttcactgaccgaggatgtgaagtggccaccaacccttcagcctccaacactgcagcctccagttgtattgggccctcccgcacccgatcctagccccctggccccaccgccaggaaacccagctggttttagggagcttttatcggaggtcctggagcctggaccccttccagccagtctcccacctgctggggaacagttacttccagacttactcatctccccccacatgcttcccctgacagacctagaaattaagttccagtaccgcggacgacctccacgtgcgctgaccatctcaaacccgcatggatgcaggcttttctactcacagctagaagccacccaagagcaggtggagctgttcggacccatatcgttagaacaggtgagatttccctctccagaggacattccgagcgacaagcagagattttacaccaaccagctgttagatgttctcgaccggggacttatcctacagttacaggggcaagacctctatgccatccgcctgtgccagtgcaaagtattttggtccggtccatgtgcctccgctcacgatagctgtcctaaccctattcaaagggaggtaaagaccaaactgttctcgctcgaacattttttaaatgaactcatcctttttcaaaagggtcagactaatactccccctccatttgaaatttttttttgcttcggggaagagtggccagaccggaaacctcgagagaaaaaattaatcacagtgcaggtggttcctgtggctgccaggctgttgttagagatgttctcaggtgagctgtcatggtctgccgattcaatacggctgcagattagcaatccagatctcaaagacaggatggtcgaacaatttaaagagctgcaccacatctggcagtcacagcagcgcctgcaacctgtggcacaggcaccacccggagcagggctcggggttggccaaggcccttggccaatgcaccctgctggcatgcagtag

SEQ ID NO: 307166 - protein, 744 aa, Artificial Sequence
  derived and/or modified sequence
MDHAEENEILAATQRYYVERPIFSHPVLQERLHTKDKVPDSIADKLKQAFTCTPKKIRNIIYMFLPITKWLPAYKFKEYVLGDLVSGISTGVLQLPQGLAFAMLAAVPPIFGLYSSFYPVIMYCFLGTSRHISIGPFAVISLMIGGVAVRLVPDDIVIPGGVNATNGTEARDALRVKVAMSVTLLSGIIQFCLGVCRFGFVAIYLTEPLVRGFTTAAAVHVFTSMLKYLFGVKTKRYSGIFSVVYSTVAVLQNVKNLNVCSLGVGLMVFGLLLGGKEFNERFKEKLPAPIPLEFFAVVMGTGISAGFNLKESYNVDVVGTLPLGLLPPANPDTSLFHLVYVDAIAIAIVGFSVTISMAKTLANKHGYQVDGNQELIALGLCNSIGSLFQTFSISCSLSRSLVQEGTGGKTQLAGCLASLMILLVILATGFLFESLPQAVLSAIVIVNLKGMFMQFSDLPFFWRTSKIELTIWLTTFVSSLFLGLDYGLITAVIIALLTVIYRTQSPSYKVLGKLPETDVYIDIDAYEEVKEIPGIKIFQINAPIYYANSDLYSNALKRKTGVNPAVIMGARRKAMRKYAKEVGNANMANATVVKADAEVDGEDATKPEEEDGEVKYPPIVIKSTFPEEMQRFMPPGDNVHTVILDFTQVNFIDSVGVKTLAGIVKEYGDVGIYVYLAGCSAQVVNDLTRNRFFENPALWELLFHSIHDAVLGSQLREALAEQEASAPPSQEDLEPNATPATPEA

SEQ ID NO: 307167 - protein, 177 aa, Artificial Sequence
  derived and/or modified sequence
MGARRKAMRKYAKEVGNANMANATVVKADAEVDGEDATKPEEEDGEVKYPPIVIKSTFPEEMQRFMPPGDNVHTVILDFTQVNFIDSVGVKTLAGIVKEYGDVGIYVYLAGCSAQVVNDLTRNRFFENPALWELLFHSIHDAVLGSQLREALAEQEASAPPSQEDLEPNATPATPEA

SEQ ID NO: 307168 - protein, 746 aa, Artificial Sequence
  derived and/or modified sequence
MDHAEENEILAATQRYYVERPIFSHPVLQERLHTKDKVPDSIADKLKQAFTCTPKKIRNIIYMFLPITKWLPAYKFKEYVLGDLVSGISTGVLQLPQGLAFAMLAAVPPIFGLYSSFYPVIMYCFLGTSRHISIGPFAVISLMIGGVAVRLVPDDIVIPGGVNATNGTEARDALRVKVAMSVTLLSGIIQFCLGVCRFGFVAIYLTEPLVRGFTTAAAVHVFTSMLKYLFGVKTKRYSGIFSVVYSTVAVLQNVKNLNVCSLGVGLMVFGLLLGGKEFNERFKEKLPAPIPLEFFAVVMGTGISAGFNLKESYNVDVVGTLPLGLLPPANPDTSLFHLVYVDAIAIAIVGFSVTISMAKTLANKHGYQVDGNQELIALGLCNSIGSLFQTFSISCSLSRSLVQEGTGGKTQLAGCLASLMILLVILATGFLFESLPQAVLSAIVIVNLKGMFMQFSDLPFFWRTSKIELTIWLTTFVSSLFLGLDYGLITAVIIALLTVIYRTQSPSYKVLGKLPETDVYIDIDAYEEVKEIPGIKIFQINAPIYYANSDLYSNALKRKTGVNPAVIMGARRKAMRKYAKEVGNANMANATVVKATQDAEVDGEDATKPEEEDGEVKYPPIVIKSTFPEEMQRFMPPGDNVHTVILDFTQVNFIDSVGVKTLAGIVKEYGDVGIYVYLAGCSAQVVNDLTRNRFFENPALWELLFHSIHDAVLGSQLREALAEQEASAPPSQEDLEPNATPATPEA

SEQ ID NO: 307169 - protein, 707 aa, Artificial Sequence
  derived and/or modified sequence
MDHAEENEILAATQRYYVERPIFSHPVLQERLHTKDKVPDSIADKLKQAFTCTPKKIRNIIYMFLPITKWLPAYKFKEYVLGDLVSGISTGVLQLPQGPFAVISLMIGGVAVRLVPDDIVIPGGVNATNGTEARDALRVKVAMSVTLLSGIIQFCLGVCRFGFVAIYLTEPLVRGFTTAAAVHVFTSMLKYLFGVKTKRYSGIFSVVYSTVAVLQNVKNLNVCSLGVGLMVFGLLLGGKEFNERFKEKLPAPIPLEFFAVVMGTGISAGFNLKESYNVDVVGTLPLGLLPPANPDTSLFHLVYVDAIAIAIVGFSVTISMAKTLANKHGYQVDGNQELIALGLCNSIGSLFQTFSISCSLSRSLVQEGTGGKTQLAGCLASLMILLVILATGFLFESLPQAVLSAIVIVNLKGMFMQFSDLPFFWRTSKIELTIWLTTFVSSLFLGLDYGLITAVIIALLTVIYRTQSPSYKVLGKLPETDVYIDIDAYEEVKEIPGIKIFQINAPIYYANSDLYSNALKRKTGVNPAVIMGARRKAMRKYAKEVGNANMANATVVKADAEVDGEDATKPEEEDGEVKYPPIVIKSTFPEEMQRFMPPGDNVHTVILDFTQVNFIDSVGVKTLAGIVKEYGDVGIYVYLAGCSAQVVNDLTRNRFFENPALWELLFHSIHDAVLGSQLREALAEQEASAPPSQEDLEPNATPATPEA

SEQ ID NO: 307170 - DNA, 2235 bp, Artificial Sequence
  derived and/or modified sequence
atggatcatgctgaagaaaatgaaatcctcgccgctactcagaggtactatgtggagaggcccatcttctcccacccagtgttgcaagaacggctgcatactaaagataaggtgccagacagtattgcagacaagttgaagcaagccttcacttgcaccccgaaaaagatcaggaacattatctacatgttcctgcctattacaaaatggctgccagcctataaatttaaggagtatgtccttggcgacctggtctcaggaattagtaccggagtgctccaactcccacagggtctggcattcgctatgttggccgctgtcccccccatttttggactgtactcgtctttctatccagtgattatgtactgctttctgggaacctccagacacatctccatcgggcctttcgcggtcattagtctaatgatcgggggtgtcgcagtgagattagttccagacgacattgtgatccccggcggcgtcaatgccaccaacggaaccgaggctcgagacgcactgcgggtaaaggtggctatgtcagtgacactcctgtcaggtattatccagttttgcctgggcgtgtgtagattcggcttcgtggccatttacctcacagaacctctggtgagaggattcacaacagctgccgccgtacatgtgtttacttccatgcttaagtatctcttcggtgttaagaccaaaaggtatagtggtatttttagtgtggtctatagtacggtggcggtactacagaatgtcaagaacctgaacgtctgttctcttggcgtcggccttatggttttcgggctgttactgggcggaaaggagtttaacgagagatttaaggagaaactgccggccccgattcctttggaatttttcgccgtggtgatggggaccggtatctctgccggattcaatctgaaggaatcgtataatgtggacgtcgtggggacgctgcctcttgggctactgccaccagctaacccagacacctctctgttccatttagtgtatgtggatgcgattgcaatagctatcgtgggattttcggtgacgataagcatggcaaaaaccctggcaaataaacacggctatcaggtcgacgggaaccaggagctgatcgctttgggactctgtaacagcatcggaagtcttttccagaccttcagcatttcctgctccctttctagatctctggtgcaggagggaacaggcggcaagacacagctggcagggtgcctggccagcctgatgatcctgctggtcatccttgccaccggttttctgttcgagtctcttccacaagctgtcctgtccgcgatcgtgatcgtgaacctgaaaggaatgttcatgcagttttccgacctgcccttcttttggcgcacgtctaagatcgagctgaccatttggttaaccacctttgtgtcctcacttttcctggggctagactacggactcattacagcggtgatcattgccctgctgacagttatatatcgaactcagtccccaagttataaagtccttggaaagcttccagagactgatgtatacattgacattgatgcctacgaggaagtcaaagaaatacccgggattaaaatctttcagatcaatgcacctatctattacgcgaacagtgacctatacagcaacgcccttaaacggaagacaggggtcaatcccgctgtgattatgggcgctagaaggaaggctatgcgcaaatacgctaaggaggtgggcaacgcaaacatggctaacgcgaccgtggtgaaggctgatgcagaagtggatggcgaggacgccaccaaacccgaggaagaggatggcgaggttaagtacccacccattgttatcaagtctacctttcccgaggagatgcagcgcttcatgcctccgggggacaacgtacacaccgtgatcctggattttacccaggtcaactttatcgactctgttggcgtgaagacactcgctgggatcgtaaaggaatacggcgacgttgggatctatgtgtatttggcagggtgcagcgcacaggtagtcaacgacttgacgcgcaaccggtttttcgaaaatcccgccctgtgggagttgttgttccatagtatccacgatgccgtgttaggctcacagcttagagaagctctggcggaacaagaggcgtccgcccccccctcccaggaagacttggagcctaatgctaccccggcgaccccagaggcatag

SEQ ID NO: 307171 - DNA, 2241 bp, Artificial Sequence
  derived and/or modified sequence
atggatcacgccgaagaaaacgaaatactcgccgccacacagcgctattacgtcgagagacccatcttttcacatcccgtgttacaggaacgcttgcatactaaagataaagtgccagactctattgcagacaaacttaaacaggctttcacctgcacgcctaaaaaaattcgtaacatcatctatatgttccttccgatcaccaagtggttgcctgcatataaatttaaagagtatgtgttaggcgacctggtatccggaataagcactggtgtgctccagctgccacagggactagcctttgccatgctggccgccgtgccacctatcttcgggctgtattcctccttctaccccgttattatgtattgttttctgggaacatcgaggcacatctccattggcccgtttgcagtgatctctctgatgatcgggggggttgctgtgcgactcgtccccgacgacatcgtgattcccggtggggtgaacgccacgaatgggaccgaggccagagatgcactgagagtgaaagtggccatgagcgtgaccttactctccgggattattcagttctgcctcggggtgtgccggttcggctttgtggccatttatctgaccgagcccctcgtgagaggctttacgacagcagcggcggtgcacgtctttacaagcatgctcaagtacctttttggtgtgaaaactaagagatacagtggcatcttcagcgtagtatactccactgttgcagtgctccaaaatgtcaaaaatctgaatgtgtgctcactgggcgttggattaatggttttcggactccttctggggggtaaggaattcaatgagcgctttaaggaaaagttacccgctccgattccactggaatttttcgccgtggttatgggcaccggaatctctgctggcttcaacctgaaagagagctacaacgtcgacgtggtggggacgctgcccctgggcctgctcccccccgccaaccctgacaccagcctattccatctcgtttatgtggatgctattgccatcgccatcgtgggtttctctgtcactattagtatggccaagactctggccaacaaacacggctatcaggtggacggtaaccaggaactcatcgctttggggctctgcaacagcataggctccctatttcagacattctccatatcctgctcattatcccggtctctggtccaggaagggactgggggcaagacacagctcgccggatgtctggcttccctgatgatcctgcttgttattctcgccactggattcctgttcgaaagtctccctcaagccgtcctatccgccatagttattgtcaatctcaagggaatgttcatgcaattttcggatctacccttcttctggcgcacaagtaagattgaactgaccatttggctgaccacctttgtcagcagtctgtttctgggactcgattatgggctgataacagcggtaatcattgcactcttgacagttatttatcgcacccagagcccaagctataaagtgttaggaaaactgcccgaaacagatgtttacatcgatatagatgcctacgaagaagtgaaagaaatccccggaattaagatttttcaaatcaacgcccctatttattacgccaatagcgatttgtatagcaacgcactgaaacgaaagaccggcgtgaatcccgccgtgattatgggcgctcggcgaaaagctatgcggaagtatgccaaggaggtgggaaatgcgaacatggccaacgccaccgtggtgaaagcaacccaggacgcagaggtggacggggaggacgcgacaaagccggaggaggaggacggcgaagttaagtacccacccatcgttatcaagtcaacattccctgaggagatgcagcgctttatgcctcctggcgacaacgtccacactgtgatcctggattttacacaggttaatttcattgattctgtaggtgtgaagactctcgcgggcatcgtgaaggaatacggcgatgtcggcatctacgtctacctcgccggttgctctgctcaggttgtgaatgaccttacaagaaataggttcttcgagaatcctgcgttgtgggagttgctgttccatagtattcatgatgcagtgctgggctctcagttacgcgaagcactggcggagcaggaggcctccgcgccacctagccaggaggacctggaacctaacgctaccccagccacacctgaagcctag

SEQ ID NO: 307172 - DNA, 2124 bp, Artificial Sequence
  derived and/or modified sequence
atggaccacgccgaagagaacgaaatcctggcagctacccaacgctactacgtggagagacccatcttctctcatccagtcttgcaagaaaggctgcacacaaaggacaaggtgccagacagcatcgccgataagctcaagcaggcattcacttgcacacctaaaaagatccgcaatattatttacatgtttctccctataactaagtggctaccagcgtataagttcaaggagtatgtgctgggcgacttggtttccggtatctctaccggcgttcttcagctgccccaggggccctttgcagtgatttctctgatgatcggaggggtggccgtgcgcctggtgccggatgacattgtaatccccgggggcgtgaacgccaccaatggaacagaggccagagatgctctgagggtgaaggttgccatgtctgtgaccctcttgagcggtattatacagttctgtctgggggtctgccgattcggatttgtagccatttatttaactgagccactggtgagagggtttactacagcggccgccgtgcacgtatttactagcatgctcaagtacctcttcggagtaaagactaagcgctactctgggatattcagcgttgtgtacagtacggtggccgtcctgcagaatgtgaagaatttaaacgtgtgtagtctgggtgttggactgatggttttcggactcctgctgggagggaaagagtttaacgaacgattcaaggaaaaactccctgcgccgattccactggaattttttgcggtggtgatgggtacaggcatttccgccggttttaatttgaaagaaagttataacgtcgatgtggtgggaacccttccccttggcctcctgcctccagccaatcccgataccagccttttccatctggtttatgtcgatgccatcgccatcgcaatcgtcggcttttctgtgaccatcagtatggcgaagactttagccaataagcacgggtatcaggtcgatggaaatcaggagctcatagctctgggcttatgtaattccatcggctctctttttcagacattctcaatctcatgctcactgagtcggtctctcgttcaagagggcaccggagggaaaacacaactcgcaggatgcctggcgagccttatgattctcttggtgattctggcaaccggattcttattcgagtcattgcctcaggcagttctgtctgcgatcgtgattgtgaaccttaaaggtatgtttatgcagttctcagaccttccttttttttggcggactagtaagattgagctcaccatctggctgacaacctttgtctcctcattattcctcggccttgattacggactgatcaccgctgtgataatcgccttgctcacagttatatatagaacccagtcaccttcttacaaagtgctggggaagttgcctgagaccgacgtgtacattgatattgacgcttatgaagaagtaaaggagattccgggaataaagatttttcagatcaacgcccccatatactatgctaatagtgacctgtattcaaacgccctaaaaaggaagactggagtgaaccccgcggtaataatgggagcccgcaggaaggccatgcgcaagtatgccaaagaggtcggtaacgccaacatggcaaacgctaccgtcgttaaagcggatgcagaagtggatggtgaggacgccacaaagcccgaggaggaggacggagaggtgaaataccctcctatcgtcattaagagtacattcccggaagagatgcaacgattcatgccccctggcgataatgtgcacaccgtaattcttgactttacacaggtgaattttattgatagcgtcggggtgaagacactggctgggatcgttaaagaatacggcgacgtcggaatttatgtgtaccttgcaggctgctccgcccaggttgtaaacgacctgactagaaatcggttcttcgagaatcccgccctctgggagttgctgttccactctatacatgatgccgtcctggggagccaactcagagaggccctcgccgaacaggaggctagtgcccccccttcccaggaagacctcgaaccaaatgctacgccagcaacaccggaagcgtag

SEQ ID NO: 307173 - DNA, 2235 bp, Artificial Sequence
  derived and/or modified sequence
atggaccacgccgaggagaatgagatcctggccgccacccagcgctactacgtggagcggcccatcttcagccaccctgtgctgcaggagcggctgcacaccaaggacaaggtgcctgacagcattgctgacaagctgaagcaggccttcacctgcacccccaagaagatccggaacatcatctacatgttcctgcccatcaccaagtggctgcctgcctacaagttcaaggagtatgtgctgggggacctggtgtctggcatcagcactggagtgctgcagctgccccagggcctggcctttgccatgctggccgctgtgccccccatcttcggcctgtacagcagcttctaccctgtgatcatgtactgcttcctgggcaccagccgccacatcagcatcggcccctttgctgtgatcagcctgatgattggaggagtggccgtgcggctggtgcctgatgacatcgtcatccctggaggagtgaatgccaccaacggcacagaggccagagatgccctgcgggtgaaggtggccatgtctgtgaccctgctgagcggcatcatccagttctgcctgggcgtgtgccgcttcggctttgtggccatctacctgacagagcccctggtgcggggcttcaccacagctgctgctgtgcacgtgttcacctccatgctgaagtacctgtttggagtgaagaccaagcgctacagcggcatcttctctgtggtgtacagcacagtggccgtgctgcagaatgtgaagaacctgaatgtgtgcagcctgggcgtgggcctgatggtgtttggcctgctgctgggcggcaaggagttcaatgaacgcttcaaggagaagctgcctgcccccatccccctggagttctttgctgtggtgatgggcaccggcatctctgctggcttcaacctgaaggagagctacaacgtggatgtggtgggcaccctgcccctgggcctgctgcccccagccaacccagacaccagcctcttccacctggtgtatgtggatgccatcgccatcgccatcgtgggcttctctgtgaccatctccatggccaagaccctggccaacaagcacggctaccaggtggatggcaaccaggagctgattgccctgggcctgtgcaacagcatcggcagcctcttccagaccttcagcatcagctgcagcctgagccgcagcctggtgcaggagggcaccggcggcaagacccagctggccggctgcctggccagcctgatgatcctgctggtgatcctggccaccggcttcctgtttgagagcctgccccaggccgtgctgagcgccatcgtgattgtgaacctgaagggcatgttcatgcagttcagtgacctgcccttcttctggaggaccagcaagattgagctgaccatctggctgaccacctttgtgagcagcctcttcctgggcctggactatggcctcatcacagctgtgatcatcgccctgctgaccgtcatctaccgcacccagagccccagctacaaggtgctgggcaagctgcctgagacagatgtgtacattgatattgatgcctatgaggaggtgaaggagatccctggcatcaagatcttccagatcaatgcccccatctactatgccaacagcgacctgtacagcaatgccctgaagaggaagacaggagtgaacccagctgtgatcatgggcgcccggaggaaggccatgaggaaatatgccaaggaggtgggcaatgccaacatggccaatgccaccgtggtgaaggcagatgctgaggtggatggagaagatgccaccaagccagaggaggaggatggagaggtgaagtacccacccatcgtcatcaagagcaccttccctgaggagatgcagcgcttcatgcctcctggggacaacgtgcacacagtcatcctggacttcacccaggtgaacttcatcgacagcgtgggcgtgaagaccctggccggcatcgtgaaggagtatggagatgtgggcatctacgtgtacctggccggctgcagcgcccaggtggtgaatgacctgaccaggaaccgcttctttgagaacccagccctgtgggagctgctcttccacagcatccatgatgctgtgctgggcagccagctgcgggaggccctggccgagcaggaggccagcgccccacccagccaggaggacctggagcccaatgccaccccagccaccccagaggcctag

SEQ ID NO: 307174 - DNA, 2241 bp, Artificial Sequence
  derived and/or modified sequence
atggaccacgccgaggagaatgagatcctggccgccacccagcgctactacgtggagcggcccatcttcagccaccctgtgctgcaggagcggctgcacaccaaggacaaggtgcctgacagcattgctgacaagctgaagcaggccttcacctgcacccccaagaagatccggaacatcatctacatgttcctgcccatcaccaagtggctgcctgcctacaagttcaaggagtatgtgctgggggacctggtgtctggcatcagcactggagtgctgcagctgccccagggcctggcctttgccatgctggccgctgtgccccccatcttcggcctgtacagcagcttctaccctgtgatcatgtactgcttcctgggcaccagccgccacatcagcatcggcccctttgctgtgatcagcctgatgattggaggagtggccgtgcggctggtgcctgatgacatcgtcatccctggaggagtgaatgccaccaacggcacagaggccagagatgccctgcgggtgaaggtggccatgtctgtgaccctgctgagcggcatcatccagttctgcctgggcgtgtgccgcttcggctttgtggccatctacctgacagagcccctggtgcggggcttcaccacagctgctgctgtgcacgtgttcacctccatgctgaagtacctgtttggagtgaagaccaagcgctacagcggcatcttctctgtggtgtacagcacagtggccgtgctgcagaatgtgaagaacctgaatgtgtgcagcctgggcgtgggcctgatggtgtttggcctgctgctgggcggcaaggagttcaatgaacgcttcaaggagaagctgcctgcccccatccccctggagttctttgctgtggtgatgggcaccggcatctctgctggcttcaacctgaaggagagctacaacgtggatgtggtgggcaccctgcccctgggcctgctgcccccagccaacccagacaccagcctcttccacctggtgtatgtggatgccatcgccatcgccatcgtgggcttctctgtgaccatctccatggccaagaccctggccaacaagcacggctaccaggtggatggcaaccaggagctgattgccctgggcctgtgcaacagcatcggcagcctcttccagaccttcagcatcagctgcagcctgagccgcagcctggtgcaggagggcaccggcggcaagacccagctggccggctgcctggccagcctgatgatcctgctggtgatcctggccaccggcttcctgtttgagagcctgccccaggccgtgctgagcgccatcgtgattgtgaacctgaagggcatgttcatgcagttcagtgacctgcccttcttctggaggaccagcaagattgagctgaccatctggctgaccacctttgtgagcagcctcttcctgggcctggactatggcctcatcacagctgtgatcatcgccctgctgaccgtcatctaccgcacccagagccccagctacaaggtgctgggcaagctgcctgagacagatgtgtacattgatattgatgcctatgaggaggtgaaggagatccctggcatcaagatcttccagatcaatgcccccatctactatgccaacagcgacctgtacagcaatgccctgaagaggaagacaggagtgaacccagctgtgatcatgggcgcccggaggaaggccatgaggaaatatgccaaggaggtgggcaatgccaacatggccaatgccaccgtggtgaaggccacccaggatgctgaggtggatggagaagatgccaccaagccagaggaggaggatggagaggtgaagtacccacccatcgtcatcaagagcaccttccctgaggagatgcagcgcttcatgcctcctggggacaacgtgcacacagtcatcctggacttcacccaggtgaacttcatcgacagcgtgggcgtgaagaccctggccggcatcgtgaaggagtatggagatgtgggcatctacgtgtacctggccggctgcagcgcccaggtggtgaatgacctgaccaggaaccgcttctttgagaacccagccctgtgggagctgctcttccacagcatccatgatgctgtgctgggcagccagctgcgggaggccctggccgagcaggaggccagcgccccacccagccaggaggacctggagcccaatgccaccccagccaccccagaggcctag

SEQ ID NO: 307175 - DNA, 2124 bp, Artificial Sequence
  derived and/or modified sequence
atggaccacgccgaggagaatgagatcctggccgccacccagcgctactacgtggagcggcccatcttcagccaccctgtgctgcaggagcggctgcacaccaaggacaaggtgcctgacagcattgctgacaagctgaagcaggccttcacctgcacccccaagaagatccggaacatcatctacatgttcctgcccatcaccaagtggctgcctgcctacaagttcaaggagtatgtgctgggggacctggtgtctggcatcagcactggagtgctgcagctgccccagggcccctttgctgtgatcagcctgatgattggaggagtggccgtgcggctggtgcctgatgacatcgtcatccctgggggcgtgaatgccaccaatggaacagaggccagagatgccctgcgggtgaaggtggccatgtctgtgaccctgctgagcggcatcatccagttctgcctgggcgtgtgccgctttggatttgtggccatctacctgacagagcccctggtgcggggcttcaccacagctgctgctgtgcacgtgttcacctccatgctgaagtacctgtttggagtgaagaccaagcgctacagcggcatcttctctgtggtgtacagcacagtggccgtgctgcagaatgtgaagaacctgaatgtgtgcagcctgggcgtgggcctgatggtgtttggcctgctgctgggcggcaaggagttcaatgaacgcttcaaggagaagctgcctgcccccatccccctggagttctttgctgtggtgatgggcaccggcatctctgctggcttcaacctgaaggagagctacaacgtggatgtggtgggcaccctgcccctgggcctgctgcccccagccaacccagacaccagcctcttccacctggtgtatgtggatgccatcgccatcgccatcgtgggcttctctgtgaccatctccatggccaagaccctggccaacaagcacggctaccaggtggatggcaaccaggagctgattgccctgggcctgtgcaacagcatcggcagcctcttccagaccttcagcatcagctgcagcctgagccgcagcctggtgcaggagggcactggaggcaagacccagctggccggctgcctggccagcctgatgatcctgctggtgatcctggccaccggcttcctgtttgagagcctgccccaggccgtgctgagcgccatcgtcatcgtgaacctgaagggcatgttcatgcagttcagtgacctgcccttcttctggaggaccagcaagattgagctgaccatctggctgaccacctttgtgagcagcctcttcctgggcctggactatggcctcatcacagctgtgatcatcgccctgctgaccgtcatctaccgcacccagagccccagctacaaggtgctgggcaagctgcctgagacagatgtgtacatcgacattgatgcctatgaggaggtgaaggagatccctggcatcaagatcttccagatcaatgcccccatctactatgccaacagcgacctgtacagcaatgccctgaagaggaagacaggagtgaacccagctgtgatcatgggcgcccggaggaaggccatgaggaaatatgccaaggaggtgggcaatgccaacatggccaatgccaccgtggtgaaggcagatgctgaggtggatggagaagatgccaccaagccagaggaggaggatggagaggtgaagtacccacccatcgtcatcaagagcaccttccctgaggagatgcagcgcttcatgcctcctggggacaacgtgcacacagtcatcctggacttcacccaggtgaacttcattgattctgtgggcgtgaagaccctggccggcatcgtgaaggagtatggagatgtgggcatctacgtgtacctggccggctgcagcgcccaggtggtgaatgacctgaccaggaaccgcttctttgaaaatcctgccctgtgggagctgctcttccacagcatccatgatgctgtgctgggcagccagctgcgggaggccctggccgagcaggaggccagcgccccacccagccaggaggacctggagcccaatgccaccccagccaccccagaggcctag

SEQ ID NO: 307176 - DNA, 2235 bp, Artificial Sequence
  derived and/or modified sequence
atggaccacgccgaggagaacgagatcctggccgccacccagcggtactatgtggagagacccatattctctcatcctgtgcttcaagagagactgcatactaaagacaaggtccccgactccattgctgacaaattaaagcaggcattcacgtgcacccctaagaaaatcagaaatatcatctatatgtttcttcccatcacaaagtggctgccagcctataaatttaaagaatacgtgctgggggatttagtctcagggattagtacaggggtgctccagttgccccaggggctggctttcgcaatgttagctgctgtacctccaatattcgggttgtattccagtttttaccccgtgataatgtactgcttcctggggactagtcggcacatcagcataggtccattcgctgtaataagtctgatgatcggaggcgtggcggttcgtctggtgccggacgatattgtgattcccgggggggtcaatgccacaaatggaactgaggctcgggatgcactgcgcgtgaaagttgctatgagcgtgacgcttctttctggaatcatccagttctgtctaggagtgtgccgcttcggattcgtagcaatctatctgacagaaccgcttgtccgtggctttacaacagccgccgcagtgcatgtgttcacatctatgcttaagtacctttttggagtcaagaccaaacgctacagcgggatcttttccgtggtgtactctactgtagccgtgctgcagaatgttaaaaaccttaacgtttgttctttgggggtgggtctgatggtgtttggtttgctcctcggaggcaaagaatttaatgaacgtttcaaggagaaattgcccgcaccaattccattggaattcttcgccgtggtgatggggaccggaatatccgcgggatttaatctgaaggagtcctataatgtggacgtggtgggcactctgcctcttggcctgctacctcccgcgaatccggacacatcactcttccatctggtttatgtagacgctattgctatcgcaatagttggctttagcgtaacgatcagcatggcaaaaaccctcgctaacaagcacgggtaccaggtggacggcaatcaggaacttattgcacttggactctgcaacagtatcgggagcttgttccaaaccttctccatatcctgctcgctgagccgctccctagttcaggaaggtacaggtggcaagacccagctcgctggctgcctcgctagtctgatgatactgctcgtcattctggctaccgggtttttgttcgagagcctgccgcaggccgtactgtccgctatagtcattgtaaatctgaagggtatgtttatgcagtttagtgatcttccctttttctggcgcacttctaagatcgagttaacgatttggttaacaacatttgtgtccagtttgtttttaggattagattacgggctaataaccgctgtgattattgccctgctcaccgtaatctataggacccagtccccatcctataaggtgctcggtaaacttccggagaccgacgtgtatatagatatcgatgcctacgaagaggttaaagagatccccggaattaagatttttcaaatcaacgctcctatatattacgccaactcagacctgtatagcaatgccctcaaacgcaagaccggggtgaaccccgcagtcatcatgggcgcccggagaaaggccatgcgtaaatatgccaaagaggttggcaacgccaatatggccaatgccacggtggtgaaggcggacgcagaagtggacggggaagacgccaccaagcccgaggaagaagatggcgaggtgaaatatcctcctatcgtaataaagtccaccttcccagaggaaatgcaaagattcatgccacctggcgataacgtgcacaccgtcatcctggactttacacaggtaaatttcatcgactccgtgggagtgaagacgctcgccggtatcgttaaggagtacggggacgtgggcatctacgtgtacctggccggatgcagtgctcaggtggtcaacgaccttacacggaaccggttttttgagaacccagccctgtgggagctgcttttccacagcatccacgatgctgtgcttgggtcccaactgcgagaggcactagccgagcaggaggcttcggccccccctagccaggaggatttggaacctaatgccacacccgcaacaccagaggcctag

SEQ ID NO: 307177 - DNA, 2241 bp, Artificial Sequence
  derived and/or modified sequence
atggaccacgccgaggagaacgagatcctggccgccacccagcggtactatgtggaacggccaatcttcagccaccccgtactgcaggaacgcctccataccaaagataaggtgcctgactctatcgcagataaactcaaacaggcctttacttgcacgccgaaaaaaatccggaatattatctacatgttcctgccgataaccaaatggctgcccgcctacaagtttaaggagtatgttcttggcgatcttgtttctggcatctccactggagtgctccagctgcctcagggcctagcctttgccatgctggctgcagtgcctcctattttcggtctgtattccagcttctaccctgtgataatgtactgtttccttggcacctcacgacacatttccatcggcccgtttgccgtgatatctctaatgattggcggggtcgctgtccgactggttcctgatgatatcgtgatccctggcggtgtcaacgccactaacggcaccgaggctagggatgccctgcgtgtcaaagtcgctatgtccgtcacgctgttgtcgggtattatccagttttgtctaggcgtgtgcagatttggcttcgtggcaatttatctgacagagcctttggtgagagggttcacaacagctgcagccgtccatgtgttcacaagcatgctgaagtacctctttggagtgaagaccaaacgctacagcggaatcttcagtgttgtgtactcaacagtggcagtgttgcaaaacgtgaagaatttgaacgtgtgtagcctgggagttggactgatggtttttggcctgttgctgggtggcaaggagtttaacgaaaggttcaaggaaaaactcccagcgcctataccactcgagttcttcgctgtggttatgggaactggaatttctgcaggctttaatttaaaagaatcgtataatgtggacgtggttgggaccctgcctttagggctgctgcctccagccaaccctgatacatcactcttccacctggtatacgtcgatgccatcgccatagcaatcgtcggattttccgttactatctctatggccaaaacgcttgccaacaagcatggctaccaagttgacggtaatcaggagctcattgcattggggctgtgcaacagtatcggttccctgttccagacctttagcatctcatgtagcctgtctagaagccttgttcaggagggcacggggggcaagacacagttagccgggtgtctggcctcactcatgattctgttggtcattcttgcaacaggcttcctttttgagtctttgccacaggctgtgctgtcagccattgtgatcgtgaatctgaaagggatgtttatgcagttctccgaccttccttttttctggcggacctcaaaaatcgagcttaccatctggttaacgacttttgtgtcaagcctatttttagggttagattacgggctcattactgcggtgatcattgctcttctaactgtgatttaccgcacccagtctccttcttataaggtgctgggcaagttacctgaaactgatgtatacatcgacatcgacgcttacgaggaggtcaaagaaattcctggtatcaaaattttccagataaatgcccctatctactatgcaaatagcgatctgtactctaatgccctgaagcggaagacaggggtgaatccggctgtgattatgggcgccagaaggaaagccatgagaaagtatgctaaagaggtcggcaatgcaaatatggccaatgccaccgttgtgaaagctacccaggacgctgaggtggacggcgaagacgccacaaaacctgaagaggaagatggagaagtgaaataccctcctattgtgattaaatcaacgttccccgaagagatgcagagattcatgccccccggcgataacgtgcatacggtaatcctggatttcacccaagtcaactttattgactctgtcggcgtcaaaactctggccgggatcgttaaagagtatggggacgtgggcatctacgtctatcttgccgggtgttccgcccaggtcgtcaacgacttgactagaaaccggttcttcgagaaccccgctctgtgggagctgttgtttcatagtattcacgacgccgtcctcggcagccaattaagagaagccctcgctgaacaagaggcatccgccccaccatcccaggaggacttggaacccaatgccacacccgccacaccagaagcgtag

SEQ ID NO: 307178 - DNA, 2124 bp, Artificial Sequence
  derived and/or modified sequence
atggaccacgccgaggagaacgagatcctggccgccacccagcggtattatgtcgagcgtcctatttttagccatcccgtccttcaggaaaggttacacaccaaggacaaggtcccggactcaatcgctgataagctgaagcaggccttcacttgtacaccaaagaaaatccggaatataatttatatgttcctcccgataactaaatggctgccggcatataaattcaaggagtatgtgcttggcgacttagtgtctgggatcagcacgggagtgctgcagttgcctcagggaccgttcgccgtgatctcgctgatgatcggaggggtcgccgttaggcttgtgccggacgatatcgtgatcccggggggtgtgaacgcgaccaacggcacagaggcccgagatgctctcagggtgaaggtagccatgagcgtgaccttgctgtccggaatcattcaattctgtctcggggtttgcagatttggcttcgtggcaatttacctcacagagcccctcgtacgcggtttcaccactgctgcagcagtacacgtgtttacttccatgctgaaatacctgtttggggtgaaaacgaagcgttattcgggaatcttcagcgtggtttactctaccgtagctgtcctgcaaaacgtcaagaaccttaacgtgtgctccctgggggtcgggctgatggtgttcggtcttctgctgggagggaaggaatttaatgaacgattcaaggaaaagctcccagccccaattccgctggagtttttcgcagtcgtgatgggaaccggtatcagtgccggttttaacctgaaagaatcttataacgtcgatgtggtgggaaccctgccgctcggtcttctgcctcctgctaatccagacaccagcctgtttcacctagtttatgtggacgcaattgcaatcgcgatagtgggctttagcgtgaccatcagcatggcaaagacactcgctaataaacatggctaccaagttgacggcaatcaggagcttatcgctctgggtctttgtaatagtattgggagcctatttcagacattcagcataagctgctccctgtccagatctctggtccaggaggggacgggtggaaagacacaactggccggatgcctcgcctcactcatgattctcttggtaattctggcaacaggatttctgttcgaatctttgccacaggctgtcctctcagctattgtgatcgtaaacctaaaaggaatgtttatgcagttcagtgaccttccctttttctggcgtacgagcaagatcgagctgaccatttggctcacaactttcgtttcctcgctttttttagggctggattacggcctcatcacggccgtcatcattgcattgctgactgtgatatatagaacacaatcgccaagttataaagtgctgggaaaactgcccgaaaccgatgtgtacatagatatcgatgcttatgaagaggtcaaggaaattccagggatcaagatctttcaaattaacgctcctatctactacgccaatagtgatctttattccaatgcactgaaaaggaaaactggggtgaatcccgccgttatcatgggcgctaggagaaaagcaatgcgcaaatacgcgaaggaagtggggaacgcgaatatggccaatgcgaccgtggtaaaggcagacgctgaggtggatggggaggatgccactaagcctgaggaggaggatggtgaagtaaagtacccccctatcgtaatcaagtcgaccttcccagaggagatgcagcggttcatgccacccggggacaacgtgcatactgtcattctggactttacacaagttaacttcatcgacagtgtgggggtcaagacactcgccggaattgtcaaggaatatggagatgtgggtatctacgtgtatctcgccggctgttccgctcaagtagtaaacgatttaactaggaatagattttttgaaaacccagcactgtgggagttgctcttccactcaatccacgatgccgttctggggtctcagctccgtgaggccctggctgaacaggaagcctctgccccgccatcccaggaggaccttgagccaaatgcaaccccggccacccccgaagcttag

SEQ ID NO: 307179 - DNA, 2235 bp, Artificial Sequence
  derived and/or modified sequence
atggaccacgcagaagagaacgaaattctggctgccacccagcggtattatgtggaaaggcctatcttcagccacccggtgttacaggaaaggctgcacactaaggacaaggtgcctgattccattgccgataagcttaagcaggcatttacatgtactcccaagaagatccgcaacataatctatatgttcttgcccatcactaagtggcttcctgcctacaagttcaaggaatacgtgctgggggatctagtgagcgggataagtaccggtgttctgcaactcccacagggccttgcattcgccatgctggccgcagtacccccaatttttggcctctatagctccttttatcccgtgataatgtactgtttcctgggtacatcgcggcatatttcgatcggtccgttcgcagttatctcattaatgatcggtggggtggccgtccgactagtgccagacgatattgtaatccccggtggagtcaatgctacaaatggcacggaagcaagagacgctttacgcgttaaagtcgccatgtccgtgactctgctgtctgggattattcagttttgcctgggggtgtgccgttttggatttgtcgcaatctatctgactgagccactcgtgaggggcttcactaccgcagctgccgtccacgtgtttacaagcatgctcaaatatttgtttggagtgaagacaaaacggtactccggaattttctccgttgtctactctacggttgccgtgttgcagaacgtgaagaacctgaatgtgtgctccctaggagttggcctgatggttttcggcctactcctcggcggtaaggagttcaatgaacggttcaaggaaaaactgcctgccccaattccactggaattctttgccgtggttatggggactgggataagcgcaggttttaacttaaaggagtcctataatgttgatgttgttggcactctccctctcggactgttgcctcccgctaaccctgacacatctttattccacctcgtgtatgtggatgctattgctatagcgattgtgggtttttccgttacaattagcatggcgaagacactcgccaacaagcacggctatcaggtggatgggaaccaggagctgatcgctcttggactttgcaatagtattggcagtctttttcagaccttcagcatctcctgctccctcagccgcagcctggtgcaagaaggcacgggtggcaagacgcagctggctggatgcctcgccagcttaatgatcttgcttgtgatcctcgccacaggatttcttttcgagtccctgccgcaagccgttctgtcagctatagttatcgtgaatctcaagggtatgttcatgcagttcagcgatctgccctttttctggaggacaagtaaaattgaattaactatttggcttactactttcgttagctccctgtttctgggcctcgattacggactgatcacggccgtgatcattgctctgctgacagtcatataccgaacccagtccccctcttataaggtgctcggcaagctgccagagaccgatgtttatattgatattgacgcttacgaagaagtcaaagaaattcccggaattaaaatcttccagatcaatgccccaatctattacgctaattccgatctctactccaacgccctcaaaagaaagactggggtgaacccggcagtaatcatgggggcaaggcgcaaagccatgagaaagtatgctaaggaagtgggtaacgctaacatggccaatgcaacagtggtgaaggcagacgcagaagtcgatggtgaggatgccacaaagccggaagaggaagatggcgaggtaaaatacccacctatcgtaattaagtcaactttccccgaggagatgcagagattcatgcccccaggagacaacgttcacacagtgattctcgacttcacgcaggttaacttcattgacagtgtgggcgtcaagacacttgccggaatcgttaaagagtatggagatgtcggaatttatgtatatctggctgggtgttctgctcaggtagtgaacgacctgacccgcaaccgattctttgaaaatccagccctgtgggaactgctctttcattcaattcacgacgcggttctcgggagccaacttagagaggcattagcagaacaggaggcttctgcccctccatctcaggaggatttggagcccaatgcaacacccgctaccccggaagcatag

SEQ ID NO: 307180 - DNA, 2241 bp, Artificial Sequence
  derived and/or modified sequence
atggatcacgctgaggagaacgaaatcctcgccgctacccagcgctactacgtggagcgtcctatcttctcccatccagtcctgcaagaacgcctgcataccaaagataaggtaccagacagcattgcggacaaattaaagcaagcattcacgtgcacaccgaagaaaattaggaacattatctatatgtttctgcctattaccaagtggctaccagcttacaagttcaaggagtacgtcctcggagatctggtctccggaatcagcaccggagtcctgcagctcccccagggactggcctttgccatgttagctgcagtgccacccatcttcggactctattctagcttttacccagttattatgtactgtttcctaggtacatcccggcacatttcgatcggacccttcgctgtgatctccctgatgattggcggagtggccgtccgtttggttcctgacgacatcgtcattcccggaggagtcaatgctactaacggaacggaagcccgagacgccttgagagttaaggtggccatgagtgtcaccctgctgagcggcataattcagttttgtctgggggtttgcagattcggctttgtcgcaatttatctcacagagccacttgtgaggggctttactaccgcagcagctgtccatgtatttacgagtatgttaaagtacctgttcggggtgaagacaaaacgctactctgggattttctctgtggtgtattcaactgtggccgtgcttcagaatgtcaaaaacctgaatgtttgctcgctcggtgtaggactgatggttttcgggcttttactcggcggaaaggagttcaacgagaggttcaaggagaagctgcctgcaccaatccccctggagttctttgcagtggtgatggggaccgggattagcgcgggattcaacctgaaggaatcttataatgtggacgtggtgggaacactgcctctcggtctgctgccacccgctaacccagacacctccctgttccacctcgtttatgtagacgccatcgcaatagcgattgttggcttctccgtcaccatttcgatggccaaaaccttggcgaataagcacgggtaccaagttgacggaaaccaggaactgattgccctggggctctgtaactccataggctccttgttccagacatttagtatctcatgcagcctgtccagaagtctcgtgcaggagggaaccggagggaagacacagctcgcgggttgcctagctagcctgatgatactactggtcatcctggccaccgggttcctctttgagagtctcccccaggctgttctgagcgctattgttatcgtgaatcttaagggtatgttcatgcaatttagcgatctgccatttttctggcgaacatccaaaatagagttgacaatttggttaacaaccttcgttagcagcttgttcctgggcctcgactatggcctgatcaccgctgtgatcatcgcgcttctcacggtgatttaccggacacaaagccctagttacaaggtattaggaaagctgccggagaccgatgtgtacattgacatagatgcctacgaagaggtgaaggaaattccaggcattaagatctttcagataaacgcacccatttactatgctaactccgatctgtacagtaatgcattgaaaagaaaaaccggggtgaatccagcagtgataatgggggcaagacgcaaggctatgcggaagtatgctaaagaagtgggaaatgcaaacatggcaaacgctacagtggtaaaggccacacaggacgctgaagtggatggcgaagatgccactaagccagaggaggaggacggggaggttaagtaccctcccattgttatcaaaagcaccttccccgaggaaatgcaacgtttcatgccacccggagacaatgttcatacggtgatactcgactttacccaggttaacttcatcgactcggtgggagttaagacgcttgctggtatagtgaaggagtatggagacgtagggatctacgtttatcttgcaggctgtagtgctcaggtggtaaacgatcttacaagaaacaggttctttgaaaatccagctctgtgggagctcctcttccattccatccatgatgccgtactgggctcgcagctgagggaggctctcgccgaacaggaagcttccgctccacccagtcaagaagatctagaacccaatgccactcccgctactcctgaagcgtag

SEQ ID NO: 307181 - DNA, 2124 bp, Artificial Sequence
  derived and/or modified sequence
atggaccacgctgaggaaaatgaaattctagccgctacacagcggtactacgttgaacgtccaatcttcagtcatcccgtactccaagaaagattacacaccaaagacaaagtgccagactctatcgccgataagctgaagcaggccttcacgtgcactccaaagaaaattagaaatattatctacatgtttctgcccattaccaaatggctcccggcttacaagttcaaagaatatgtgttgggagatcttgtcagcgggatttctactggagtgctacagttgcctcaagggccttttgccgtaatcagccttatgattgggggtgtcgcagtgcggctggtgcccgatgatatcgtaatccctggcggtgttaacgcaaccaacgggaccgaagcacgtgatgcccttagagtgaaggttgccatgtctgtcacactcctgtctggcattatccagttctgtttaggtgtgtgtcgatttggatttgtggcaatctacctgacagagcctctggttcgcggatttaccaccgccgctgcagtgcatgtttttactagcatgctgaaataccttttcggagtgaagactaagaggtattccggcatatttagtgtggtgtactctacagttgcagttctgcagaacgtcaagaatctcaatgtttgttctctgggggtgggactcatggtgtttggcttgctactcggcggaaaagaattcaatgaacgttttaaggaaaaactgcccgctccaattccgctcgagttttttgctgtggtcatgggaacgggaatctcagctggattcaatctgaaagagagttacaacgtagacgtggttggaacactccccctgggtttactgcccccagcaaaccccgacacaagcctgttccatctcgtgtatgtggatgccatcgcaattgcaatcgtcggattctccgtgacaatttcaatggcaaagaccttggccaacaagcacggatatcaggtggatggcaatcaggagcttatagctttgggcctctgcaattcaattgggagcctgttccaaacattctccatctcctgtagtctttcaaggagccttgtgcaggaaggcacgggtggaaaaacacaacttgccggttgcctggctagtctcatgatattgttggtgattctggctacaggctttctgtttgagagtcttcctcaggccgttctaagcgctatcgtgattgtcaatctgaaaggaatgttcatgcagttctctgatctcccattcttttggcggacctcaaagatagagctcactatctggctgactacattcgtaagctcactgttcctgggtcttgattacgggctaatcactgctgttatcatcgcactgttgaccgttatatacagaacacagagcccgtcctacaaagtcctgggaaagttgcccgaaaccgacgtatatattgatatcgacgcctacgaggaagtgaaggagataccaggtataaagatcttccagattaatgctcctatctactacgcgaactccgacctctattctaacgcacttaaacgcaagaccggcgtgaacccggctgtaataatgggggctcgcagaaaggccatgcggaaatatgccaaagaggttgggaacgccaacatggccaatgcaactgtggtaaaggcggatgcagaagttgacggcgaggacgcaaccaaaccggaggaggaagacggggaggtgaaatatccccctatcgtgatcaagagcacttttcctgaagagatgcagcgtttcatgccccctggggataacgtacacactgtgatactggattttacccaggtgaattttattgactctgttggagtgaaaactctggcaggtatagtaaaagagtatggtgacgtggggatctacgtgtacctcgctgggtgctctgcacaggttgtgaacgatctcactagaaataggtttttcgaaaatcccgcactttgggaactgctcttccacagtatccatgatgcagtccttggctcgcaactgcgggaggccctggcagaacaggaagcatccgctcctccctcgcaggaagatctggagcccaacgcaacgccagccaccccggaagcatag

SEQ ID NO: 307182 - DNA, 2689 bp, Artificial Sequence
  derived and/or modified sequence
acctggaggcagcgcgcgcgtcgaagaggcagcggctgtggagcgcggcggggcggctccgcccagggcagcccgggctgggccaaggagcgagctctcccttctcctgctctcagcctcagtgatcaaggcttcagtgaactgcactggagctcccagcgggggatcttgtcccctgtcccgacttttgtgctgcacattggatctggtgacactcaggaaatgcttgtctccggctgttaaggaataatttcagagtactatggatcatgctgaagaaaatgaaatccttgcagcaacccagaggtactatgtggaaaggcctatctttagtcatccggtcctccaggaaagactacacacaaaggacaaggttcctgattccattgcggataagctgaaacaggcattcacatgtactcctaaaaaaataagaaatatcatttatatgttcctacccataactaaatggctgccagcatacaaattcaaggaatatgtgttgggtgacttggtctcaggcataagcacaggggtgcttcagcttcctcaaggcttagcctttgcaatgctggcagctgtgcctccaatatttggcctgtactcttcattttaccctgttatcatgtattgttttcttggaacctccagacacatatccataggtccttttgctgttattagcctgatgattggtggtgtagctgttcgattagtaccagatgatatagtcattccaggaggagtaaatgcaaccaatggcacagaggccagagatgccttgagagtgaaagtcgccatgtctgtgaccttactttcaggaatcattcagttttgcctaggtgtctgtaggtttggatttgtggccatatatctcacagagcctctggtccgtgggtttaccaccgcagcagctgtgcatgtcttcacctccatgttaaaatatctgtttggagttaaaacaaagcggtacagtggaatcttttccgtggtgtatagtacagttgctgtgttgcagaatgttaaaaacctcaacgtgtgttccctaggcgtcgggctgatggtttttggtttgctgttgggtggcaaggagtttaatgagagatttaaagagaaattgccggcgcctattcctttagagttctttgcggtcgtaatgggaactggcatttcagctgggtttaacttgaaagaatcatacaatgtggatgtcgttggaacacttcctctagggctgctacctccagccaatccggacaccagcctcttccaccttgtgtacgtagatgccattgccatagccatcgttggattttcagtgaccatctccatggccaagaccttagcaaataaacatggctaccaggttgacggcaatcaggagctcattgccctgggactgtgcaattccattggctcactcttccagaccttttcaatttcatgctccttgtctcgaagccttgttcaggagggaaccggtgggaagacacagcttgcaggttgtttggcctcattaatgattctgctggtcatattagcaactggattcctctttgaatcattgccccaggctgtgctgtcggccattgtgattgtcaacctgaagggaatgtttatgcagttctcagatctcccctttttctggagaaccagcaaaatagagctgaccatctggcttaccacttttgtgtcctccttgttcctgggattggactatggtttgatcactgctgtgatcattgctctgctgactgtgatttacagaacacagagtccaagctacaaagtccttggaaagcttcctgaaactgatgtgtatattgatatagacgcatatgaggaggtgaaagaaattcctggaataaaaatatttcaaataaatgcaccaatttactatgcaaatagcgacttgtatagcaatgcattaaaacgaaagactggagtgaacccagcagtcatcatgggagcaaggagaaaggccatgcggaagtacgctaaggaagtcggaaatgcaaatatggccaacgcaactgttgtcaaagcagatgcagaagtagatggagaggatgctaccaagcctgaagaagaggatggtgaagtaaaatatcccccaatagtgatcaaaagcacatttcctgaggaaatgcaaagatttatgcccccaggggataacgtccacactgtcattttggatttcactcaagtcaattttattgattctgttggagtgaaaactctggcagggattgtaaaagaatatggagacgtcggtatatatgtatacttagcaggatgcagtgcacaagttgtgaatgacctcactcggaatagattttttgaaaatcctgccctatgggagctgctgttccacagcattcatgatgcagttttaggcagccaacttagagaggcacttgctgaacaggaagcctcggctcccccttcccaggaggacttggagcccaatgccactcctgccactcctgaggcatagatgaggacctcaccctaggatggggttataagcctctcatgaagttcataatttacacgttttaaatactagacgctagatttttttttctaagggtgaatactagtagtccaggcttgatttggagggtgaatgacgcctagcaagatgtattgtacttgtgtttttttaattgaatacttcaaagataaa

SEQ ID NO: 307183 - DNA, 2270 bp, Artificial Sequence
  derived and/or modified sequence
tctcccttctcctgctctcagcctcagtgatcaaggcttcagtgaactgcactggagctcccagcgggggatcttgtcccctgtcccgacttttgtgctgcacattggatctggtgacactcaggaaatgcttgtctccggctgttaaggaataatttcagagtactatggatcatgctgaagaaaatgaaatccttgcagcaacccagaggtactatgtggaaaggcctatctttagtcatccggtcctccaggaaagactacacacaaaggacaaggttcctgattccattgcggataagctgaaacaggcattcacatgtactcctaaaaaaataagaaatatcatttatatgttcctacccataactaaatggctgccagcatacaaattcaaggaatatgtgttgggtgacttggtctcaggcataagcacaggggtgcttcagcttcctcaaggcttagcctttgcaatgctggcagctgtgcctccaatatttggcctgtactcttcattttaccctgttatcatgtattgttttcttggaacctccagacacatatccataggtccttttgctgttattagcctgatgattggtggtgtagctgttcgattagtaccagatgatatagtcattccaggaggagtaaatgcaaccaatggcacagaggccagagatgccttgagagtgaaagtcgccatgtctgtgaccttactttcaggaatcattcagttttgcctaggtgtctgtaggtttggatttgtggccatatatctcacagagcctctggtccgtgggtttaccaccgcagcagctgtgcatgtcttcacctccatgttaaaatatctgtttggagttaaaacaaagcggtacagtggaatcttttccgtggtgtatgcgtcgggctgatggtttttggtttgctgttgggtggcaaggagtttaatgagagatttaaagagaaattgccggcgcctattcctttagagttctttgcggtcgtaatgggaactggcatttcagctgggtttaacttgaaagaatcatacaatgtggatgtcgttggaacacttcctctagggagctcattgccctgggactgtgcaattccattggctcactcttccagaccttttcaatttcatgctccttgtctcgaagccttgttcaggagggaaccggtgggaagacacagcttgcaggttgtttggcctcattaatgattctgctggtcatattagcaactggattcctctttgaatcattgccccaggctgtgctgtcggccattgtgattgtcaacctgaagggaatgtttatgcagttctcagatctcccctttttctggagaaccagcaaaatagagctgaccatctggcttaccacttttgtgtcctccttgttcctgggattggactatggtttgatcactgctgtgatcattgctctgctgactgtgatttacagaacacagaggtgaaagaaattcctggaataaaaatatttcaaataaatgcaccaatttactatgcaaatagcgacttgtatagcaatgcattaaaacgaaagactggagtgaacccagcagtcatcatgggagcaaggagaaaggccatgcggaagtacgctaaggaagtcggaaatgcaaatatggccaacgcaactgttgtcaaagcagatgcagaagtagatggagaggatgctaccaagcctgaagaagaggatggtgaagtaaaatatcccccaatagtgatcaaaagcacatttcctgaggaaatgcaaagatttatgcccccaggggataacgtccacactgtcattttggatttcactcaagtcaattttattgattctgttggagtgaaaactctggcagggattgtaaaagaatatggagacgtcggtatatatgtatacttagcaggatgcagtgcacaagttgtgaatgacctcactcggaatagattttttgaaaatcctgccctatgggagctgctgttccacagcattcatgatgcagttttaggcagccaacttagagaggcacttgctgaacaggaagcctcggctcccccttcccaggaggacttggagcccaatgccactcctgccactcctgaggcatagatgaggacctcaccctaggatggggttataagcctctcatgaagttcataatttacacgttttaaatactagacgctagatttttttttctaagggtgaatactagtagtccaggcttgatttggagggtgaatgacg

SEQ ID NO: 307184 - DNA, 2270 bp, Artificial Sequence
  derived and/or modified sequence
agagtactatggatcatgctgaagaaaatgaaatccttgcagcaacccagaggtactatgtggaaaggcctatctttagtcatccggtcctccaggaaagactacacacaaaggacaaggttcctgattccattgcggataagctgaaacaggcattcacatgtactcctaaaaaaataagaaatatcatttatatgttcctacccataactaaatggctgccagcatacaaattcaaggaatatgtgttgggtgacttggtctcaggcataagcacaggggtgcttcagcttcctcaaggcttagcctttgcaatgctggcagctgtgcctccaatatttggcctgtactcttcattttaccctgttatcatgtattgttttcttggaacctccagacacatatccataggtccttttgctgttattagcctgatgattggtggtgtagctgttcgattagtaccagatgatatagtcattccaggaggagtaaatgcaaccaatggcacagaggccagagatgccttgagagtgaaagtcgccatgtctgtgaccttactttcaggaatcattcagttttgcctaggtgtctgtaggtttggatttgtggccatatatctcacagagcctctggtccgtgggtttaccaccgcagcagctgtgcatgtcttcacctccatgttaaaatatctgtttggagttaaaacaaagcggtacagtggaatcttttccgtggtgtatagtacagttgctgtgttgcagaatgttaaaaacctcaacgtgtgttccctaggcgtcgggctgatggtttttggtttgctgttgggtggcaaggagtttaatgagagatttaaagagaaattgccggcgcctattcctttagagttctttgcggtcgtaatgggaactggcatttcagctgggtttaacttgaaagaatcatacaatgtggatgtcgttggaacacttcctctagggctgctacctccagccaatccggacaccagcctcttccaccttgtgtacgtagatgccattgccatagccatcgttggattttcagtgaccatctccatggccaagaccttagcaaataaacatggctaccaggttgacggcaatcaggagctcattgccctgggactgtgcaattccattggctcactcttccagaccttttcaatttcatgctccttgtctcgaagccttgttcaggagggaaccggtgggaagacacagcttgcaggttgtttggcctcattaatgattctgctggtcatattagcaactggattcctctttgaatcattgccccaggctgtgctgtcggccattgtgattgtcaacctgaagggaatgtttatgcagttctcagatctcccctttttctggagaaccagcaaaatagagctgaccatctggcttaccacttttgtgtcctccttgttcctgggattggactatggtttgatcactgctgtgatcattgctctgctgactgtgatttacagaacacagagtccaagctacaaagtccttggaaagcttcctgaaactgatgtgtatattgatatagacgcatatgaggaggtgaaagaaattcctggaataaaaatatttcaaataaatgcaccaatttactatgcaaatagcgacttgtatagcaatgcattaaaacgaaagactggagtgaacccagcagtcatcatgggagcaaggagaaaggccatgcggaagtacgctaaggaagtcggaaatgcaaatatggccaacgcaactgttgtcaaagcaacacaggatgcagaagtagatggagaggatgctaccaagcctgaagaagaggatggtgaagtaaaatatcccccaatagtgatcaaaagcacatttcctgaggaaatgcaaagatttatgcccccaggggataacgtccacactgtcattttggatttcactcaagtcaattttattgattctgttggagtgaaaactctggcagggattgtaaaagaatatggagacgtcggtatatatgtatacttagcaggatgcagtgcacaagttgtgaatgacctcactcggaatagattttttgaaaatcctgccctatgggagctgctgttccacagcattcatgatgcagttttaggcagccaacttagagaggcacttgctgaacaggaagcctcggctcccccttcccaggaggacttggagcccaatgccactcctgccactcctgaggcatagatgaggacctcaccctaggat

SEQ ID NO: 307185 - DNA, 2422 bp, Artificial Sequence
  derived and/or modified sequence
tcccttctcctgctctcagcctcagtgatcaaggcttcagtgaactgcactggagctcccagcgggggatcttgtcccctgtcccgacttttgtgctgcacattggatctggtgacactcaggaaatgcttgtctccggctgttaaggaataatttcagagtactatggatcatgctgaagaaaatgaaatccttgcagcaacccagaggtactatgtggaaaggcctatctttagtcatccggtcctccaggaaagactacacacaaaggacaaggttcctgattccattgcggataagctgaaacaggcattcacatgtactcctaaaaaaataagaaatatcatttatatgttcctacccataactaaatggctgccagcatacaaattcaaggaatatgtgttgggtgacttggtctcaggcataagcacaggggtgcttcagcttcctcaaggtccttttgctgttattagcctgatgattggtggtgtagctgttcgattagtaccagatgatatagtcattccaggaggagtaaatgcaaccaatggcacagaggccagagatgccttgagagtgaaagtcgccatgtctgtgaccttactttcaggaatcattcagttttgcctaggtgtctgtaggtttggatttgtggccatatatctcacagagcctctggtccgtgggtttaccaccgcagcagctgtgcatgtcttcacctccatgttaaaatatctgtttggagttaaaacaaagcggtacagtggaatcttttccgtggtgtatagtacagttgctgtgttgcagaatgttaaaaacctcaacgtgtgttccctaggcgtcgggctgatggtttttggtttgctgttgggtggcaaggagtttaatgagagatttaaagagaaattgccggcgcctattcctttagagttctttgcggtcgtaatgggaactggcatttcagctgggtttaacttgaaagaatcatacaatgtggatgtcgttggaacacttcctctagggctgctacctccagccaatccggacaccagcctcttccaccttgtgtacgtagatgccattgccatagccatcgttggattttcagtgaccatctccatggccaagaccttagcaaataaacatggctaccaggttgacggcaatcaggagctcattgccctgggactgtgcaattccattggctcactcttccagaccttttcaatttcatgctccttgtctcgaagccttgttcaggagggaaccggtgggaagacacagcttgcaggttgtttggcctcattaatgattctgctggtcatattagcaactggattcctctttgaatcattgccccaggctgtgctgtcggccattgtgattgtcaacctgaagggaatgtttatgcagttctcagatctcccctttttctggagaaccagcaaaatagagctgaccatctggcttaccacttttgtgtcctccttgttcctgggattggactatggtttgatcactgctgtgatcattgctctgctgactgtgatttacagaacacagagtccaagctacaaagtccttggaaagcttcctgaaactgatgtgtatattgatatagacgcatatgaggaggtgaaagaaattcctggaataaaaatatttcaaataaatgcaccaatttactatgcaaatagcgacttgtatagcaatgcattaaaacgaaagactggagtgaacccagcagtcatcatgggagcaaggagaaaggccatgcggaagtacgctaaggaagtcggaaatgcaaatatggccaacgcaactgttgtcaaagcagatgcagaagtagatggagaggatgctaccaagcctgaagaagaggatggtgaagtaaaatatcccccaatagtgatcaaaagcacatttcctgaggaaatgcaaagatttatgcccccaggggataacgtccacactgtcattttggatttcactcaagtcaattttattgattctgttggagtgaaaactctggcagggattgtaaaagaatatggagacgtcggtatatatgtatacttagcaggatgcagtgcacaagttgtgaatgacctcactcggaatagattttttgaaaatcctgccctatgggagctgctgttccacagcattcatgatgcagttttaggcagccaacttagagaggcacttgctgaacaggaagcctcggctcccccttcccaggaggacttggagcccaatgccactcctgccactcctgaggcatagatgaggacctcaccctaggatggggttataagcctctcatgaagttcataatttacacgttttaaatactagacgctagatttttttttctaagggtgaatactagtagtccaggcttgatttggagggtgaa

SEQ ID NO: 307186 - DNA, 2235 bp, Artificial Sequence
  derived and/or modified sequence
atggaccacgccgaggagaacgagatcctggccgccacccagagatactacgtggagagacccatcttcagccaccccgtgctgcaggagagactgcacaccaaggacaaggtgcccgacagcatcgccgacaagctgaagcaggccttcacctgcacccccaagaagatcagaaacatcatctacatgttcctgcccatcaccaagtggctgcccgcctacaagttcaaggagtacgtgctgggcgacctggtgagcggcatcagcaccggcgtgctgcagctgccccagggcctggccttcgccatgctggccgccgtgccccccatcttcggcctgtacagcagcttctaccccgtgatcatgtactgcttcctgggcaccagcagacacatcagcatcggccccttcgccgtgatcagcctgatgatcggcggcgtggccgtgagactggtgcccgacgacatcgtgatccccggcggcgtgaacgccaccaacggcaccgaggccagagacgccctgagagtgaaggtggccatgagcgtgaccctgctgagcggcatcatccagttctgcctgggcgtgtgcagattcggcttcgtggccatctacctgaccgagcccctggtgagaggcttcaccaccgccgccgccgtgcacgtgttcaccagcatgctgaagtacctgttcggcgtgaagaccaagagatacagcggcatcttcagcgtggtgtacagcaccgtggccgtgctgcagaacgtgaagaacctgaacgtgtgcagcctgggcgtgggcctgatggtgttcggcctgctgctgggcggcaaggagttcaacgagagattcaaggagaagctgcccgcccccatccccctggagttcttcgccgtggtgatgggcaccggcatcagcgccggcttcaacctgaaggagagctacaacgtggacgtggtgggcaccctgcccctgggcctgctgccccccgccaaccccgacaccagcctgttccacctggtgtacgtggacgccatcgccatcgccatcgtgggcttcagcgtgaccatcagcatggccaagaccctggccaacaagcacggctaccaggtggacggcaaccaggagctgatcgccctgggcctgtgcaacagcatcggcagcctgttccagaccttcagcatcagctgcagcctgagcagaagcctggtgcaggagggcaccggcggcaagacccagctggccggctgcctggccagcctgatgatcctgctggtgatcctggccaccggcttcctgttcgagagcctgccccaggccgtgctgagcgccatcgtgatcgtgaacctgaagggcatgttcatgcagttcagcgacctgcccttcttctggagaaccagcaagatcgagctgaccatctggctgaccaccttcgtgagcagcctgttcctgggcctggactacggcctgatcaccgccgtgatcatcgccctgctgaccgtgatctacagaacccagagccccagctacaaggtgctgggcaagctgcccgagaccgacgtgtacatcgacatcgacgcctacgaggaggtgaaggagatccccggcatcaagatcttccagatcaacgcccccatctactacgccaacagcgacctgtacagcaacgccctgaagagaaagaccggcgtgaaccccgccgtgatcatgggcgccagaagaaaggccatgagaaagtacgccaaggaggtgggcaacgccaacatggccaacgccaccgtggtgaaggccgacgccgaggtggacggcgaggacgccaccaagcccgaggaggaggacggcgaggtgaagtacccccccatcgtgatcaagagcaccttccccgaggagatgcagagattcatgccccccggcgacaacgtgcacaccgtgatcctggacttcacccaggtgaacttcatcgacagcgtgggcgtgaagaccctggccggcatcgtgaaggagtacggcgacgtgggcatctacgtgtacctggccggctgcagcgcccaggtggtgaacgacctgaccagaaacagattcttcgagaaccccgccctgtgggagctgctgttccacagcatccacgacgccgtgctgggcagccagctgagagaggccctggccgagcaggaggccagcgccccccccagccaggaggacctggagcccaacgccacccccgccacccccgaggcctag

SEQ ID NO: 307187 - DNA, 2241 bp, Artificial Sequence
  derived and/or modified sequence
atggaccacgccgaggagaacgagatcctggccgccacccagagatactacgtggagagacccatcttcagccaccccgtgctgcaggagagactgcacaccaaggacaaggtgcccgacagcatcgccgacaagctgaagcaggccttcacctgcacccccaagaagatcagaaacatcatctacatgttcctgcccatcaccaagtggctgcccgcctacaagttcaaggagtacgtgctgggcgacctggtgagcggcatcagcaccggcgtgctgcagctgccccagggcctggccttcgccatgctggccgccgtgccccccatcttcggcctgtacagcagcttctaccccgtgatcatgtactgcttcctgggcaccagcagacacatcagcatcggccccttcgccgtgatcagcctgatgatcggcggcgtggccgtgagactggtgcccgacgacatcgtgatccccggcggcgtgaacgccaccaacggcaccgaggccagagacgccctgagagtgaaggtggccatgagcgtgaccctgctgagcggcatcatccagttctgcctgggcgtgtgcagattcggcttcgtggccatctacctgaccgagcccctggtgagaggcttcaccaccgccgccgccgtgcacgtgttcaccagcatgctgaagtacctgttcggcgtgaagaccaagagatacagcggcatcttcagcgtggtgtacagcaccgtggccgtgctgcagaacgtgaagaacctgaacgtgtgcagcctgggcgtgggcctgatggtgttcggcctgctgctgggcggcaaggagttcaacgagagattcaaggagaagctgcccgcccccatccccctggagttcttcgccgtggtgatgggcaccggcatcagcgccggcttcaacctgaaggagagctacaacgtggacgtggtgggcaccctgcccctgggcctgctgccccccgccaaccccgacaccagcctgttccacctggtgtacgtggacgccatcgccatcgccatcgtgggcttcagcgtgaccatcagcatggccaagaccctggccaacaagcacggctaccaggtggacggcaaccaggagctgatcgccctgggcctgtgcaacagcatcggcagcctgttccagaccttcagcatcagctgcagcctgagcagaagcctggtgcaggagggcaccggcggcaagacccagctggccggctgcctggccagcctgatgatcctgctggtgatcctggccaccggcttcctgttcgagagcctgccccaggccgtgctgagcgccatcgtgatcgtgaacctgaagggcatgttcatgcagttcagcgacctgcccttcttctggagaaccagcaagatcgagctgaccatctggctgaccaccttcgtgagcagcctgttcctgggcctggactacggcctgatcaccgccgtgatcatcgccctgctgaccgtgatctacagaacccagagccccagctacaaggtgctgggcaagctgcccgagaccgacgtgtacatcgacatcgacgcctacgaggaggtgaaggagatccccggcatcaagatcttccagatcaacgcccccatctactacgccaacagcgacctgtacagcaacgccctgaagagaaagaccggcgtgaaccccgccgtgatcatgggcgccagaagaaaggccatgagaaagtacgccaaggaggtgggcaacgccaacatggccaacgccaccgtggtgaaggccacccaggacgccgaggtggacggcgaggacgccaccaagcccgaggaggaggacggcgaggtgaagtacccccccatcgtgatcaagagcaccttccccgaggagatgcagagattcatgccccccggcgacaacgtgcacaccgtgatcctggacttcacccaggtgaacttcatcgacagcgtgggcgtgaagaccctggccggcatcgtgaaggagtacggcgacgtgggcatctacgtgtacctggccggctgcagcgcccaggtggtgaacgacctgaccagaaacagattcttcgagaaccccgccctgtgggagctgctgttccacagcatccacgacgccgtgctgggcagccagctgagagaggccctggccgagcaggaggccagcgccccccccagccaggaggacctggagcccaacgccacccccgccacccccgaggcctag

SEQ ID NO: 307188 - DNA, 2124 bp, Artificial Sequence
  derived and/or modified sequence
atggaccacgccgaggagaacgagatcctggccgccacccagagatactacgtggagagacccatcttcagccaccccgtgctgcaggagagactgcacaccaaggacaaggtgcccgacagcatcgccgacaagctgaagcaggccttcacctgcacccccaagaagatcagaaacatcatctacatgttcctgcccatcaccaagtggctgcccgcctacaagttcaaggagtacgtgctgggcgacctggtgagcggcatcagcaccggcgtgctgcagctgccccagggccccttcgccgtgatcagcctgatgatcggcggcgtggccgtgagactggtgcccgacgacatcgtgatccccggcggcgtgaacgccaccaacggcaccgaggccagagacgccctgagagtgaaggtggccatgagcgtgaccctgctgagcggcatcatccagttctgcctgggcgtgtgcagattcggcttcgtggccatctacctgaccgagcccctggtgagaggcttcaccaccgccgccgccgtgcacgtgttcaccagcatgctgaagtacctgttcggcgtgaagaccaagagatacagcggcatcttcagcgtggtgtacagcaccgtggccgtgctgcagaacgtgaagaacctgaacgtgtgcagcctgggcgtgggcctgatggtgttcggcctgctgctgggcggcaaggagttcaacgagagattcaaggagaagctgcccgcccccatccccctggagttcttcgccgtggtgatgggcaccggcatcagcgccggcttcaacctgaaggagagctacaacgtggacgtggtgggcaccctgcccctgggcctgctgccccccgccaaccccgacaccagcctgttccacctggtgtacgtggacgccatcgccatcgccatcgtgggcttcagcgtgaccatcagcatggccaagaccctggccaacaagcacggctaccaggtggacggcaaccaggagctgatcgccctgggcctgtgcaacagcatcggcagcctgttccagaccttcagcatcagctgcagcctgagcagaagcctggtgcaggagggcaccggcggcaagacccagctggccggctgcctggccagcctgatgatcctgctggtgatcctggccaccggcttcctgttcgagagcctgccccaggccgtgctgagcgccatcgtgatcgtgaacctgaagggcatgttcatgcagttcagcgacctgcccttcttctggagaaccagcaagatcgagctgaccatctggctgaccaccttcgtgagcagcctgttcctgggcctggactacggcctgatcaccgccgtgatcatcgccctgctgaccgtgatctacagaacccagagccccagctacaaggtgctgggcaagctgcccgagaccgacgtgtacatcgacatcgacgcctacgaggaggtgaaggagatccccggcatcaagatcttccagatcaacgcccccatctactacgccaacagcgacctgtacagcaacgccctgaagagaaagaccggcgtgaaccccgccgtgatcatgggcgccagaagaaaggccatgagaaagtacgccaaggaggtgggcaacgccaacatggccaacgccaccgtggtgaaggccgacgccgaggtggacggcgaggacgccaccaagcccgaggaggaggacggcgaggtgaagtacccccccatcgtgatcaagagcaccttccccgaggagatgcagagattcatgccccccggcgacaacgtgcacaccgtgatcctggacttcacccaggtgaacttcatcgacagcgtgggcgtgaagaccctggccggcatcgtgaaggagtacggcgacgtgggcatctacgtgtacctggccggctgcagcgcccaggtggtgaacgacctgaccagaaacagattcttcgagaaccccgccctgtgggagctgctgttccacagcatccacgacgccgtgctgggcagccagctgagagaggccctggccgagcaggaggccagcgccccccccagccaggaggacctggagcccaacgccacccccgccacccccgaggcctag

SEQ ID NO: 307189 - protein, 1063 aa, Artificial Sequence
  derived and/or modified sequence
MSSHSAGSCFLCLVDVVPVKNEDGAVIMFILNFEVVMEKDMVGSPAHDTNHRGPPTSWLAPGRAKTFRLKLPALLALTARESSVRSGGAGGAGAPGAVVVDVDLTPAAPSSESLALDEVTAMDNHVAGLGPAEERRALVGPGSPPRSAPGQLPSPRAHSLNPDASGSSCSLARTRSRESCASVRRASSADDIEAMRAGVLPPPPRHASTGAMHPLRSGLLNSTSDSDLVRYRTISKIPQITLNFVDLKGDPFLASPTSDREIIAPKIKERTHNVTEKVTQVLSLGADVLPEYKLQAPRIHRWTILHYSPFKAVWDWLILLLVIYTAVFTPYSAAFLLKETEEGPPATECGYACQPLAVVDLIVDIMFIVDILINFRTTYVNANEEVVSHPGRIAVHYFKGWFLIDMVAAIPFDLLIFGSGSEELIGLLKTARLLRLVRVARKLDRYSEYGAAVLFLLMCTFALIAHWLACIWYAIGNMEQPHMDSRIGWLHNLGDQIGKPYNSSGLGGPSIKDKYVTALYFTFSSLTSVGFGNVSPNTNSEKIFSICVMLIGSLMYASIFGNVSAIIQRLYSGTARYHTQMLRVREFIRFHQIPNPLRQRLEEYFQHAWSYTNGIDMNAVLKGFPECLQADICLHLNRSLLQHCKPFRGATKGCLRALAMKFKTTHAPPGDTLVHAGDLLTALYFISRGSIEILRGDVVVAILGKNDIFGEPLNLYARPGKSNGDVRALTYCDLHKIHRDDLLEVLDMYPEFSDHFWSSLEITFNLRDTNMIPGSPGSTELEGGFSRQRKRKLSFRRRTDKDTEQPGEVSALGPGRAGAGPSSRGRPGGPWGESPSSGPSSPESSEDEGPGRSSSPLRLVPFSSPRPPGEPPGGEPLMEDCEKSSDTCNPLSGAFSGVSNIFSFWGDSRGRQYQELPRCPAPTPSLLNIPLSSPGRRPRGDVESRLDALQRQLNRLETRLSADMATVLQLLQRQMTLVPPAYSAVTTPGPGPTSTSPLLPVSPLPTLTLDSLSQVSQFMACEELPPGAPELPQEGPTRRLSLPGQLGALTSQPLHRHGSDPGS

SEQ ID NO: 307190 - DNA, 3192 bp, Artificial Sequence
  derived and/or modified sequence
atgagcagtcacagcgccggctcctgcttcctttgcctggtggatgtcgtgcccgtgaagaacgaagacggcgcagtcatcatgtttatactgaacttcgaggttgtaatggagaaagatatggtgggcagtcccgctcacgacacgaatcaccggggtccgccaactagctggctcgcacctgggcgggcaaagacctttcgcttaaagcttcctgctttattggctttgaccgcaagggaaagctctgtccgatcgggcggggctggaggcgccggcgcccctggcgccgtggtcgtggacgtcgacctcactcccgccgcgccaagttctgagtccctcgcactggatgaagttacagctatggacaaccatgttgctgggctcggccccgcagaggagcgcagggcattggtggggcccggttcgcctcccagaagcgccccaggtcagcttccttctcccagagcccactcactgaatcccgacgcttccggttctagttgttcattggcccgcaccagatctagagaatcctgtgccagcgtgcgaagagcctcttctgctgacgatatcgaagcaatgcgcgccggggttctccccccaccacccagacacgcctcaaccggtgctatgcacccattgaggtccgggctcctcaactcaaccagcgacagtgacctggtcaggtaccgtaccatcagtaaaattccccagatcactctcaacttcgtcgatctcaagggtgacccgtttcttgcatcaccaacttcagatcgcgagattatcgcccccaaaattaaggagcgcacgcacaatgtgaccgagaaggtgactcaagtgctaagcctcggagctgacgtgctgcccgagtacaaattgcaggcccctaggatccaccgatggactattctccattacagcccattcaaagccgtctgggattggttaattctgctgctggtgatttataccgcagtttttactccatatagtgcagcttttctgctgaaggaaacagaggaagggcctccagcgacggagtgcggctatgcttgccaaccattggccgtcgtcgacctcattgtggacattatgttcatcgttgatatccttattaatttccgaacaacttacgtgaatgcaaacgaggaagtagttagccaccctgggagaatcgcagtccactactttaaaggctggttcctcattgatatggtcgcagctattccattcgatctactgatctttggctctgggagcgaagaactcattggactgcttaaaactgctaggttactgcgtttagtgcgtgtcgccaggaaactggatcggtacagcgaatacggagctgcggttctgttcctgctgatgtgtacttttgccctgatcgcccactggctggcatgtatctggtatgcgattgggaatatggagcagccacacatggattcacgtattggctggctccacaaccttggcgaccaaattggcaaaccttacaactcctctgggctgggaggaccgtctatcaaagataagtacgtaacggccctgtattttactttttccagtctgacgtctgtggggtttggcaatgttagtccgaataccaactcggaaaaaatcttcagtatctgtgttatgctgattggctccctgatgtatgccagtatctttggaaacgtctccgcaataatccagcggctctatagcggaaccgcaagatatcacacacaaatgttacgggtgcgggagttcataagatttcatcaaatacctaacccgctgaggcagagactagaagaatatttccagcacgcatggtcttatacaaacgggattgacatgaatgccgtattgaaggggttcccggaatgcttgcaggctgacatctgtctgcatctgaacaggagcttgctccagcactgcaagccttttcggggggcaaccaaggggtgtctgcgggctcttgctatgaagtttaagacaacccatgccccacccggggataccctcgttcatgctggtgacctcctgactgcgctttatttcatttctcgcggcagtatcgagattctgaggggcgacgtggtcgtggccatccttgggaagaatgacatcttcggagagccattgaacctctacgcacgtcccgggaaatccaacggtgatgtccgggcactaacttattgtgaccttcacaagatccacagggacgacttgttggaagtcctcgacatgtacccagaattttccgaccacttctggagcagcctggagatcacctttaatctccgcgatacaaacatgattcctgggtctccaggatcaactgagctcgaaggtggcttcagccggcaacgaaagcgtaagctctctttccggagaagaaccgacaaagacaccgaacagccaggggaagtgagtgcactcggccctgggcgggctggggccggaccatctagccgggggaggcccggtggcccatggggtgagtcccccagcagtggcccttcctcaccggaatcgagtgaggatgagggccccggacgctcatcaagccccctcaggctggtacccttctcatctcctcgtccacctggtgagccccccggtggcgaacccctgatggaggactgtgaaaaatcttctgacacctgcaatcccctaagcggggctttttcaggggtgtcaaacatcttttctttttggggagattcgcgagggaggcagtatcaggagctgcctcggtgtccagccccaaccccgtccttgcttaacatcccccttagttcaccgggccggcggccaagaggcgatgtagagtctaggctcgatgccctccagcgtcagttgaataggttggagacacgcctttccgccgatatggctactgttctgcagcttctacagcgccaaatgacgctcgtgcccccggcctattccgccgtgacaactccaggtcccggccctacctcgacaagtcccttgctgcccgtcagccccctacctaccctgacgttggattctctgagccaagtgtcccagtttatggcatgcgaggagcttccccccggggcaccagagctgccgcaggagggaccgaccaggaggctcagcctgcccggacagctcggagcactgacatcgcagcctcttcatcgccacggtagtgatcccggctcatag

SEQ ID NO: 307191 - DNA, 3192 bp, Artificial Sequence
  derived and/or modified sequence
atgagcagccacagcgctggcagctgcttcctgtgcctggtggatgtggtgcctgtgaagaatgaagatggagctgtgatcatgttcatcctgaactttgaggtggtgatggagaaggacatggtgggcagccctgcccatgacaccaaccaccggggcccccccacctcctggctggcccctggccgggccaagaccttccggctgaagctgcctgccctgctggccctgacagcccgggagagctctgtgcgcagcggcggggccggcggggccggggcccctggagctgtggtggtggatgtggacctgaccccagctgcccccagcagcgagagcctggccctggatgaggtgacagccatggacaaccacgtggccggcctgggccctgctgaggagcggcgggccctggtgggccctggcagcccccccaggtctgcccctggccagctgcccagcccccgggcccacagcctgaacccagatgccagcggcagcagctgcagcctggcccggaccaggagccgggagagctgtgcctctgtgcggcgggccagcagcgcagatgacatcgaggccatgagagctggggtgctgcccccaccacccaggcatgccagcactggagccatgcaccccctgcggagcggcctgctgaacagcaccagtgacagcgacctggtgcgctaccgcaccatcagcaagatcccccagatcaccctgaactttgtggacctgaagggggaccccttcctggccagccccaccagtgaccgggagatcatcgcccccaagatcaaggagaggacccacaacgtgacagagaaggtgacccaggtgctgagcctgggcgcagatgtgctgcctgagtacaagctgcaggccccccgcatccaccgctggaccatcctgcactacagccccttcaaggctgtgtgggactggctgatcctgctgctggtgatctacacagctgtgttcaccccctacagcgctgccttcctgctgaaggagacagaggagggccccccagccacagaatgtggctacgcctgccagcccctggccgtggtggacctgattgtggacatcatgttcatcgtggacatcctgatcaacttccgcaccacctacgtgaatgccaatgaggaggtggtgagccaccctggaagaattgctgtgcactacttcaagggctggttcctgattgacatggtggccgccatcccctttgacctgctgatctttggaagtggcagcgaggagctgattggcctgctgaagacagcccggctgctgcggctggtgcgggtggccaggaagctggaccgctacagtgaatatggagctgctgtgctcttcctgctgatgtgcacctttgccctgattgcccactggctggcctgcatctggtacgccatcggcaacatggagcagccccacatggacagcagaattggctggctgcacaacctgggggaccagatcggcaagccctacaacagcagcggcctgggcggccccagcatcaaggacaagtatgtgacagccctgtacttcaccttcagcagcctgacctctgtgggctttggaaatgtgagccccaacaccaacagcgagaagatcttcagcatctgtgtgatgctgattggcagcctgatgtatgccagcatctttggaaatgtgtctgccatcatccagaggctgtacagcggcacagcccgctaccacacccagatgctgcgggtgcgggagttcatccgcttccaccagatccccaaccccctgcggcagaggctggaggagtacttccagcacgcctggagctacaccaatggaattgacatgaatgctgtgctgaagggcttccctgagtgcctgcaggccgacatctgcctgcacctgaacagaagcctgctgcagcactgcaagcccttccggggggccaccaagggctgcctgcgggccctggccatgaagttcaagaccacccacgcccctcctggggacaccctggtgcacgccggggacctgctgacagccctgtacttcatcagccggggcagcattgagatcctgcggggagatgtggtggtggccatcctgggcaagaatgacatctttggagagcccctgaacctgtatgcccggcctgggaagagcaatggagatgtgcgggccctgacctactgtgacctgcacaagatccacagagatgacctgctggaggtgctggacatgtacccagagttcagtgaccacttctggagcagcctggagatcaccttcaacctgcgggacaccaacatgatccctggcagccctggcagcacagagctggagggcggcttcagccggcagaggaagaggaagctgtccttcagaagaagaacagacaaggacacagagcagcccggggaggtgtctgccctgggccctggccgggccggggccggccccagcagccggggccggcctgggggcccctggggcgagagccccagcagcggccccagcagccctgagagcagtgaagatgagggccctggccgcagcagcagccccctgcggctggtgcccttcagcagccccaggcctcctggagagcccccaggaggagagcccctgatggaggactgtgagaagagcagtgacacctgcaaccccctgagcggggccttcagcggcgtgagcaacatcttctccttctggggagacagccggggccggcagtaccaggagctgccccgctgcccagcccccacccccagcctgctgaacatccccctgagcagccctggccggcggcccagaggagatgtggagagccggctggatgccctgcagaggcagctgaaccggctggagacccggctgtctgctgacatggccaccgtgctgcagctgctgcagaggcagatgaccctggtgcccccagcctacagcgctgtgaccaccccaggccctggccccaccagcaccagccccctgctgcctgtgagccccctgcccaccctgaccctggacagcctgagccaggtgtcccagttcatggcctgtgaggagctgcccccaggggcccctgagctgccccaggagggccccacccggcggctgagcctgcccggccagctgggcgccctgaccagccagcccctgcacagacatggcagtgaccccggcagctag

SEQ ID NO: 307192 - DNA, 3192 bp, Artificial Sequence
  derived and/or modified sequence
atgagcagccacagcgccggcagctgcttcctgtgcctggtggacgtcgtaccggttaagaacgaggacggtgcagtgatcatgttcatcctgaattttgaggtggttatggagaaagacatggtggggtccccggcacatgacactaaccaccggggacctcctacctcgtggctcgccccaggacgcgcaaagacttttagactgaaactgccagccctgttggccctgaccgctcgagagtcttccgtgcgatcaggcggggccggcggcgccggggctcctggtgctgtcgtggtggatgttgacttgacccccgccgcgccttcctcagagtccctcgctctagacgaagtgaccgctatggacaaccacgttgctggcctaggacccgctgaggaaagaagggccctcgtgggtccaggatctcctccaagaagcgcacccggacagctccctagcccccgagcacactcactcaacccagatgcaagtggctctagttgtagtctggctcggactcgctcaagggaatcgtgtgcctctgtaaggagggcgagcagcgccgacgatatagaggcgatgcgcgctggcgtgctcccccccccacctcgtcacgccagcacgggcgcgatgcaccccctacgtagcgggctgctcaattctacctccgacagcgacctagttaggtatagaaccatctccaagattccccagataacccttaactttgtggacctgaagggcgaccctttcctggcctcaccaacatcggacagagagattattgcccctaagattaaggaaaggacacacaatgtcactgaaaaggtcacccaagttctctctctgggtgccgacgtgctcccagagtacaagctccaggcgccccgaattcataggtggaccatcttacactacagtccctttaaggcagtctgggattggctgattctgttactggtgatatacacagcggtgttcaccccgtactctgcagcgttcctgctgaaggagacggaggagggtcctcccgcgactgagtgtggatacgcgtgtcagccactggcagttgttgacttgatagttgacatcatgttcatcgtggacattttgatcaattttaggactacatacgtgaacgccaatgaggaagtcgtgtctcatcccgggcgcattgcagtgcactactttaagggctggttcctcattgatatggtggctgcgatccccttcgacctcctgatttttggctccggttccgaggaattgataggactactaaagaccgcaagactgttgcgactggttcgagtggcaaggaagttggacagatactccgagtacggagccgccgtcttgttcttgctgatgtgcaccttcgccctgatcgcccattggcttgcttgtatatggtatgccattggtaacatggagcaaccccacatggactcccggattgggtggctgcataacctcggtgaccaaattggtaagccctacaacagctcgggtttgggaggaccgtctatcaaggacaaatatgtcaccgctctgtatttcacttttagctctttgacatctgtcggcttcgggaacgtgtctccaaataccaattctgaaaaaatcttctcaatttgtgtgatgctgataggctccctcatgtacgcctcaattttcggaaacgtgtctgccattatacagcgcctctactctggaacagcccgttaccatacacagatgcttagagtgagagagtttatccggtttcatcaaatcccgaatccgctcaggcagaggttggaggagtactttcagcacgcctggagttatacgaacggaatcgatatgaatgctgtgctaaagggcttcccggaatgcctgcaggccgacatctgcctacacctgaatcgttctctgttgcagcactgcaaaccatttcgcggcgcaacgaaggggtgccttagagccttggccatgaaattcaagacaacacacgcccctcccggggacaccctcgttcatgcaggagatcttcttactgcgttgtacttcatatctcgggggagcatagaaatcttacgcggcgacgttgtggtcgcaattttaggaaaaaacgacatcttcggcgagcctctgaatttgtacgcaagacccggaaagtccaatggcgacgtgagagctctgacctactgtgacctgcacaaaatccaccgagatgaccttttggaggtattggacatgtaccccgaattctccgatcatttttggagttctctagagattacctttaacctccgcgacaccaacatgataccgggctctccaggctcaaccgaactggaaggtggctttagccgacagcgcaagcgcaaattatcatttcgaaggcgaacagacaaggatactgaacaacccggcgaggtctctgctctcggtcccggaagggctggggctggaccctcaagccgcggacggcctggcgggccttggggggagagcccaagctctggtccatcctcacctgagtcttctgaggatgagggacctggtcgctcttccagccctctccgtctggtcccgtttagttctcccagaccaccaggagaaccacctggaggagaaccgttgatggaggattgtgagaagtccagcgacacatgtaatccgctcagtggcgcctttagcggcgtctccaatattttcagcttttggggagatagtcgtggcaggcagtatcaggagctaccgagatgtcccgctcccacgccctctttgctaaacattccactgtcgtctcctggcaggagaccgagaggcgacgtggagagtaggctcgacgccttgcagcggcagttaaatcgcctcgagaccaggcttagtgcggatatggccactgtgctccagctgttgcagcgacaaatgactttggtgcctcccgcatatagcgcggtgaccacccccggacccggaccgactagcacctcaccccttctgcctgtctcgccgcttccaacactcactctggactctcttagtcaggttagtcagttcatggcgtgtgaggagctgcctcctggggctcccgaactaccacaagaaggtcccaccagacgactctccctgccaggtcagttgggggccttgacttcccagccattgcatcggcacgggtctgatccagggagctag

SEQ ID NO: 307193 - DNA, 4717 bp, Artificial Sequence
  derived and/or modified sequence
ggggcggggggcggtggggcagcagggggcccatgtgctcaacagggagctgagggagaccaggggtgcttggcttaggggactgacctcatctggtacagggcctttggtggacagagagagactggaaaagaaaaagtcaaggatcgaggggaacgcgaggcgaggtgaagatgaaagatctagaagcagtgcttcttagactctttggtgaaggatcagtgttttttaatgctaatatgttataggctggtacatctgtgaaatacaagagcacatgcgtggattttgtggtgatgccaaattgctgtaaagtttttgaaattcttgctctcaacgtctgtccttatcttgtgtgctgacacaacggctggtgctaatctagagagaacagagagacagatagtaacagctaaccgtctgtagtgtgcggcatacgccaggcattgcctaagcgctcagcatgtgctgacttggttaatctttataactcatgagaaaagaattatatacattatgtgtatcacaacatcactgtgtaccccataaatatgtacaattattgtgtcaattaaaaagttaaaaaattttaaaaagaaaaaattattattcttcccattttatagatggaaaaaatgaggcacaaggatgttaaataatttaggaaaaaagcataagtgattaagcagcagatccgggctatgaacccagagatcgtaggcctaaagtctgtgggcttaagcactgtgctacagcgcctcgcttgagggaaaggcagaggtgctgggaggatatgaggaaatgagatagggaggaaatgagatcaaagatggcagaagaaaggatcatagccagcgtgagaaaaagtgcagccgggaaagagctagataaatcatataggcagagagaggggtaggggagcctggcagcaacaagctggggtagacagattgaggggagccataagggcggcaggcacatggccgggtgggggatcaggacgggagatcccggagaggaagggccatacggggaggcagaagtggacgggcccacttgggttccagggtccatcctgcgtggctttctgctctgcccactgagtgggtgccaagggggctatgtcctcccactctgcagggagctgcttcctatgtctggtggatgtggtgcccgtgaagaacgaggatggggctgtcatcatgttcatcctcaatttcgaggtggtgatggagaaggacatggtggggtccccggctcatgacaccaaccaccggggcccccccaccagctggctggccccaggccgcgccaagaccttccgcctgaagctgcccgcgctgctggcgctgacggcccgggagtcgtcggtgcggtcgggcggcgcgggcggcgcgggcgccccgggggccgtggtggtggacgtggacctgacgcccgcggcacccagcagcgagtcgctggccctggacgaagtgacagccatggacaaccacgtggcagggctcgggcccgcggaggagcggcgtgcgctggtgggtcccggctctccgccccgcagcgcgcccggccagctcccatcgccccgggcgcacagcctcaaccccgacgcctcgggctccagctgcagcctggcccggacgcgctcccgagaaagctgcgccagcgtgcgccgcgcctcgtcggccgacgacatcgaggccatgcgcgccggggtgctgcccccgccaccgcgccacgccagcaccggggccatgcacccactgcgcagcggcttgctcaactccacctcggactccgacctcgtgcgctaccgcaccattagcaagattccccaaatcaccctcaactttgtggacctcaagggcgaccccttcttggcttcgcccaccagtgaccgtgagatcatagcacctaagataaaggagcgaacccacaatgtcactgagaaggtcacccaggtcctgtccctgggcgccgacgtgctgcctgagtacaagctgcaggcaccgcgcatccaccgctggaccatcctgcattacagccccttcaaggccgtgtgggactggctcatcctgctgctggtcatctacacggctgtcttcacaccctactcggctgccttcctgctgaaggagacggaagaaggcccgcctgctaccgagtgtggctacgcctgccagccgctggctgtggtggacctcatcgtggacatcatgttcattgtggacatcctcatcaacttccgcaccacctacgtcaatgccaacgaggaggtggtcagccaccccggccgcatcgccgtccactacttcaagggctggttcctcatcgacatggtggccgccatccccttcgacctgctcatcttcggctctggctctgaggagctgatcgggctgctgaagactgcgcggctgctgcggctggtgcgcgtggcgcggaagctggatcgctactcagagtacggcgcggccgtgctgttcttgctcatgtgcacctttgcgctcatcgcgcactggctagcctgcatctggtacgccatcggcaacatggagcagccacacatggactcacgcatcggctggctgcacaacctgggcgaccagataggcaaaccctacaacagcagcggcctgggcggcccctccatcaaggacaagtatgtgacggcgctctacttcaccttcagcagcctcaccagtgtgggcttcggcaacgtctctcccaacaccaactcagagaagatcttctccatctgcgtcatgctcattggctccctcatgtatgctagcatcttcggcaacgtgtcggccatcatccagcggctgtactcgggcacagcccgctaccacacacagatgctgcgggtgcgggagttcatccgcttccaccagatccccaatcccctgcgccagcgcctcgaggagtacttccagcacgcctggtcctacaccaacggcatcgacatgaacgcggtgctgaagggcttccctgagtgcctgcaggctgacatctgcctgcacctgaaccgctcactgctgcagcactgcaaacccttccgaggggccaccaagggctgccttcgggccctggccatgaagttcaagaccacacatgcaccgccaggggacacactggtgcatgctggggacctgctcaccgccctgtacttcatctcccggggctccatcgagatcctgcggggcgacgtcgtcgtggccatcctggggaagaatgacatctttggggagcctctgaacctgtatgcaaggcctggcaagtcgaacggggatgtgcgggccctcacctactgtgacctacacaagatccatcgggacgacctgctggaggtgctggacatgtaccctgagttctccgaccacttctggtccagcctggagatcaccttcaacctgcgagataccaacatgatcccgggctcccccggcagtacggagttagagggtggcttcagtcggcaacgcaagcgcaagttgtccttccgcaggcgcacggacaaggacacggagcagccaggggaggtgtcggccttggggccgggccgggcgggggcagggccgagtagccggggccggccgggggggccgtggggggagagcccgtccagtggcccctccagccctgagagcagtgaggatgagggcccaggccgcagctccagccccctccgcctggtgcccttctccagccccaggccccccggagagccgccgggtggggagcccctgatggaggactgcgagaagagcagcgacacttgcaaccccctgtcaggcgccttctcaggagtgtccaacattttcagcttctggggggacagtcggggccgccagtaccaggagctccctcgatgccccgcccccacccccagcctcctcaacatccccctctccagcccgggtcggcggccccggggcgacgtggagagcaggctggatgccctccagcgccagctcaacaggctggagacccggctgagtgcagacatggccactgtcctgcagctgctacagaggcagatgacgctggtcccgcccgcctacagtgctgtgaccaccccggggcctggccccacttccacatccccgctgttgcccgtcagccccctccccaccctcaccttggactcgctttctcaggtttcccagttcatggcgtgtgaggagctgcccccgggggccccagagcttccccaagaaggccccacacgacgcctctccctaccgggccagctgggggccctcacctcccagcccctgcacagacacggctcggacccgggcagttagtggggctgcccagtgtggacacgtggctcacccagggatcaaggcgctgctgggccgctccccttggaggccctgctcaggaggccctgaccgtggaaggggagaggaactcgaaagcacagctcctcccccagcccttgggaccatcttctcctgcagtcccctgggccccagtgagaggggcaggggcagggccggcagtaggtggggcctgtggtccccccactgccctgagggcattagctggtctaactgcccggaggcacccggccctgggccttaggcacctcaaggacttttctgctatttactgctcttattgttaaggataataattaaggatcatatgaataattaatgaagatgctgatgactatgaataataaataattatcctgaggaga

SEQ ID NO: 307194 - DNA, 3192 bp, Artificial Sequence
  derived and/or modified sequence
atgtcttcccacagcgccggtagttgttttttatgcctggtagacgtggtccctgtcaagaacgaggacggggctgttatcatgttcatcttgaacttcgaggtcgttatggagaaggacatggtcgggagtccagctcatgatacaaatcatcgtggtccacccacttcttggctagcccctggacgcgcaaagaccttcaggctgaagttgcccgctctcttggccctgactgctcgtgagagcagcgtccgctccggtggggcaggaggcgcaggagcacccggagctgttgttgtggatgtcgatttgactcccgcagctcctagctcggaaagcttagccttagatgaggttacagcaatggacaaccacgttgccggactcggacctgctgaggagaggagggctctggtggggcctggtagcccaccacggagtgctcccggtcagctgccttccccccgtgcccactcactcaacccagatgccagtggaagctcctgctctctggccagaacgcggagtcgcgagtcctgcgcttccgtgcgccgtgcaagcagcgcagacgacattgaagcaatgcgagctggcgtgctcccacctccccctcgccacgccagtacaggggcaatgcatccactgcgcagcggactgctgaactctacctcagacagcgatttggtcaggtaccgtacaatctccaaaataccccaaatcaccctcaactttgttgacctcaaaggcgacccatttttggcctcaccaacatcagatagggagattattgccccaaagattaaggagaggacacacaacgtcactgaaaaggtaacacaggttctgtcactgggagctgacgtcctgccagaatataagttacaggcaccgaggatccaccgttggaccatactccactatagccctttcaaggctgtgtgggactggttaattctattgctggtgatatatacagcagtgttcaccccttactctgccgctttccttcttaaggaaaccgaagagggaccccctgctactgaatgcggctatgcatgccagcccctcgcagttgtcgatctcattgtcgatatcatgtttatcgtcgacatcctgattaactttcgaacgacctacgtcaatgcaaacgaagaggtcgtatctcaccctggacgcattgccgtgcactacttcaagggttggtttctgattgacatggttgctgcaatcccctttgatctcctgattttcggctccgggagtgaggaactgattggcctcctgaaaacagctcgtctgttgcgtctggttagggtagcgcgaaaactggataggtatagtgagtacggagctgcagtactcttcctgctgatgtgcaccttcgcattgatcgctcattggctagcatgcatttggtacgccatcgggaatatggagcagcctcatatggactcacgaattggctggcttcataatctaggtgaccagatcgggaaaccctataatagttccggcctgggagggccaagcattaaggataaatacgtgacagccctatattttacatttagctctctcacttctgtgggtttcggtaacgtgtcacccaatacaaactcagagaagatttttagcatctgtgtgatgctgattggttctctgatgtatgcctctatttttggtaacgtttctgccatcatccagcggttgtattcagggaccgccagataccatacacaaatgctgcgcgtgcgagagtttattcgcttccatcagatccccaaccctttaaggcagcgcctggaggagtactttcagcacgcctggtcctacacaaatgggatcgacatgaatgctgtgctcaaaggcttcccagagtgcttgcaggccgacatttgcttacacctgaacagatcactcttacagcactgcaagccctttcggggagcaactaagggatgcctgcgagctttggcaatgaaattcaagacaacccacgccccacccggagacaccctagttcatgctggcgatctcttaaccgccttatatttcattagccgcggatctatcgagatcctccgtggtgacgttgtggtggccattctcggcaagaacgatatttttggggaacccctcaacttgtatgcccgtccaggcaagtccaatggcgacgttagagcactgacctactgcgacttgcacaaaattcaccgtgatgacctgctggaggtgctggatatgtaccccgaattcagcgatcacttttggtcttcactcgagatcacatttaatcttagggacacgaacatgatcccagggtctcctggatccacggagctcgaggggggtttcagtaggcagaggaaaaggaaactgtctttccgcaggaggaccgacaaagacaccgaacagcctggggaagtgtccgcactcggacccggaagggctggcgcagggccttcctcaaggggacggccaggcggaccatggggggaatctccgtcatcgggcccatctagtcctgagtcatccgaggatgagggccctggccgatcttcctctccgctgcgcttggtcccgttctcttctccgagacctcctggcgaaccaccagggggagagcccttgatggaagattgcgagaaatcaagtgatacgtgcaatcccctgtcaggagcctttagcggcgtgtctaatattttctctttttggggggatagccgcggtcggcaataccaggagctgccacgttgtcccgcacctacaccatcattgctcaacataccactttcttcacccggacgcaggcccagaggtgacgtggagtccaggctcgatgccctccagcgccagctgaaccggttagagacacgcttgagcgccgacatggctacagtgcttcagttgctccagaggcagatgactcttgtgccgccagcatactccgctgtcaccacaccaggacctggcccaaccagtacttcacctctgcttccagtgagtccacttccaactctcactctcgactccctctcgcaggtgagccagtttatggcctgtgaagagctgcctcccggtgctcccgagttgccccaggagggacccacgcggcgactcagcctgcccggtcagctgggcgctctcacaagtcagccgctgcaccggcatggctctgatcctggttcatag

SEQ ID NO: 307195 - DNA, 3192 bp, Artificial Sequence
  derived and/or modified sequence
atgagcagccacagcgccggcagctgcttcctgtgcctggtggacgtggtgcccgtgaagaacgaggacggcgccgtgatcatgttcatcctgaacttcgaggtggtgatggagaaggacatggtgggcagccccgcccacgacaccaaccacagaggcccccccaccagctggctggcccccggcagagccaagaccttcagactgaagctgcccgccctgctggccctgaccgccagagagagcagcgtgagaagcggcggcgccggcggcgccggcgcccccggcgccgtggtggtggacgtggacctgacccccgccgcccccagcagcgagagcctggccctggacgaggtgaccgccatggacaaccacgtggccggcctgggccccgccgaggagagaagagccctggtgggccccggcagcccccccagaagcgcccccggccagctgcccagccccagagcccacagcctgaaccccgacgccagcggcagcagctgcagcctggccagaaccagaagcagagagagctgcgccagcgtgagaagagccagcagcgccgacgacatcgaggccatgagagccggcgtgctgccccccccccccagacacgccagcaccggcgccatgcaccccctgagaagcggcctgctgaacagcaccagcgacagcgacctggtgagatacagaaccatcagcaagatcccccagatcaccctgaacttcgtggacctgaagggcgaccccttcctggccagccccaccagcgacagagagatcatcgcccccaagatcaaggagagaacccacaacgtgaccgagaaggtgacccaggtgctgagcctgggcgccgacgtgctgcccgagtacaagctgcaggcccccagaatccacagatggaccatcctgcactacagccccttcaaggccgtgtgggactggctgatcctgctgctggtgatctacaccgccgtgttcaccccctacagcgccgccttcctgctgaaggagaccgaggagggcccccccgccaccgagtgcggctacgcctgccagcccctggccgtggtggacctgatcgtggacatcatgttcatcgtggacatcctgatcaacttcagaaccacctacgtgaacgccaacgaggaggtggtgagccaccccggcagaatcgccgtgcactacttcaagggctggttcctgatcgacatggtggccgccatccccttcgacctgctgatcttcggcagcggcagcgaggagctgatcggcctgctgaagaccgccagactgctgagactggtgagagtggccagaaagctggacagatacagcgagtacggcgccgccgtgctgttcctgctgatgtgcaccttcgccctgatcgcccactggctggcctgcatctggtacgccatcggcaacatggagcagccccacatggacagcagaatcggctggctgcacaacctgggcgaccagatcggcaagccctacaacagcagcggcctgggcggccccagcatcaaggacaagtacgtgaccgccctgtacttcaccttcagcagcctgaccagcgtgggcttcggcaacgtgagccccaacaccaacagcgagaagatcttcagcatctgcgtgatgctgatcggcagcctgatgtacgccagcatcttcggcaacgtgagcgccatcatccagagactgtacagcggcaccgccagataccacacccagatgctgagagtgagagagttcatcagattccaccagatccccaaccccctgagacagagactggaggagtacttccagcacgcctggagctacaccaacggcatcgacatgaacgccgtgctgaagggcttccccgagtgcctgcaggccgacatctgcctgcacctgaacagaagcctgctgcagcactgcaagcccttcagaggcgccaccaagggctgcctgagagccctggccatgaagttcaagaccacccacgccccccccggcgacaccctggtgcacgccggcgacctgctgaccgccctgtacttcatcagcagaggcagcatcgagatcctgagaggcgacgtggtggtggccatcctgggcaagaacgacatcttcggcgagcccctgaacctgtacgccagacccggcaagagcaacggcgacgtgagagccctgacctactgcgacctgcacaagatccacagagacgacctgctggaggtgctggacatgtaccccgagttcagcgaccacttctggagcagcctggagatcaccttcaacctgagagacaccaacatgatccccggcagccccggcagcaccgagctggagggcggcttcagcagacagagaaagagaaagctgagcttcagaagaagaaccgacaaggacaccgagcagcccggcgaggtgagcgccctgggccccggcagagccggcgccggccccagcagcagaggcagacccggcggcccctggggcgagagccccagcagcggccccagcagccccgagagcagcgaggacgagggccccggcagaagcagcagccccctgagactggtgcccttcagcagccccagaccccccggcgagccccccggcggcgagcccctgatggaggactgcgagaagagcagcgacacctgcaaccccctgagcggcgccttcagcggcgtgagcaacatcttcagcttctggggcgacagcagaggcagacagtaccaggagctgcccagatgccccgcccccacccccagcctgctgaacatccccctgagcagccccggcagaagacccagaggcgacgtggagagcagactggacgccctgcagagacagctgaacagactggagaccagactgagcgccgacatggccaccgtgctgcagctgctgcagagacagatgaccctggtgccccccgcctacagcgccgtgaccacccccggccccggccccaccagcaccagccccctgctgcccgtgagccccctgcccaccctgaccctggacagcctgagccaggtgagccagttcatggcctgcgaggagctgccccccggcgcccccgagctgccccaggagggccccaccagaagactgagcctgcccggccagctgggcgccctgaccagccagcccctgcacagacacggcagcgaccccggcagctag

SEQ ID NO: 307196 - protein, 249 aa, Artificial Sequence
  derived and/or modified sequence
MAWQVSLLELEDRLQCPICLEVFKESLMLQCGHSYCKGCLVSLSYHLDTKVRCPMCWQVVDGSSSLPNVSLAWVIEALRLPGDPEPKVCVHHRNPLSLFCEKDQELICGLCGLLGSHQHHPVTPVSTVCSRMKEELAALFSELKQEQKKVDELIAKLVKNRTRIVNESDVFSWVIRREFQELRHPVDEEKARCLEGIGGHTRGLVASLDMQLEQAQGTRERLAQAECVLEQFGNEDHHEFIWFHSMASR

SEQ ID NO: 307197 - protein, 249 aa, Artificial Sequence
  derived and/or modified sequence
MAWQVSLLELEDWLQCPICLEVFKESLMLQCGHSYCKGCLVSLSYHLDTKVRCPMCWQVVDGSSSLPNVSLAWVIEALRLPGDPEPKVCVHHRNPLSLFCEKDQELICGLCGLLGSHQHHPVTPVSTVCSRMKEELAALFSELKQEQKKVDELIAKLVKNRTRIVNESDVFSWVIRREFQELRHPVDEEKARCLEGIGGHTRGLVASLDMQLEQAQGTRERLAQAECVLEQFGNEDHHEFIWFHSMASR

SEQ ID NO: 307198 - DNA, 750 bp, Artificial Sequence
  derived and/or modified sequence
atggcctggcaggtgagcctgctggagctggaggacagactgcagtgccccatctgcctggaggtgttcaaggagagcctgatgctgcagtgcggccacagctactgcaagggctgcctggtgagcctgagctaccacctggacaccaaggtgagatgccccatgtgctggcaggtggtggacggcagcagcagcctgcccaacgtgagcctggcctgggtgatcgaggccctgagactgcccggcgaccccgagcccaaggtgtgcgtgcaccacagaaaccccctgagcctgttctgcgagaaggaccaggagctgatctgcggcctgtgcggcctgctgggcagccaccagcaccaccccgtgacccccgtgagcaccgtgtgcagcagaatgaaggaggagctggccgccctgttcagcgagctgaagcaggagcagaagaaggtggacgagctgatcgccaagctggtgaagaacagaaccagaatcgtgaacgagagcgacgtgttcagctgggtgatcagaagagagttccaggagctgagacaccccgtggacgaggagaaggccagatgcctggagggcatcggcggccacaccagaggcctggtggccagcctggacatgcagctggagcaggcccagggcaccagagagagactggcccaggccgagtgcgtgctggagcagttcggcaacgaggaccaccacgagttcatctggttccacagcatggccagcagatag

SEQ ID NO: 307199 - DNA, 750 bp, Artificial Sequence
  derived and/or modified sequence
atggcctggcaggtgagcctgctggagctggaggactggctgcagtgccccatctgcctggaggtgttcaaggagagcctgatgctgcagtgcggccacagctactgcaagggctgcctggtgagcctgagctaccacctggacaccaaggtgagatgccccatgtgctggcaggtggtggacggcagcagcagcctgcccaacgtgagcctggcctgggtgatcgaggccctgagactgcccggcgaccccgagcccaaggtgtgcgtgcaccacagaaaccccctgagcctgttctgcgagaaggaccaggagctgatctgcggcctgtgcggcctgctgggcagccaccagcaccaccccgtgacccccgtgagcaccgtgtgcagcagaatgaaggaggagctggccgccctgttcagcgagctgaagcaggagcagaagaaggtggacgagctgatcgccaagctggtgaagaacagaaccagaatcgtgaacgagagcgacgtgttcagctgggtgatcagaagagagttccaggagctgagacaccccgtggacgaggagaaggccagatgcctggagggcatcggcggccacaccagaggcctggtggccagcctggacatgcagctggagcaggcccagggcaccagagagagactggcccaggccgagtgcgtgctggagcagttcggcaacgaggaccaccacgagttcatctggttccacagcatggccagcagatag

SEQ ID NO: 307200 - DNA, 750 bp, Artificial Sequence
  derived and/or modified sequence
atggcttggcaagtaagtctgttagaactggaggacaggttgcaatgccctatatgtcttgaagtttttaaagagagtctcatgttacagtgcggtcattcctactgtaagggatgcttggtgtccctgagttaccatctcgatacaaaggtgcgatgcccaatgtgctggcaggtcgtcgacggcagctcctcgcttccgaacgtctcacttgcctgggtaatagaggctctccgcttgccgggagatcctgagcctaaggtgtgtgtccaccaccggaatccactgtccttgttttgcgagaaagaccaggagctgatatgtggcctgtgcggactgttgggatcccatcagcaccatcccgtgactcccgtatccaccgtctgtagtaggatgaaagaggagttagccgcgctgttcagtgagctgaagcaggaacagaagaaggtcgacgaattgattgcgaagctggttaagaaccgaacccggattgtcaatgagagtgacgtctttagctgggtcatccgtagggaattccaggagctgcggcatccagtcgacgaggagaaggctcggtgcctggagggaatcggcggccacacaagaggccttgtggcaagcctcgacatgcagctggagcaggcccaggggacacgcgagcgtctggcgcaggccgagtgcgtgctggagcagttcggtaatgaggatcaccatgagttcatctggtttcatagcatggccagcagatag

SEQ ID NO: 307201 - DNA, 750 bp, Artificial Sequence
  derived and/or modified sequence
atggcatggcaggtgtccctgttggaacttgaggattggctccagtgtccaatatgcttagaggtgtttaaggagtccctgatgcttcagtgtgggcactcttattgcaagggatgtttggtttccctcagttaccatcttgacacaaaggtgaggtgtcccatgtgctggcaggtggtagatggctcttcttcactgcccaacgtgtcactagcttgggtgatcgaagcacttaggctccctggagaccctgagcccaaggtctgcgtacaccacagaaatccacttagcctcttttgtgagaaagaccaggaactgatttgcggcctctgcggtctgctggggtcacaccagcaccatcccgttactcctgtgagcaccgtgtgttctcgaatgaaggaggagctcgccgcactgtttagtgagctcaaacaagagcagaaaaaggtagacgagcttattgctaaactggtaaagaacagaaccagaatcgtcaacgaaagtgatgttttctcctgggtcattcggcgggaatttcaagagctgcggcacccagtggacgaagaaaaagctagatgtctcgaaggaatcggaggccacacacgtgggctggtggcaagcctcgacatgcaactggaacaggcccagggaacgcgagagagactggcacaggcagagtgtgtcttggagcagttcgggaatgaagatcaccacgagtttatctggtttcatagtatggcctccaggtag

SEQ ID NO: 307202 - DNA, 750 bp, Artificial Sequence
  derived and/or modified sequence
atggcctggcaggtgtccctgctggagctggaggaccggctgcagtgccccatctgcctggaggtgttcaaggagagcctgatgctgcagtgtggccacagctactgcaagggctgcctggtgtccctgagctaccacctggacaccaaggtgcgctgccccatgtgctggcaggtggtggatggcagcagcagcctgcccaacgtgtccctggcctgggtgattgaggccctgcggctgcccggggaccctgagcccaaggtgtgtgtgcaccacaggaaccccctgagcctcttctgtgagaaggaccaggagctgatctgtggcctgtgtggcctgctgggcagccaccagcaccaccctgtgacccctgtgtccacagtgtgcagcaggatgaaggaggagctggccgccctcttcagcgagctgaagcaggagcagaagaaggtggatgagctgattgccaagctggtgaagaacagaacccgcatcgtgaatgaaagtgatgtgttctcctgggtgatccggcgggagttccaggagctgcggcaccctgtggatgaggagaaggcccgctgcctggagggcattggaggccacacccggggcctggtggccagcctggacatgcagctggagcaggcccagggcacccgggagcggctggcccaggccgagtgtgtgctggagcagtttggaaatgaagaccaccacgagttcatctggttccacagcatggccagcaggtag

SEQ ID NO: 307203 - DNA, 750 bp, Artificial Sequence
  derived and/or modified sequence
atggcctggcaggtgtccctgctggagctggaggactggctgcagtgccccatctgcctggaggtgttcaaggagagcctgatgctgcagtgtggccacagctactgcaagggctgcctggtgtccctgagctaccacctggacaccaaggtgcgctgccccatgtgctggcaggtggtggatggcagcagcagcctgcccaacgtgtccctggcctgggtgattgaggccctgcggctgcccggggaccctgagcccaaggtgtgtgtgcaccacaggaaccccctgagcctcttctgtgagaaggaccaggagctgatctgtggcctgtgtggcctgctgggcagccaccagcaccaccctgtgacccctgtgtccacagtgtgcagcaggatgaaggaggagctggccgccctcttcagcgagctgaagcaggagcagaagaaggtggatgagctgattgccaagctggtgaagaacagaacccgcatcgtgaatgaaagtgatgtgttctcctgggtgatccggcgggagttccaggagctgcggcaccctgtggatgaggagaaggcccgctgcctggagggcattggaggccacacccggggcctggtggccagcctggacatgcagctggagcaggcccagggcacccgggagcggctggcccaggccgagtgtgtgctggagcagtttggaaatgaagaccaccacgagttcatctggttccacagcatggccagcaggtag

SEQ ID NO: 307204 - DNA, 750 bp, Artificial Sequence
  derived and/or modified sequence
atggcctggcaggtgagcctgctggagctggaggaccggctgcagtgtccaatatgccttgaggtgtttaaggaaagcctcatgctgcagtgcggacatagctattgcaaaggctgcctagtgtcgctctcgtatcacttggacacgaaagtgcggtgtcctatgtgctggcaggtagtagacggctcctcaagtctgcctaatgtctcgttagcttgggtaatcgaagctttgcgcctacccggcgacccagaaccaaaagtctgcgtgcaccataggaatcctctgtctcttttttgcgaaaaggatcaagagctgatctgtggcttgtgtgggctcctgggctcccatcagcatcaccccgtgacccccgtatcaactgtgtgttcgcgcatgaaagaagaactggctgccctgtttagtgaattgaagcaggaacagaaaaaggtcgacgaacttatagccaagctggtcaaaaacaggacacgcattgtgaatgaatccgacgttttctcctgggtgataaggcgcgagttccaggagctaagacatcctgtggacgaagaaaaggcccggtgcctcgaaggtatcggtgggcatacgagaggcctggtcgcatccctggacatgcagctggagcaagcacaaggcacccgagagcgcctggcccaagctgagtgtgtgctcgagcaatttgggaatgaggatcaccatgagttcatctggtttcactccatggccagcagatag

SEQ ID NO: 307205 - DNA, 750 bp, Artificial Sequence
  derived and/or modified sequence
atggcctggcaggtgagcctgctggagctggaggactggctgcagtgtcctatctgcctagaggtcttcaaagagtcccttatgcttcagtgtgggcactcctactgtaaaggatgtctcgtttcgctgagctaccatctagacacaaaagtcaggtgtcccatgtgctggcaggttgttgacggatcatcaagccttcctaatgtgagtctggcttgggtgatagaggccttaaggctacccggcgaccctgagcccaaggtttgtgtacatcatagaaaccctctgtccctattctgtgagaaggaccaggagttgatttgtgggctatgcgggttgcttgggtctcaccagcaccaccctgttacacccgtgtctacagtttgtagccgaatgaaggaggaactggccgctttatttagtgaacttaaacaagaacagaagaaggtggacgaactgatcgcaaaacttgtgaagaacaggacacggatagtcaatgaaagtgacgtattctcatgggtgatccgacgggagtttcaggaacttcgtcacccggtggatgaagaaaaggctaggtgtttagaagggattggtggccatactagagggctggtcgcctccctggacatgcaactcgagcaggcgcaagggacgagggagcgcttagctcaggctgagtgcgtgctcgagcaattcggcaacgaggatcatcatgagtttatttggtttcattccatggcctctcgatag

SEQ ID NO: 307206 - DNA, 750 bp, Artificial Sequence
  derived and/or modified sequence
atggcctggcaggtcagcctgctggaactggaagaccgcctgcagtgccccatctgcctcgaggtgttcaaagagagtttgatgctgcagtgcggacattcctactgtaagggctgtctggtttctctttcgtatcatctggacacgaaggtaaggtgccccatgtgttggcaggtggtcgatggatctagctctctccctaacgtgagccttgcatgggtcatagaggcattacggttacccggtgatcccgaacctaaggtttgcgtccaccatcgaaatccgctgagtttattttgcgagaaagatcaagagctaatatgcggcctctgtggtctgcttggctcgcaccagcaccatcctgtgacccccgtgtccacagtttgcagtaggatgaaggaagagcttgcggcactattttcagagctgaaacaggagcagaagaaagtcgatgagctgattgccaaattggtaaagaaccgcaccaggatcgtaaacgaaagtgatgtgttctcctgggtaatccgccgagagttccaagagctgcgacatcccgtggatgaggagaaggcgagatgcctggaaggtataggcggacatactcgcggactcgtggcatctctggatatgcagcttgagcaggctcagggcacaagggagcgacttgcacaagcagagtgtgtcctggaacagttcgggaacgaggaccatcacgaatttatctggtttcactcaatggcctcccggtag

SEQ ID NO: 307207 - DNA, 750 bp, Artificial Sequence
  derived and/or modified sequence
atggcctggcaggtatccctgcttgagttggaagactggttacagtgtccgatttgtttagaggtcttcaaagaatcattaatgcttcaatgtggacattcctactgcaaagggtgccttgtcagtttgtcctaccacctggatacaaaagtcaggtgtccaatgtgttggcaagtggtcgatggctctagctcgctaccaaatgtgtcattggcctgggtgatagaagcattgcgattacccggagaccccgagcctaaagtgtgcgtccaccatcgaaatcccttatccctgttttgcgaaaaggatcaggagctgatatgtgggctttgtggcctcctggggtctcatcagcaccacccagtcacaccggtttccactgtgtgcagcaggatgaaggaggaattagcggcactattcagcgaactgaaacaggaacagaagaaagttgatgaacttattgcaaagctggtaaagaataggactcgcattgtgaatgagtcagatgtcttcagttgggtcattagacgggagtttcaggagctccgccatcctgtcgacgaagaaaaagccaggtgcctggagggaattggcggacataccagaggactggtagcctctcttgacatgcagctggaacaggctcaggggaccagagaaaggctagcacaggctgaatgcgtactcgagcaattcggcaatgaggatcaccacgagtttatctggttccatagcatggccagcagatag

SEQ ID NO: 307208 - DNA, 1286 bp, Artificial Sequence
  derived and/or modified sequence
ggcgtccagctgcacttcccacttctgactctgtgcctgctgttccctgctgggaagaagaaaagccagtgatgctggcttgaggctgtagtgggaggcccagcggattgtgagaagccagcccgggcagtgagtgtggatggcttggcaggtgagcctgctggagctggaggaccggcttcagtgtcccatctgcctggaggtcttcaaggagtccctaatgctacagtgcggccactcctactgcaagggctgcctggtttccctgtcctaccacctggacaccaaggtgcgctgccccatgtgctggcaggtggtggacggcagcagctccttgcccaacgtctccctggcctgggtgatcgaagccctgaggctccctggggacccagagcccaaggtctgcgtgcaccaccggaacccgctcagccttttctgcgagaaggaccaggagctcatctgtggcctctgcggtctgctgggctcccaccaacaccacccggtcacgcccgtctccaccgtctgcagccgcatgaaggaggagctcgcagccctcttctctgagctgaagcaggagcagaagaaggtggatgagctcatcgccaaactggtgaaaaaccggacccgaatcgtcaatgagtcggatgtcttcagctgggtgatccgccgcgagttccaggagctgcgccacccggtggacgaggagaaggcccgctgcctggaggggatagggggtcacacccgtggcctggtggcctccctggacatgcagctggagcaggcccagggaacccgggagcggctggcccaagccgagtgtgtgctggaacagttcggcaatgaggaccaccatgagttcatctggttccactccatggcctccaggtaataaccttggagagagctcagccagggtctggtggctgcgggcacgggcatctcagctccactggttcctccattcagcttaaccagcgcctcccaagcagctgcctatagctggctctataactgagcctggggaagatagaggaaagtcacatccctgccttcaagggtctcgcagacaggtggggaggcagatggtgaactgtgggtacctagaacagcagaagttcactcaagctacagaaatactagaggagggtagctcatgcctgcaatcccagtactttgggaggccaaggcaggagtattgctggaggccgggagttcgagaccagcctggccaatgtagtaacacccccgtctctacaaaaaatacaaaaataaaaaaattagttggg

SEQ ID NO: 307209 - DNA, 1286 bp, Artificial Sequence
  derived and/or modified sequence
ggcgtccagctgcacttcccacttctgactctgtgcctgctgttccctgctgggaagaagaaaagccagtgatgctggcttgaggccatagtgggaggcccagtggatcctgagaagctagcccgggcagtgagtgtggatggcttggcaggtgagcctgctggagctggaggactggcttcagtgtcccatctgcctggaggtcttcaaggagtccctaatgctacagtgcggccactcctactgcaagggctgcctggtttccctgtcctaccacctggacaccaaggtgcgctgccccatgtgctggcaggtggtggacggcagcagctccttgcccaacgtctccctggcctgggtgatcgaagccctgaggctccctggggacccggagcccaaggtctgcgtgcaccaccggaacccgctcagccttttctgcgagaaggaccaggagctcatctgtggcctctgcggtctgctgggctcccaccaacaccacccggtcacgcccgtctccaccgtctgcagccgcatgaaggaggagctcgcagccctcttctctgagctgaagcaggagcagaagaaggtggatgagctcatcgccaaactggtgaaaaaccggacccgaatcgtcaatgagtcggatgtcttcagctgggtgatccgccgcgagttccaggagctgcgccacccggtggacgaggagaaggcccgctgcctggaggggatagggggtcacacccgtggcctggtggcctccctggacatgcagctggagcaggcccagggaacccgggagcggctggcccaagccgagtgtgtgctggaacagttcggaaatgaggaccaccatgagttcatctggttccactccatggcctccaggtaataaccttggagagagctcagccagggtctggtggctgcgggcacgggcatctcagctccactggttcctccattcagcttaaccagcgcctcccaagcagctgcctatagctggctctataactgagcctggggaagatagaggaaagtcacgtccctgccttcaagggtctcgcagacaggtggggaggcagatggtgaactgtgggtacctagaacagcagaagttcactcaagctacagaaatactagaggagggtagctcatgcctgcaatcccagtactttgggaggccaaggcaggagtattgctggaggccgggagttcgagaccagcctggccaatgtagtaacacccccgtctctacaaaaaatacaaaaataaaaaaattagttggg

SEQ ID NO: 307210 - DNA, 417 bp, Artificial Sequence
  derived and/or modified sequence
atgatcttcccccagatctacctggactacttcaagatgcggcaggattattgccagagtctcaacgtgtggagttatcttccctggatcttcttcagcttcgggctcggtttcatcaacaacctgaatatcatttcttatcgaattacaaaggaagaggtgaacttgatccacctgcggttgcagccaaaaatccaatccaactcatctttttctctctcctgcttcttttttatgttcttactgcttattgctgccagaatcctgcacaggatctcaattgaaatgtacgaaatcctctggagcttgcacgtgcgcatagcccagtacgttactattcagtttcagagggagcccactttcgtccgcttcaccgatcagggggtcgtggaagaagtggaactgcagatacgttag

SEQ ID NO: 307211 - DNA, 550 bp, Artificial Sequence
  derived and/or modified sequence
ttctttgggctcgggggctcccggagcagggcgagagctcgcgtcgccgggtgaggagaacaaagtggctgcacgattttccccactttccagcccaccccccgcttccgtgggagcgacaggaaatggaagggcgcctcttctctctttgaacatttgccttttttcccctcctttccacctctccagaaaggaagacgggaagaaagggcaggcggctcggcgggcgtcttctccactcctctgccgcgtccccgtggctgcagggagccggcatggggcttctccagttgctagctttcagtttcttagccctgtgcagagcccgagtgcgcgctcaggaacccgagttcagctacggctgcgcagaaggcagctgctatcccgccacgggcgaccttctcatcggccgagcacagaagctttcggtgacctcgacgtgcgggctgcacaagcccgaaccctactgtatcgtcagccacttgcaggaggacaaaaaatgcttcatatgcaattcccaagatccttatcatgagaccctgaatcctga

SEQ ID NO: 307212 - protein, 516 aa, Artificial Sequence
  derived and/or modified sequence
MPTLDAPEERRRKFKYRGKDVSLRRQQRMAVSLELRKAKKDEQTLKRRNITSFCPDTPSEKTAKGVAVSLTLGEIIKGVNSSDPVLCFQATQTARKMLSQEKNPPLKLVIEAGLIPRMVEFLKSSLYPCLQFEAAWALTNIASGTSEQTRAVVEGGAIQPLIELLSSSNVAVCEQAVWALGNIAGDGPEFRDNVITSNAIPHLLALISPTLPITFLRNITWTLSNLCRNKNPYPCDTAVKQILPALLHLLQHQDSEVLSDACWALSYLTDGSNKRIGQVVNTGVLPRLVVLMTSSELNVLTPSLRTVGNIVTGTDEQTQMAIDAGMLNVLPQLLQHNKPSIQKEAAWALSNVAAGPCHHIQQLLAYDVLPPLVALLKNGEFKVQKEAVWMVANFATGATMDQLIQLVHSGVLEPLVNLLTAPDVKIVLIILDVISCILQAAEKRSEKENLCLLIEELGGIDRIEALQLHENRQIGQSALNIIEKHFGEEEDESQTLLSQVIDQDYEFIDYECLAKK

SEQ ID NO: 307213 - DNA, 1725 bp, Artificial Sequence
  derived and/or modified sequence
tgctgtccaacctgcaggtaacttactacttccagtcaatatgccgaccttagatgctccagaagagaggcggagaaaatttaagtaccgaggcaaagatgtgtctctgaggcgacagcagaggatggcggtcagtctggagctccgaaaggccaagaaagatgaacagaccttaaagagaaggaatatcacgagcttctgccctgacacaccttctgaaaaaacagccaaaggggtggcggtcagcctcactctgggtgaaataatcaaaggtgtgaatagctcagatccagtcctatgtttccaggccacccagacagccaggaaaatgctatcccaggaaaagaacccccctctgaaactggtcattgaagcgggcctcattcccaggatggtggagttcctgaagtcatcactttacccctgcttgcagtttgaggctgcctgggccctgaccaacatcgcttcagggacttcggagcagactcgtgccgtggtagaagggggagccatccagcccttgattgagctcctgtcttcctccaacgtggctgtgtgtgaacaggcagtgtgggctcttggtaatatagccggtgatggcccagagttcagagataacgtcatcacaagcaatgccatcccacatctcctagccttgatttcacccaccctgccgatcacatttctgcggaacatcacgtggaccttgtcgaatctgtgccgaaacaagaacccatacccttgcgacactgcggtgaagcagatactgccggccctccttcacctcctgcagcaccaggacagtgaggttctctcggatgcctgctgggcactgtcctacctcaccgacggctccaacaagcgcatcggccaagtggttaacacgggggtcctgcccaggctggtagtgctcatgaccagctcagaactcaatgtcttgactccttctctccgcaccgtggggaacattgtcacgggcacagatgagcagacgcagatggccattgatgcgggtatgctgaacgtgctcccccagctcctgcaacacaacaagccctccatccagaaggaggcagcctgggccctgagcaacgtagcagcggggccttgtcaccacatccagcagctgcttgcctacgacgtcttgcctcccttggtggctctgctaaaaaacggagaatttaaagtccagaaagaggctgtctggatggtggcgaactttgcaacaggggccaccatggatcagctgatccagctcgtccactctggggtcctggagccactggtgaatctgctcactgccccagatgttaaaattgttctcatcatccttgatgtcatctcttgcatcctccaggcggcagagaaacggtctgagaaggaaaacctgtgtcttctgatagaagaacttggtgggatcgatagaattgaggctttacagctgcatgagaaccgtcaaattggccagtcggctttgaacatcatcgagaagcactttggtgaggaagaagatgagagccaaactttactgagccaagtcatagaccaagattatgaatttatagattatgaatgcttagcaaaaaaatagccaagctccctacctcctaaaccaacaacccagtgctaaaggataacttctttaagaagcagcagtcctctatcttagtgtaacccaaatgtgaagcttttaaaacttgacattaataaaatgttcaacacttt

SEQ ID NO: 307214 - protein, 292 aa, Artificial Sequence
  derived and/or modified sequence
MREWWVQVGLLAVPLLAAYLHIPPPQLSPALHSWKSSGKFFTYKGLRIFYQDSVGVVGSPEIVVLLHGFPTSSYDWYKIWEGLTLRFHRVIALDFLGFGFSDKPRPHHYSIFEQASIVEALLRHLGLQNRRINLLSHDYGDIVAQELLYRYKQNRSGRLTIKSLCLSNGGIFPETHRPLLLQKLLKDGGVLSPILTRLMNFFVFSRGLLQYINQRKKFRRRWVGALASVTIPIHFIYGPLDPVNPYPEFLELYRKTLPRSTVSILDDHISHYPQLEDPMGFLNAYMGFINSF

SEQ ID NO: 307215 - protein, 118 aa, Artificial Sequence
  derived and/or modified sequence
MREWWVQVGLLAVPLLAAYLHIPPPQLSPALHSWKSSGKFFTYKGLRIFYQDSVGVVGSPEIVVLLHGFPTSSYDWYKIWEGLTLRFHRVIALDFLGFGFSDKPRPHHYSIFEQASIV

SEQ ID NO: 307216 - protein, 160 aa, Artificial Sequence
  derived and/or modified sequence
MREWWVQVGLLAVPLLAAYLHIPPPQLSPALHSWKSSGKFFTYKGLRIFYQDSVGVVGSPEIVVLLHGFPTSSYDWYKIWEGLTLRFHRVIALDFLGFGFSDKPRPHHYSIFEQASIVEALLRHLGLQNRRINLLSHDYGDIVAQELLYRYKQNRSGRLT

SEQ ID NO: 307217 - protein, 127 aa, Artificial Sequence
  derived and/or modified sequence
MREWWVQVGLLAVPLLAAYLHIPPPQLSPALHSWKSSGKFFTYKGLRIFYQDSVGVVGSPEIVVLLHGFPTSSYDWYKIWEGLTLRFHRVIALDFLGFGFSDKPRPHHYSIFEQASIVEALLRHLGL

SEQ ID NO: 307218 - protein, 173 aa, Artificial Sequence
  derived and/or modified sequence
MREWWVQVGLLAVPLLAAYLHIPPPQLSPALHSWKSSGKFFTYKGLRIFYQDSVGVVGSPEIVVLLHGFPTSSYDWYKIWEGLTLRFHRVIALDFLGFGFSDKPRPHHYSIFEQASIVEALLRHLGLQNRRINLLSHDYGDIVAQELLYRYKQNRSGRLTIKSLCLSNGGNCL

SEQ ID NO: 307219 - DNA, 2158 bp, Artificial Sequence
  derived and/or modified sequence
ccgaaacatggagtcctgtaggcaaggtcttacctgaatcaggatgagggagtggtgggtccaggtggggctgctggccgtgcccctgcttgctgcgtacctgcacatcccaccccctcagctctcccctgcccttcactcatggaagtcttcaggcaagtttttcacttacaagggactgcgtatcttctaccaagactctgtgggtgtggttggaagtccagagatagttgtgcttttacacggttttccaacatccagctacgactggtacaagatttgggaaggtctgaccttgaggtttcatcgggtgattgcccttgatttcttaggctttggcttcagtgacaaaccgagaccacatcactattccatatttgagcaggccagcatcgtggaagcgcttttgcggcatctggggctccagaaccgcaggatcaaccttctttctcatgactatggagatattgttgctcaggagcttctctacaggtacaagcagaatcgatctggtcggcttaccataaagagtctctgtctgtcaaatggaggtatctttcctgagactcaccgtccactccttctccaaaagctactcaaagatggaggtgtgctgtcacccatcctcacacgactgatgaacttctttgtattctctcgaggtctcttacagtacatcaatcagaggaagaagttcagaaggcgctgggtgggagctcttgcctctgtaactatccccattcattttatctatgggccattggatcctgtaaatccctatccagagtttttggagctgtacaggaaaacgctgccgcggtccacagtgtcgattctggatgaccacattagccactatccacagctagaggatcccatgggcttcttgaatgcatatatgggcttcatcaactccttctgagctggaaagagtagcttccctgtattacctcccctactcccttatgtgttgtgtattccacttaggaagaaatgcccaaaagaggtcctggccatcaaacataattctctcacaaagtccactttactcaaattggtgaacagtgtataggaagaagccagcaggagctctgactaaggttgacataatagtccacctcccattactttgatatctgatcaaatgtatagacttggctttgttttttgtgctattaggaaattctgatgagcattactattcactgatgcagaaagacgttcttttgcataaaagacttttttttaacactttggacttctctgaaatatttagaagtgctaatttctggcccacccccaacaggaattctatagtaaggaggaggagaaggggggctccttccctctcctcgaatgacgttatgggcacatgccttttaaaagttctttaagcaacacagagctgagtcctctttgtcatacctttggatttagtgtttcatcagctgtttttagttataaacattttgttaaaatagatattggtttaaatgatacagtattttaggtatgatttaagactatgatttacctatacattatatatattttataaagatactaaaccagcatacccttactctgccagagtagtgaagctaattaaacacatttggtttctgaataaattgaactaaatccaaactatttcctaaaatcacaggacattaaggaccaatagcatctgtgccagagatgtactgttattagctgggaagaccaattctaacagcaaataacagtctgagactcctcatacctcagtggttagaagcatgtctctcttgagctacagtagaggggaagggattgttgtgtagtcaagtcaccatgctgaatgtacactgattcctttatgatgactgcttaactccccactgcctgtcccagagaggctttccaatgtagctcagtaattcctgttactttacagacaggaaagttccagaaactttaagaacaaactctgaaagacctatgagcaaatggtgctgaatactttttttttaaagccacatttcattgtcttagtcaaagcaggattattaagtgattatttaaaattcgtttttttaaattagcaacttcaagtataacaactttgaaactggaataagtgtttattttctattaataaaaatgaattgtgacaaaa

SEQ ID NO: 307220 - DNA, 2180 bp, Artificial Sequence
  derived and/or modified sequence
ccgaaacatggagtcctgtaggcaaggtcttacctgaatcagtgggtctctgcttttcctacaggatgagggagtggtgggtccaggtggggctgctggccgtgcccctgcttgctgcgtacctgcacatcccaccccctcagctctcccctgcccttcactcatggaagtcttcaggcaagtttttcacttacaagggactgcgtatcttctaccaagactctgtgggtgtggttggaagtccagagatagttgtgcttttacacggttttccaacatccagctacgactggtacaagatttgggaaggtctgaccttgaggtttcatcgggtgattgcccttgatttcttaggctttggcttcagtgacaaaccgagaccacatcactattccatatttgagcaggccagcatcgtggaagcgcttttgcggcatctggggctccagaaccgcaggatcaaccttctttctcatgactatggagatattgttgctcaggagcttctctacaggtacaagcagaatcgatctggtcggcttaccataaagagtctctgtctgtcaaatggaggtatctttcctgagactcaccgtccactccttctccaaaagctactcaaagatggaggtgtgctgtcacccatcctcacacgactgatgaacttctttgtattctctcgaggtctcttacagtacatcaatcagaggaagaagttcagaaggcgctgggtgggagctcttgcctctgtaactatccccattcattttatctatgggccattggatcctgtaaatccctatccagagtttttggagctgtacaggaaaacgctgccgcggtccacagtgtcgattctggatgaccacattagccactatccacagctagaggatcccatgggcttcttgaatgcatatatgggcttcatcaactccttctgagctggaaagagtagcttccctgtattacctcccctactcccttatgtgttgtgtattccacttaggaagaaatgcccaaaagaggtcctggccatcaaacataattctctcacaaagtccactttactcaaattggtgaacagtgtataggaagaagccagcaggagctctgactaaggttgacataatagtccacctcccattactttgatatctgatcaaatgtatagacttggctttgttttttgtgctattaggaaattctgatgagcattactattcactgatgcagaaagacgttcttttgcataaaagacttttttttaacactttggacttctctgaaatatttagaagtgctaatttctggcccacccccaacaggaattctatagtaaggaggaggagaaggggggctccttccctctcctcgaatgacgttatgggcacatgccttttaaaagttctttaagcaacacagagctgagtcctctttgtcatacctttggatttagtgtttcatcagctgtttttagttataaacattttgttaaaatagatattggtttaaatgatacagtattttaggtatgatttaagactatgatttacctatacattatatatattttataaagatactaaaccagcatacccttactctgccagagtagtgaagctaattaaacacatttggtttctgaataaattgaactaaatccaaactatttcctaaaatcacaggacattaaggaccaatagcatctgtgccagagatgtactgttattagctgggaagaccaattctaacagcaaataacagtctgagactcctcatacctcagtggttagaagcatgtctctcttgagctacagtagaggggaagggattgttgtgtagtcaagtcaccatgctgaatgtacactgattcctttatgatgactgcttaactccccactgcctgtcccagagaggctttccaatgtagctcagtaattcctgttactttacagacaggaaagttccagaaactttaagaacaaactctgaaagacctatgagcaaatggtgctgaatactttttttttaaagccacatttcattgtcttagtcaaagcaggattattaagtgattatttaaaattcgtttttttaaattagcaacttcaagtataacaactttgaaactggaataagtgtttattttctattaataaaaatgaattgtgacaaaa

SEQ ID NO: 307221 - DNA, 390 bp, Artificial Sequence
  derived and/or modified sequence
tggttcagggagggggacagctgaagaaggtgtgaggatgagggagtggtgggtccaggtggggctgctggccgtgcccctgcttgctgcgtacctgcacatcccaccccctcagctctcccctgcccttcactcatggaagtcttcaggcaagtttttcacttacaagggactgcgtatcttctaccaagactctgtgggtgtggttggaagtccagagatagttgtgcttttacacggttttccaacatccagctacgactggtacaagatttgggaaggtctgaccttgaggtttcatcgggtgattgcccttgatttcttaggctttggcttcagtgacaaaccgagaccacatcactattccatatttgagcaggccagcatcgt

SEQ ID NO: 307222 - DNA, 555 bp, Artificial Sequence
  derived and/or modified sequence
attccgcgcccgctctgcctacttgaggagggggtgtcactcctgcccgcaatggaatgttcagaacgcgggacctccttgggttaggatttctagaccccgggatcgtcgtgggattgttcaccttggtttcgcgggttttcaaagtggttcgtctcgcggcgacgccatcaggatgagggagtggtgggtccaggtggggctgctggccgtgcccctgcttgctgcgtacctgcacatcccaccccctcagctctcccctgcccttcactcatggaagtcttcaggcaagtttttcacttacaagggactgcgtatcttctaccaagactctgtgggtgtggttggaagtccagagatagttgtgcttttacacggttttccaacatccagctacgactggtacaagatttgggaaggtctgaccttgaggtttcatcgggtgattgcccttgatttcttaggctttggcttcagtgacaaaccgagaccacatcactattccatatttgagcaggccagcatcgtggaagcgcttttgcggcatctggggct

SEQ ID NO: 307223 - protein, 1390 aa, Artificial Sequence
  derived and/or modified sequence
MKAPAVLAPGILVLLFTLVQRSNGECKEALAKSEMNVNMKYQLPNFTAETPIQNVILHEHHIFLGATNYIYVLNEEDLQKVAEYKTGPVLEHPDCFPCQDCSSKANLSGGVWKDNINMALVVDTYYDDQLISCGSVNRGTCQRHVFPHNHTADIQSEVHCIFSPQIEEPSQCPDCVVSALGAKVLSSVKDRFINFFVGNTINSSYFPDHPLHSISVRRLKETKDGFMFLTDQSYIDVLPEFRDSYPIKYVHAFESNNFIYFLTVQRETLDAQTFHTRIIRFCSINSGLHSYMEMPLECILTEKRKKRSTKKEVFNILQAAYVSKPGAQLARQIGASLNDDILFGVFAQSKPDSAEPMDRSAMCAFPIKYVNDFFNKIVNKNNVRCLQHFYGPNHEHCFNRTLLRNSSGCEARRDEYRTEFTTALQRVDLFMGQFSEVLLTSISTFIKGDLTIANLGTSEGRFMQVVVSRSGPSTPHVNFLLDSHPVSPEVIVEHTLNQNGYTLVITGKKITKIPLNGLGCRHFQSCSQCLSAPPFVQCGWCHDKCVRSEECLSGTWTQQICLPAIYKVFPNSAPLEGGTRLTICGWDFGFRRNNKFDLKKTRVLLGNESCTLTLSESTMNTLKCTVGPAMNKHFNMSIIISNGHGTTQYSTFSYVDPVITSISPKYGPMAGGTLLTLTGNYLNSGNSRHISIGGKTCTLKSVSNSILECYTPAQTISTEFAVKLKIDLANRETSIFSYREDPIVYEIHPTKSFISGGSTITGVGKNLNSVSVPRMVINVHEAGRNFTVACQHRSNSEIICCTTPSLQQLNLQLPLKTKAFFMLDGILSKYFDLIYVHNPVFKPFEKPVMISMGNENVLEIKGNDIDPEAVKGEVLKVGNKSCENIHLHSEAVLCTVPNDLLKLNSELNIEWKQAISSTVLGKVIVQPDQNFTGLIAGVVSISTALLLLLGFFLWLKKRKQIKDLGSELVRYDARVHTPHLDRLVSARSVSPTTEMVSNESVDYRATFPEDQFPNSSQNGSCRQVQYPLTDMSPILTSGDSDISSPLLQNTVHIDLSALNPELVQAVQHVVIGPSSLIVHFNEVIGRGHFGCVYHGTLLDNDGKKIHCAVKSLNRITDIGEVSQFLTEGIIMKDFSHPNVLSLLGICLRSEGSPLVVLPYMKHGDLRNFIRNETHNPTVKDLIGFGLQVAKGMKYLASKKFVHRDLAARNCMLDEKFTVKVADFGLARDMYDKEYYSVHNKTGAKLPVKWMALESLQTQKFTTKSDVWSFGVLLWELMTRGAPPYPDVNTFDITVYLLQGRRLLQPEYCPDPLYEVMLKCWHPKAEMRPSFSELVSRISAIFSTFIGEHYVHVNATYVNVKCVAPYPSLLSSEDNADDEVDTRPASFWETS

SEQ ID NO: 307224 - protein, 764 aa, Artificial Sequence
  derived and/or modified sequence
MKAPAVLAPGILVLLFTLVQRSNGECKEALAKSEMNVNMKYQLPNFTAETPIQNVILHEHHIFLGATNYIYVLNEEDLQKVAEYKTGPVLEHPDCFPCQDCSSKANLSGGVWKDNINMALVVDTYYDDQLISCGSVNRGTCQRHVFPHNHTADIQSEVHCIFSPQIEEPSQCPDCVVSALGAKVLSSVKDRFINFFVGNTINSSYFPDHPLHSISVRRLKETKDGFMFLTDQSYIDVLPEFRDSYPIKYVHAFESNNFIYFLTVQRETLDAQTFHTRIIRFCSINSGLHSYMEMPLECILTEKRKKRSTKKEVFNILQAAYVSKPGAQLARQIGASLNDDILFGVFAQSKPDSAEPMDRSAMCAFPIKYVNDFFNKIVNKNNVRCLQHFYGPNHEHCFNRTLLRNSSGCEARRDEYRTEFTTALQRVDLFMGQFSEVLLTSISTFIKGDLTIANLGTSEGRFMQVVVSRSGPSTPHVNFLLDSHPVSPEVIVEHTLNQNGYTLVITGKKITKIPLNGLGCRHFQSCSQCLSAPPFVQCGWCHDKCVRSEECLSGTWTQQICLPAIYKVFPNSAPLEGGTRLTICGWDFGFRRNNKFDLKKTRVLLGNESCTLTLSESTMNTLKCTVGPAMNKHFNMSIIISNGHGTTQYSTFSYVDPVITSISPKYGPMAGGTLLTLTGNYLNSGNSRHISIGGKTCTLKSVSNSILECYTPAQTISTEFAVKLKIDLANRETSIFSYREDPIVYEIHPTKSFIRHVNIALIQR

SEQ ID NO: 307225 - DNA, 6635 bp, Artificial Sequence
  derived and/or modified sequence
aggtgacccggaggccctcgccgcccgcggcgccccgagcgctttgtgagcagatgcggagccgagtggagggcgcgagccagatgcggggcgacagctgacttgctgagaggaggcggggaggcgcggagcgcgcgtgtggtccttgcgccgctgacttctccactggttcctgggcaccgaaagataaacctctcataatgaaggcccccgctgtgcttgcacctggcatcctcgtgctcctgtttaccttggtgcagaggagcaatggggagtgtaaagaggcactagcaaagtccgagatgaatgtgaatatgaagtatcagcttcccaacttcaccgcggaaacacccatccagaatgtcattctacatgagcatcacattttccttggtgccactaactacatttatgttttaaatgaggaagaccttcagaaggttgctgagtacaagactgggcctgtgctggaacacccagattgtttcccatgtcaggactgcagcagcaaagccaatttatcaggaggtgtttggaaagataacatcaacatggctctagttgtcgacacctactatgatgatcaactcattagctgtggcagcgtcaacagagggacctgccagcgacatgtctttccccacaatcatactgctgacatacagtcggaggttcactgcatattctccccacagatagaagagcccagccagtgtcctgactgtgtggtgagcgccctgggagccaaagtcctttcatctgtaaaggaccggttcatcaacttctttgtaggcaataccataaattcttcttatttcccagatcatccattgcattcgatatcagtgagaaggctaaaggaaacgaaagatggttttatgtttttgacggaccagtcctacattgatgttttacctgagttcagagattcttaccccattaagtatgtccatgcctttgaaagcaacaattttatttacttcttgacggtccaaagggaaactctagatgctcagacttttcacacaagaataatcaggttctgttccataaactctggattgcattcctacatggaaatgcctctggagtgtattctcacagaaaagagaaaaaagagatccacaaagaaggaagtgtttaatatacttcaggctgcgtatgtcagcaagcctggggcccagcttgctagacaaataggagccagcctgaatgatgacattcttttcggggtgttcgcacaaagcaagccagattctgccgaaccaatggatcgatctgccatgtgtgcattccctatcaaatatgtcaacgacttcttcaacaagatcgtcaacaaaaacaatgtgagatgtctccagcatttttacggacccaatcatgagcactgctttaataggacacttctgagaaattcatcaggctgtgaagcgcgccgtgatgaatatcgaacagagtttaccacagctttgcagcgcgttgacttattcatgggtcaattcagcgaagtcctcttaacatctatatccaccttcattaaaggagacctcaccatagctaatcttgggacatcagagggtcgcttcatgcaggttgtggtttctcgatcaggaccatcaacccctcatgtgaattttctcctggactcccatccagtgtctccagaagtgattgtggagcatacattaaaccaaaatggctacacactggttatcactgggaagaagatcacgaagatcccattgaatggcttgggctgcagacatttccagtcctgcagtcaatgcctctctgccccaccctttgttcagtgtggctggtgccacgacaaatgtgtgcgatcggaggaatgcctgagcgggacatggactcaacagatctgtctgcctgcaatctacaaggttttcccaaatagtgcaccccttgaaggagggacaaggctgaccatatgtggctgggactttggatttcggaggaataataaatttgatttaaagaaaactagagttctccttggaaatgagagctgcaccttgactttaagtgagagcacgatgaatacattgaaatgcacagttggtcctgccatgaataagcatttcaatatgtccataattatttcaaatggccacgggacaacacaatacagtacattctcctatgtggatcctgtaataacaagtatttcgccgaaatacggtcctatggctggtggcactttacttactttaactggaaattacctaaacagtgggaattctagacacatttcaattggtggaaaaacatgtactttaaaaagtgtgtcaaacagtattcttgaatgttataccccagcccaaaccatttcaactgagtttgctgttaaattgaaaattgacttagccaaccgagagacaagcatcttcagttaccgtgaagatcccattgtctatgaaattcatccaaccaaatcttttattagtggtgggagcacaataacaggtgttgggaaaaacctgaattcagttagtgtcccgagaatggtcataaatgtgcatgaagcaggaaggaactttacagtggcatgtcaacatcgctctaattcagagataatctgttgtaccactccttccctgcaacagctgaatctgcaactccccctgaaaaccaaagcctttttcatgttagatgggatcctttccaaatactttgatctcatttatgtacataatcctgtgtttaagccttttgaaaagccagtgatgatctcaatgggcaatgaaaatgtactggaaattaagggaaatgatattgaccctgaagcagttaaaggtgaagtgttaaaagttggaaataagagctgtgagaatatacacttacattctgaagccgttttatgcacggtccccaatgacctgctgaaattgaacagcgagctaaatatagagtggaagcaagcaatttcttcaaccgtccttggaaaagtaatagttcaaccagatcagaatttcacaggattgattgctggtgttgtctcaatatcaacagcactgttattactacttgggtttttcctgtggctgaaaaagagaaagcaaattaaagatctgggcagtgaattagttcgctacgatgcaagagtacacactcctcatttggataggcttgtaagtgcccgaagtgtaagcccaactacagaaatggtttcaaatgaatctgtagactaccgagctacttttccagaagatcagtttcctaattcatctcagaacggttcatgccgacaagtgcagtatcctctgacagacatgtcccccatcctaactagtggggactctgatatatccagtccattactgcaaaatactgtccacattgacctcagtgctctaaatccagagctggtccaggcagtgcagcatgtagtgattgggcccagtagcctgattgtgcatttcaatgaagtcataggaagagggcattttggttgtgtatatcatgggactttgttggacaatgatggcaagaaaattcactgtgctgtgaaatccttgaacagaatcactgacataggagaagtttcccaatttctgaccgagggaatcatcatgaaagattttagtcatcccaatgtcctctcgctcctgggaatctgcctgcgaagtgaagggtctccgctggtggtcctaccatacatgaaacatggagatcttcgaaatttcattcgaaatgagactcataatccaactgtaaaagatcttattggctttggtcttcaagtagccaaaggcatgaaatatcttgcaagcaaaaagtttgtccacagagacttggctgcaagaaactgtatgctggatgaaaaattcacagtcaaggttgctgattttggtcttgccagagacatgtatgataaagaatactatagtgtacacaacaaaacaggtgcaaagctgccagtgaagtggatggctttggaaagtctgcaaactcaaaagtttaccaccaagtcagatgtgtggtcctttggcgtgctcctctgggagctgatgacaagaggagccccaccttatcctgacgtaaacacctttgatataactgtttacttgttgcaagggagaagactcctacaacccgaatactgcccagaccccttatatgaagtaatgctaaaatgctggcaccctaaagccgaaatgcgcccatccttttctgaactggtgtcccggatatcagcgatcttctctactttcattggggagcactatgtccatgtgaacgctacttatgtgaacgtaaaatgtgtcgctccgtatccttctctgttgtcatcagaagataacgctgatgatgaggtggacacacgaccagcctccttctgggagacatcatagtgctagtactatgtcaaagcaacagtccacactttgtccaatggttttttcactgcctgacctttaaaaggccatcgatattctttgctcttgccaaaattgcactattataggacttgtattgttatttaaattactggattctaaggaatttcttatctgacagagcatcagaaccagaggcttggtcccacaggccacggaccaatggcctgcagccgtgacaacactcctgtcatattggagtccaaaacttgaattctgggttgaattttttaaaaatcaggtaccacttgatttcatatgggaaattgaagcaggaaatattgagggcttcttgatcacagaaaactcagaagagatagtaatgctcaggacaggagcggcagccccagaacaggccactcatttagaattctagtgtttcaaaacacttttgtgtgttgtatggtcaataacatttttcattactgatggtgtcattcacccattaggtaaacattcccttttaaatgtttgtttgttttttgagacaggatctcactctgttgccagggctgtagtgcagtggtgtgatcatagctcactgcaacctccacctcccaggctcaagcctcccgaatagctgggactacaggcgcacaccaccatccccggctaatttttgtattttttgtagagacggggttttgccatgttgccaaggctggtttcaaactcctggactcaagaaatccacccacctcagcctcccaaagtgctaggattacaggcatgagccactgcgcccagcccttataaatttttgtatagacattcctttggttggaagaatatttataggcaatacagtcaaagtttcaaaatagcatcacacaaaacatgtttataaatgaacaggatgtaatgtacatagatgacattaagaaaatttgtatgaaataatttagtcatcatgaaatatttagttgtcatataaaaacccactgtttgagaatgatgctactctgatctaatgaatgtgaacatgtagatgttttgtgtgtatttttttaaatgaaaactcaaaataagacaagtaatttgttgataaatatttttaaagataactcagcatgtttgtaaagcaggatacattttactaaaaggttcattggttccaatcacagctcataggtagagcaaagaaagggtggatggattgaaaagattagcctctgtctcggtggcaggttcccacctcgcaagcaattggaaacaaaacttttggggagttttattttgcattagggtgtgttttatgttaagcaaaacatactttagaaacaaatgaaaaaggcaattgaaaatcccagctatttcacctagatggaatagccaccctgagcagaactttgtgatgcttcattctgtggaattttgtgcttgctactgtatagtgcatgtggtgtaggttactctaactggttttgtcgacgtaaacatttaaagtgttatattttttataaaaatgtttatttttaatgatatgagaaaaattttgttaggccacaaaaacactgcactgtgaacattttagaaaaggtatgtcagactgggattaatgacagcatgattttcaatgactgtaaattgcgataaggaaatgtactgattgccaatacaccccaccctcattacatcatcaggacttgaagccaagggttaacccagcaagctacaaagagggtgtgtcacactgaaactcaatagttgagtttggctgttgttgcaggaaaatgattataactaaaagctctctgatagtgcagagacttaccagaagacacaaggaattgtactgaagagctattacaatccaaatattgccgtttcataaatgtaataagtaatactaattcacagagtattgtaaatggtggatgacaaaagaaaatctgctctgtggaaagaaagaactgtctctaccagggtcaagagcatgaacgcatcaatagaaagaactcggggaaacatcccatcaacaggactacacacttgtatatacattcttgagaacactgcaatgtgaaaatcacgtttgctatttataaacttgtccttagattaatgtgtctggacagattgtgggagtaagtgattcttctaagaattagatacttgtcactgcctatacctgcagctgaactgaatggtacttcgtatgttaatagttgttctgataaatcatgcaattaaagtaaagtgatgcaacatcttgta

SEQ ID NO: 307226 - protein, 93 aa, Artificial Sequence
  derived and/or modified sequence
MLGLVMSCPDRTLVTKVRSHPSGNQHRPTRGGSRSFHCRRGVPRPAALRVLPRCPAFSDAACPAAMRPPQCLLHTPSLASPLLLLLLWLLGGG

SEQ ID NO: 307227 - DNA, 282 bp, Artificial Sequence
  derived and/or modified sequence
atgctggggctagtgatgtcttgccctgaccgtactctggttaccaaggttagatcacatccatctggcaatcagcatcggccgactcggggtggcagtagatcctttcactgcagaaggggtgtcccacggcccgctgccctgagggtattacccaggtgccccgcattttcagacgccgcatgcccggcagccatgcggcctccccaatgtctgctacatactccatcgctcgcctctcccctgctcttgttgctgctctggctgttgggaggtgggtag

SEQ ID NO: 307228 - DNA, 282 bp, Artificial Sequence
  derived and/or modified sequence
atgctgggcctggtgatgagctgcccagacaggaccctggtgaccaaggtgcgcagccaccccagcggcaaccagcaccggcccacccggggcggcagccgctccttccactgcagaagaggagtgcccaggcctgctgccctgcgggtgctgccccgctgcccagccttcagtgatgctgcctgcccagctgccatgaggcctccccagtgcctgctgcacacccccagcctggccagccccctgctgctgctgctgctgtggctgctgggcggcggctag

SEQ ID NO: 307229 - DNA, 282 bp, Artificial Sequence
  derived and/or modified sequence
atgttgggacttgtcatgagttgccccgaccggacactggtcaccaaggtgcgatctcatcctagcggtaaccagcacagacccacccgcggaggctctcgctcattccattgtaggagaggcgtgcctcgaccggcagccctgagagtcctgccccgatgccccgcattcagcgatgccgcttgcccggctgcgatgcgtccacctcagtgcctcttacacacgcctagcttggcctccccactgcttttgctcctgctttggctattagggggtggctag

SEQ ID NO: 307230 - DNA, 585 bp, Artificial Sequence
  derived and/or modified sequence
gtccctgcgtttgtctgtgcctgtcactgcatgaggtcgtccgtctgcgcgtgtctgtctccacgggcttctgtccgtctgtctgtcacacgccgcctgccctgcagccatgaggcccccgcagtgtctgctgcacacgccttccctggcttccccactccttctcctcctcctctggctcctgggtggaggagtgggggctgagggccgggaggatgcagagctgctggtgacggtgcgtgggggccggctgcggggcattcgcctgaagacccccgggggccctgtctctgctttcctgggcatcccctttgcggagccacccatgggaccccgtcgctttctgccaccggagcccaagcagccttggtcaggggtggtagacgctacaaccttccagagtgtctgctaccaatatgtggacaccctatacccaggttttgagggcaccgagatgtggaaccccaaccgtgagctgagcgaggactgcctgtacctcaacgtgtggacaccatacccccggcctacatcccccacccctgtcctcgtctggatctatgggggtggcttctacagtggggcctc

SEQ ID NO: 307231 - DNA, 153 bp, Artificial Sequence
  derived and/or modified sequence
cctcgcccagcagccttgcgcgtgctaccacgctgtcctgccttctcagacgccgcctgccctgcagccatgaggcccccgcagtgtctgctgcacacgccttccctggcttccccactccttctcctcctcctctggctcctgggtggagga

SEQ ID NO: 307232 - DNA, 282 bp, Artificial Sequence
  derived and/or modified sequence
atgctgggcctggtgatgagctgccccgacagaaccctggtgaccaaggtgagaagccaccccagcggcaaccagcacagacccaccagaggcggcagcagaagcttccactgcagaagaggcgtgcccagacccgccgccctgagagtgctgcccagatgccccgccttcagcgacgccgcctgccccgccgccatgagacccccccagtgcctgctgcacacccccagcctggccagccccctgctgctgctgctgctgtggctgctgggcggcggctag

SEQ ID NO: 307233 - protein, 338 aa, Artificial Sequence
  derived and/or modified sequence
MDPSADTWDLFSPLISLWINRFYIYLGFAVSISLWICVQIVIKTQGFATVLAEAVTSLDLPVAIINLKEYDPDDHLIEEVTSKNVCVFLVATYTDGLPTESAEWFCKWLEEASIDFRFGKTYLKGMRYAVFGLGNSAYASHFNKVGKNVDKWLWMLGAHRVMSRGEGDCDVVKSKHGSIEADFRAWKTKFISQLQALQKGERKKSCGGHCKKGKCESHQHGSEEREEGSHEQDELHHRDTEEEEPFESSSEEEFGGEDHQSLNSIVDVEDLGKIMDHVKKEKREKEQQEEKSGLFRNMGRNEDGERRAMITPALREALTKQVHAPRERRLLQTHILWN

SEQ ID NO: 307234 - protein, 176 aa, Artificial Sequence
  derived and/or modified sequence
MDPSADTWDLFSPLISLWINRFYIYLGFAVSISLWICVQIVIKTQGFATVLAEAVTSLDLPVAIINLKEYDPDDHLIEEEEEPFESSSEEEFGGEDHQSLNSIVDVEDLGKIMDHVKKEKREKEQQEEKSGLFRNMGRNEDGERRAMITPALREALTKQVHAPRERRLLQTHILWN

SEQ ID NO: 307235 - DNA, 1017 bp, Artificial Sequence
  derived and/or modified sequence
atggaccccagcgccgacacctgggacctgttcagccccctgatcagcctgtggatcaacagattctacatctacctgggcttcgccgtgagcatcagcctgtggatctgcgtgcagatcgtgatcaagacccagggcttcgccaccgtgctggccgaggccgtgaccagcctggacctgcccgtggccatcatcaacctgaaggagtacgaccccgacgaccacctgatcgaggaggtgaccagcaagaacgtgtgcgtgttcctggtggccacctacaccgacggcctgcccaccgagagcgccgagtggttctgcaagtggctggaggaggccagcatcgacttcagattcggcaagacctacctgaagggcatgagatacgccgtgttcggcctgggcaacagcgcctacgccagccacttcaacaaggtgggcaagaacgtggacaagtggctgtggatgctgggcgcccacagagtgatgagcagaggcgagggcgactgcgacgtggtgaagagcaagcacggcagcatcgaggccgacttcagagcctggaagaccaagttcatcagccagctgcaggccctgcagaagggcgagagaaagaagagctgcggcggccactgcaagaagggcaagtgcgagagccaccagcacggcagcgaggagagagaggagggcagccacgagcaggacgagctgcaccacagagacaccgaggaggaggagcccttcgagagcagcagcgaggaggagttcggcggcgaggaccaccagagcctgaacagcatcgtggacgtggaggacctgggcaagatcatggaccacgtgaagaaggagaagagagagaaggagcagcaggaggagaagagcggcctgttcagaaacatgggcagaaacgaggacggcgagagaagagccatgatcacccccgccctgagagaggccctgaccaagcaggtgcacgcccccagagagagaagactgctgcagacccacatcctgtggaactag

SEQ ID NO: 307236 - DNA, 531 bp, Artificial Sequence
  derived and/or modified sequence
atggaccccagcgccgacacctgggacctgttcagccccctgatcagcctgtggatcaacagattctacatctacctgggcttcgccgtgagcatcagcctgtggatctgcgtgcagatcgtgatcaagacccagggcttcgccaccgtgctggccgaggccgtgaccagcctggacctgcccgtggccatcatcaacctgaaggagtacgaccccgacgaccacctgatcgaggaggaggaggagcccttcgagagcagcagcgaggaggagttcggcggcgaggaccaccagagcctgaacagcatcgtggacgtggaggacctgggcaagatcatggaccacgtgaagaaggagaagagagagaaggagcagcaggaggagaagagcggcctgttcagaaacatgggcagaaacgaggacggcgagagaagagccatgatcacccccgccctgagagaggccctgaccaagcaggtgcacgcccccagagagagaagactgctgcagacccacatcctgtggaactag

SEQ ID NO: 307237 - DNA, 1017 bp, Artificial Sequence
  derived and/or modified sequence
atggatccaagtgcagatacatgggacctgttctcacctttgatttccttatggattaaccgcttttatatttaccttggcttcgctgtgtctatctctctctggatttgtgttcagattgtcataaaaacccagggctttgctacagtcctggccgaggcagtgacgtccttagatttgcctgtcgccataatcaatcttaaggagtatgatcccgatgatcacctgatagaagaggtgacatcaaaaaacgtgtgcgtgtttctggtggcgacctacactgatggcctgcctacggaatccgccgaatggttttgtaaatggctcgaagaggcctcaatcgactttaggttcggtaagacttatctgaagggtatgagatacgcggtgttcggcttggggaatagcgcttatgcgtctcattttaataaagtgggcaagaatgtcgacaagtggctgtggatgcttggcgctcatagggttatgagtagaggtgaaggtgattgcgatgttgtgaagtccaagcatggatccatcgaggctgactttagagcatggaagacaaaattcatctctcaactccaggctctccaaaagggcgagaggaagaaatcctgtggtggccactgcaagaaaggtaagtgcgaatcccatcagcacgggagcgaagagcgagaggagggctcgcacgaacaggacgagctgcatcatagagatacagaagaggaggagcctttcgaaagctccagtgaggaggaatttggaggcgaagaccaccagagtttaaactcaatcgttgatgtagaggatctgggaaaaatcatggatcatgtgaaaaaggaaaagcgagaaaaggaacaacaggaggagaagtccggactgtttagaaacatggggcgaaacgaagatggagagcgccgagctatgatcacgcccgctttgcgtgaggccctgaccaaacaagtccacgcccctagggaacgccggctgctccaaacgcatatcctctggaactag

SEQ ID NO: 307238 - DNA, 531 bp, Artificial Sequence
  derived and/or modified sequence
atggacccgagcgccgacacttgggatttgtttagcccactgatatccttgtggataaaccgcttttacatctacttggggttcgcagttagcatatctttatggatctgcgttcagatcgtgattaaaacgcagggcttcgcgacggtcctagctgaggccgtgacctcactcgatctgccagtcgccataatcaacctgaaagagtatgacccagatgaccacctcattgaggaagaagaagagccatttgaatctagcagcgaagaggaattcgggggtgaggaccaccagtctctgaactctatagttgacgtggaggacttaggaaagattatggaccatgtgaaaaaagaaaagcgggagaaagagcagcaggaagaaaagtctggccttttccgcaacatggggagaaacgaggatggagagcgccgtgccatgatcacaccggccctcagagaagcgctcactaagcaggtccacgccccgagggagcgccggctcctccagacccacatcttatggaattag

SEQ ID NO: 307239 - DNA, 1017 bp, Artificial Sequence
  derived and/or modified sequence
atggaccccagcgctgacacctgggacctcttcagccccctcatcagcctgtggatcaaccgcttctacatctacctgggctttgctgtgtccatcagcctgtggatctgtgtgcagatcgtcatcaagacccagggctttgccaccgtgctggccgaggccgtgaccagcctggacctgcctgtggccatcatcaacctgaaggagtatgaccctgatgaccacctgattgaggaggtgaccagcaagaatgtgtgtgtgttcctggtggccacctacacagatggcctgcccacagaatctgctgagtggttctgcaagtggctggaggaggccagcattgacttccgctttgggaagacctacctgaagggcatgagatatgctgtgtttggcctgggcaacagcgcctatgccagccacttcaacaaggtgggcaagaatgtggacaagtggctgtggatgctgggcgcccaccgggtgatgagcagaggagagggggactgtgatgtggtgaagagcaagcacggcagcattgaagctgacttccgggcctggaagaccaagttcatcagccagctgcaggccctgcagaagggggagaggaagaagagctgtggcggccactgcaagaagggcaaatgtgagagccaccagcacggcagcgaggagcgggaggagggcagccatgagcaggatgagctgcaccaccgggacacagaggaggaggagccctttgagagcagcagcgaggaggagtttggaggagaggaccaccagagcctgaacagcatcgtggatgtggaggacctgggcaagatcatggaccacgtgaagaaggagaagcgggagaaggagcagcaggaggagaagagcggcctcttcaggaacatgggcagaaatgaagatggagagcggcgggccatgatcaccccagccctgcgggaggccctgaccaagcaggtgcacgccccccgggagcggcggctgctgcagacccacatcctgtggaactag

SEQ ID NO: 307240 - DNA, 531 bp, Artificial Sequence
  derived and/or modified sequence
atggaccccagcgctgacacctgggacctcttcagccccctcatcagcctgtggatcaaccgcttctacatctacctgggctttgctgtgtccatcagcctgtggatctgtgtgcagatcgtcatcaagacccagggctttgccaccgtgctggccgaggccgtgaccagcctggacctgcctgtggccatcatcaacctgaaggagtatgaccctgatgaccacctgattgaggaggaggaggagccctttgagagcagcagcgaggaggagtttggaggagaggaccaccagagcctgaacagcatcgtggatgtggaggacctgggcaagatcatggaccacgtgaagaaggagaagcgggagaaggagcagcaggaggagaagagcggcctcttcaggaacatgggcagaaatgaagatggagagcggcgggccatgatcaccccagccctgcgggaggccctgaccaagcaggtgcacgccccccgggagcggcggctgctgcagacccacatcctgtggaactag

SEQ ID NO: 307241 - DNA, 1017 bp, Artificial Sequence
  derived and/or modified sequence
atggaccccagcgccgacacctgggacctgttcagccccctgatcagcctctggatcaatcggttctatatttacttaggatttgccgtgtcgatctctctgtggatttgtgtacagattgtgatcaagactcagggatttgctactgttttggccgaggcggttacttcactcgacctgcctgtggcaatcattaatctcaaagaatacgatcccgatgaccatttgattgaggaggtgacctcgaagaatgtctgtgtgttcttggtcgctacctataccgatgggctacccacagaaagcgcagaatggttctgtaagtggctcgaggaagccagtattgattttcgcttcggcaaaacctatttgaagggcatgcgatatgctgtgttcgggcttggtaatagcgcctacgccagccatttcaataaagtgggcaaaaatgtggacaagtggctgtggatgctgggcgcacatagggtgatgtcccgcggcgaaggcgactgtgacgtcgttaagtcaaagcacggctccatcgaggctgacttccgggcctggaagacaaagtttatctcccagcttcaggcattgcagaaaggagagcggaagaaatcatgtgggggacactgcaaaaaggggaaatgtgagtcacatcagcacggatccgaggagagagaggaggggagtcatgaacaggatgaactgcatcaccgagacacagaagaggaagaaccctttgaatcctctagcgaagaagagttcggcggcgaagaccaccaatctttgaactctatagttgacgtggaagacctcgggaagatcatggaccacgtcaaaaaggagaagcgcgagaaagaacaacaggaagaaaagtccggcctatttaggaacatggggcgcaatgaggatggggagaggcgcgctatgattacaccggccttgcgggaagccctcacaaagcaggtgcacgcccctagagaaaggcgcctcctgcagactcatattctgtggaattag

SEQ ID NO: 307242 - DNA, 531 bp, Artificial Sequence
  derived and/or modified sequence
atggaccccagcgccgacacctgggacctgttcagccccctgatcagtttgtggatcaatcggttttacatctacctaggatttgcagtcagcatttccctgtggatatgtgtgcagatcgtgattaaaacgcagggatttgctaccgtgcttgccgaagcggttactagccttgacctgcctgtggccataattaatctgaaggagtatgatccggatgaccaccttattgaagaggaggaggagccttttgagagttcctctgaagaggaattcggaggcgaggaccatcagtcattgaacagtattgtggatgttgaagatctaggaaaaataatggatcacgtgaaaaaggagaaacgggaaaaggagcagcaagaagaaaaaagcgggttattcagaaatatgggacgaaatgaggacggtgagcgtagggccatgataacccctgctctgcgggaagcgttgactaagcaggtacacgcaccccgagagcggagacttctgcagacccacatactgtggaactag

SEQ ID NO: 307243 - DNA, 1017 bp, Artificial Sequence
  derived and/or modified sequence
atggatccctctgccgacacatgggatctcttctcccccctaatatccctgtggataaacagattctacatttatttgggctttgctgtctctattagcctgtggatttgtgtgcaaatcgtgataaagactcagggtttcgccacggtcttagcagaggccgtgacatccttggatctgccggtcgcaatcatcaacctgaaagagtatgatcctgacgaccacttgatcgaggaagtaacaagcaaaaatgtctgcgttttcctggtggccacttatacagacgggctgcctaccgaaagtgctgagtggttctgcaagtggctggaagaagcctccatcgatttccggttcgggaagacctatctgaaagggatgagatacgcggtgtttggtctcggaaactcagcatatgcttctcatttcaataaggtgggaaagaacgttgacaagtggctttggatgctgggcgcacatcgggtgatgagtcgcggagagggggactgcgacgttgtgaaaagcaaacatggctcaatcgaggcggacttcagagcctggaagacgaagtttatttctcagctgcaagcacttcaaaaaggcgagaggaaaaaatcatgtggaggccactgcaaaaaaggaaagtgtgaatcacaccaacatggttcagaagagcgggaggaggggtcacacgaacaggatgaactccaccatagggacactgaggaagaggaaccttttgagtcaagtagcgaggaagaatttggcggtgaagaccaccagtcactgaattccatagtagatgtggaggacttagggaagatcatggaccacgtgaagaaggaaaaacgcgaaaaagagcaacaagaagagaaaagcggtctgttccggaatatgggcaggaacgaggatggcgaaagacgggcaatgatcacccctgcgctgcgggaagcccttacaaaacaagtgcacgcacccagggagcgaagactgctacagactcacatcctatggaattag

SEQ ID NO: 307244 - DNA, 531 bp, Artificial Sequence
  derived and/or modified sequence
atggacccatccgcggatacgtgggacctcttttcccctctcatttcattgtggatcaaccgtttctacatctatctgggcttcgctgtgagcatatccctctggatctgtgttcagattgtaattaagactcagggctttgccacagtgctcgcagaggctgtgaccagcttagatttgcctgttgccatcatcaacctgaaagaatacgatccagacgaccatctgatcgaagaggaggaagagccgttcgagtcctctagtgaggaagagtttggaggcgaagaccaccagtccctgaacagtattgtggacgtcgaagacctgggcaaaattatggaccacgtcaagaaggaaaagagggagaaggagcagcaggaggagaagagtgggctatttcgaaatatgggcagaaacgaagatggtgaaaggcgcgcaatgatcacaccagccctgcgggaggctctaacaaagcaggtgcacgccccacgcgaacggagattgctccaaacccacatcctgtggaattag

SEQ ID NO: 307245 - protein, 335 aa, Artificial Sequence
  derived and/or modified sequence
MQLLGLLGLLWMLKASPWATGTLSTATSISQVPFPRAEAASAVLSNSPHSRDLAGWPLGVPQLASPAPGHRENAPMTLTTSPHDTLISETLLNSPVSSNTSTTPTSKFAFKVETTPPTVLVYSATTECVYPTSFIITISHPTSICVTTTQVAFTSSYTSTPVTQKPVTTVTSTYSMTTTEKGTSAMTSSPSTTTARETPIVTVTPSSVSATDTTFHTTISSTTRTTERTPLPTGSIHTTTSPTPVFTTLKTAVTSTSPITSSITSTNTVTSMTTTASQPTATNTLSSPTRTILSSTPVLSTETITSGITNTTPLSTLVTTLPTTISRSTPTSETT

SEQ ID NO: 307246 - protein, 876 aa, Artificial Sequence
  derived and/or modified sequence
IYSTVSTSTTAITSHFTTSETAVTPTPVTPSSLSTDIPTTSLRTLTPSSVGTSTSLTTTTDFPSIPTDISTLPTRTHIISSSPSIQSTETSSLVGTTSPTMSTVRMTLRITENTPISSFSTSIVVIPETPTQTPPVLTSATGTQTSPAPTTVTFGSTDSSTSTLHTLTPSTALSTIVSTSQVPIPSTHSSTLQTTPSTPSLQTSLTSTSEFTTESFTRGSTSTNAILTSFSTIIWSSTPTIIMSSSPSSASITPVFSTTIHSVPSSPYIFSTENVGSASITGFPSLSSSATTSTSSTSSSLTTALTEITPFSYISLPSTTPCPGTITITIVPASPTDPCVEMDPSTEATSPPTTPLTVFPFTTEMVTCPTSISIQTTLTTYMDTSSMMPESESSISPNASSSTGTGTVPTNTVFTSTRLPTSETWLSNSSVIPLPLPGVSTIPLTMKPSSSLPTILRTSSKSTHPSPPTTRTSETPVATTQTPTTLTSRRTTRITSQMTTQSTLTTTAGTCDNGGTWEQGQCACLPGFSGDRCQLQTRCQNGGQWDGLKCQCPSTFYGSSCEFAVEQVDLDVVETEVGMEVSVDQQFSPDLNDNTSQAYRDFNKTFWNQMQKIFADMQGFTFKGVEILSLRNGSIVVDYLVLLEMPFSPQLESEYEQVKTTLKEGLQNASQDANSCQDSQTLCFKPDSIKVNNNSKTELTPEAICRRAAPTGYEEFYFPLVEATRLRCVTKCTSGVDNAIDCHQGQCVLETSGPACRCYSTDTHWFSGPRCEVAVHWRALVGGLTAGAALLVLLLLALGVRAVRSGWWGGQRRGRSWDQDRKWFETWDEEVVGTFSNWGFEDDGTDKDTNFHVALENVDTTMKVHIKRPEMTSSSV

SEQ ID NO: 307247 - DNA, 927 bp, Artificial Sequence
  derived and/or modified sequence
tgtgataacggcggcacttgggagcagggtcagtgtgcatgcctgcccgggtttagtggcgatcgttgccagctgcagacacgctgccagaatggagggcaatgggacggattgaaatgccagtgcccgtcaactttctatggatcctcctgcgaattcgccgtggagcaggtggacctcgacgtagtagaaacagaggtgggcatggaggtttccgtggatcaacagttctcccctgatttgaacgacaatacatcccaagcatatcgggactttaataaaacattttggaaccagatgcagaaaattttcgccgacatgcagggtttcacattcaaaggggtggagattttgagcctacgcaatggtagtattgttgtcgattaccttgtactcctggaaatgcctttttcaccgcagctggaatcggaatatgagcaggtgaagacaaccctgaaagagggtcttcaaaatgcctcacaggatgccaattcctgtcaggattctcagaccctgtgcttcaagccagattccatcaaagtgaataacaactctaaaaccgaacttacccctgaagctatttgtagacgagccgctcctaccggatacgaagaattctactttcctttagtcgaggccacaaggttgcgctgtgtgacgaagtgtaccagcggtgtggataatgctattgactgtcaccagggccaatgcgtcttagagacaagcgggcctgcatgccgcagctgggaccaagacaggaaatggttcgagacctgggatgaggaggtggtaggaacgttctcgaactgggggtttgaagacgatggcaccgacaaggatacaaacttccatgtggcactcgagaatgtggatacaactatgaaggtccacatcaagcgcccagaaatgaccagctcttcagtgtag

SEQ ID NO: 307248 - DNA, 219 bp, Artificial Sequence
  derived and/or modified sequence
atgtcgtaccaacagcagcagtgcaaacaaccatgtcagcctccccctgtgtgtccaactccgaaatgtcccgaaccgtgccctccacccaagtgtccagaaccttgcccaccacctaaatgtcctcagccctgccccccccagcagtgtcagcaaaagtatcctcccgtcacacccagccctccctgccagcctaaatatccaccaaagtcaaagtag

SEQ ID NO: 307249 - DNA, 927 bp, Artificial Sequence
  derived and/or modified sequence
tgtgacaatggaggcacctgggagcagggccagtgtgcctgcctgcccggcttcagcggggaccgctgccagctgcagacccgctgccagaatggaggccagtgggatggcctgaagtgccagtgccccagcaccttctacggcagcagctgtgaatttgctgtggagcaggtggacctggatgtggtggagacagaggtgggcatggaggtgtctgtggaccagcagttctccccagacctgaatgacaacaccagccaggcctacagagacttcaacaagaccttctggaaccagatgcagaagatctttgctgacatgcagggcttcaccttcaagggcgtggagatcctgagcctgagaaatggcagcatcgtggtggactacctggtgctgctggagatgcccttcagcccccagctggagagtgaatatgagcaggtgaagaccaccctgaaggagggcctgcagaatgccagccaggatgccaacagctgccaggacagccagaccctgtgcttcaagccagacagcatcaaggtgaacaacaacagcaagacagagctgaccccagaggccatctgccggcgggccgcccccaccggctatgaggagttctacttccccctggtggaggccacccggctgcgctgtgtgaccaagtgcaccagcggcgtggacaatgccatcgactgccaccagggccagtgtgtgctggagaccagcggccctgcctgccgctcctgggaccaggacaggaagtggtttgagacctgggatgaggaggtggtgggcaccttcagcaactggggctttgaagatgatggaacagacaaggacaccaacttccacgtggccctggagaatgtggacaccaccatgaaggtgcacatcaagaggcctgagatgaccagcagctctgtgtag

SEQ ID NO: 307250 - DNA, 1073 bp, Artificial Sequence
  derived and/or modified sequence
tgtgacaatggtggcacctgggaacagggacagtgtgcttgccttccggggttttctggggaccgctgtcagctccagaccagatgccagaatgggggtcagtgggatggcctcaaatgccagtgccccagcaccttctatggttccagttgtgagtttgctgtggaacaggtggatctagatgtagtggagaccgaggtgggcatggaagtgtctgtggatcagcagttctcgccggacctcaatgacaacacttcccaggcctacagggatttcaacaagaccttctggaatcagatgcagaagatttttgcagacatgcagggcttcaccttcaagggtgtggagatcctgtccctgaggaatggcagcatcgtggtggactacctggtcctgctggagatgcccttcagcccccagctggagagcgagtatgagcaggtgaagaccacgctgaaggaggggctccagaacgccagccaggatgcgaacagctgccaggactcccagaccctgtgttttaagcctgactccatcaaggtgaacaacaacagcaagacagagctgaccccggaagccatctgccgccgcgccgctcccacgggctatgaagagttctacttccctctggtggaggccacccggctccgctgtgtcaccaaatgcacgtcgggcgtggacaacgccatcgactgtcaccagggccagtgcgttctagagacgagcggtcccgcgtgtcggtcctgggaccaggacaggaaatggttcgagacctgggatgaggaagtcgtgggcactttttcaaactggggtttcgaggacgacggaacagacaaggatacaaatttccatgtggccttggagaacgtggacaccactatgaaggtgcacatcaagagacccgagatgacctcgtcctcagtgtgagccctgcggggccccttcaccaccccctccgccctgccccggacacaagggtctgcattgcgtccatttcaagaggtggccccaggacgcgggcagcccaggctcctgctgttcttgggcaagatgagactgttcccccaaatccc

SEQ ID NO: 307251 - DNA, 927 bp, Artificial Sequence
  derived and/or modified sequence
tgcgacaacggcggcacctgggagcagggccagtgcgcctgcctgcccggattttcaggagacagatgccagttgcagaccagatgccagaacggcggccagtgggatgggctgaaatgccagtgtccatcgaccttttatggatccagctgcgagtttgcagtggaacaggtcgacctggacgtcgtcgaaacagaggtgggcatggaggtttccgttgatcagcagtttagcccggatcttaatgacaatacatcccaggcatatagagattttaacaagacattctggaatcagatgcagaaaattttcgcagatatgcaggggtttacttttaaaggagtggaaattctcagtctgaggaatgggagcatcgtggtggactatctggtgcttctcgagatgccgtttagcccccaactggagtctgagtacgaacaagtgaagaccaccctcaaggaaggactacagaatgcttcccaggatgctaattcctgccaggactctcagacactgtgctttaagccagactctattaaagtgaacaataatagcaagactgagctcacacctgaggctatttgcagacgggcggccccaaccggctacgaggagttttacttcccactcgttgaggccacacgactccgttgtgtcacaaagtgtacctccggcgtggataacgcaatcgattgtcaccagggccagtgcgtccttgaaaccagcggacctgcctgtcggtcttgggatcaagatagaaagtggttcgagacctgggacgaagaagtggtgggcacattctctaattggggtttcgaggatgacggtaccgacaaggacaccaatttccatgtggcattggagaacgttgacacgaccatgaaggtccatatcaagcgtccagaaatgacatcctcctctgtgtag

SEQ ID NO: 307252 - DNA, 927 bp, Artificial Sequence
  derived and/or modified sequence
tgcgacaatggagggacttgggagcagggacagtgtgcgtgcttacccggtttcagtggcgaccgctgccaactgcagacacggtgccaaaacggaggccagtgggacggtctcaaatgccagtgcccaagcactttttatggtagtagctgcgagttcgcggtcgaacaggtggacttggatgtcgtggagacagaggtcggaatggaagtatcagtcgatcagcagttcagtcctgatctaaacgacaatacctcccaggcttatcgcgactttaataagacattctggaaccaaatgcagaaaatctttgccgacatgcaaggattcacattcaaaggggtcgagatattgtcccttaggaatggatccattgtggtcgattacctggttctcctggagatgccattttctccccagctcgagagtgagtatgagcaagtgaagaccaccctgaaggagggactgcaaaacgcctcacaggacgccaactcctgccaagattcacagacactgtgcttcaagcccgatagtattaaggtcaacaacaactctaagaccgagttaactccagaagccatttgtcgtagggcggctccaactggttacgaagagttctactttccactggtggaggcaactcgcctcagatgtgtcaccaagtgcacttctggcgtggataatgcaattgattgccaccaaggacagtgcgtgctggaaacctccggccctgcttgtcgctcctgggaccaggaccgtaaatggtttgagacctgggatgaggaggtcgtgggaacgttcagtaactggggcttcgaagatgacggaactgacaaagatactaatttccacgtggcccttgagaacgtggataccaccatgaaggtgcacattaaaaggccagagatgaccagcagctctgtgtag

SEQ ID NO: 307253 - DNA, 927 bp, Artificial Sequence
  derived and/or modified sequence
tgcgacaacggcggcacctgggagcagggccagtgcgcctgcctgcccggcttcagcggcgacagatgccagctgcagaccagatgccagaacggcggccagtgggacggcctgaagtgccagtgccccagcaccttctacggcagcagctgcgagttcgccgtggagcaggtggacctggacgtggtggagaccgaggtgggcatggaggtgagcgtggaccagcagttcagccccgacctgaacgacaacaccagccaggcctacagagacttcaacaagaccttctggaaccagatgcagaagatcttcgccgacatgcagggcttcaccttcaagggcgtggagatcctgagcctgagaaacggcagcatcgtggtggactacctggtgctgctggagatgcccttcagcccccagctggagagcgagtacgagcaggtgaagaccaccctgaaggagggcctgcagaacgccagccaggacgccaacagctgccaggacagccagaccctgtgcttcaagcccgacagcatcaaggtgaacaacaacagcaagaccgagctgacccccgaggccatctgcagaagagccgcccccaccggctacgaggagttctacttccccctggtggaggccaccagactgagatgcgtgaccaagtgcaccagcggcgtggacaacgccatcgactgccaccagggccagtgcgtgctggagaccagcggccccgcctgcagaagctgggaccaggacagaaagtggttcgagacctgggacgaggaggtggtgggcaccttcagcaactggggcttcgaggacgacggcaccgacaaggacaccaacttccacgtggccctggagaacgtggacaccaccatgaaggtgcacatcaagagacccgagatgaccagcagcagcgtgtag

SEQ ID NO: 307254 - protein, 61 aa, Artificial Sequence
  derived and/or modified sequence
MQLKIMPKKKRLSAGRVPLILFLCQMISALEVPLDPKLLEDLVQPPTITQQSPKDYIIDPR

SEQ ID NO: 307255 - protein, 118 aa, Artificial Sequence
  derived and/or modified sequence
MQLKIMPKKKRLSAGRVPLILFLCQMISALEVPLDPKLLEDLVQPPTITQQSPKDYIIDPRENIVIQCEAKGKPPPSFSWTRNGTHFDIDKDPLVTMKPGTGTLIINIMSEGKAETYE

SEQ ID NO: 307256 - protein, 431 aa, Artificial Sequence
  derived and/or modified sequence
MQLKIMPKKKRLSAGRVPLILFLCQMISALEVPLDLVQPPTITQQSPKDYIIDPRENIVIQCEAKGKPPPSFSWTRNGTHFDIDKDPLVTMKPGTGTLIINIMSEGKAETYEGVYQCTARNERGAAVSNNIVVRPSRSPLWTKEKLEPITLQSGQSLVLPCRPPIGLPPPIIFWMDNSFQRLPQSERVSQGLNGDLYFSNVLPEDTREDYICYARFNHTQTIQQKQPISVKVISVDELNDTIAANLSDTEFYGAKSSRERPPTFLTPEGNASNKEELRGNVLSLECIAEGLPTPIIYWAKEDGMLPKNRTVYKNFEKTLQIIHVSEADSGNYQCIAKNALGAIHHTISVRVKAAPYWITAPQNLVLSPGEDGTLICRANGNPKPRISWLTNGVPIEIAPDDPSRKIDGDTIIFSNVQERSSAVYQCNASNE

SEQ ID NO: 307257 - protein, 771 aa, Artificial Sequence [sequence omitted]

SEQ ID NO: 307258 - DNA, 3711 bp, Artificial Sequence
  derived and/or modified sequence
atgcagctcaagataatgccaaagaagaaaaggctaagcgctggaagggtcccattaattttgttcctgtgtcagatgatttctgcattggaagtccctttggatcagaaatcaacggaggtgatggtgcagccccccactatcacccagcagtcacccaaagattatatcatcgaccctcgtgagaatatcgtcattcaatgcgaagcaaaaggcaaacctccgccatcattctcgtggaccaggaacgggactcatttcgacatcgacaaggacccactggtgacaatgaaaccaggaactggaacactgattattaacattatgagtgaagggaaggctgagacatatgagggcgtttaccaatgcacagctcgaaatgaaagaggggccgccgtgagtaacaacatcgtggtacgaccctctcggagtccactgtggacaaaagaaaagctcgaacctattacccttcagtccggccagagcctggtgttaccctgccgcccgcccattggtctgccacccccgattattttttggatggataatagcttccagagattgccgcaatctgagagagtgagccaagggttgaatggcgatttatacttcagtaacgtgctgccagaggatacccgggaagactacatttgctatgcacgtttcaaccacacgcagacaatccagcagaagcaacctattagcgtgaaggtgattagcgtcgacgaactgaacgatacgattgctgctaacctcagcgacacggaattctacggcgccaagtcatccagggaacgacctccaaccttccttacacccgagggaaacgcttccaataaggaagagctgcgggggaacgtgcttagcctcgagtgtattgctgaaggccttcctacccctatcatctattgggccaaagaggacggcatgctgcccaagaacagaacagtttacaaaaacttcgaaaaaacactgcagataattcacgtcagcgaggctgattctggtaattatcagtgcattgcaaaaaacgctctgggagctattcaccacaccatcagcgtgcgtgttaaggcagccccctactggatcacagctccccaaaatctcgtactttcaccaggcgaggacgggacactcatatgccgcgctaatggtaaccctaagccccggatctcatggctaacgaacggcgtgcccattgaaatcgccccagacgatcccagtaggaaaattgacggcgacacaattatatttagcaacgtgcaggagaggagttccgctgtataccagtgtaacgccagcaacgagtacggatacctacttgcaaatgccttcgtaaatgttctggcagaaccacccaggattcttacacctgcaaatacactgtatcaagttattgccaatcgaccagccctgcttgattgtgcgttctttgggagtccccttccgacaatcgagtggttcaagggcgccaaggggtccgcactccatgaggacatttacgtcttacatgaaaatggcacactcgaaattcccgttgctcagaaagattctaccggcacatacacgtgcgtggccagaaataaattgggcatggccaaaaacgaagtgcatctagagattaaggacccaacctggatcgtcaagcaaccagaatatgccgtagtccagcgaggttccatggtgagcttcgaatgtaaagtgaagcatgatcacactctctcactgacagtgctttggttgaaagacaatagggagctgcctagcgatgagagatttaccgtggataaggaccacttggttgtcgccgacgtaagtgatgatgacagtggaacctatacctgcgtggctaatacaaccctggattctgtcagtgcctcagctgtgctgagtgtagttgccccaacccctaccccagcccctgtgtatgacgtgcccaatccacccttcgatctggaattaacagatcagcttgacaaaagcgtgcagctgtcatggaccccaggcgacgacaacaattccccgatcacaaaatttattattgagtacgaggacgcgatgcacaagccaggtctgtggcatcaccagacagaagtatctgggacacaaaccactgcgcagctcaaactctccccctatgtgaattactcattccgagtgatggctgttaactctatcggtaaatctctgccctcagaagcctcggaacagtaccttacgaaagctagtgagcccgataaaaacccaactgctgtagagggtctgggatccgagcctgacaacctggttattacctggaaaccccttaacggtttcgagtccaatgggcccgggctgcaatataaggtcagttggagacagaaggacggcgatgatgagtggacctctgttgtggttgcaaacgtctctaaatacatcgtgtccggaacccctacttttgtgccctatctgatcaaagtgcaggcgctgaacgacatggggttcgcccccgaacctgcagtcgtgatgggtcactctggtgaagatctccctatggtcgcacctggaaacgtcagagtaaacgtcgtgaactccactctcgccgaagtccactgggaccctgttcctctcaagtccatccgggggcatctgcagggatatagaatatattactggaagacccagtcttctagtaagcggaatcgcagacatattgagaaaaaaatcctaacctttcaaggctcaaaaacacatgggatgctgcccgggctcgagcctttcagccactatacactcaacgtccgagtcgtcaatgggaagggagagggcccagctagtcccgaccgcgttttcaacactccggagggagttccgagcgcaccctcctcactgaagatagtgaatccaactttggacagcctgaccttagaatgggatccccccagccacccaaacgggatactcactgagtatacgcttaagtaccagcccattaattccacacatgaactgggtccattagtcgatctgaaaatccctgccaataaaacccgctggacactcaaaaatctaaatttcagtacacggtacaaattctacttctacgcacagacctccgcaggtagtggctcacagatcacagaggaggctgttaccacagtggatgaagccgggattctcccacctgacgtgggggcaggaaaggttcaggccgtgaacccaagaattagcaatcttacggctgccgccgcagagacctatgcaaatatatcctgggaatacgagggcccagaacacgtgaacttctatgttgaatacggtgtggctgggtccaaggaggaatggagaaaggaaattgtgaatggatcaagatcctttttcggcctgaaaggacttatgcccggcacagcctacaaggtgagagtaggggcagtcggggactctggattcgtgtcctccgaagatgtcttcgagactgggccagctatggcaagcaggcaggttgacatcgctacgcaggggtggttcattggccttatgtgcgccgttgccctgttgattctcatactcctgattgtgtgctttatccgacgcaacaaagggggcaagtacccggtcaaggaaaaggaggatgcacacgccgatccggaaatccagccgatgaaggaggacgatggaactttcggcgaatacaggttattttccttcgtttccagcgcatcgttttag

SEQ ID NO: 307259 - DNA, 3711 bp, Artificial Sequence
  derived and/or modified sequence
atgcagctgaagatcatgcccaagaagaagaggctgtctgctggccgggtgcccctcatcctcttcctgtgccagatgatcagcgccctggaggtgcccctggaccagaagagcacagaggtgatggtgcagccccccaccatcacccagcagagccccaaggactacatcatcgacccccgggagaacatcgtcatccagtgtgaggccaagggcaagcccccacccagcttctcctggaccagaaatggcacccactttgatattgacaaggaccccctggtgaccatgaagccaggcaccggcaccctcatcatcaacatcatgtctgagggcaaggccgagacctatgaaggagtgtaccagtgcacagccagaaatgaaagaggagctgctgtgagcaacaacatcgtggtgcggcccagccgcagccccctgtggaccaaggagaagctggagcccatcaccctgcagagcggccagagcctggtgctgccctgcaggcctcccatcggcctgcccccacccatcatcttctggatggacaacagcttccagaggctgccccagagcgagcgggtgtcccagggcctgaatggagacctgtacttcagcaatgtgctgcctgaggacacccgggaggactacatctgctacgcccgcttcaaccacacccagaccatccagcagaagcagcccatctctgtgaaggtgatctctgtggatgagctgaatgacaccatcgccgccaacctgagtgacacagagttctacggggccaagagcagccgggagaggcctcccaccttcctgaccccagagggcaatgccagcaacaaggaggagctgcggggaaatgtgctgagcctggagtgcatcgccgagggcctgcccacccccatcatctactgggccaaggaggatggcatgctgcccaagaacagaacagtgtacaagaactttgagaagaccctgcagatcatccacgtgtctgaggccgacagcggcaactaccagtgcatcgccaagaatgccctgggcgccatccaccacaccatctctgtgcgggtgaaggccgccccctactggatcacagccccccagaacctggtgctgagccctggagaagatggcaccctcatctgccgggccaatggaaaccccaagccccgcatctcctggctgaccaatggagtgcccattgaaattgccccagatgaccccagcaggaagattgatggagacaccatcatcttcagcaatgtgcaggagaggagcagcgctgtgtaccagtgcaatgccagcaatgaatatggctacctgctggccaatgcctttgtgaatgtgctggccgagcccccacgcatcctgaccccagccaacaccctgtaccaggtgattgccaacagacctgccctgctggactgtgccttcttcggcagccccctgcccaccatcgagtggttcaagggggccaagggcagcgccctgcacgaggacatctacgtgctgcatgaaaatggcaccctggagatccctgtggcccagaaggacagcacaggcacctacacctgtgtggccaggaacaagctgggcatggccaagaatgaggtgcacctggagatcaaggaccccacctggatcgtgaagcagccagaatatgctgtggtgcagaggggctccatggtgtcctttgagtgcaaggtgaagcatgaccacaccctgagcctgactgtgctgtggctgaaggacaaccgggagctgcccagtgatgagcgcttcaccgtggacaaggaccacctggtggtggctgatgtgtctgatgatgattctggcacctacacctgtgtggccaacaccaccctggacagcgtgtctgccagcgctgtgctgtctgtggtggcccccacccccaccccagcccctgtgtatgatgtgcccaaccccccatttgacctggagctgacagaccagctggacaagtctgtgcagctgtcctggaccccaggagatgacaacaacagccccatcaccaagttcatcatcgagtatgaagatgccatgcacaagccaggcctgtggcaccaccagacagaggtgtctggcacccagaccacagcccagctgaagctgagcccctacgtgaactacagcttccgggtgatggctgtgaacagcatcggcaagagcctgcccagcgaggccagcgagcagtacctgaccaaggccagcgagccagacaagaaccccacagctgtggagggcctgggcagcgagccagacaacctggtgatcacctggaagcccctgaatggatttgagagcaatggacctggcctgcagtacaaggtgtcctggaggcagaaggatggagatgatgagtggacctctgtggtggtggccaacgtgtccaagtacatcgtgtctggcacccccacctttgtgccctacctgatcaaggtgcaggccctgaatgacatgggctttgcccctgagcctgctgtggtgatgggccacagcggggaggacctgcccatggtggcccctggaaatgtgcgggtgaatgtggtgaacagcaccctggccgaggtgcactgggaccctgtgcccctgaagagcatccggggccacctgcagggctaccgcatctactactggaagacccagagcagcagcaagaggaacagaagacacatcgagaagaagatcctgaccttccagggcagcaagacccacggcatgctgcccggcctggagcccttcagccactacaccctgaatgtgcgggtggtgaatggcaagggggagggccctgccagcccagacagagtcttcaacaccccagagggcgtgcccagcgcccccagcagcctgaagatcgtgaaccccaccctggacagcctgaccctggagtgggacccccccagccaccccaacggcatcctgacagagtacaccctgaagtaccagcccatcaacagcacccatgagctgggccccctggtggacctgaagatcccagccaacaagacccgctggaccctgaagaacctgaacttcagcacccgctacaagttctacttctacgcccagaccagcgctggcagcggcagccagatcacagaggaggccgtgaccaccgtggatgaagctggcatcctgcccccagatgtgggcgctgggaaggtgcaggccgtgaacccccgcatcagcaacctgacagctgctgctgctgagacctacgccaacatctcctgggagtatgagggccctgagcacgtgaacttctacgtggagtatggagtggccggcagcaaggaggagtggaggaaggagatcgtgaatggcagccgctccttcttcggcctgaagggcctgatgcctggaacagcctacaaggtgcgggtgggcgctgtgggggacagcggctttgtgtccagtgaagatgtgtttgaaacaggccctgccatggccagccggcaggtggacatcgccacccagggctggttcatcggcctgatgtgtgctgtggccctgctgatcctgatcctgctgattgtgtgcttcatcagaagaaacaagggcggcaagtaccctgtgaaggagaaggaggatgcccacgccgaccctgagatccagcccatgaaggaggatgatggcaccttcggggagtaccgcctcttctcctttgtgtcctctgccagcttctag

SEQ ID NO: 307260 - DNA, 3711 bp, Artificial Sequence
  derived and/or modified sequence
atgcagctgaagatcatgcccaagaagaagcggctgagcgccggccgtgtccccctgatcttgtttctgtgccagatgatctccgccctggaagtgccactggaccagaagtcaactgaggtgatggtgcagcctccaaccataacacagcagtcccctaaggactatatcatagatccccgggaaaacattgtgatccagtgtgaggcaaaagggaagcctccaccttcattctcctggaccaggaatgggacgcatttcgacatcgataaagatcccctggtgacaatgaagcctgggaccgggactctgatcatcaatattatgagtgaagggaaagccgagacctatgagggagtgtaccagtgtacagcccggaatgagcgcggcgccgcagtgagtaacaatattgtggtgcgacctagccggagccctctttggacgaaggagaagctggaaccaatcaccctgcagtctggtcaaagtctggtcctgccttgtaggccaccaattggccttccacctcccatcatcttttggatggacaactcctttcaacgcttgcctcaatctgagcgggtgtcccagggcctgaatggcgatttgtatttcagcaacgtgctcccagaggatacgagagaagactacatctgctacgcccggttcaaccacactcagactatacagcagaaacaacccatctccgtcaaggtgattagcgtcgatgaactcaacgataccatagcagcaaacctgtcagacaccgagttctacggagccaaaagtagcagggagagaccacctaccttcctaacacccgaggggaacgcgagcaataaggaagaactgcgtggcaacgtgttatcattggaatgcattgccgaagggctcccaacacccatcatctattgggccaaagaggatgggatgctgcctaagaaccggactgtctacaagaatttcgagaagacccttcagatcatccacgttagcgaagccgacagtggaaattatcaatgcattgccaagaacgctctgggagcgatacatcacacaatttctgtccgtgtgaaagccgccccatactggataactgcgcctcagaacctggttttaagccctggtgaggacgggaccctcatctgccgggcaaatggaaacccaaaacccaggatctcctggttgaccaacggcgtaccaatcgagatagcgcctgacgacccatctcgcaagatagatggggatacaataattttctctaacgtacaggagcgaagcagcgcggtgtatcaatgcaatgcaagcaacgagtacgggtaccttcttgccaacgccttcgtgaatgtcctggcagagccacctcggatcttgaccccggccaataccctgtaccaggtgatagcaaacaggcctgcactgctggactgtgcctttttcggcagccctttaccaactattgaatggtttaagggagctaagggctctgccctgcacgaggatatttatgtcctgcatgaaaacgggacattggaaatcccggtggctcaaaaagacagcaccggtacatatacttgcgtagcccgcaataaactaggcatggcgaagaatgaggtgcaccttgaaatcaaggatccaacatggattgttaagcaaccagaatacgcggtggtgcagaggggaagtatggtgagctttgagtgcaaagtaaaacatgaccatactttgtctctcacggtgttgtggctcaaggacaaccgagagctgccatctgacgagaggtttacagtagacaaagatcatcttgtggtggccgacgtcagcgacgacgacagcggaacctacacttgcgtcgccaacacaactttagacagcgtatcagccagcgctgtgttatccgtggtggctccaacgccaactcctgcccccgtatatgacgtacctaatccgccctttgatctggagttgacagatcaactggataagtcagtgcagctctcatggacgccgggagatgataataacagccctattacaaagttcatcatcgagtacgaagatgccatgcacaagccaggcctgtggcaccaccagacagaagtatccgggacacaaacaaccgctcagctcaaactgtcaccctatgtcaattacagtttcagagttatggccgtgaatagcattgggaagagtctccccagcgaggcaagtgagcaatatctcactaaagccagcgaacccgacaaaaaccctaccgcggtggaagggcttggctccgagcctgacaacctggtcattacctggaagcccttgaacggctttgagtctaacggtccggggctgcagtataaggtatcgtggaggcagaaggacggggacgatgagtggacatccgtggtggtcgctaacgtctcgaaatacattgtttcgggtacaccgaccttcgtgccttaccttataaaagttcaggctcttaatgacatgggattcgcccccgagcccgccgttgtgatgggccattccggagaagacttgcctatggtggctcccggcaacgtccgggtgaatgtagtcaattcgacgctcgccgaggtgcactgggatcccgtgcccctaaaatccattcggggtcacctccagggatacagaatctactactggaaaacacagtcgtcttccaaaaggaatcgacggcatattgaaaagaaaatcctgacattccaggggtctaagacacacggcatgctgcccggactggaacccttctcccactatacactaaatgtccgggtggtgaatggaaagggtgaggggccagctagccccgatcgtgtgtttaacactcccgaaggggtgccatctgcgccgtccagcctgaaaatcgtgaaccctacactggatagcctaactctggagtgggatcctccctcccatccaaatggcatcctcactgagtacaccttaaagtaccagcccattaattcaacacatgaactgggcccgctggtagatctgaaaatccctgctaacaaaacacggtggacacttaaaaacttgaatttcagcacccgttataaattctacttctatgcacagacatccgctggcagcggctctcagataacagaagaggcagtgaccaccgtggatgaggcaggcatcctcccaccagatgtcggggcaggaaaggtccaagccgtgaatccccggattagcaacctgacagctgctgccgccgagacttacgccaacattagctgggagtacgagggtcctgagcacgtcaatttttacgtcgaatatggtgtcgcaggaagtaaggaggaatggagaaaagaaattgtcaacggctctcgttcctttttcggccttaagggattaatgcctggcacagcctataaggtcagagtgggagctgtgggtgattcaggatttgtatctagcgaagatgtctttgagactggcccagcaatggcttccaggcaggttgacatcgctactcagggatggtttattggccttatgtgcgcagtggcgctgctcatcctgattctgctgattgtatgctttataaggcgcaataagggaggaaagtaccccgtaaaagagaaggaggatgcccatgccgaccctgagatccaaccaatgaaagaagacgacggtacctttggcgagtatagactattttcattcgtctcctccgcaagcttttag

SEQ ID NO: 307261 - DNA, 4182 bp, Artificial Sequence
  derived and/or modified sequence
cgcgcgggcgcgggggacggcgcaggggccgcctggctggagcagccagaggggatagcttcgtcgagaacggaggacaccggcggtccagggtcctgggcagtcgcgccagagctgagcggagggcgcggcgcgagaacgaatctttgtgacattctctctcagcattctttatcccctgtttgctgaagacttcgacaaaagctggtcttagctgttggcattctcctgagaaaaggatagcttcagaaatcagaaaaacatttgggaggtgtctagcccagtggaccttctgaagagcaatgctaagaagacgtttggtttaaagaattaaaaggaagaacaacttaagagcttcttcaaagtttcccgcatgaaaattacttaaacgttgcacacaacgtttcacaaaatcttttgtgaaagaagaaaaggaaattcagtgtgtgagtctcagcaggagttaagctaatgcagcttaaaataatgccgaaaaagaagcgcttatctgcgggcagagtgcccctgattctcttcctgtgccagatgattagtgcactggaagtacctcttgatcaaaaatctactgaagtaatggtacagcctccaaccatcacccaacagtctccaaaagattacattattgaccctcgggagaatattgtaatccagtgtgaagccaaagggaaaccgcccccaagcttttcctggacccgtaatgggactcattttgacatcgataaagaccctctggtcaccatgaagcctggcacaggaacgctcataattaacatcatgagcgaagggaaagctgagacctatgaaggagtctatcagtgtacagcaaggaacgaacgcggagctgcagtttctaataacattgttgtccgcccatccagatcaccattgtggaccaaagaaaaacttgaaccaatcacacttcaaagtggtcagtctttagtacttccctgcagacccccaattggattaccaccacctataatattttggatggataattcctttcaaagacttccacaaagtgagagagtttctcaaggtttgaatggggacctttatttttccaatgtcctcccagaggacacccgcgaagactatatctgttatgctagatttaatcatactcaaaccatacagcagaagcaacctatttctgtgaaggtgatttcagtggatgaattgaatgacactatagctgctaatttgagtgacactgagttttatggtgctaaatcaagtagagagaggccaccaacatttttaactccagaaggcaatgcaagtaacaaagaggaattaagaggaaatgtgctttcactggagtgcattgcagaaggactgcctaccccaattatttactgggcaaaggaagatggaatgctacccaaaaacaggacagtttataagaactttgagaaaaccttgcagatcattcatgtttcagaagcagactctggaaattaccaatgtatagcaaaaaacgcattaggagccatccaccataccatttctgttagagttaaagcggctccatactggatcacagcccctcaaaatcttgtgctgtccccaggagaggatgggaccttgatctgcagagctaatggcaaccccaaacccagaattagctggttaacaaatggagtcccaatagaaattgcccctgatgaccccagcagaaaaatagatggcgataccattattttttcaaatgttcaagaaagatcaagtgcagtctatcagtgcaatgcctctaatgaatatggatatttactggcaaacgcatttgtaaatgtgctggctgagccaccacgaatcctcacacctgcaaacacactctaccaggtcattgcaaacaggcctgctttactagactgtgccttctttgggtctcctctcccaaccatcgagtggtttaaaggagctaaaggaagtgctcttcatgaagatatttatgttttacatgaaaatggaactttggaaattcctgtggcccaaaaggacagtacaggaacttatacgtgtgttgcaaggaataaattagggatggcgaagaatgaagttcacttagaaatcaaagatcctacatggatcgttaaacagcccgaatatgcagttgtgcaaagagggagcatggtgtcctttgaatgcaaagtgaaacatgatcacaccttatccctcactgtcctgtggctgaaggacaacagggaactgcccagtgatgaaaggttcactgttgacaaggatcatctagtggtagctgatgtcagtgacgatgacagcgggacctacacgtgtgtggccaacaccactctggacagcgtctccgccagcgctgtgcttagcgttgttgctcctactccaactccagctcccgtttacgatgtcccaaatcctccctttgacttagaactgacagatcaacttgacaaaagtgttcagctgtcatggaccccaggcgatgacaacaatagccccattacaaaattcatcatcgaatatgaagatgcaatgcacaagccagggctgtggcaccaccaaactgaagtttctggaacacagaccacagcccagctgaagctgtctccttacgtgaactactccttccgcgtgatggcagtgaacagcattgggaagagcttgcccagcgaggcgtctgagcagtatttgacgaaagcctcagaaccagataaaaaccccacagctgtggaaggactgggatcagagcctgataatttggtgattacgtggaagcccttgaatggtttcgaatctaatgggccaggccttcagtacaaagttagctggcgccagaaagatggtgatgatgaatggacatctgtggttgtggcaaatgtatccaaatatattgtctcaggcacgccaacctttgttccatacctgatcaaagttcaggccctgaatgacatggggtttgcccccgagccagctgtagtcatgggacattctggagaagacctcccaatggtggctcctgggaacgtgcgtgtgaatgtggtgaacagtaccttagccgaggtgcactgggacccagtacctctgaaaagcatccgaggacacctacaaggctatcggatttactattggaagacccagagttcatctaaaagaaacagacgtcacattgagaaaaagatcctcaccttccaaggcagcaagactcatggcatgttgccggggctagagccctttagccactacacactgaatgtccgagtggtcaatgggaaaggggagggcccagccagccctgacagagtctttaatactccagaaggagtccccagtgctccctcgtctttgaagattgtgaatccaacactggactctctcactttggaatgggatccaccgagccacccgaatggcattttgacagagtacaccttaaagtatcagccaattaacagcacacatgaattaggccctctggtagatttgaaaattcctgccaacaagacacggtggactttaaaaaatttaaatttcagcactcgatataagttttatttctatgcacaaacatcagcaggatcaggaagtcaaattacagaggaagcagtaacaactgtggatgaagctggtattcttccacctgatgtaggtgcaggcaaagttcaagcagtaaatcccaggatcagcaatcttactgctgcagctgctgagacctatgccaatatcagttgggaatatgagggaccagagcatgtgaacttttatgttgaatatggtgtagcaggcagcaaagaagaatggagaaaagaaattgtaaatggttctcggagcttctttgggttaaagggtctaatgccaggaacagcatacaaagttcgagttggtgctgtgggggactctggttttgtgagttcagaggatgtgtttgagacaggcccagcgatggcaagccggcaggtggatattgcaactcagggctggttcattggtctgatgtgtgctgttgctctccttatcttaattttgctgattgtttgcttcatcagaagaaacaagggtggtaaatatccagttaaagaaaaggaagatgcccatgctgaccctgaaatccagcctatgaaggaagatgatgggacatttggagaatacaggctgttttcatttgtttcttctgcatccttttaa

SEQ ID NO: 307262 - DNA, 3711 bp, Artificial Sequence
  derived and/or modified sequence
atgcagctcaagatcatgcccaaaaagaaacgcctgtccgccggaagagtccctttgatcctgtttctctgccagatgatcagcgctttagaggtgcccttggatcaaaagtctactgaagtgatggtacagccccctaccatcacccagcagtcccccaaagattacatcatcgaccctagggagaacattgtcattcaatgtgaggccaaaggcaagccaccaccatcttttagttggacccggaatgggacgcatttcgacatagacaaagatcccctggttaccatgaagccaggcactggcactctgatcattaacattatgtctgaaggaaaggctgaaacatatgaaggcgtgtatcagtgtactgcacgcaatgagcgcggagcagctgtgagcaataatatcgtggttagaccttctaggagcccactatggactaaggagaagctggagccaatcactctccaatcaggccagagtctcgttttgccatgcagacccccaattggcttaccacccccaatcatattttggatggacaatagcttccagcgcctaccccaaagcgagcgcgtcagccagggcctgaatggcgacctctattttagcaacgtgctcccggaggatacgagggaagactacatttgttatgcccgattcaaccatacccagaccatccagcagaaacagccgatctcggtcaaagtaataagcgtcgacgagctaaacgataccattgctgcgaatttgtctgataccgaattttacggggctaaatcatcccgcgagagaccacctacctttttgacaccagaaggcaatgcttcaaataaggaagagcttcggggtaacgttctttccttagaatgcatcgcggagggcttacccactccgatcatatactgggccaaggaggatggaatgctaccaaagaaccggaccgtgtacaagaacttcgagaagactttgcaaatcatccacgtttctgaggccgacagtggcaattatcaatgcattgccaaaaacgcccttggagctattcatcacaccatctcagtcagagtaaaagccgcaccctactggatcactgccccacagaatctcgtgctgtctcctggtgaagatggcacgttgatttgcagggctaatgggaatccgaagcccagaatctcctggctgaccaatggcgtgccaattgaaatcgccccagacgatccttctaggaaaatcgatggtgatacaattatttttagcaatgtccaggaacggagctccgccgtgtatcaatgcaacgcctctaatgagtacggttatcttctggccaacgccttcgtgaacgtcctcgccgagcctcctcggatcctaactccagccaacacactgtaccaggtgattgccaatcggccagccctactggactgtgctttttttggctcgcctctgcccacaatagaatggttcaagggggctaaaggctcagccttacatgaggacatttacgtcctgcatgaaaatggtacactcgaaatccccgtggcgcagaaggatagtacgggaacctatacatgtgttgcacgcaacaagctggggatggcaaagaatgaagttcacctggagattaaggaccctacctggatcgttaaacagccagaatatgcggtcgtgcagcgcggatctatggtgtctttcgagtgtaaggtgaagcacgaccacacattatctcttacagtcctttggctcaaggataacagggagttacccagtgatgaaagatttacggtcgacaaagatcatctagtagtggcggacgtgtccgacgatgattccggtacctatacatgtgtggccaatacgactctggatagcgtgtccgccagtgcagttttgtctgtggtggctcctacaccaacacctgcaccggtctacgacgttccaaacccccctttcgatctcgagctcacagatcaactggataagtctgtccagctatcgtggacacccggagacgacaataatagccctataactaaatttatcattgaatatgaggatgccatgcacaagcctgggctctggcatcatcagaccgaggtctctggcacacagactactgctcagctgaagctaagcccgtacgtgaactactctttccgcgtgatggccgtgaatagcatagggaagtccctgccttcagaagcatcagagcaatatctcacaaaggcctctgagcccgataaaaaccccacagcagttgagggcctggggtcagagcccgacaacttagttattacttggaaacctctcaacggttttgagagcaatggcccagggcttcagtacaaagtgtcttggagacagaaagatggggatgacgagtggaccagcgtagtggtagcaaacgtttccaaatatatagtcagcgggactccaacatttgtgccatacttaatcaaagtccaggcgctgaatgacatgggtttcgctcccgaacccgcagtggtgatggggcattcaggcgaagacttacctatggtggcacccggaaatgtgagagtaaacgtggtaaactccacccttgccgaagtacactgggacccagtaccacttaagtccattcgcggtcacctgcagggataccgcatctactattggaagacacagagctcttccaaaagaaatagaagacacatcgaaaagaagatcctaactttccagggctcaaaaacccacgggatgttgccaggtctcgaaccattttctcattatactttaaacgttagggttgtgaatggcaaaggggaagggccagctagtcccgatagagtgttcaacacccctgaaggcgttccatcagctcccagctccttgaagatcgtgaaccccaccctggatagtctgacgctggagtgggaccccccaagtcaccctaatggcattctcacagaatacactctgaagtatcagcctatcaatagtacacatgagctcggaccactggtggacttaaaaatcccagccaacaagactaggtggacactcaagaatctgaattttagtacccgctacaaattttacttttacgcccagactagcgccggatccggcagtcagattaccgaggaggcagttactacagtcgatgaggccggtatcctgcccccagatgtcggagcaggtaaagtacaggctgttaaccctaggatatcaaatttgaccgcggcagccgctgaaacatacgccaatattagctgggagtacgagggccctgagcatgtcaacttctatgttgaatacggtgttgcgggtagcaaggaggagtggcgtaaggaaattgtaaatggcagcagatcctttttcgggctgaagggtcttatgccaggaacagcctacaaagtgagagtgggggctgttggtgactctggatttgtctcgtctgaggacgtcttcgagaccggtccggctatggcttctcgccaggtcgacattgctactcagggctggtttattggactgatgtgcgcggtcgcactgctgattctgattctgctgattgtatgctttatacggcgaaacaagggaggtaagtaccctgtgaaggaaaaagaggacgcacacgccgatcccgaaattcagccgatgaaagaggacgatggcacatttggcgaatataggctattcagttttgtttcatcggcaagtttttag

SEQ ID NO: 307263 - DNA, 3711 bp, Artificial Sequence
  derived and/or modified sequence
atgcagctgaagatcatgcccaagaagaagagactgagcgccggcagagtgcccctgatcctgttcctgtgccagatgatcagcgccctggaggtgcccctggaccagaagagcaccgaggtgatggtgcagccccccaccatcacccagcagagccccaaggactacatcatcgaccccagagagaacatcgtgatccagtgcgaggccaagggcaagcccccccccagcttcagctggaccagaaacggcacccacttcgacatcgacaaggaccccctggtgaccatgaagcccggcaccggcaccctgatcatcaacatcatgagcgagggcaaggccgagacctacgagggcgtgtaccagtgcaccgccagaaacgagagaggcgccgccgtgagcaacaacatcgtggtgagacccagcagaagccccctgtggaccaaggagaagctggagcccatcaccctgcagagcggccagagcctggtgctgccctgcagaccccccatcggcctgcccccccccatcatcttctggatggacaacagcttccagagactgccccagagcgagagagtgagccagggcctgaacggcgacctgtacttcagcaacgtgctgcccgaggacaccagagaggactacatctgctacgccagattcaaccacacccagaccatccagcagaagcagcccatcagcgtgaaggtgatcagcgtggacgagctgaacgacaccatcgccgccaacctgagcgacaccgagttctacggcgccaagagcagcagagagagaccccccaccttcctgacccccgagggcaacgccagcaacaaggaggagctgagaggcaacgtgctgagcctggagtgcatcgccgagggcctgcccacccccatcatctactgggccaaggaggacggcatgctgcccaagaacagaaccgtgtacaagaacttcgagaagaccctgcagatcatccacgtgagcgaggccgacagcggcaactaccagtgcatcgccaagaacgccctgggcgccatccaccacaccatcagcgtgagagtgaaggccgccccctactggatcaccgccccccagaacctggtgctgagccccggcgaggacggcaccctgatctgcagagccaacggcaaccccaagcccagaatcagctggctgaccaacggcgtgcccatcgagatcgcccccgacgaccccagcagaaagatcgacggcgacaccatcatcttcagcaacgtgcaggagagaagcagcgccgtgtaccagtgcaacgccagcaacgagtacggctacctgctggccaacgccttcgtgaacgtgctggccgagccccccagaatcctgacccccgccaacaccctgtaccaggtgatcgccaacagacccgccctgctggactgcgccttcttcggcagccccctgcccaccatcgagtggttcaagggcgccaagggcagcgccctgcacgaggacatctacgtgctgcacgagaacggcaccctggagatccccgtggcccagaaggacagcaccggcacctacacctgcgtggccagaaacaagctgggcatggccaagaacgaggtgcacctggagatcaaggaccccacctggatcgtgaagcagcccgagtacgccgtggtgcagagaggcagcatggtgagcttcgagtgcaaggtgaagcacgaccacaccctgagcctgaccgtgctgtggctgaaggacaacagagagctgcccagcgacgagagattcaccgtggacaaggaccacctggtggtggccgacgtgagcgacgacgacagcggcacctacacctgcgtggccaacaccaccctggacagcgtgagcgccagcgccgtgctgagcgtggtggcccccacccccacccccgcccccgtgtacgacgtgcccaacccccccttcgacctggagctgaccgaccagctggacaagagcgtgcagctgagctggacccccggcgacgacaacaacagccccatcaccaagttcatcatcgagtacgaggacgccatgcacaagcccggcctgtggcaccaccagaccgaggtgagcggcacccagaccaccgcccagctgaagctgagcccctacgtgaactacagcttcagagtgatggccgtgaacagcatcggcaagagcctgcccagcgaggccagcgagcagtacctgaccaaggccagcgagcccgacaagaaccccaccgccgtggagggcctgggcagcgagcccgacaacctggtgatcacctggaagcccctgaacggcttcgagagcaacggccccggcctgcagtacaaggtgagctggagacagaaggacggcgacgacgagtggaccagcgtggtggtggccaacgtgagcaagtacatcgtgagcggcacccccaccttcgtgccctacctgatcaaggtgcaggccctgaacgacatgggcttcgcccccgagcccgccgtggtgatgggccacagcggcgaggacctgcccatggtggcccccggcaacgtgagagtgaacgtggtgaacagcaccctggccgaggtgcactgggaccccgtgcccctgaagagcatcagaggccacctgcagggctacagaatctactactggaagacccagagcagcagcaagagaaacagaagacacatcgagaagaagatcctgaccttccagggcagcaagacccacggcatgctgcccggcctggagcccttcagccactacaccctgaacgtgagagtggtgaacggcaagggcgagggccccgccagccccgacagagtgttcaacacccccgagggcgtgcccagcgcccccagcagcctgaagatcgtgaaccccaccctggacagcctgaccctggagtgggacccccccagccaccccaacggcatcctgaccgagtacaccctgaagtaccagcccatcaacagcacccacgagctgggccccctggtggacctgaagatccccgccaacaagaccagatggaccctgaagaacctgaacttcagcaccagatacaagttctacttctacgcccagaccagcgccggcagcggcagccagatcaccgaggaggccgtgaccaccgtggacgaggccggcatcctgccccccgacgtgggcgccggcaaggtgcaggccgtgaaccccagaatcagcaacctgaccgccgccgccgccgagacctacgccaacatcagctgggagtacgagggccccgagcacgtgaacttctacgtggagtacggcgtggccggcagcaaggaggagtggagaaaggagatcgtgaacggcagcagaagcttcttcggcctgaagggcctgatgcccggcaccgcctacaaggtgagagtgggcgccgtgggcgacagcggcttcgtgagcagcgaggacgtgttcgagaccggccccgccatggccagcagacaggtggacatcgccacccagggctggttcatcggcctgatgtgcgccgtggccctgctgatcctgatcctgctgatcgtgtgcttcatcagaagaaacaagggcggcaagtaccccgtgaaggagaaggaggacgcccacgccgaccccgagatccagcccatgaaggaggacgacggcaccttcggcgagtacagactgttcagcttcgtgagcagcgccagcttctag

SEQ ID NO: 307264 - protein, 106 aa, Artificial Sequence
  derived and/or modified sequence
MQLKIMPKKKRLSAGRVPLILFLCQMISALEVPLDLVQPPTITQQSPKDYIIDPRENIVIQCEAKGKPPPSFSWTRNGTHFDIDKDPLVTMKPGTGTLIINIMSEG

SEQ ID NO: 307265 - DNA, 2316 bp, Artificial Sequence
  derived and/or modified sequence
atgcagctcaaaataatgcctaagaagaagaggttgagcgctggcagagtccccctgatactcttcctctgccagatgatctccgccctggaggtaccgttagatttagtccagccacctacaattacccaacaaagtccgaaggattatatcattgaccctagagagaacatcgtgattcagtgtgaggccaagggcaagccaccaccatcttttagctggacgagaaacggcacgcactttgacattgacaaggatccactggtgaccatgaaacctgggacaggcacattgattattaatataatgtccgagggcaaagccgagacctatgagggggtctaccagtgtacagcgcggaacgaaaggggggcagctgtctctaacaatatagtggtgcgcccaagcagatctccactgtggactaaagagaagttggaaccaatcactcttcagtctgggcagtctcttgttcttccgtgcagaccacctattggccttccaccaccgatcattttctggatggataattcattccagagactgccccaatcagagcgggtaagccaggggcttaatggtgatttgtatttctctaacgttttacccgaagacaccagagaggactacatttgttacgccaggtttaatcatactcagacaatacagcaaaagcagcctattagtgtgaaggtgattagcgtggacgagctgaacgacactatcgcggcgaaccttagcgatacagaattctacggggccaaatcatctagagagcggccacccacatttcttactcccgagggaaacgcgtctaataaagaggagctcagaggtaatgtcctctccctcgagtgtattgccgaagggctccctacaccaattatttattgggccaaagaggacggcatgctgcctaagaaccgcacagtttataagaatttcgagaagactcttcaaatcatccacgtcagtgaggccgattcagggaattatcagtgcatcgctaaaaatgctctgggcgcaattcaccataccatttccgtgagagtgaaagccgcaccatactggattactgcacctcagaacctcgtcctgagtcctggggaagacggtacgcttatttgtcgggcaaacggaaaccctaaacctcgaattagttggcttacaaatggagtccccatcgagatcgccccagacgaccctagccggaagatcgacggcgacactatcattttcagcaatgtgcaggagcgatccagcgccgtatatcaatgtaatgcatcaaatgagtatgggtatttactggcaaacgcctttgttaatgttctggccgagccacctcgcatcctcacaccagctaacaccttgtaccaggtgattgccaaccgaccggcccttttggattgtgctttttttggatctcccctaccgaccattgagtggtttaaaggagccaaaggatctgctctgcatgaggatatatatgttctccacgagaatggaacgctcgagatacctgttgcacagaaggacagcacaggtacatacacatgcgtggctcgaaacaaattgggaatggccaagaacgaggtgcatctggagattaaagatccgacctggatcgtgaagcagcccgagtatgctgtcgtccagagaggatctatggtgtcttttgagtgtaaggtaaaacatgaccacacactatccttaacagtgctgtggctgaaggacaatcgcgaactaccctctgacgaacgctttacagttgacaaagatcacttggtggttgctgatgtttctgatgatgactctggtacatacacttgtgttgcaaacacaacccttgacagcgtgagcgcctctgcagtccttagtgtggttgatgttccaaacccaccttttgacctggaacttactgatcaattggacaagagtgtccagttaagttggacaccgggcgatgacaataactcacccatcacaaaattcatcatcgagtacgaggacgctatgcataaacccgggttatggcaccaccagaccgaggtaagtggtacgcagaccaccgctcagctgaagctgagtccttacgtgaattactcattccgggtgatggctgtcaatagtattgggaagagcctgccaagtgaggcttccgagcagtacctgactaaggcttctgagcccgataagaatccaaccgctgtggaggggctcggttctgagcctgacaacctcgtcattacttggaaaccgctcaacggtttcgaatccaatgggccgggattacagacttccaccgcgtctttctag

SEQ ID NO: 307266 - DNA, 2316 bp, Artificial Sequence
  derived and/or modified sequence
atgcagctgaagatcatgcccaagaagaagaggctgtctgctggccgggtgcccctcatcctcttcctgtgccagatgatcagcgccctggaggtgcccctggacctggtgcagccccccaccatcacccagcagagccccaaggactacatcatcgacccccgggagaacatcgtcatccagtgtgaggccaagggcaagcccccacccagcttctcctggaccagaaatggcacccactttgatattgacaaggaccccctggtgaccatgaagccaggcaccggcaccctcatcatcaacatcatgtctgagggcaaggccgagacctatgaaggagtgtaccagtgcacagccagaaatgaaagaggagctgctgtgagcaacaacatcgtggtgcggcccagccgcagccccctgtggaccaaggagaagctggagcccatcaccctgcagagcggccagagcctggtgctgccctgcaggcctcccatcggcctgcccccacccatcatcttctggatggacaacagcttccagaggctgccccagagcgagcgggtgtcccagggcctgaatggagacctgtacttcagcaatgtgctgcctgaggacacccgggaggactacatctgctacgcccgcttcaaccacacccagaccatccagcagaagcagcccatctctgtgaaggtgatctctgtggatgagctgaatgacaccatcgccgccaacctgagtgacacagagttctacggggccaagagcagccgggagaggcctcccaccttcctgaccccagagggcaatgccagcaacaaggaggagctgcggggaaatgtgctgagcctggagtgcatcgccgagggcctgcccacccccatcatctactgggccaaggaggatggcatgctgcccaagaacagaacagtgtacaagaactttgagaagaccctgcagatcatccacgtgtctgaggccgacagcggcaactaccagtgcatcgccaagaatgccctgggcgccatccaccacaccatctctgtgcgggtgaaggccgccccctactggatcacagccccccagaacctggtgctgagccctggagaagatggcaccctcatctgccgggccaatggaaaccccaagccccgcatctcctggctgaccaatggagtgcccattgaaattgccccagatgaccccagcaggaagattgatggagacaccatcatcttcagcaatgtgcaggagaggagcagcgctgtgtaccagtgcaatgccagcaatgaatatggctacctgctggccaatgcctttgtgaatgtgctggccgagcccccacgcatcctgaccccagccaacaccctgtaccaggtgattgccaacagacctgccctgctggactgtgccttcttcggcagccccctgcccaccatcgagtggttcaagggggccaagggcagcgccctgcacgaggacatctacgtgctgcatgaaaatggcaccctggagatccctgtggcccagaaggacagcacaggcacctacacctgtgtggccaggaacaagctgggcatggccaagaatgaggtgcacctggagatcaaggaccccacctggatcgtgaagcagccagaatatgctgtggtgcagaggggctccatggtgtcctttgagtgcaaggtgaagcatgaccacaccctgagcctgactgtgctgtggctgaaggacaaccgggagctgcccagtgatgagcgcttcaccgtggacaaggaccacctggtggtggctgatgtgtctgatgatgattctggcacctacacctgtgtggccaacaccaccctggacagcgtgtctgccagcgctgtgctgtctgtggtggatgtgcccaaccccccatttgacctggagctgacagaccagctggacaagtctgtgcagctgtcctggaccccaggagatgacaacaacagccccatcaccaagttcatcatcgagtatgaagatgccatgcacaagccaggcctgtggcaccaccagacagaggtgtctggcacccagaccacagcccagctgaagctgagcccctacgtgaactacagcttccgggtgatggctgtgaacagcatcggcaagagcctgcccagcgaggccagcgagcagtacctgaccaaggccagcgagccagacaagaaccccacagctgtggagggcctgggcagcgagccagacaacctggtgatcacctggaagcccctgaatggatttgagagcaatggacctggcctgcagaccagcacagccagcttctag

SEQ ID NO: 307267 - DNA, 2316 bp, Artificial Sequence
  derived and/or modified sequence
atgcagctgaagatcatgcccaagaagaagcggctgagcgccggcagggtgcctctcatccttttcctatgccaaatgatttctgccctcgaggtcccattggatcttgtgcagccccccacaataacccagcagagtcccaaagattatattatcgaccctagggagaatatcgtgattcagtgtgaggccaaaggaaagccgccacccagcttctcatggacacgaaatggtactcacttcgatatagacaaagaccccctggtcactatgaaacctggaaccggcactcttatcataaatatcatgtcggaaggcaaggctgaaacgtatgaaggggtgtaccagtgcaccgcacgcaacgagaggggggctgctgtgagcaacaatatcgtggtcaggccatcccgctcacccctgtggacaaaggagaaattggagcctataaccttgcagagtggtcaatctctggtgctaccctgtaggcctcctattggtcttccccctcccataattttctggatggacaactcctttcagagactcccccagtctgagagagtgtcccaaggattgaatggcgacctgtacttctccaacgtcctcccggaggatacgagggaagactatatttgctacgccagattcaatcacactcagacaatccagcaaaaacagcccatttctgtgaaagtgatatctgtggacgagctcaatgacacgatagctgcgaatctgtcagacacggaattttacggagcgaagagctccagggagcgtcccccaacttttctaacgcccgaaggcaatgcttccaacaaggaagagctgcggggcaatgtattaagcctggagtgcattgccgaagggctgcccaccccaattatatattgggcgaaagaggacggtatgctgcccaaaaacagaacagtctacaaaaacttcgagaaaaccctgcaaattatccatgtgtcagaagccgattctgggaattaccaatgtatcgcaaagaatgccctgggggcgatacaccacaccatctccgtgcgggtgaaggcggccccttactggattaccgcaccacaaaacttggtactctcgcctggggaggatggcacactcatatgcagggctaacggcaatccaaagccccgaatctcttggctgactaatggagttccgatcgaaatcgcaccagacgacccaagcaggaaaattgatggggataccataattttcagtaacgtccaggaacggtcatctgcagtctatcagtgcaacgcctcaaatgagtacggatacttgttggctaacgcctttgttaacgtgctcgcagagccccccagaattctgacacctgccaatacactttatcaggtgattgccaaccggccggccctgctagactgcgccttcttcggctcacccctccccacgatcgagtggtttaagggagctaagggctctgccctgcatgaggatatctacgttctgcatgagaatggaacactggagattccagtcgcacagaaagactcaacaggaacatacacttgcgtggcccgaaataaacttggaatggccaagaacgaggtgcacctcgagatcaaggacccaacctggatcgtgaagcaaccggagtatgccgtcgtgcagagaggctcaatggtttcatttgagtgtaaggtcaaacacgaccatacactgtccctgacagtgctgtggctgaaggataatagggagctaccgagcgacgaacgctttacagtcgacaaagaccacctagtggtagccgatgtcagcgacgatgacagtggaacgtacacttgtgtcgcaaatactaccctggatagtgtctccgctagcgcggtcctcagcgttgttgacgttccaaatcccccgttcgatctggagctgacagaccaactcgacaagtccgtccagctgtcgtggacaccaggagacgataataactccccgatcacaaagtttattatcgaatacgaagatgcaatgcataagcccggcctgtggcatcaccaaaccgaggtctcaggaacccaaactacagcccagctgaagttaagcccctatgtgaactatagctttagggtgatggccgtcaactcgattggcaagtccctgccttccgaggcctccgaacagtatttaacgaaggcttccgaaccagacaagaatccaaccgccgtggagggactgggatctgaaccagataacctcgtaatcacatggaagccactcaacgggtttgaatcaaatggtccgggcctccagacaagtactgccagtttctag

SEQ ID NO: 307268 - DNA, 3025 bp, Artificial Sequence
  derived and/or modified sequence
agacgcgcgggcgcgggggacggcgcaggggccgcctggctggagcagccagaggggatagcttcgtcgagaacggaggacaccggcggtccagggtcctgggcagtcgcgccagagctgagcggagggcgcggcgcgagaacgaatctttgtgacattctctctcagcattctttatcccctgtttgctgaagacttcgacaaaagctggtcttagctgttggcattctcctgagaaaaggatagcttcagaaatcagaaaaacatttgggaggtgtctagcccagtggaccttctgaagagcaatgctaagaagacgtttggtttaaagaattaaaaggaagaacaacttaagagcttcttcaaagtttcccgcatgaaaattacttaaacgttgcacacaacgtttcacaaaatcttttgtgaaagaagaaaaggaaattcagtgtgtgagtctcagcaggagttaagctaatgcagcttaaaataatgccgaaaaagaagcgcttatctgcgggcagagtgcccctgattctcttcctgtgccagatgattagtgcactggaagtacctcttgatctggtacagcctccaaccatcacccaacagtctccaaaagattacattattgaccctcgggagaatattgtaatccagtgtgaagccaaagggaaaccgcccccaagcttttcctggacccgtaatgggactcattttgacatcgataaagaccctctggtcaccatgaagcctggcacaggaacgctcataattaacatcatgagcgaagggaaagctgagacctatgaaggagtctatcagtgtacagcaaggaacgaacgcggagctgcagtttctaataacattgttgtccgcccatccagatcaccattgtggaccaaagaaaaacttgaaccaatcacacttcaaagtggtcagtctttagtacttccctgcagacccccaattggattaccaccacctataatattttggatggataattcctttcaaagacttccacaaagtgagagagtttctcaaggtttgaatggggacctttatttttccaatgtcctcccagaggacacccgcgaagactatatctgttatgctagatttaatcatactcaaaccatacagcagaagcaacctatttctgtgaaggtgatttcagtggatgaattgaatgacactatagctgctaatttgagtgacactgagttttatggtgctaaatcaagtagagagaggccaccaacatttttaactccagaaggcaatgcaagtaacaaagaggaattaagaggaaatgtgctttcactggagtgcattgcagaaggactgcctaccccaattatttactgggcaaaggaagatggaatgctacccaaaaacaggacagtttataagaactttgagaaaaccttgcagatcattcatgtttcagaagcagactctggaaattaccaatgtatagcaaaaaacgcattaggagccatccaccataccatttctgttagagttaaagcggctccatactggatcacagcccctcaaaatcttgtgctgtccccaggagaggatgggaccttgatctgcagagctaatggcaaccccaaacccagaattagctggttaacaaatggagtcccaatagaaattgcccctgatgaccccagcagaaaaatagatggcgataccattattttttcaaatgttcaagaaagatcaagtgcagtctatcagtgcaatgcctctaatgaatatggatatttactggcaaacgcatttgtaaatgtgctggctgagccaccacgaatcctcacacctgcaaacacactctaccaggtcattgcaaacaggcctgctttactagactgtgccttctttgggtctcctctcccaaccatcgagtggtttaaaggagctaaaggaagtgctcttcatgaagatatttatgttttacatgaaaatggaactttggaaattcctgtggcccaaaaggacagtacaggaacttatacgtgtgttgcaaggaataaattagggatggcgaagaatgaagttcacttagaaatcaaagatcctacatggatcgttaaacagcccgaatatgcagttgtgcaaagagggagcatggtgtcctttgaatgcaaagtgaaacatgatcacaccttatccctcactgtcctgtggctgaaggacaacagggaactgcccagtgatgaaaggttcactgttgacaaggatcatctagtggtagctgatgtcagtgacgatgacagcgggacctacacgtgtgtggccaacaccactctggacagcgtctccgccagcgctgtgcttagcgttgttgatgtcccaaatcctccctttgacttagaactgacagatcaacttgacaaaagtgttcagctgtcatggaccccaggcgatgacaacaatagccccattacaaaattcatcatcgaatatgaagatgcaatgcacaagccagggctgtggcaccaccaaactgaagtttctggaacacagaccacagcccagctgaagctgtctccttacgtgaactactccttccgcgtgatggcagtgaacagcattgggaagagcttgcccagcgaggcgtctgagcagtatttgacgaaagcctcagaaccagataaaaaccccacagctgtggaaggactgggatcagagcctgataatttggtgattacgtggaagcccttgaatggtttcgaatctaatgggccaggccttcagacaagtactgcctctttttaaaatattaggtttgagtccatctaaaggcaaagtcattatgtgttttgagaggatggttttattaaatataaatgtaaatgacaagagagaaaaaggaagagaataactaaatgggtgcctgtcacaggtttgtactaatgtattttcagctgaatcaggaatgagttactgaaactcaaaaccttgaatcgtgcgagcacggtgaaatgtcaatttaatacatgttgaaacattc

SEQ ID NO: 307269 - DNA, 2316 bp, Artificial Sequence
  derived and/or modified sequence
atgcagctcaaaatcatgccgaaaaaaaaaaggctaagcgctggcagggtacctctcatcctgttcctctgtcagatgatttccgcccttgaagttccattggatctggttcaaccgccaaccataacgcagcagagccccaaggactatattattgatccccgagaaaacatcgtcatccagtgcgaagccaaggggaagccccctccctccttctcatggacacggaacggtacccattttgatatcgataaagatccactcgtgactatgaaaccgggaaccggcacattaattatcaatatcatgtctgagggcaaggctgagacttacgaaggcgtgtatcagtgcacagcgagaaacgagcgcggtgcggctgtctccaataatattgtggtgcgtccatcccggtcccctctctggacaaaggaaaagctggaaccaattacattacagagtgggcagagcctggttctgccatgcagaccccctataggtctgccgcctccaatcatattctggatggacaattcctttcaaaggctccctcagagcgaacgggtgtcacagggactgaacggggacctgtatttctctaatgttctgcctgaggacacgagagaggactatatctgttatgctcgatttaatcacactcagactattcagcagaagcagcccatttccgttaaagtgatctcggtggacgagctgaacgacaccatcgctgccaatctgtccgataccgaattctacggtgccaagtcctcccgcgaacgtccccctacctttctcactcccgagggaaatgcgtccaacaaagaggagcttcgcggaaacgtgctgagcctggagtgcatcgcagaaggcctgcccaccccaatcatatattgggccaaggaggacggaatgcttccaaagaatcgtaccgtgtacaaaaacttcgaaaagaccctacagatcatacacgtgagcgaggcggacagtggcaattatcagtgcatagccaagaatgcactgggtgccatccaccataccataagtgtcagagtcaaagcagcaccatactggattacggcccctcagaatctggtactgagtcccggagaggatggaacccttatctgtagagccaatgggaacccaaagcccagaatctcgtggttaaccaacggggtgcctatagagatcgccccagacgacccgagcaggaaaattgatggagacactataatatttagcaatgtgcaggagcgctcctccgccgtttatcagtgcaacgccagcaatgaatatggctatctgctggccaatgcctttgtgaatgtccttgctgaacctccaagaattctgactcccgcaaacacactgtaccaagtgatcgcaaataggccagcactgttggactgcgctttctttgggtctcctttacctactatcgaatggtttaagggggctaaggggagcgccctccacgaagacatctatgttctgcacgagaatggaactctggagatccccgtcgctcaaaaagacagcaccggcacatacacttgcgttgcaaggaataagctgggaatggctaagaatgaggtccatctggagatcaaggaccccacctggatagtgaaacagccagaatatgctgttgtgcagcggggttctatggtgtccttcgaatgcaaggtaaaacatgaccatacactaagcctgaccgttctgtggctgaaggacaaccgcgagcttcctagtgacgagcgttttacagtggataaggatcatctggtagttgccgacgtaagtgatgatgattctggaacttatacttgtgttgctaacacaaccctggactcggtgagtgcctcagctgtgctttcagtggttgatgtccctaatcccccattcgatctggagctgacggaccagctggacaaatccgtgcagctaagctggactcccggtgacgataacaattctccaattacgaaattcataatcgaatacgaagacgctatgcacaagccagggctatggcaccaccagaccgaggtgagcggtactcaaacaaccgctcagctgaagctctctccctacgtcaactatagcttcagggttatggccgtgaactctattgggaaatctctgccctccgaagcctcagagcagtacctgactaaggcaagcgaaccggataaaaatcctacagccgttgagggcttaggcagtgaacccgacaacttagttattacctggaaacctttaaatgggtttgagtcaaacggaccgggactgcagacttcaactgcgtcattctag

SEQ ID NO: 307270 - DNA, 2316 bp, Artificial Sequence
  derived and/or modified sequence
atgcagctgaagatcatgcccaagaagaagagactgagcgccggcagagtgcccctgatcctgttcctgtgccagatgatcagcgccctggaggtgcccctggacctggtgcagccccccaccatcacccagcagagccccaaggactacatcatcgaccccagagagaacatcgtgatccagtgcgaggccaagggcaagcccccccccagcttcagctggaccagaaacggcacccacttcgacatcgacaaggaccccctggtgaccatgaagcccggcaccggcaccctgatcatcaacatcatgagcgagggcaaggccgagacctacgagggcgtgtaccagtgcaccgccagaaacgagagaggcgccgccgtgagcaacaacatcgtggtgagacccagcagaagccccctgtggaccaaggagaagctggagcccatcaccctgcagagcggccagagcctggtgctgccctgcagaccccccatcggcctgcccccccccatcatcttctggatggacaacagcttccagagactgccccagagcgagagagtgagccagggcctgaacggcgacctgtacttcagcaacgtgctgcccgaggacaccagagaggactacatctgctacgccagattcaaccacacccagaccatccagcagaagcagcccatcagcgtgaaggtgatcagcgtggacgagctgaacgacaccatcgccgccaacctgagcgacaccgagttctacggcgccaagagcagcagagagagaccccccaccttcctgacccccgagggcaacgccagcaacaaggaggagctgagaggcaacgtgctgagcctggagtgcatcgccgagggcctgcccacccccatcatctactgggccaaggaggacggcatgctgcccaagaacagaaccgtgtacaagaacttcgagaagaccctgcagatcatccacgtgagcgaggccgacagcggcaactaccagtgcatcgccaagaacgccctgggcgccatccaccacaccatcagcgtgagagtgaaggccgccccctactggatcaccgccccccagaacctggtgctgagccccggcgaggacggcaccctgatctgcagagccaacggcaaccccaagcccagaatcagctggctgaccaacggcgtgcccatcgagatcgcccccgacgaccccagcagaaagatcgacggcgacaccatcatcttcagcaacgtgcaggagagaagcagcgccgtgtaccagtgcaacgccagcaacgagtacggctacctgctggccaacgccttcgtgaacgtgctggccgagccccccagaatcctgacccccgccaacaccctgtaccaggtgatcgccaacagacccgccctgctggactgcgccttcttcggcagccccctgcccaccatcgagtggttcaagggcgccaagggcagcgccctgcacgaggacatctacgtgctgcacgagaacggcaccctggagatccccgtggcccagaaggacagcaccggcacctacacctgcgtggccagaaacaagctgggcatggccaagaacgaggtgcacctggagatcaaggaccccacctggatcgtgaagcagcccgagtacgccgtggtgcagagaggcagcatggtgagcttcgagtgcaaggtgaagcacgaccacaccctgagcctgaccgtgctgtggctgaaggacaacagagagctgcccagcgacgagagattcaccgtggacaaggaccacctggtggtggccgacgtgagcgacgacgacagcggcacctacacctgcgtggccaacaccaccctggacagcgtgagcgccagcgccgtgctgagcgtggtggacgtgcccaacccccccttcgacctggagctgaccgaccagctggacaagagcgtgcagctgagctggacccccggcgacgacaacaacagccccatcaccaagttcatcatcgagtacgaggacgccatgcacaagcccggcctgtggcaccaccagaccgaggtgagcggcacccagaccaccgcccagctgaagctgagcccctacgtgaactacagcttcagagtgatggccgtgaacagcatcggcaagagcctgcccagcgaggccagcgagcagtacctgaccaaggccagcgagcccgacaagaaccccaccgccgtggagggcctgggcagcgagcccgacaacctggtgatcacctggaagcccctgaacggcttcgagagcaacggccccggcctgcagaccagcaccgccagcttctag

SEQ ID NO: 307271 - DNA, 186 bp, Artificial Sequence
  derived and/or modified sequence
atgcagcttaagatcatgcccaagaaaaaaagactgtccgccggaagggtgcccttgatcctcttcctatgccagatgatcagtgcactcgaagttccattggatccaaagcttctggaggatctcgtacaaccccccaccatcacacagcagagcccaaaggactatattatcgacccccgctag

SEQ ID NO: 307272 - DNA, 357 bp, Artificial Sequence
  derived and/or modified sequence
atgcagttaaagattatgcccaaaaaaaaacgactctctgcgggacgagttcccctaatcctcttcctctgccagatgatctccgcactggaggttccattagatcctaaactgttggaggacttggttcagccccccacaataacccagcaatcccctaaggactacattattgatcctagagaaaacatcgtcattcagtgcgaggccaagggaaaaccgccgccctccttttcttggacaaggaacggtactcacttcgacattgataaggaccctctggttacaatgaagccaggtaccggtaccctgattatcaatatcatgtccgaaggcaaggccgagacatatgaatag

SEQ ID NO: 307273 - DNA, 186 bp, Artificial Sequence
  derived and/or modified sequence
atgcagctgaagatcatgcccaagaagaagaggctgtctgctggccgggtgcccctcatcctcttcctgtgccagatgatcagcgccctggaggtgcccctggaccccaagctgctggaggacctggtgcagccccccaccatcacccagcagagccccaaggactacatcatcgaccccaggtag

SEQ ID NO: 307274 - DNA, 357 bp, Artificial Sequence
  derived and/or modified sequence
atgcagctgaagatcatgcccaagaagaagaggctgtctgctggccgggtgcccctcatcctcttcctgtgccagatgatcagcgccctggaggtgcccctggaccccaagctgctggaggacctggtgcagccccccaccatcacccagcagagccccaaggactacatcatcgacccccgggagaacatcgtcatccagtgtgaggccaagggcaagcccccacccagcttctcctggaccagaaatggcacccactttgatattgacaaggaccccctggtgaccatgaagccaggcaccggcaccctcatcatcaacatcatgtctgagggcaaggccgagacctatgaatag

SEQ ID NO: 307275 - DNA, 186 bp, Artificial Sequence
  derived and/or modified sequence
atgcagctgaagatcatgcccaagaagaagcggctgagcgccggccgggttccattaatcttattcctgtgccaaatgataagcgctcttgaggttcctctggaccctaagttgctggaggatctggtgcagccccccaccattacgcagcagtccccaaaggactacatcatcgacccaaggtag

SEQ ID NO: 307276 - DNA, 357 bp, Artificial Sequence
  derived and/or modified sequence
atgcagctgaagatcatgcccaagaagaagcggctgagcgccggccgtgtgcctttgatactctttctctgccaaatgatctccgccctcgaagtgcctttggacccgaagctgctagaggatctagtgcagcctcctacgatcacacagcaaagtcccaaggattacattatcgatccacgcgaaaacattgtgatccagtgcgaggccaaggggaagccaccgccgtcttttagctggactcgtaatggaacccattttgacattgataaggaccctttggtgaccatgaaaccaggaactggcactttaataatcaacatcatgagcgaggggaaggctgagacttacgagtag

SEQ ID NO: 307277 - DNA, 562 bp, Artificial Sequence
  derived and/or modified sequence
acacgcgctcgcaggctgacggaggttggcggtggggcggccgctcaggaatctttgtgacattctctctcagcattctttatcccctgtttgctgaagacttcgacaaaagctggtcttagctgttggcattctcctgagaaaaggatagcttcagaaatcagaaaaacatttgggaggtgtctagcccagtggaccttctgaagagcaatgctaagaagacgtttggtttaaagaattaaaaggaagaacaacttaagagcttcttcaaagtttcccgcatgaaaattacttaaacgttgcacacaacgtttcacaaaatcttttgtgaaagaagaaaaggaaattcagtgtgtgagtctcagcaggagttaagctaatgcagcttaaaataatgccgaaaaagaagcgcttatctgcgggcagagtgcccctgattctcttcctgtgccagatgattagtgcactggaagtacctcttgatccaaaacttcttgaagacttggtacagcctccaaccatcacccaacagtctccaaaagattacattattgaccctcgg

SEQ ID NO: 307278 - DNA, 595 bp, Artificial Sequence
  derived and/or modified sequence
actttgtttaaaatttccctttgctactgggaggaaatggaaagcagtaagataacttcatttgtaagagcaatgctaagaagacgtttggtttaaagaattaaaaggaagaacaacttaagagcttcttcaaagtttcccgcatgaaaattacttaaacgttgcacacaacgtttcacaaaatcttttgtgaaagaagaaaaggaaattcagtgtgtgagtctcagcaggagttaagctaatgcagcttaaaataatgccgaaaaagaagcgcttatctgcgggcagagtgcccctgattctcttcctgtgccagatgattagtgcactggaagtacctcttgatccaaaacttcttgaagacttggtacagcctccaaccatcacccaacagtctccaaaagattacattattgaccctcgggagaatattgtaatccagtgtgaagccaaagggaaaccgcccccaagcttttcctggacccgtaatgggactcattttgacatcgataaagaccctctggtcaccatgaagcctggcacaggaacgctcataattaacatcatgagcgaagggaaagctgagacctatgaa

SEQ ID NO: 307279 - DNA, 186 bp, Artificial Sequence
  derived and/or modified sequence
atgcagctgaaaatcatgcctaagaagaagaggctctctgccggacgcgtgccactcatattattcctctgccagatgatttccgccttggaggtgccactcgaccctaaactcctggaagacctggtgcagccccctaccataactcagcaaagtccgaaagactacattattgaccctaggtag

SEQ ID NO: 307280 - DNA, 357 bp, Artificial Sequence
  derived and/or modified sequence
atgcaacttaagatcatgcccaaaaaaaagcgcctgtcagccggtcgcgttcctctgattctctttctttgtcaaatgatatctgctctggaagtgcccctggatcccaagctgctcgaagacctggttcagcctcctacaattacacagcaaagcccaaaagactatatcattgacccaagagaaaatatcgtaatccagtgcgaagccaaagggaagccgccacccagctttagttggacaagaaacggaacccacttcgacatcgacaaagacccactagttactatgaagcccggaaccggaaccctgatcattaacatcatgtccgagggtaaagcagagacgtacgaatag

SEQ ID NO: 307281 - DNA, 186 bp, Artificial Sequence
  derived and/or modified sequence
atgcagctgaagatcatgcccaagaagaagagactgagcgccggcagagtgcccctgatcctgttcctgtgccagatgatcagcgccctggaggtgcccctggaccccaagctgctggaggacctggtgcagccccccaccatcacccagcagagccccaaggactacatcatcgaccccagatag

SEQ ID NO: 307282 - DNA, 357 bp, Artificial Sequence
  derived and/or modified sequence
atgcagctgaagatcatgcccaagaagaagagactgagcgccggcagagtgcccctgatcctgttcctgtgccagatgatcagcgccctggaggtgcccctggaccccaagctgctggaggacctggtgcagccccccaccatcacccagcagagccccaaggactacatcatcgaccccagagagaacatcgtgatccagtgcgaggccaagggcaagcccccccccagcttcagctggaccagaaacggcacccacttcgacatcgacaaggaccccctggtgaccatgaagcccggcaccggcaccctgatcatcaacatcatgagcgagggcaaggccgagacctacgagtag

SEQ ID NO: 307283 - DNA, 3462 bp, Artificial Sequence
  derived and/or modified sequence
gtcatgctctattgcgcatatctcggggcgggggaggaacggagattgacaaggaggcagaggcctgagcgaggcggaaaatcctcaccccggcccgcgggtagacccaaacttctagcgcgtcacttccgctgggggcggagcggggcggggctgagtgggtggcgacctagctgctgcgccagtgtttgtgttggaagctcagctgatgcaggccggttggagtggacgtcattgccgggaacgagcgagtcgccgctgcagccctagtgactgcggcctgcatcccggtaagaccatgaattatggcatttcttaaatgaagcgttcaagaagtgagagaatgtcatagaaaataaatgatttttaagttatgtctattaatctgactgtagatatatatatttacctccttagtaatgcaagaagtgtttgtgggaagcagagaagcaagcaactgtatttcttgttctcacctaagcattactggaggataagccacatcagtctacaaagaggttttcatacaaacataataagatgtaaatggaccaaaagtgaagcacattcttgcagtaagcactgttactctccaagcaaccatggtttacatattgggattttgaaacttagcacttctgctcccaagggacttacaaaagtgaacatttgtatgtcccgtattaaaagtactttgaactctgtttcaaaggctgtttttggcaatcaaaatgaaatgatttcacgtttagctcaatttaagccaagttcccaaattttaagaaaagtatcggatagtggctggttaaaacagaaaaacatcaaacaagccatcaaatctctgaaaaaatatagtgacaaatcagcagaaaagagtccttttccagaagagaaaagtcacattatagacaaagaagaagatataggtaaacgcagtctttttcattacacaagttctataaccacaaaatttggagactcattctactttttatcaaatcatattaattcatatttcaaacgtaaggaaaaaatgtctcaacaaaaggaaaatgaacatttccgggacaaatcagaacttgaagataaaaaggtagaagaggggaaattaagatctccagatcctggcatcctggcttataagccaggctcagaatctgtacatacggtggacaagcctacaagtccttctgcgatacctgatgttcttcaagtttcaactaaacaaagtattgctaactttctttctcgtcccacggaaggtgtacaagctttagtaggtggttatattggtggacttgtccccaaattaaagtatgattcaaagagtcagtcagaagaacaggaagagcctgctaaaactgatcaggctgtcagcaaagacagaaatgcagaggagaaaaagcgtttatctcttcagcgagaaaagattatcgcaagggtgagtattgataacaggacccgggcattagttcaggcattaagaagaacaactgacccaaagctctgcattactagggttgaagaactgacttttcatcttctagaatttcctgaaggaaaaggagtggctgtcaaggaaagaattattccatatttattacgactgagacaaattaaggatgaaactcttcaggctgcagttagagaaattttggccctaattggctatgtggatccagtgaaagggagaggaatccgaattctctcaattgatggtggaggaacaaggggcgtggttgctctccagaccctacgaaaattagttgaacttactcagaagccagttcatcagctctttgattacatttgtggtgtaagcacaggtgccatattagctttcatgttggggttgtttcatatgcccttggatgaatgtgaggaactttatcgaaaattaggatcagatgtattttcacaaaatgtcattgttggaacagtaaaaatgagttggagccatgcattttatgacagtcaaacatgggaaaacattcttaaggataggatgggatctgcactgatgattgaaacagcaagaaaccccacatgtcctaaggtagctgctgtaagtaccatagtaaatagagggataacacccaaagcttttgtgttcagaaactatggtcattttcctggaatcaactctcattatttgggaggctgtcagtataaaatgtggcaggccattagagcctcatctgctgctccaggctactttgcagaatatgcattgggaaatgatcttcatcaagatggaggtttgcttctgaataacccttcggcattagctatgcatgagtgtaaatgtctttggccagatgtgccgttagagtgcatagtatccctgggcactggacgttatgagagtgatgtgagaaacacggtaacatacacaagcttgaaaactaaactttctaatgttatcaacagtgctacagatacagaagaagtccatataatgcttgatggcctgttacctcctgacacctattttagattcaatcctgtaatgtgtgaaaacatacctctagatgaaagtcgaaatgaaaagctggatcagctgcagttggaagggttgaaatacatagaaagaaatgaacaaaaaatgaaaaaagttgcaaaaatattaagtcaagaaaaaacaactctgcagaaaattaatgattggataaaattaaaaactgatatgtatgaaggacttccattcttttcaaaattgtgatgagtatatgcttatgttctcataaatgaaggtctgtttagaagatcaaccacattcaataaggaattgtggggttcgacatgagttaactttgaaatacgtatgaattctggagaatcctgaaaaagacggtgcttcaaccagcttgcatagcacagagaatattcttggttacagaattcatatgggaactaggcttttaagatgttaataattagctaagctttagtaacccttactgtgctagtagattttagtagatattggtgttatattgtttgatgtttgaaaatatattaatatatgtgccgaacaagaaaccgaaagctatattgtactgtgtatttttactttagtcctcataatcatgttgaatttatgtgatcattgattttatttcatatggaaaagctaatttcttcttaaatttacattacctaatattctcactagctatgttctccaatccacactgccttttattgtaatatcatctaaatagatgcagaaaaatggaattttctctattaaagtattttacatttgacataaaaaagaaccagatacagttttctattcagatatgtttattttaacattgtttggttaaaaaaggtgaagttccagtcaaccactttttacccctgaaatttcaagataatgctatattaacttttccagatctaacactagcttattcttccctgttataaaatggtttgaacttactgaggagatat

SEQ ID NO: 307284 - DNA, 3366 bp, Artificial Sequence
  derived and/or modified sequence
atgctctattgcgcatatctcggggcgggggaggaacggagattgacaaggaggcagaggcctgagcgaggcggaaaatcctcaccccggcccgcgggtagacccaaacttctagcgcgtcacttccgctgggggcggagcggggcggggctgagtgggtggcgacctagctgctgcgccagtgtttgtgttggaagctcagctgatgcaggccggttggagtggacgtcattgccgggaacgagcgagtcgccgctgcagccctagtgactgcggcctgcatcccgtaatgcaagaagtgtttgtgggaagcagagaagcaagcaactgtatttcttgttctcacctaagcattactggaggataagccacatcagtctacaaagaggttttcatacaaacataataagatgtaaatggaccaaaagtgaagcacattcttgcagtaagcactgttactctccaagcaaccatggtttacatattgggattttgaaacttagcacttctgctcccaagggacttacaaaagtgaacatttgtatgtcccgtattaaaagtactttgaactctgtttcaaaggctgtttttggcaatcaaaatgaaatgatttcacgtttagctcaatttaagccaagttcccaaattttaagaaaagtatcggatagtggctggttaaaacagaaaaacatcaaacaagccatcaaatctctgaaaaaatatagtgacaaatcagcagaaaagagtccttttccagaagagaaaagtcacattatagacaaagaagaagatataggtaaacgcagtctttttcattacacaagttctataaccacaaaatttggagactcattctactttttatcaaatcatattaattcatatttcaaacgtaaggaaaaaatgtctcaacaaaaggaaaatgaacatttccgggacaaatcagaacttgaagataaaaaggtagaagaggggaaattaagatctccagatcctggcatcctggcttataagccaggctcagaatctgtacatacggtggacaagcctacaagtccttctgcgatacctgatgttcttcaagtttcaactaaacaaagtattgctaactttctttctcgtcccacggaaggtgtacaagctttagtaggtggttatattggtggacttgtccccaaattaaagtatgattcaaagagtcagtcagaagaacaggaagagcctgctaaaactgatcaggctgtcagcaaagacagaaatgcagaggagaaaaagcgtttatctcttcagcgagaaaagattatcgcaagggtgagtattgataacaggacccgggcattagttcaggcattaagaagaacaactgacccaaagctctgcattactagggttgaagaactgacttttcatcttctagaatttcctgaaggaaaaggagtggctgtcaaggaaagaattattccatatttattacgactgagacaaattaaggatgaaactcttcaggctgcagttagagaaattttggccctaattggctatgtggatccagtgaaagggagaggaatccgaattctctcaattgatggtggaggaacaaggggcgtggttgctctccagaccctacgaaaattagttgaacttactcagaagccagttcatcagctctttgattacatttgtggtgtaagcacaggtgccatattagctttcatgttggggttgtttcatatgcccttggatgaatgtgaggaactttatcgaaaattaggatcagatgtattttcacaaaatgtcattgttggaacagtaaaaatgagttggagccatgcattttatgacagtcaaacatgggaaaacattcttaaggataggatgggatctgcactgatgattgaaacagcaagaaaccccacatgtcctaaggtagctgctgtaagtaccatagtaaatagagggataacacccaaagcttttgtgttcagaaactatggtcattttcctggaatcaactctcattatttgggaggctgtcagtataaaatgtggcaggccattagagcctcatctgctgctccaggctactttgcagaatatgcattgggaaatgatcttcatcaagatggaggtttgcttctgaataacccttcggcattagctatgcatgagtgtaaatgtctttggccagatgtgccgttagagtgcatagtatccctgggcactggacgttatgagagtgatgtgagaaacacggtaacatacacaagcttgaaaactaaactttctaatgttatcaacagtgctacagatacagaagaagtccatataatgcttgatggcctgttacctcctgacacctattttagattcaatcctgtaatgtgtgaaaacatacctctagatgaaagtcgaaatgaaaagctggatcagctgcagttggaagggttgaaatacatagaaagaaatgaacaaaaaatgaaaaaagttgcaaaaatattaagtcaagaaaaaacaactctgcagaaaattaatgattggataaaattaaaaactgatatgtatgaaggacttccattcttttcaaaattgtgatgagtatatgcttatgttctcataaatgaaggtctgtttagaagatcaaccacattcaataaggaattgtggggttcgacatgagttaactttgaaatacgtatgaattctggagaatcctgaaaaagacggtgcttcaaccagcttgcatagcacagagaatattcttggttacagaattcatatgggaactaggcttttaagatgttaataattagctaagctttagtaacccttactgtgctagtagattttagtagatattggtgttatattgtttgatgtttgaaaatatattaatatatgtgccgaacaagaaaccgaaagctatattgtactgtgtatttttactttagtcctcataatcatgttgaatttatgtgatcattgattttatttcatatggaaaagctaatttcttcttaaatttacattacctaatattctcactagctatgttctccaatccacactgccttttattgtaatatcatctaaatagatgcagaaaaatggaattttctctattaaagtattttacatttgacataaaaaagaaccagatacagttttctattcagatatgtttattttaacattgtttggttaaaaaaggtgaagttccagtcaaccactttttacccctgaaatttcaagataatgctatattaacttttccagatctaacactagcttattcttccctgttataaaatggtttgaacttactgaggagatattcctatcattaacaaaaataaactatttaaataa

SEQ ID NO: 307285 - DNA, 735 bp, Artificial Sequence
  derived and/or modified sequence
ggaagctcagctgatgcaggccggttggagtggacgtcattgccgggaacgagcgagtcgccgctgcagccctagtaagaccatgaattatggcatttcttaaatgaagcgttcaagaagtgagagaatgtcatagaaaataaatgatttttaagttatgtctattaatctgactgtagatatatatatttacctccttagtaatgcaagaagtgtttgtgggaagcagagaagcaagcaactgtatttcttgttctcacctaagcattactggaggataagccacatcagtctacaaagaggttttcatacaaacataataagatgtaaatggaccaaaagtgaagcacattcttgcagtaagcactgttactctccaagcaaccatggtttacatattgggattttgaaacttagcacttctgctcccaagggacttacaaaagtgaacatttgtatgtcccgtattaaaagtactttgaactctgtttcaaaggctgtttttggcaatcaaaatgaaatgatttcacgtttagctcaatttaagccaagttcccaaattttaagaaaagtatcggatagtggctggttaaaacagaaaaacatcaaacaagccatcaaatctctgaaaaaatatagtgacaaatcagcagaaaagagtccttttccagaagagaaaagtcacattatagacaaagaagaagatataggtaaacgcagtctttttcattacac

SEQ ID NO: 307286 - protein, 273 aa, Artificial Sequence
  derived and/or modified sequence
MHQDGISSMNQLGGLFVNGRPLPLDTRQQIVRLAVSGMRPCDISRILKVSNGCVSKILGRYYRTGVLEPKGIGGSKPRLATPPVVARIAQLKGECPALFAWEIQRQLCAEGLCTQDKTPSVSSINRVLRALQEDQGLPCTRLRSPAVLAPAVLTPHSGSETPRGTHPGTGHRNRTIFSPSQAEALEKEFQRGQYPDSVARGKLATATSLPEDTVRVWFSNRRAKWRRQEKLKWEMQLPAVPWQCAHSSPACPGTTGSLLLSAVLGNSTRKVSE

SEQ ID NO: 307287 - protein, 348 aa, Artificial Sequence
  derived and/or modified sequence
MHQDGISSMNQLGGLFVNGRPLPLDTRQQIVRLAVSGMRPCDISRILKVSNGCVSKILGRYYRTGVLEPKGIGGSKPRLATPPVVARIAQLKGECPALFAWEIQRQLCAEGLCTQDKTPSVSSINRVLRALQEDQGLPCTRLRSPAVLAPAVLTPHSGSETPRGTHPGTGHRNRTIFSPSQAEALEKEFQRGQYPDSVARGKLATATSLPEDTVRVWFSNRRAKWRRQEKLKWEMQLPGASQGLTVPRVAPGIISAQQSPGSVPTAALPALEPLGPSCYQLCWATAPERCLSDTPPKACLKPCWDCGSFLLPVIAPSCVDVAWPCLDASLAHHLIGGAGKATPTHFSH

SEQ ID NO: 307288 - DNA, 2010 bp, Artificial Sequence
  derived and/or modified sequence
caaagactcacccgtgagccagctctcaaagaaagcagcttgcgttgacagcctgggggcagcaaggatgcagtctcccaggagaggatgcactcggtggtgggaagccaggctggaggggcctgagtgaccctctccacaggcgggcagggcagtgggagaggtggtgtgtggatacctctgtctcacgcccagggatcagcagcatgaaccagcttggggggctctttgtgaatggccggcccctgcctctggatacccggcagcagattgtgcggctagcagtcagtggaatgcggccctgtgacatctcacggatccttaaggtatctaatggctgtgtgagcaagatcctagggcgttactaccgcacaggtgtcttggagccaaagggcattgggggaagcaagccacggctggctacaccccctgtggtggctcgaattgcccagctgaagggtgagtgtccagccctctttgcctgggaaatccaacgccagctttgtgctgaagggctttgcacccaggacaagactcccagtgtctcctccatcaaccgagtcctgcgggcattacaggaggaccagggactaccgtgcacacggctcaggtcaccagctgttttggctccagctgtcctcactccccatagtggctctgagactccccggggtacccacccagggaccggccaccggaatcggactatcttctccccaagccaagcagaggcactggagaaagagttccagcgtgggcagtatcctgattcagtggcccgtggaaagctggctactgccacctctctgcctgaggacacggtgagggtctggttttccaacagaagagccaaatggcgtcggcaagagaagctcaagtgggaaatgcagctgccaggtgcttcccaggggctgactgtaccaagggttgccccaggaatcatctctgcacagcagtcccctggcagtgtgcccacagcagccctgcctgccctggaaccactgggtccctcctgctatcagctgtgctgggcaacagcaccagaaaggtgtctgagtgacaccccacctaaagcctgtctcaagccctgctggggccacttgcccccacagccgaattccctggactcaggactgctttgccttccttgcccttcctcccactgtcacctggccagtcttagtggctctcaggccctgctctggcctggctgcccactactgtatggcttggaatgaggcaggagtgggaaggagatggcatagagaagatctaataccatcctgcccattgtccttaccgtcctgcccatacagactgtggctccttcctccttcctgtgattgctccctcctgtgtggacgttgcctggccctgcctcgatgcctctctggcgcatcacctgattggaggggctggtaaagcaacacccacccacttctcacactagccttaagaggcctccactcagcagtaataaaagctgtttttattagcagtagttctgttgtccatcatgttttccctatgagcacccctatgcccactctaatattcaacaattatagacaatttgccctatcatttatttacatctatgtatctaccatctaatctatgcatgtatgtaggcaatacatgtatctaaacaatgtatttgtcaatgcatcaatttacctactctatgtatgcatctatatgtgtattatgtatgcgtgcatgcgtgcgcgcacacacacacacacacacacacactgacattatatcatggcattttattcctaaatcttccagcatgcatccccaaaaaacaagaaacttgtcttacataatcacaataatatatccacatctaagaaaatttactgtaacttcttaatctaagaaaattatgtatttttgtcatatgtattttgtcatatgtattttgtatttgcatatgtattttgtatttgcatatgtatttttgtcatagcagcaaacagagtgaaatgccatttttcatattct

SEQ ID NO: 307289 - DNA, 822 bp, Artificial Sequence
  derived and/or modified sequence
atgcatcaggatggcatcagcagtatgaaccagctcggcggcctctttgtgaacggtaggccactgcctctggacacacggcagcagatcgttaggttggcagtgtcaggaatgcgtccttgtgatatttcaaggattctcaaggtcagcaacggttgtgtcagcaagatcctgggaaggtactataggactggcgttctggagccaaaaggcatcggcggtagcaaacctagacttgctactccgcctgtggtggcgcgtatcgctcagctcaagggggaatgccccgctctgtttgcctgggagatccaacgacagctctgcgccgaaggtctgtgtacccaggacaagacaccgtccgtgtctagtattaaccgagtgctgagagccttgcaggaagatcaggggctcccctgtacccggctgcgcagccccgcagtcctggcacctgcagtgctgaccccacatagcgggtccgaaaccccccgcggcacacatcccggaacagggcatcgaaaccgaaccattttcagcccatcccaagccgaggccctggagaaggagttccagcggggccagtaccccgatagtgttgctcgtggaaagttagcaaccgccacaagtttacctgaggatacagtcagggtatggttcagtaatcggcgggctaaatggcgccgccaggagaaactgaaatgggagatgcagctacctgctgtaccatggcaatgcgcacactcttctcctgcgtgtcccggcacgaccggatctttgctcctgagtgccgtcctaggtaactccacacgaaaggtatctgaatag

SEQ ID NO: 307290 - DNA, 1047 bp, Artificial Sequence
  derived and/or modified sequence
atgcatcaggatgggattagcagtatgaaccaactggggggtctgtttgtaaatggcaggccgctgcctttagatacacggcagcaaatcgtgaggctcgcggtctctgggatgaggccttgtgatatttctcgcattctcaaggtcagtaacggatgcgtgtcaaaaatcctaggtaggtactaccggaccggcgtcctggaacccaaggggataggaggctctaagcctaggctagcaactccccctgtggtggcgagaattgcccagctaaaaggtgagtgtcccgccctgtttgcttgggaaattcagaggcagctgtgcgcggaaggtctttgtacccaagacaagaccccatcagtgagttccattaacagggtgttgcgcgcattgcaggaggaccagggcctgccctgcacaaggcttcggtctcctgcggtgctggccccagctgtattgacaccccattcaggaagcgaaacacccaggggcacacacccaggtaccgggcaccggaataggaccattttctcacccagtcaggcagaagctctagaaaaagaattccagcgggggcagtaccctgactctgtcgccagagggaaactcgctaccgcgacctcccttcctgaagatactgtccgagtctggttctctaatcgccgagcaaagtggcgacggcaggagaagctcaaatgggagatgcaactgcccggagcctctcagggcctaactgtgccccgcgtggcccctggaatcattagtgcccaacagagccccggaagtgtgccgacagctgcactgcccgccctggagcccctcggcccaagctgctaccaactctgttgggcaaccgcacccgagcgatgtctttccgacacaccaccgaaagcctgtctcaagccctgctgggactgcgggtcttttctactcccagtaatcgccccatcatgtgtggacgtggcatggccctgtctggatgcctccctggcacaccatttaattggtggtgcgggcaaggccacccctactcacttctcccattag

SEQ ID NO: 307291 - DNA, 822 bp, Artificial Sequence
  derived and/or modified sequence
atgcaccaggacggcatcagctccatgaaccagctgggcggcctgtttgtgaatggccggcccctgcccctggacacccggcagcagatcgtgcggctggccgtgtctggcatgaggccctgtgacatcagccgcatcctgaaggtgtccaatggctgtgtgtccaagatcctgggccgctactacagaactggagtgctggagcccaagggcatcggcggcagcaagccccggctggccaccccacctgtggtggcccgcatcgcccagctgaagggggagtgcccagccctgtttgcctgggagatccagaggcagctgtgtgccgagggcctgtgcacccaggacaagacccccagcgtgagcagcatcaacagagtgctgcgggccctgcaggaggaccagggcctgccctgcacccggctgcggagccctgctgtgctggccccagctgtgctgaccccccacagcggcagcgagaccccccggggcacccaccctggcaccggccacaggaacagaaccatcttcagccccagccaggccgaggccctggagaaggagttccagaggggccagtacccagattctgtggcccggggcaagctggccacagccaccagcctgcctgaagatactgtgcgggtgtggttcagcaacagaagagccaagtggaggcggcaggagaagctgaagtgggagatgcagctgcctgctgtgccctggcagtgtgcccacagcagccctgcctgccccggcaccaccggcagcctgctgctgtctgctgtgctgggcaacagcaccaggaaggtgtctgagtag

SEQ ID NO: 307292 - DNA, 1047 bp, Artificial Sequence
  derived and/or modified sequence
atgcaccaggacggcatcagctccatgaaccagctgggcggcctgtttgtgaatggccggcccctgcccctggacacccggcagcagatcgtgcggctggccgtgtctggcatgaggccctgtgacatcagccgcatcctgaaggtgtccaatggctgtgtgtccaagatcctgggccgctactacagaactggagtgctggagcccaagggcatcggcggcagcaagccccggctggccaccccacctgtggtggcccgcatcgcccagctgaagggggagtgcccagccctgtttgcctgggagatccagaggcagctgtgtgccgagggcctgtgcacccaggacaagacccccagcgtgagcagcatcaacagagtgctgcgggccctgcaggaggaccagggcctgccctgcacccggctgcggagccctgctgtgctggccccagctgtgctgaccccccacagcggcagcgagaccccccggggcacccaccctggcaccggccacaggaacagaaccatcttcagccccagccaggccgaggccctggagaaggagttccagaggggccagtacccagattctgtggcccggggcaagctggccacagccaccagcctgcctgaagatactgtgcgggtgtggttcagcaacagaagagccaagtggaggcggcaggagaagctgaagtgggagatgcagctgcccggggccagccagggcctgactgtgccccgggtggcccctggcatcatcagcgcccagcagagccctggctctgtgcccacagctgccctgcctgccctggagcccctgggccccagctgctaccagctgtgctgggccacagcccctgagcgctgcctgagtgacaccccacccaaggcctgcctgaagccctgctgggactgtggcagcttcctgctgcccgtcatcgcccccagctgtgtggatgtggcctggccctgcctggatgccagcctggcccaccacctgattggaggagctgggaaggccacccccacccacttcagccactag

SEQ ID NO: 307293 - DNA, 822 bp, Artificial Sequence
  derived and/or modified sequence
atgcaccaggacggcatcagcagcatgaaccagctgggcggcctgttcgttaatggacgacccctccccctcgacacccggcagcagatcgtgagactggccgtgtcagggatgagaccatgcgacatctctcggattctgaaagtgagcaatggttgtgtctcaaaaattttgggacgctactatcgcacgggtgttctggagccgaagggcataggggggtctaaacccagactcgctactccacctgtggtcgcaagaattgctcaactcaaaggggagtgtccagccttgtttgcctgggagatccagcgccagctgtgcgctgagggcctgtgtacccaggacaagacaccatccgtttcctcaatcaacagagtgctcagagctctgcaggaagaccaaggtctgccatgcacacgcctgagatcccccgctgtgcttgccccagcagtgcttacacctcacagcgggagtgagacaccccgggggacccacccaggcactggccatcgcaaccggactatcttctccccctcgcaggccgaggcgctggaaaaggaatttcaaagagggcagtaccccgactctgttgctagaggcaagctggctacggccactagcttgccagaagatacagtgagagtgtggtttagtaaccggagagctaagtggaggagacaggagaagctcaaatgggagatgcaattgcctgccgttccatggcagtgcgctcactcttcccctgcctgcccaggaaccaccggatcactccttctgtccgctgtgctcggcaactcgaccagaaaggtgtccgagtag

SEQ ID NO: 307294 - DNA, 1047 bp, Artificial Sequence
  derived and/or modified sequence
atgcaccaggacggcatcagcagcatgaaccagctgggcggcctgtttgtcaatggtagacccttgcctctcgatactaggcaacagatcgtccgtttagcagtgtccggtatgcgaccttgcgatatctctcgcatcctaaaagtctcgaatggatgtgtttcgaaaatcctaggtcggtactaccggacaggcgtgctggagcctaaaggaattggcggaagtaaacctaggctcgccaccccccccgtggttgcacggattgctcagctcaaaggtgagtgtcccgcactgttcgcttgggagatccagcggcagctgtgcgccgaaggcctttgtactcaggacaaaactccttcggtgagctctatcaaccgcgtgctccgtgcattgcaggaggatcagggattaccatgcactcgcctgcgaagtcctgccgtactggcgccagcagtgttgacccctcactccggcagtgaaactccccgcggaacacatcccggtaccggtcatagaaaccgaaccatattctcaccctcccaggctgaagcacttgagaaagagtttcagagaggacagtatcccgattcagtggcaaggggcaagctggccactgctacctctcttccggaggatacagtccgggtgtggttctctaataggcgggcaaaatggagaagacaggagaaacttaaatgggagatgcagttgccaggtgcaagccagggactgactgtacctcgcgtagcacctggcatcatcagcgcgcagcagtctcctgggtctgtccctactgctgccttgcccgcattggaaccacttggtccttcatgttaccagctgtgttgggccacagctccagagcgctgcttgtcagacacaccacccaaggcttgcctgaagccgtgctgggattgcggcagctttctactgccagtcatcgctcctagctgtgttgacgtggcatggccgtgcttggacgcctcccttgcacatcacctgattgggggagcaggcaaggctactcccacccacttcagccattag

SEQ ID NO: 307295 - DNA, 1772 bp, Artificial Sequence
  derived and/or modified sequence
atgcatcaggacgggatcagcagcatgaaccagcttggggggctctttgtgaatggccggcccctgcctctggatacccggcagcagattgtgcggctagcagtcagtggaatgcggccctgtgacatctcacggatccttaaggtatctaatggctgtgtgagcaagatcctagggcgttactaccgcacaggtgtcttggagccaaagggcattgggggaagcaagccacggctggctacaccccctgtggtggctcgaattgcccagctgaagggtgagtgtccagccctctttgcctgggaaatccaacgccagctttgtgctgaagggctttgcacccaggacaagactcccagtgtctcctccatcaaccgagtcctgcgggcattacaggaggaccagggactaccgtgcacacggctcaggtcaccagctgttttggctccagctgtcctcactccccatagtggctctgagactccccggggtacccacccagggaccggccaccggaatcggactatcttctccccaagccaagcagaggcactggagaaagagttccagcgtgggcagtatcctgattcagtggcccgtggaaagctggctactgccacctctctgcctgaggacacggtgagggtctggttttccaacagaagagccaaatggcgtcggcaagagaagctcaagtgggaaatgcagctgccagcagtcccctggcagtgtgcccacagcagccctgcctgccctggaaccactgggtccctcctgctatcagctgtgctgggcaacagcaccagaaaggtgtctgagtgacaccccacctaaagcctgtctcaagccctgctggggccacttgcccccacagccgaattccctggactcaggactgctttgccttccttgcccttcctcccactgtcacctggccagtcttagtggctctcaggccctgctctggcctggctgcccactactgtatggcttggaatgaggcaggagtgggaaggagatggcatagagaagatctaataccatcctgcccattgtccttaccgtcctgcccatacagactgtggctccttcctccttcctgtgattgctccctcctgtgtggacgttgcctggccctgcctcgatgcctctctggcgcatcacctgattggaggggctggtaaagcaacacccacccacttctcacactagccttaagaggcctccactcagcagtaataaaagctgtttttattagcagtagttctgttgtccatcatgttttccctatgagcacccctatgcccactctaatattcaacaattatagacaatttgccctatcatttatttacatctatgtatctaccatctaatctatgcatgtatgtaggcaatacatgtatctaaacaatgtatttgtcaatgcatcaatttacctactctatgtatgcatctatatgtgtattatgtatgcgtgcatgcgtgcgcgcacacacacacacacacacacacactgacattatatcatggcattttattcctaaatcttccagcatgcatccccaaaaaacaagaaacttgtcttacataatcacaataatatatccacatctaagaaaatttactgtaacttcttaatctaagaaaattatgtatttttgtcatatgtattttgtcatatgtattttgtatttgcatatgtattttgtatttgcatatgtatttttgtcatagcagcaaacagagtgaaatgccatttttcatattct

SEQ ID NO: 307296 - DNA, 1088 bp, Artificial Sequence
  derived and/or modified sequence
atgcatcaggacgggatcagcagcatgaaccagcttggggggctctttgtgaatggccggcccctgcctctggatacccggcagcagattgtgcggctagcagtcagtggaatgcggccctgtgacatctcacggatccttaaggtatctaatggctgtgtgagcaagatcctagggcgttactaccgcacaggtgtcttggagccaaagggcattgggggaagcaagccacggctggctacaccccctgtggtggctcgaattgcccagctgaagggtgagtgtccagccctctttgcctgggaaatccaacgccagctttgtgctgaagggctttgcacccaggacaagactcccagtgtctcctccatcaaccgagtcctgcgggcattacaggaggaccagggactaccgtgcacacggctcaggtcaccagctgttttggctccagctgtcctcactccccatagtggctctgagactccccggggtacccacccagggaccggccaccggaatcggactatcttctccccaagccaagcagaggcactggagaaagagttccagcgtgggcagtatcctgattcagtggcccgtggaaagctggctactgccacctctctgcctgaggacacggtgagggtctggttttccaacagaagagccaaatggcgtcggcaagagaagctcaagtgggaaatgcagctgccaggtgcttcccaggggctgactgtaccaagggttgccccaggaatcatctctgcacagcagtcccctggcagtgtgcccacagcagccctgcctgccctggaaccactgggtccctcctgctatcagctgtgctgggcaacagcaccagaaaggtgtctgagtgacaccccacctaaagcctgtctcaagccctgctgggactgtggctccttcctccttcctgtgattgctccctcctgtgtggacgttgcctggccctgcctcgatgcctctctggcgcatcacctgattggaggggctggtaaagcaacacccacccacttctcacactagccttaagaggcctccactcagcagtaataaaagctgttttt

SEQ ID NO: 307297 - DNA, 822 bp, Artificial Sequence
  derived and/or modified sequence
atgcatcaggacggaattagttcaatgaaccagctgggtggcctgtttgttaatggcagaccactccccctggatacccgtcagcagatcgtccggctggctgtgagcggtatgcgtccgtgcgacatctcccgcattttgaaggtgagtaatgggtgtgtgtcaaagatcctcggtcggtactatcgcactggggtgctggaacccaaaggaattggcggaagtaagccgcgtctcgccacccctccggttgttgccaggatcgcgcagctgaagggcgagtgccccgcactgttcgcctgggagatacagcgccaactgtgcgctgagggtctgtgtacccaggataaaacaccgtcggtctccagtatcaacagagtgcttcgcgcactgcaggaagatcaaggcctcccttgtaccaggctaagaagtcctgccgtattagccccagccgttctcacaccgcattcaggatccgaaacccctagggggactcatcccggaacaggccatcgcaatagaactatctttagcccatctcaggcggaagcccttgaaaaagaattccagcgaggccaataccctgacagcgtggcaagggggaagctggccaccgccacgagccttcctgaagacacggtgagagtatggttcagcaacagacgcgcaaagtggcggaggcaggaaaagctgaagtgggaaatgcagttgcccgctgtcccctggcagtgcgcacacagctcccctgcctgccctgggaccactggttctctcctgttgagtgcagtcctgggaaattctacccggaaggtcagcgaatag

SEQ ID NO: 307298 - DNA, 1047 bp, Artificial Sequence
  derived and/or modified sequence
atgcaccaggatggcatctcgtctatgaaccagttaggaggcttgtttgtgaatggacgccctctcccattggatacacggcagcagattgtgcggctggcagtgtccggtatgcgcccttgtgatatctccaggatcctcaaagtctcaaacggatgcgtttccaaaatcctcggccgatactatcgcaccggcgttctcgagcctaaggggatcggcggttccaagcccaggttagctacgcccccagtggtggcaaggattgcacagctgaaaggcgagtgccccgctttgtttgcatgggagattcagaggcagctgtgcgcagaagggctctgtactcaggacaagacccctagcgttagctcgattaacagagttctgagggctctccaggaggaccagggcctaccatgcactaggctcaggagtcctgccgtgctggcacccgcagtgcttacaccgcattccgggagcgagacacctcgaggcacacatcctggaacaggccacagaaacagaacgattttcagtccctcacaggccgaggcactggaaaaggagtttcagagaggtcagtaccccgattcggttgcccgtggaaagttggcaacagctacgtcactgccagaagataccgtgcgtgtgtggttttccaaccgacgggctaaatggcgcaggcaagagaaactgaaatgggaaatgcagttacctggggcatcccagggtctcactgttccaagagtggcccctggcattatttctgcacaacagtctcctgggtctgttccgacagcggctttacctgccttagaacctttgggcccttcgtgctatcaattgtgctgggcaactgccccagagcgctgcctgtcagacacgcctccaaaggcctgtctcaaaccttgctgggactgcggctctttcctacttcccgtaatcgcaccctcctgcgtcgacgtcgcctggccctgcttggatgcatccctggcgcaccatttgatcggcggtgccggtaaagctaccccgactcacttttcccattag

SEQ ID NO: 307299 - DNA, 822 bp, Artificial Sequence
  derived and/or modified sequence
atgcaccaggacggcatcagcagcatgaaccagctgggcggcctgttcgtgaacggcagacccctgcccctggacaccagacagcagatcgtgagactggccgtgagcggcatgagaccctgcgacatcagcagaatcctgaaggtgagcaacggctgcgtgagcaagatcctgggcagatactacagaaccggcgtgctggagcccaagggcatcggcggcagcaagcccagactggccaccccccccgtggtggccagaatcgcccagctgaagggcgagtgccccgccctgttcgcctgggagatccagagacagctgtgcgccgagggcctgtgcacccaggacaagacccccagcgtgagcagcatcaacagagtgctgagagccctgcaggaggaccagggcctgccctgcaccagactgagaagccccgccgtgctggcccccgccgtgctgaccccccacagcggcagcgagacccccagaggcacccaccccggcaccggccacagaaacagaaccatcttcagccccagccaggccgaggccctggagaaggagttccagagaggccagtaccccgacagcgtggccagaggcaagctggccaccgccaccagcctgcccgaggacaccgtgagagtgtggttcagcaacagaagagccaagtggagaagacaggagaagctgaagtgggagatgcagctgcccgccgtgccctggcagtgcgcccacagcagccccgcctgccccggcaccaccggcagcctgctgctgagcgccgtgctgggcaacagcaccagaaaggtgagcgagtag

SEQ ID NO: 307300 - DNA, 1047 bp, Artificial Sequence
  derived and/or modified sequence
atgcaccaggacggcatcagcagcatgaaccagctgggcggcctgttcgtgaacggcagacccctgcccctggacaccagacagcagatcgtgagactggccgtgagcggcatgagaccctgcgacatcagcagaatcctgaaggtgagcaacggctgcgtgagcaagatcctgggcagatactacagaaccggcgtgctggagcccaagggcatcggcggcagcaagcccagactggccaccccccccgtggtggccagaatcgcccagctgaagggcgagtgccccgccctgttcgcctgggagatccagagacagctgtgcgccgagggcctgtgcacccaggacaagacccccagcgtgagcagcatcaacagagtgctgagagccctgcaggaggaccagggcctgccctgcaccagactgagaagccccgccgtgctggcccccgccgtgctgaccccccacagcggcagcgagacccccagaggcacccaccccggcaccggccacagaaacagaaccatcttcagccccagccaggccgaggccctggagaaggagttccagagaggccagtaccccgacagcgtggccagaggcaagctggccaccgccaccagcctgcccgaggacaccgtgagagtgtggttcagcaacagaagagccaagtggagaagacaggagaagctgaagtgggagatgcagctgcccggcgccagccagggcctgaccgtgcccagagtggcccccggcatcatcagcgcccagcagagccccggcagcgtgcccaccgccgccctgcccgccctggagcccctgggccccagctgctaccagctgtgctgggccaccgcccccgagagatgcctgagcgacaccccccccaaggcctgcctgaagccctgctgggactgcggcagcttcctgctgcccgtgatcgcccccagctgcgtggacgtggcctggccctgcctggacgccagcctggcccaccacctgatcggcggcgccggcaaggccacccccacccacttcagccactag

SEQ ID NO: 307301 - DNA, 333 bp, Artificial Sequence
  derived and/or modified sequence
atgagcaccgccctgacccacaccaccgtggccatgagatgccccatgggcggcggcggcggccccacctacggccccccccagccctggggccaccccgacgtgcacatcatgcagcaccacgtgctgcccatccaggccagactgggcagcatcgccgagatcgacctgggcgtgcccccccccgtgatgaagaccttcaaggagttcctgctgagcctggacgacagcgtggacgagaccgaggccgtgaagagatacaacgactacaagctggacttcagaagacagcagatgcaggacttcttcctggcccacaaggacgaggagtag

SEQ ID NO: 307302 - DNA, 333 bp, Artificial Sequence
  derived and/or modified sequence
atgagcactgcactgacccacaccacggtggcgatgagatgccctatgggcgggggcggcggacccacgtatggtccaccccagccatgggggcatcctgacgtccacatcatgcaacaccacgtgctgcccatccaggcacgcctgggatcaattgccgaaatcgacctgggcgtgcctccgcccgttatgaaaaccttcaaagagttcctcctgagcctggacgactccgtggacgagaccgaggccgtgaagaggtataacgactataaattggacttccgaaggcagcagatgcaggacttttttctggctcacaaagacgaggaatag

SEQ ID NO: 307303 - DNA, 333 bp, Artificial Sequence
  derived and/or modified sequence
atgagcacagccctgacccacaccaccgtggccatgcgctgccccatgggcggcggcggcggccccacctacggccccccccagccctggggccacccagatgtgcacatcatgcagcaccacgtgctgcccatccaggcccggctgggcagcattgctgagattgacctgggcgtgcccccacctgtgatgaagaccttcaaggagttcctgctgagcctggatgattctgtggatgaaacagaagctgtgaagcgctacaatgactacaagctggacttccggcggcagcagatgcaggacttcttcctggcccacaaggatgaggagtag

SEQ ID NO: 307304 - DNA, 333 bp, Artificial Sequence
  derived and/or modified sequence
atgagcaccgccctgacccacaccaccgtggccatgcggtgccccatggggggtgggggagggccaacttacgggcctccgcaaccatgggggcatcctgacgtccatataatgcaacatcacgtcttaccgatccaagcgcgcctgggctcaattgctgaaattgacttaggagtccctcccccggtgatgaagacgtttaaagaatttctcctatcactagatgattcagttgatgaaacagaggctgtcaaaagatataatgactacaagctcgatttccgtcggcagcagatgcaggatttttttctggcccataaggacgaggaatag

SEQ ID NO: 307305 - DNA, 333 bp, Artificial Sequence
  derived and/or modified sequence
atgagtacggccctgacccacaccactgtcgcaatgaggtgtcccatgggtggtgggggaggtcctacctatggtccacctcagccatgggggcaccccgatgtacacattatgcaacaccacgtgctgcccatccaggcaaggctgggatccatcgctgaaattgatctaggtgttccaccacccgtcatgaagactttcaaggagttcctgctcagtctggacgactccgttgacgaaacagaggctgtgaagcgttacaacgactacaagttggacttccgccgtcagcagatgcaagacttctttctagcccataaggacgaggaatag

SEQ ID NO: 307306 - DNA, 4020 bp, Artificial Sequence
  derived and/or modified sequence
gggcgggggcgggggcgggggcgaggccgcggcgagcaaagtccaggcccctctgctgcagcgcccgcgcgtccagaggccctgccagacacgcgcgaggttcgaggctgagatggatcttgaggcggcaaagaacggaacagcctggcgccccacgagcgcggagggcgactttgaactgggcatcagcagcaaacaaaaaaggaaaaaaacgaagacagtgaaaatgattggagtattaacattgtttcgatactccgattggcaggataaattgtttatgtcgctgggtaccatcatggccatagctcacggatcaggtctccccctcatgatgatagtatttggagagatgactgacaaatttgttgatactgcaggaaacttctcctttccagtgaacttttccttgtcgctgctaaatccaggcaaaattctggaagaagaaatgactagatatgcatattactactcaggattgggtgctggagttcttgttgctgcctatatacaagtttcattttggactttggcagctggtcgacagatcaggaaaattaggcagaagttttttcatgctattctacgacaggaaataggatggtttgacatcaacgacaccactgaactcaatacgcggctaacagatgacatctccaaaatcagtgaaggaattggtgacaaggttggaatgttctttcaagcagtagccacgttttttgcaggattcatagtgggattcatcagaggatggaagctcacccttgtgataatggccatcagccctattctaggactctctgcagccgtttgggcaaagatactctcggcatttagtgacaaagaactagctgcttatgcaaaagcaggcgccgtggcagaagaggctctgggggccatcaggactgtgatagctttcgggggccagaacaaagagctggaaaggtatcagaaacatttagaaaatgccaaagagattggaattaaaaaagctatttcagcaaacatttccatgggtattgccttcctgttaatatatgcatcatatgcactggccttctggtatggatccactctagtcatatcaaaagaatatactattggaaatgcaatgacagtttttttttcaatcctaattggagctttcagtgttggccaggctgccccatgtattgatgcttttgccaatgcaagaggagcagcatatgtgatctttgatattattgataataatcctaaaattgacagtttttcagagagaggacacaaaccagacagcatcaaagggaatttggagttcaatgatgttcacttttcttacccttctcgagctaacgtcaagatcttgaagggcctcaacctgaaggtgcagagtgggcagacggtggccctggttggaagtagtggctgtgggaagagcacaacggtccagctgatacagaggctctatgaccctgatgagggcacaattaacattgatgggcaggatattaggaactttaatgtaaactatctgagggaaatcattggtgtggtgagtcaggagccggtgctgttttccaccacaattgctgaaaatatttgttatggccgtggaaatgtaaccatggatgagataaagaaagctgtcaaagaggccaacgcctatgagtttatcatgaaattaccacagaaatttgacaccctggttggagagagaggggcccagctgagtggtgggcagaagcagaggatcgccattgcacgtgccctggttcgcaaccccaagatccttctgctggatgaggccacgtcagcattggacacagaaagtgaagctgaggtacaggcagctctggataaggccagagaaggccggaccaccattgtgatagcacaccgactgtctacggtccgaaatgcagatgtcatcgctgggtttgaggatggagtaattgtggagcaaggaagccacagcgaactgatgaagaaggaaggggtgtacttcaaacttgtcaacatgcagacatcaggaagccagatccagtcagaagaatttgaactaaatgatgaaaaggctgccactagaatggccccaaatggctggaaatctcgcctatttaggcattctactcagaaaaaccttaaaaattcacaaatgtgtcagaagagccttgatgtggaaaccgatggacttgaagcaaatgtgccaccagtgtcctttctgaaggtcctgaaactgaataaaacagaatggccctactttgtcgtgggaacagtatgtgccattgccaatggggggcttcagccggcattttcagtcatattctcagagatcatagcgatttttggaccaggcgatgatgcagtgaagcagcagaagtgcaacatattctctttgattttcttatttctgggaattatttctttttttactttcttccttcagggtttcacgtttgggaaagctggcgagatcctcaccagaagactgcggtcaatggcttttaaagcaatgctaagacaggacatgagctggtttgatgaccataaaaacagtactggtgcactttctacaagacttgccacagatgctgcccaagtccaaggagccacaggaaccaggttggctttaattgcacagaatatagctaaccttggaactggtattatcatatcatttatctacggttggcagttaaccctattgctattagcagttgttccaattattgctgtgtcaggaattgttgaaatgaaattgttggctggaaatgccaaaagagataaaaaagaactggaagctgctggaaagattgcaacagaggcaatagaaaatattaggacagttgtgtctttgacccaggaaagaaaatttgaatcaatgtatgttgaaaaattgtatggaccttacaggaattctgtgcagaaggcacacatctatggaattacttttagtatctcacaagcatttatgtatttttcctatgccggttgttttcgatttggtgcatatctcattgtgaatggacatatgcgcttcagagatgttattctggtgttttctgcaattgtatttggtgcagtggctctaggacatgccagttcatttgctccagactatgctaaagctaagctgtctgcagcccacttattcatgctgtttgaaagacaacctctgattgacagctacagtgaagaggggctgaagcctgataaatttgaaggaaatataacatttaatgaagtcgtgttcaactatcccacccgagcaaacgtgccagtgcttcaggggctgagcctggaggtgaagaaaggccagacactagccctggtgggcagcagtggctgtgggaagagcacggtggtccagctcctggagcggttctacgaccccttggcggggacagtgtttgtggactttggttttcagcttctcgatggtcaagaagcaaagaaactcaatgtccagtggctcagagctcaactcggaatcgtgtctcaggagcctatcctatttgactgcagcattgccgagaatattgcctatggagacaacagccgggttgtatcacaggatgaaattgtgagtgcagccaaagctgccaacatacatcctttcatcgagacgttaccccacaaatatgaaacaagagtgggagataaggggactcagctctcaggaggtcaaaaacagaggattgctattgcccgagccctcatcagacaacctcaaatcctcctgttggatgaagctacatcagctctggatactgaaagtgaaaaggttgtccaagaagccctggacaaagccagagaaggccgcacctgcattgtgattgctcaccgcctgtccaccatccagaatgcagacttaatagtggtgtttcagaatgggagagtcaaggagcatggcacgcatcagcagctgctggcacagaaaggcatctatttttcaatggtcagtgtccaggctgggacacagaacttatgaacttttgctacagtatattttaaaaataaattcaaattattctacca

SEQ ID NO: 307307 - DNA, 2007 bp, Artificial Sequence
  derived and/or modified sequence
tagaaaatcaggtggagatgatagtggcttgcatgatggtggtagagctggaggtgcagggcaaaggtcagattctgaatatattttgaaagtaaaggcaacaagatttcctgacagattgattatggtgtgtcaaagaaagagaggaatgcaggatgattccagtgtttttgttgacaactataagtctggagctgccaactggatgcagaagttcactggagggcccagcctggggaaaggatcaggagcaggttaggcatgttaagcttgagatgtctgttaaacatccagataggaatgtcaaagatgcacttgtgtttaagagtcaggaatgcaagagggaattttaggctagaaacaaaaagttagaaattattcgatacagatggtatttaaagctgtgtgactgactgacatgacagaagtggcgagaatagactgagaagtccaaggaatgagccttggaccactccagtgttaggtaagtagttgaaaaaaagagagagagagaaggcatcaaaggagactgaggaagagtgatcaggaaagcataggaaaatccgagaaacatatggtgtcctggaatctatatgaaaaagatatattcagaaagacagagtgataaatctgtcaaattattgaatttgtcaggtaaaataagaacagagaattgatctttggacttagcaaagcagagattatcagtgacttttataaaaatagtttcggtagtgtggaaagatcaaacttctgtttagagtgggtttcagagagaacaacaggaattgaagaaagtaataaactttgccaaccagtttagctccaaaggaaaagagggaaatatgatggtagctggcaggggaagtgtggtcaagagaggttttttgtttgtttttcaagatggaagaaataacagtatgtatgtaagctcacaggagggatccagcaggcatggggaaattgatgatataggacagaaagggaagaatggctccttgtgaaagtgaaaggggatgggatctacaggatgaacatgcaaacaaagactggctgcaaagagaggcatgaatagttcatttacagaaacagcaaaggcagagtgttggtacagatgctggtaagtggaaaaatatcatggtaggaggttatggagttccattctaaacacttcaacttcatcagtgaaataagcacggtaatttagcagaatgtgaagatgtaaaagaacagaatttgagaaaacagacgatatgaaataattattagaaaagcagagactgaagaaactgtcatctccttatgtgctaatgagtttaataatgtcctccagtcaccacaagccttctttcaaactacacaattccaactgcttccgtctcagagtatcttgaaataatgatctgaccgcctgttagaccagtgaagggaaggaatttgggttgatttaagaagagaatcctcatggtcatggtagactgatatggagagaaaacattttgaggaaaaatactcaactaaattcatttctactccagcatgcagtttcaagtcaagttccaccttagctccaggtggcaggcagagcaggatgcagaggcacagcacaagtaagggatccaatgactgagtcaagaattacataacctggccagacagctggtacatgggaaagtgctaagagggcaccaacagcgttcctcctccccaaggagcataatgtgatggttcctgccggccctggctgactctcgccgtccttggagataattgggttcagtgccacctggaccagaactggggatgcggaagcaagaggctgagatggatcttgaggcggcaaagaacggaacagcctggcgccccacgagcgcggagggcgactttgaactgggcatcagcagcaaacaaaaaaggaaaaaaacgaagacagtgaaaatgattggagtattaacattgtttcgatactccgattggcaggataaattgtttatgtcgctgggtacc

SEQ ID NO: 307308 - DNA, 136 bp, Artificial Sequence
  derived and/or modified sequence
ataaacatcaaacggaatcaaacggaattatcgaatggaatcgaagagaataatcgaatggactcaaatggagtcatctaatggaatggtatggaagaatccatggactccaacgcaatcatcagcgaatggaatc

SEQ ID NO: 307309 - protein, 859 aa, Artificial Sequence
  derived and/or modified sequence
MQAAVAVSVPFLLLCVLGTCPPARCGQAGDASLMELEKRKENRFVERQSIVPLRLIYRSGGEDESRHDALDTRVRGDLGGPQLTHVDQASFQVDAFGTSFILDVVLNHDLLSSEYIERHIEHGGKTVEVKGGEHCYYQGHIRGNPDSFVALSTCHGLHGMFYDGNHTYLIEPEENDTTQEDFHFHSVYKSRLFEFSLDDLPSEFQQVNITPSKFILKPRPKRSKRQLRRYPRNVEEETKYIELMIVNDHLMFKKHRLSVVHTNTYAKSVVNMADLIYKDQLKTRIVLVAMETWATDNKFAISENPLITLREFMKYRRDFIKEKSDAVHLFSGSQFESSRSGAAYIGGICSLLKGGGVNEFGKTDLMAVTLAQSLAHNIGIISDKRKLASGECKCEDTWSGCIMGDTGYYLPKKFTQCNIEEYHDFLNSGGGACLFNKPSKLLDPPECGNGFIETGEECDCGTPAECVLEGAECCKKCTLTQDSQCSDGLCCKKCKFQPMGTVCREAVNDCDIRETCSGNSSQCAPNIHKMDGYSCDGVQGICFGGRCKTRDRQCKYIWGQKVTASDKYCYEKLNIEGTEKGNCGKDKDTWIQCNKRDVLCGYLLCTNIGNIPRLGELDGEITSTLVVQQGRTLNCSGGHVKLEEDVDLGYVEDGTPCGPQMMCLEHRCLPVASFNFSTCLSSKEGTICSGNGVCSNELKCVCNRHWIGSDCNTYFPHNDDAKTGITLSGNGVAGTNIIIGIIAGTILVLALILGITAWGYKNYREQRQLPQGDYVKKPGDGDSFYSDIPPGVSTNSASSSKKRSNGLSHSWSERIPDTKHISDICENGRPRSNSWQGNLGGNKKKIRGKRFRPRSNSTE

SEQ ID NO: 307310 - DNA, 2580 bp, Artificial Sequence
  derived and/or modified sequence
atgcaggctgccgtagcagttagtgtgccattcctgctgttgtgtgtgcttggcacatgcccacctgctaggtgcggacaggccggcgacgcctctctgatggaattggaaaaaagaaaagaaaacagattcgttgaaaggcagtctatagtgcccctgcggttgatctaccgtagcggaggcgaggacgagtcgcgtcacgacgcgctggataccagagtgcggggagatctggggggcccgcagctgactcacgtagaccaggcaagcttccaggttgatgcatttgggacgtcctttatcctggatgtggtgctgaaccacgacttgcttagctcggaatacattgagcgtcatatcgagcatggaggtaaaaccgtagaagtaaaaggtggcgagcactgctattatcagggacacattagagggaacccggactccttcgttgccctttcaacatgccacgggctgcacggaatgttttatgatgggaatcatacatacctgatcgagcccgaagaaaatgacaccacccaggaggatttccactttcactctgtctataagtctcgtctatttgaattctcccttgatgacttgcccagcgagtttcaacaagttaatattacaccaagtaaatttatcctaaaaccgaggcctaagcgatcgaaaagacaactgcggaggtacccccgcaatgtggaggaagagacgaaatatatcgagcttatgattgttaatgatcacttgatgtttaaaaagcaccgactatccgtggttcacacgaacacttatgcaaagtctgttgtgaacatggccgatttaatttataaagatcagctgaaaaccagaatcgtgctggttgccatggagacttgggctacggacaacaagttcgcaattagtgaaaacccactgattacactgcgcgagtttatgaagtacaggcgggatttcataaaagaaaagagtgatgctgtgcacctgttttccggatctcagtttgagtcatcccggtcaggggctgcctacattggcggaatctgctctctgcttaagggagggggcgtaaatgaattcggaaaaacagacctcatggctgtgacacttgcccagtctctggctcacaatattggaataatttcagacaaacgcaagctggcatccggagagtgtaagtgtgaggatacatggtcaggatgcatcatgggggacaccggatactacctgcctaaaaaatttactcagtgtaatatcgaagaataccatgatttcctgaacagcggggggggcgcttgcttgttcaataagccttctaaactacttgatccccccgagtgcggtaatggctttattgaaaccggtgaggaatgtgattgtggaacacccgccgagtgtgtactggagggagctgaatgctgcaagaaatgcacccttacacaggattctcagtgttccgacgggctgtgctgtaaaaagtgtaagtttcagcctatgggtactgtgtgtcgggaggcagttaacgactgtgatataagggaaacctgctcaggcaactcgagccagtgcgcacctaacattcataaaatggatgggtatagttgcgacggagtccagggcatatgtttcggaggcagatgcaagacacgggacagacagtgcaagtacatttggggtcagaaagtcaccgcgagcgataaatactgttatgaaaaactcaacatcgagggcaccgaaaaagggaactgtgggaaggataaggatacgtggatccagtgtaacaagagagacgtgttatgtggatacctgctgtgtactaatatcgggaacatcccccgactgggcgagctggatggcgaaatcacctcaactctcgtggtccagcagggacggactcttaactgttcaggagggcacgttaaacttgaagaggacgtcgatctgggttacgtcgaagatgggactccgtgtggacctcagatgatgtgccttgagcatcggtgtctgcccgttgcttcattcaacttctccacatgtctcagctctaaggaggggacgatctgctcaggcaatggtgtatgttctaatgagctgaagtgtgtgtgcaatcgtcattggataggcagcgactgtaatacatattttcctcataatgacgacgccaaaacaggtataactttatctggcaacggagtcgctggcactaacataatcataggtattatcgcaggtacaatacttgtccttgctttaattctgggcatcacagcctggggttacaaaaactaccgagaacagaggcaattaccccagggggactacgtgaagaagccgggggacggcgattctttctactcggacattcctcctggcgtgtccactaactccgccagctcttccaaaaagcgctccaacggactgtcccactcttggagcgagcgtatacccgatacaaaacatatctccgatatttgcgagaacggccgcccccggagtaatagttggcagggcaacctcgggggcaacaaaaaaaagattcgggggaaaaggtttaggccgcgatccaacagcacagaatag

SEQ ID NO: 307311 - DNA, 2580 bp, Artificial Sequence
  derived and/or modified sequence
atgcaggccgctgtggccgtgtctgtgcccttcctgctgctgtgtgtgctgggcacctgccccccagcccgctgtggccaggccggagatgccagcctgatggagctggagaagaggaaagaaaatagatttgtggagcggcagagcatcgtgcccctgcggctcatctacagaagtggaggagaagatgagagcagacatgatgccctggacaccagggtgcggggggacctgggcggcccccagctgacccacgtggaccaggccagcttccaggtggatgccttcggcaccagcttcatcctggatgtggtgctgaaccacgacctgctgagcagcgagtacatcgagcggcacatcgagcacggcggcaagacagtggaggtgaagggcggggagcactgctactaccagggccacatccggggcaacccagacagctttgtggccctgagcacctgccacggcctgcacggcatgttttatgatggcaaccacacctacctgattgagcctgaggagaatgacaccacccaggaggacttccacttccacagcgtgtacaagagccggctgtttgagttcagcctggatgacctgcccagcgagttccagcaggtgaacatcacccccagcaagttcatcctgaagccccggcccaagaggagcaagaggcagctgcggcgctaccccagaaatgtggaggaggagaccaagtacatcgagctgatgattgtgaatgaccacctgatgttcaagaagcaccggctgtctgtggtgcacaccaacacctacgccaagtctgtggtgaacatggctgacctgatctacaaggaccagctgaagaccagaattgtgctggtggccatggagacctgggccacagacaacaagtttgccatcagcgagaaccccctcatcaccctgcgggagttcatgaagtaccgccgggacttcatcaaggagaagagtgatgctgtgcacctgttcagcggcagccagtttgagagcagccgcagcggggccgcctacatcggcggcatctgcagcctgctgaagggcggcggcgtgaatgaatttgggaagacagacctgatggctgtgaccctggcccagagcctggcccacaacatcggcatcatcagtgacaagaggaagctggccagcggagaatgtaaatgtgaggacacctggagcggctgcatcatgggagacaccggctactacctgcccaagaagttcacccagtgcaacatcgaggagtaccatgacttcctgaacagcggcggcggggcctgcctcttcaacaagcccagcaagctgctggaccccccagaatgtggaaatggcttcatcgagaccggggaggagtgtgactgtggcaccccagcagaatgtgtgctggagggcgctgagtgctgcaagaagtgcaccctgacccaggacagccagtgcagtgatggcctgtgctgcaagaagtgcaagttccagcccatgggcaccgtgtgccgggaggccgtgaatgactgtgacatccgggagacctgcagcggcaacagcagccagtgtgcccccaacatccacaagatggatggctacagctgtgatggagtgcagggcatctgctttggaggccgctgcaagacccgggaccggcagtgcaagtacatctggggccagaaggtgacagccagtgacaagtactgctatgagaagctgaacatcgagggcacagagaagggcaactgtgggaaggacaaggacacctggatccagtgcaacaagagagatgtgctgtgtggctacctgctgtgcaccaacatcggcaacatcccccggctgggggagctggatggagagatcaccagcaccctggtggtgcagcagggccgcaccctgaactgcagcggcggccacgtgaagctggaggaggatgtggacctgggctacgtggaggatggcaccccctgtggcccccagatgatgtgcctggagcaccgctgcctgcctgtggccagcttcaacttcagcacctgcctgagcagcaaggagggcaccatctgcagcggaaatggagtgtgcagcaatgagctgaagtgtgtgtgcaacagacactggattggaagtgactgcaacacctacttcccccacaatgatgatgccaagacaggcatcaccctgtctggaaatggagtggccggcaccaacatcatcatcggcatcatcgccggcaccatcctggtgctggccctgatcctgggcatcacagcctggggctacaagaactaccgggagcagaggcagctgccccagggcgactatgtgaagaagccaggagatggagacagcttctacagcgacatccccccaggagtgtccaccaacagcgccagcagcagcaagaagaggagcaatggcctgagccacagctggagcgagcgcatcccagacaccaagcacatcagtgacatctgtgaaaatggccggcccaggagcaacagctggcagggcaacctgggcggcaacaagaagaagatccggggcaagcgcttccggcccaggagcaacagcacagaatag

SEQ ID NO: 307312 - DNA, 2580 bp, Artificial Sequence
  derived and/or modified sequence
atgcaggccgccgtggccgtgagcgtgcccttcctgctgctgtgcgtactcggaacatgcccaccggcgcgatgcggccaagccggtgacgcatctttgatggaactggagaagcgcaaagaaaaccgatttgtggagcgacagagcatcgtgcctctccggcttatatatcgcagcggcggagaggacgaatctaggcacgacgctctggacacccgggtgagaggagatctgggaggtccacagctgacccacgtcgaccaggcctcttttcaagtggatgcgtttggaacctccttcattctggacgtggtgctcaaccacgatctgctcagcagcgaatacatagagcgacatatagaacatggcggaaaaacagtggaagtcaaaggcggcgaacactgctactatcaggggcatatccgaggcaaccctgatagcttcgtggcactgagcacttgccatgggttacacggcatgttttatgatggtaatcacacttatctgatagagcctgaggagaacgacactacgcaggaagacttccattttcattcagtttacaagagtcgcctattcgagtttagtttagatgacctgccgagtgagtttcagcaagtgaatatcacaccttccaaatttatacttaaaccacggcccaagagatccaaacgtcagctgcggcgatatccccggaacgtagaggaggagacaaaatatatcgagctcatgatcgtcaatgaccatttgatgttcaagaagcaccgcctgagtgtcgttcacacgaatacttatgcaaaaagtgtcgtcaacatggctgatctgatatacaaggaccagctgaaaacccggattgttctggtggccatggaaacatgggccacagataataagttcgctatcagcgagaatcctctgatcaccctgagagaatttatgaaataccgccgtgacttcatcaaagagaaatctgatgcagttcacctattctcagggagccagttcgaatcatcaagaagcggagcagcctatatagggggcatctgtagtctgctcaaaggaggaggggtcaatgagttcggcaaaacggacttgatggccgtaacgctggctcagagtctggcccataacattgggattattagcgataaacgaaagctcgcctccggcgagtgcaaatgtgaggatacgtggtctggttgcatcatgggtgatacgggttattacctgcccaagaagtttacacaatgtaatatcgaggagtatcacgacttcctgaattcaggaggaggcgcttgcctattcaataagccgagtaaattgcttgaccccccagagtgtggcaatggttttatagaaacaggagaagagtgcgattgcggaactcctgctgaatgtgtcctggagggagcagagtgttgcaaaaagtgcaccctgacgcaggattcacagtgttctgacggcctgtgttgcaagaagtgcaaattccagcctatgggtaccgtgtgtagagaagccgtgaacgactgcgatattcgggagacttgcagcggtaattcatcgcagtgcgcccccaacattcacaaaatggacggttactcatgcgatggagtccagggtatctgcttcggtggcaggtgcaaaactcgcgaccgacaatgcaagtacatctggggacagaaagtgaccgcttcagataagtactgctatgaaaagctcaacattgaaggcactgagaagggcaattgtggaaaagacaaagatacctggattcagtgcaacaaaagggatgtgttatgtgggtacctgctctgtacgaatatcgggaatattcctcggctcggagagctggatggcgagatcactagcactttagtggtgcagcagggccgaaccctcaactgcagcggcgggcatgtaaaattggaagaagacgtcgatctgggttacgtcgaggatggtacgccctgcggaccacaaatgatgtgcctcgaacaccggtgcttgcccgtagcctccttcaacttcagtacatgcctctccagcaaggagggcacaatttgttctggcaacggcgtgtgtagtaacgaattaaagtgtgtctgcaatcggcattggattgggagtgactgtaacacatacttcccacacaatgatgacgctaaaacaggcatcacgctgagtggaaatggcgtcgccggcactaacattatcataggtatcatcgctggcacgatcctcgtgctcgcccttattctgggaattactgcatggggctacaagaactatagagaacagaggcagcttccgcagggggactacgtgaagaagccaggggacggcgattccttttattccgacatccctccaggcgtctctaccaactctgcatcctctagcaaaaaacgctccaacggcctgtctcactcttggtcagagcggattcccgatactaagcatatcagcgatatttgcgagaatggaaggccacggtccaatagctggcagggtaatctcggtgggaacaagaaaaagatccgtggtaagcgcttccggcccaggtccaattccaccgagtag

SEQ ID NO: 307313 - DNA, 2580 bp, Artificial Sequence
  derived and/or modified sequence
atgcaggcggctgtggccgtcagtgtgcctttcctgctgttatgcgtgctgggtacctgtccaccggctagatgtggtcaagctggagacgccagcctcatggagttagagaagcggaaggagaatagattcgtggagcgacaatccatagtgcctctgcggttaatctatcggtcaggaggagaggatgagtccagacatgatgccttagacactcgtgttcggggtgaccttggcggaccccaactgacccacgtcgaccaggcttcatttcaagtagatgcctttggaacctcattcattcttgatgtggttctcaatcacgaccttctttcgtccgaatacatcgagaggcatatagagcacggtgggaaaactgttgaagtaaaagggggagagcattgttactatcaaggtcacatccggggaaatcctgactctttcgtagcattgtccacctgtcacgggttacacgggatgttttacgatggaaaccatacttatctgattgaacctgaggagaatgacacaacacaggaagactttcattttcacagcgtgtataaatcacgcttgttcgaatttagtctggatgacctgccttctgagttccagcaggtaaatataacaccttcaaaatttatcctcaaacccaggcctaagcgttccaagagacagctcagaagatatcccaggaacgtggaagaagaaacaaaatatatcgaacttatgatcgtaaacgatcacctgatgttcaagaagcaccgtctgtctgttgtgcacacgaacacgtatgccaagtctgtggtgaacatggctgacttaatttataaagaccagttgaagaccaggattgtgcttgtagcgatggaaacctgggccaccgataataaatttgcgatctccgagaaccctctcatcacactcagagaatttatgaagtaccggagagatttcattaaggagaaaagtgacgctgtgcatttgttttctgggtctcagttcgaatcatccagaagcggggctgcctacataggcggtatctgctccttgctgaagggaggcggagtaaatgagtttggtaaaaccgacctcatggccgtgaccctagctcaatcactggcgcacaacatcggtataatctcggataaaagaaagttggctagtggcgagtgtaagtgcgaagacacctggtcaggctgtatcatgggcgatacaggctattatctgcccaagaaatttacccagtgcaatattgaggaataccacgattttctgaacagcgggggtggcgcttgcctattcaataagccatccaaactgctcgatcctccggagtgcgggaatggatttatcgagaccggagaggagtgcgattgtggtacacctgctgaatgcgtgctcgagggcgctgaatgctgtaaaaagtgcacattaactcaagactcccaatgcagtgacggactctgttgtaaaaaatgcaaattccaacccatgggaacagtttgtcgtgaggctgtgaatgactgtgatatccgtgaaacctgtagtgggaactcctcccaatgcgcacccaacattcataagatggacggttattcatgtgacggcgtccagggcatctgcttcggcggtaggtgcaagacccgcgatcgccaatgtaagtacatctggggccagaaagtgactgcctccgacaaatactgctacgagaagctgaacattgaaggaaccgaaaagggcaattgtggcaaagataaagacacgtggatccagtgcaataagcgcgatgtcctgtgtggttatctcctgtgcacgaatattggtaatatcccccgacttggagagctagacggagagattacatccacgctggtcgtccaacaggggaggacccttaactgtagtggcggacacgttaaactggaggaagatgtggaccttggctacgtggaggacggtactccgtgcggtcctcaaatgatgtgccttgagcaccgctgccttcccgtggcttccttcaatttctcaacttgcttgagcagcaaggaggggactatttgcagtggaaacggggtgtgctctaatgagctcaagtgcgtttgcaaccgccactggattggttcggattgcaacacgtatttcccgcataacgacgatgctaagaccggtatcactttatctgggaatggcgtggccggaactaacataatcattgggataattgcaggcacaattctggtgctcgcactgatcttgggcattacggcctggggatacaagaattaccgtgagcagcgccagctccctcaaggcgactacgtgaaaaagccaggtgacggcgattctttttactccgacatccctcccggagtgtccacaaattctgccagtagctctaaaaaaagaagcaatggactgagtcattcatggagcgagaggatacccgacacaaaacatatctcagatatctgtgagaacggcaggccaagatccaactcctggcagggcaatttagggggaaacaagaaaaagatcagagggaagcggtttaggcccaggtcaaatagtactgaatag

SEQ ID NO: 307314 - DNA, 2580 bp, Artificial Sequence
  derived and/or modified sequence
atgcaggccgccgtggccgtgagcgtgcccttcctgctgctgtgcgtgctgggcacctgcccccccgccagatgcggccaggccggcgacgccagcctgatggagctggagaagagaaaggagaacagattcgtggagagacagagcatcgtgcccctgagactgatctacagaagcggcggcgaggacgagagcagacacgacgccctggacaccagagtgagaggcgacctgggcggcccccagctgacccacgtggaccaggccagcttccaggtggacgccttcggcaccagcttcatcctggacgtggtgctgaaccacgacctgctgagcagcgagtacatcgagagacacatcgagcacggcggcaagaccgtggaggtgaagggcggcgagcactgctactaccagggccacatcagaggcaaccccgacagcttcgtggccctgagcacctgccacggcctgcacggcatgttctacgacggcaaccacacctacctgatcgagcccgaggagaacgacaccacccaggaggacttccacttccacagcgtgtacaagagcagactgttcgagttcagcctggacgacctgcccagcgagttccagcaggtgaacatcacccccagcaagttcatcctgaagcccagacccaagagaagcaagagacagctgagaagataccccagaaacgtggaggaggagaccaagtacatcgagctgatgatcgtgaacgaccacctgatgttcaagaagcacagactgagcgtggtgcacaccaacacctacgccaagagcgtggtgaacatggccgacctgatctacaaggaccagctgaagaccagaatcgtgctggtggccatggagacctgggccaccgacaacaagttcgccatcagcgagaaccccctgatcaccctgagagagttcatgaagtacagaagagacttcatcaaggagaagagcgacgccgtgcacctgttcagcggcagccagttcgagagcagcagaagcggcgccgcctacatcggcggcatctgcagcctgctgaagggcggcggcgtgaacgagttcggcaagaccgacctgatggccgtgaccctggcccagagcctggcccacaacatcggcatcatcagcgacaagagaaagctggccagcggcgagtgcaagtgcgaggacacctggagcggctgcatcatgggcgacaccggctactacctgcccaagaagttcacccagtgcaacatcgaggagtaccacgacttcctgaacagcggcggcggcgcctgcctgttcaacaagcccagcaagctgctggacccccccgagtgcggcaacggcttcatcgagaccggcgaggagtgcgactgcggcacccccgccgagtgcgtgctggagggcgccgagtgctgcaagaagtgcaccctgacccaggacagccagtgcagcgacggcctgtgctgcaagaagtgcaagttccagcccatgggcaccgtgtgcagagaggccgtgaacgactgcgacatcagagagacctgcagcggcaacagcagccagtgcgcccccaacatccacaagatggacggctacagctgcgacggcgtgcagggcatctgcttcggcggcagatgcaagaccagagacagacagtgcaagtacatctggggccagaaggtgaccgccagcgacaagtactgctacgagaagctgaacatcgagggcaccgagaagggcaactgcggcaaggacaaggacacctggatccagtgcaacaagagagacgtgctgtgcggctacctgctgtgcaccaacatcggcaacatccccagactgggcgagctggacggcgagatcaccagcaccctggtggtgcagcagggcagaaccctgaactgcagcggcggccacgtgaagctggaggaggacgtggacctgggctacgtggaggacggcaccccctgcggcccccagatgatgtgcctggagcacagatgcctgcccgtggccagcttcaacttcagcacctgcctgagcagcaaggagggcaccatctgcagcggcaacggcgtgtgcagcaacgagctgaagtgcgtgtgcaacagacactggatcggcagcgactgcaacacctacttcccccacaacgacgacgccaagaccggcatcaccctgagcggcaacggcgtggccggcaccaacatcatcatcggcatcatcgccggcaccatcctggtgctggccctgatcctgggcatcaccgcctggggctacaagaactacagagagcagagacagctgccccagggcgactacgtgaagaagcccggcgacggcgacagcttctacagcgacatcccccccggcgtgagcaccaacagcgccagcagcagcaagaagagaagcaacggcctgagccacagctggagcgagagaatccccgacaccaagcacatcagcgacatctgcgagaacggcagacccagaagcaacagctggcagggcaacctgggcggcaacaagaagaagatcagaggcaagagattcagacccagaagcaacagcaccgagtag

SEQ ID NO: 307315 - DNA, 2784 bp, Artificial Sequence
  derived and/or modified sequence
gccggggctgggtggaggtggccgcggggaccccgggggcgcggagcgagggaaacggactcggcggcgccggcatgaggagctgagcgtctcgggcgaggcgggctgacggcagcaccatgcaggcggcagtggctgtgtccgtgcccttcttgctgctctgtgtcctggggacctgccctccggcgcgctgcggccaggcaggagacgcctcattgatggagctagagaagaggaaggaaaaccgcttcgtggagcgccagagcatcgtgccactgcgcctcatctaccgctcgggcggcgaagacgaaagtcggcacgacgcgctcgacacgcgggtgcggggcgacctcggtggcccgcagttgactcatgttgaccaagcaagcttccaggttgatgcctttggaacgtcattcattctcgatgtcgtgctaaatcatgatttgctgtcctctgaatacatagagagacacattgaacatggaggcaagactgtggaagttaaaggaggagagcactgttactaccagggccatatccgaggaaaccctgactcatttgttgcattgtcaacatgccacggacttcatgggatgttctatgacgggaaccacacatatctcattgagccagaagaaaatgacactactcaagaggatttccattttcattcagtttacaaatccagactgtttgaattttccttggatgatcttccatctgaatttcagcaagtaaacattactccatcaaaatttattttgaagccaagaccaaaaaggagtaaacggcagcttcgtcgatatcctcgtaatgtagaagaagaaaccaaatacattgaactgatgattgtgaatgatcaccttatgtttaaaaaacatcggctttccgttgtacataccaatacctatgcgaaatctgtggtgaacatggcagatttaatatataaagaccaacttaagaccaggatagtattggttgctatggaaacctgggcgactgacaacaagtttgccatatctgaaaatccattgatcaccctacgtgagtttatgaaatacaggagggattttatcaaagagaaaagtgatgcagttcaccttttttcgggaagtcaatttgagagtagccggagcggggcagcttatattggtgggatttgctcgttgctgaaaggaggaggcgtgaatgaatttgggaaaactgatttaatggctgttacacttgcccagtcattagcccataatattggtattatctcagacaaaagaaagttagcaagtggtgaatgtaaatgcgaggacacgtggtccgggtgcataatgggagacactggctattatcttcctaaaaagttcacccagtgtaatattgaagagtatcatgacttcctgaatagtggaggtggtgcctgccttttcaacaaaccttctaagcttcttgatcctcctgagtgtggcaatggcttcattgaaactggagaggagtgtgattgtggaaccccggccgaatgtgtccttgaaggagcagagtgttgtaagaaatgcaccttgactcaagactctcaatgcagtgacggtctttgctgtaaaaagtgcaagtttcagcctatgggcactgtgtgccgagaagcagtaaatgattgtgatattcgtgaaacgtgctcaggaaattcaagccagtgtgcccctaatattcataaaatggatggatattcatgtgatggtgttcagggaatttgctttggaggaagatgcaaaaccagagatagacaatgcaaatacatttgggggcaaaaggtgacagcatcagacaaatattgctatgagaaactgaatattgaagggacggagaagggtaactgtgggaaagacaaagacacatggatacagtgcaacaaacgggatgtgctttgtggttaccttttgtgtaccaatattggcaatatcccaaggcttggagaactcgatggtgaaatcacatctactttagttgtgcagcaaggaagaacattaaactgcagtggtgggcatgttaagcttgaagaagatgtagatcttggctatgtggaagatgggacaccttgtggtccccaaatgatgtgcttagaacacaggtgtcttcctgtggcttctttcaactttagtacttgcttgagcagtaaagaaggcactatttgctcaggaaatggagtttgcagtaatgagctgaagtgtgtgtgtaacagacactggataggttctgattgcaacacttacttccctcacaatgatgatgcaaagactggtatcactctgtctggcaatggtgttgctggcaccaatatcataataggcataattgctggcaccattttagtgctggccctcatattaggaataactgcgtggggttataaaaactatcgagaacagagacagttaccccagggagattatgtaaaaaagcctggagatggtgactctttttatagcgacattcctcccggagtcagcacaaactcagcatctagttctaagaagaggtcaaatgggctctctcattcttggagtgaaaggattccagacacaaaacatatttcagacatctgtgaaaatgggcgacctcgaagtaactcttggcaaggtaacctgggaggcaacaaaaagaaaatcagaggcaaaagatttagacctcggtctaattcaactgagtaagtctgaacctctaatggaaaaaggcactccaaggtcctgtgcaaatagtgtcaaaagtaaattaagcagatagtcaaagaactgt

SEQ ID NO: 307316 - DNA, 1794 bp, Artificial Sequence
  derived and/or modified sequence
atggagcacatcctggtccgactggaaaccgatagtagaccagtgtcacgacgccttgtgtcacttatttttaattctttcctgcctgtgaatcagcctgaggaggtgtggtgtgagcggtgtgtgacccttgtacagatgaaccacgcggctgccaggcggttctatcaatatgcccacgagcataccgcgtgcacaaatatcgcaaaacttatacatgtcatcaggcactgccttaacgcctgcattcaacgcgctgttcgggaacctcccgaggatgaggaggaggaggacggacgcgaaaaagaaaacgtgactgtgcttgataaaacattatctgtcaatgatgtcgcctgcatggccggcttactggaaattattgttattctttggaaatccattgaccgcagcatggagaataataaggaagctaagctgtacactattaacaagtttgcctccgtgctgccagagtacctaaaggtgtttaaggacgacagatgcaagattcctctgttcatgctcatgtcattcatgccagccagcgccgtccccccatttagttgcggcgtcataagtactctgagatcaagggaagagggtgccgtcgacaaatcatattgtacactgcttgactgcttgtgcagctggggtcaagtaggacatatcctggagctggttgacaattggctgcctaccgagcatgcccaggctaagtccaatacagcctctaaagggagagtgcagatccatgacacccgtccagtgaagccagagttggcattggtgtatatcgagtacctcctaactcaccctaaaaaccgcgagtgcctgctgtcagcccccagaaaaaaactgaaccatctactcaaggcactggagacctcaaaagcagacctggagagcctgctccagacacccggcggtaaaccaaggggattttcggaagccgcagcccctcgagcctttgggttacactgccggctttccatccacttacagcacaagttttgttcagaaggcaaggtgtatctgtccatgctcgaggacaccggattctggttagaaagcaaaatcctatcttttatccaagaccaggaagaggattacctcaagctgcatcgggtgatatatcaacagattatccagacctatctgactgtgtgtaaggatgtggtcatggttggcttaggtgaccaccagttccagatgcaacttttgcagaggagtctggggatcatgcaaaccgtgaaaggtttcttttacgtttcgctgttactcgacattttgaaagagattaccgggtccagtctgatccagaaaaccgactcagatgaggaggtggccatgctacttgatacggtgcaaaaagtttttcagaaaatgctcgaatgcattgcacgcagttttaggaagcagcccgaagagggcctccgcgtgtcagacgtcgaagagctgactcccccggagcacctttccgacctgccacctttttctcggtgcctgatcggtatcatcattaagtcctcaaatgtcgtgcgctcttttctagatgagctgaaggcgtgcgtggcctctaatgacattgaggggatcgtttgcctgactgctgcagtccacatcatcctggttatcaatgctggtaagcacaagtcatccaaggtacgcgaagtcgcagccaccgtccaccggaagcttaaaaccttcatggaaattacactagaagaagactctattgagcggtttctttatgaatccagctcccgcactctgggcgagctcttaaatagctag

SEQ ID NO: 307317 - DNA, 1794 bp, Artificial Sequence
  derived and/or modified sequence
atggagcacatcctggtgcggctggagacagacagcaggcctgtgtcccggcggctggtgtccctcatcttcaacagcttcctgcctgtgaaccagcctgaggaggtgtggtgtgagcgctgtgtgaccctggtgcagatgaaccacgccgccgcccggcgcttctaccagtatgcccacgagcacacagcctgcaccaacatcgccaagctgattcatgtgatccgccactgcctgaatgcctgcatccagagagctgtgcgggagcccccagaagatgaggaggaggaggatggccgggagaaggaaaatgtgacagtgctggacaagaccctgtctgtgaatgatgtggcctgcatggccggcctgctggagatcatcgtcatcctgtggaagagcattgaccgctccatggagaacaacaaggaggccaagctgtacaccatcaacaagtttgcctctgtgctgcctgagtacctgaaggtgttcaaggatgaccgctgcaagatccccctcttcatgctgatgtccttcatgcctgccagcgctgtgccccccttcagctgtggggtcatcagcaccctgcggagccgggaggagggcgctgtggacaagagctactgcaccctgctggactgcctgtgctcctggggccaggtgggccacatcctggagctggtggacaactggctgcccacagaacatgcccaggccaagagcaacacagccagcaagggccgggtgcagatccatgacaccaggcctgtgaagccagagctggccctggtgtacatcgagtacctgctgacccaccccaagaaccgggagtgcctgctgagcgcccccaggaagaagctgaaccacctgctgaaggccctggagaccagcaaggctgacctggagagcctgctgcagaccccaggcggcaagccccggggcttcagcgaggccgccgccccccgggccttcggcctgcactgccgcctgagcatccacctgcagcacaagttctgcagcgagggcaaggtgtacctgtccatgctggaggacaccggcttctggctggagagcaagatcctgtccttcatccaggaccaggaggaggactacctgaagctgcacagggtcatctaccagcagatcatccagacctacctgactgtgtgcaaggatgtggtgatggtgggcctgggggaccaccagttccagatgcagctgctgcagaggagcctgggcatcatgcagacagtgaagggcttcttctacgtgtccctgctgctggacatcctgaaggagatcaccggcagcagcctcatccagaagacagacagtgatgaggaggtggccatgctgctggacacagtgcagaaggtgttccagaagatgctggagtgcatcgcccgctccttcaggaagcagcctgaggagggcctgcgggtgtctgatgtggaggagctgaccccacctgagcacctgagtgacctgccccccttcagccgctgcctgattggcatcatcatcaagagcagcaatgtggtgcgctccttcctggatgagctgaaggcctgtgtggccagcaatgacatcgagggcatcgtgtgcctgacagctgctgtgcacatcatcctggtgatcaatgccggcaagcacaagagcagcaaggtgcgggaggtggccgccaccgtgcacaggaagctgaagaccttcatggagatcaccctggaggaggacagcattgagcgcttcctgtatgagagcagcagcaggaccctgggggagctgctgaacagctag

SEQ ID NO: 307318 - DNA, 1794 bp, Artificial Sequence
  derived and/or modified sequence
atggagcacatcctggtgcggctggagaccgacagccggcccgtgtctcggaggctcgtgtctctgatcttcaatagcttcctgccagtcaaccagcccgaagaagtttggtgcgaaaggtgcgtgacactggtgcaaatgaatcacgccgctgctcggaggttttaccagtatgctcatgaacatactgcttgtacaaatatcgcgaaactcatccatgtcatacggcactgtctcaacgcttgcatccagcgggcagtgcgcgagccccccgaagacgaagaagaagaggatggcagagagaaagaaaatgtcaccgttctggataagaccttatcggtaaatgatgtggcctgcatggcaggcctgctggaaatcatagtgatcctctggaagtcaattgaccggagtatggagaataataaggaagctaagctgtacacgataaataaattcgcgtcggtgctgccagaatatctcaaagtgttcaaagacgaccggtgtaagattcctctgttcatgttgatgagttttatgcctgcttccgccgtgcctccatttagttgtggtgtgatttctactctgcgcagtcgggaagagggcgccgtggataaaagctactgtacccttctcgattgcctgtgcagttgggggcaagtcggtcatattctagaactggtcgacaactggctcccaacagagcacgcccaggcaaaatcaaacacagcatctaaggggcgcgtgcaaatccatgacacccgcccagtaaagccggaattggccctagtgtacattgagtacctgctaactcaccccaagaatcgggagtgtctgctttctgcaccgagaaagaaattgaatcatctgttgaaagccctggaaacatcgaaggccgatctggagtcgctgttacaaacccccggcggtaaacctcggggcttctctgaggcggccgccccgcgcgcattcggactccactgccgactgtcaattcatctacagcataagttttgttccgaagggaaagtctacctctcgatgctcgaagacaccggattctggctcgagtccaagatcctgtccttcattcaagatcaagaagaggactacctcaagttgcaccgcgtgatataccaacaaatcatacagacatatctgacagtgtgtaaggacgtggttatggtcggactgggcgatcatcagtttcaaatgcagctcctgcagaggtccctggggatcatgcagacggttaaggggttcttttacgtctcactgctcctcgacattcttaaggagattacgggaagctcattaatacaaaaaactgactcggatgaagaagtggctatgcttctggatacagtgcagaaggtattccagaaaatgcttgagtgcatagcacgatcctttcgtaagcagcccgaggagggattgagggtgtccgacgtggaagaattaactcctcccgagcacttatcagacctgccccctttttccaggtgtttgattggcataatcattaaatcaagcaatgtagtgaggtctttcttggatgagctcaaggcttgcgtggcttctaatgatatcgagggcatcgtgtgcctcaccgccgcagttcacatcatcttggtgatcaacgcaggcaaacacaaatcctccaaggtccgagaagtggctgccaccgtgcacagaaagctcaaaacattcatggaaataaccctggaggaagattcaatagaaagatttctgtacgaatctagcagtcgtactttgggagaattattgaattcctag

SEQ ID NO: 307319 - DNA, 1794 bp, Artificial Sequence
  derived and/or modified sequence
atggaacacatcctggttcggctagaaacggattcgcgtcctgtttcaagaagactagttagcttaatcttcaattcgttcctgcccgtgaatcagcctgaagaggtgtggtgcgagcgttgtgtcacactggtacagatgaaccacgcagccgctcggagattctatcagtatgcccatgaacacacagcctgtactaacatcgccaagctgattcatgtcatccgtcactgtctgaacgcgtgtattcaacgcgctgttagagaaccacctgaggatgaggaggaggaggacggacgggaaaaggaaaacgtgacagtgctggacaagacgttgagcgttaacgatgtggcctgcatggcgggtttactggagatcatagtaatactctggaaaagcatagatcggtctatggagaacaataaggaggcaaagctttatactataaataagtttgcaagcgtcctacccgagtatcttaaagtctttaaggatgatcgctgcaagatacccctgttcatgttaatgtcgttcatgcccgcatctgccgtccccccattcagctgtggtgtgatctctacactgcgtagtcgcgaagagggcgctgtggacaagtcctattgtacgctgttagattgcttgtgcagctggggtcaggtcgggcacattctcgagctggtggataactggctccccactgaacacgctcaggcgaaaagcaataccgccagcaaagggagagtccagatccacgacacccgccctgtgaagcctgaattggctctggtttatattgagtatctactgactcaccctaaaaaccgagaatgccttcttagcgctccaagaaagaagctgaaccatctgcttaaggctctcgaaacctccaaagctgacttggaatccctgttgcagactcccggaggcaagcctcgcggattcagcgaagcggctgcccctcgcgcatttggcctccattgcagactgtccatccatctgcagcacaagttttgcagcgaaggaaaggtctatctcagtatgctggaggataccggcttttggcttgaatctaaaatactctccttcatacaagatcaggaggaggattatctaaagctgcaccgggtcatttatcagcagatcatccagacttacctgacggtctgcaaggatgttgtcatggtcggactgggagatcaccaatttcaaatgcagcttctgcagcgatcactcggcatcatgcaaacagtgaaagggttcttctatgtgagcctcctgttagacatacttaaggagattacaggctcctctctgatccaaaaaacggactccgacgaggaggtggccatgctgctggataccgtccagaaagtttttcagaaaatgcttgaatgtattgcgaggtcctttcgcaagcagccagaggagggactgagggtgagtgatgtggaggagctgaccccccctgaacacttatctgacctccccccatttagccggtgtctgatagggatcatcattaaaagctcaaacgtcgttcggtcgtttctggacgaacttaaagcgtgcgtagcatcaaacgacatagaggggatagtttgtctgacagctgctgtccacattatcctggtgattaatgccggaaaacataagagtagcaaggttagagaagtggccgcaaccgttcatcgcaagctgaagacgttcatggaaattactctggaggaagactctatagagcgatttctgtacgagagtagtagtaggacacttggcgagttgctcaattcctag

SEQ ID NO: 307320 - DNA, 1794 bp, Artificial Sequence
  derived and/or modified sequence
atggagcacatcctggtgagactggagaccgacagcagacccgtgagcagaagactggtgagcctgatcttcaacagcttcctgcccgtgaaccagcccgaggaggtgtggtgcgagagatgcgtgaccctggtgcagatgaaccacgccgccgccagaagattctaccagtacgcccacgagcacaccgcctgcaccaacatcgccaagctgatccacgtgatcagacactgcctgaacgcctgcatccagagagccgtgagagagccccccgaggacgaggaggaggaggacggcagagagaaggagaacgtgaccgtgctggacaagaccctgagcgtgaacgacgtggcctgcatggccggcctgctggagatcatcgtgatcctgtggaagagcatcgacagaagcatggagaacaacaaggaggccaagctgtacaccatcaacaagttcgccagcgtgctgcccgagtacctgaaggtgttcaaggacgacagatgcaagatccccctgttcatgctgatgagcttcatgcccgccagcgccgtgccccccttcagctgcggcgtgatcagcaccctgagaagcagagaggagggcgccgtggacaagagctactgcaccctgctggactgcctgtgcagctggggccaggtgggccacatcctggagctggtggacaactggctgcccaccgagcacgcccaggccaagagcaacaccgccagcaagggcagagtgcagatccacgacaccagacccgtgaagcccgagctggccctggtgtacatcgagtacctgctgacccaccccaagaacagagagtgcctgctgagcgcccccagaaagaagctgaaccacctgctgaaggccctggagaccagcaaggccgacctggagagcctgctgcagacccccggcggcaagcccagaggcttcagcgaggccgccgcccccagagccttcggcctgcactgcagactgagcatccacctgcagcacaagttctgcagcgagggcaaggtgtacctgagcatgctggaggacaccggcttctggctggagagcaagatcctgagcttcatccaggaccaggaggaggactacctgaagctgcacagagtgatctaccagcagatcatccagacctacctgaccgtgtgcaaggacgtggtgatggtgggcctgggcgaccaccagttccagatgcagctgctgcagagaagcctgggcatcatgcagaccgtgaagggcttcttctacgtgagcctgctgctggacatcctgaaggagatcaccggcagcagcctgatccagaagaccgacagcgacgaggaggtggccatgctgctggacaccgtgcagaaggtgttccagaagatgctggagtgcatcgccagaagcttcagaaagcagcccgaggagggcctgagagtgagcgacgtggaggagctgaccccccccgagcacctgagcgacctgccccccttcagcagatgcctgatcggcatcatcatcaagagcagcaacgtggtgagaagcttcctggacgagctgaaggcctgcgtggccagcaacgacatcgagggcatcgtgtgcctgaccgccgccgtgcacatcatcctggtgatcaacgccggcaagcacaagagcagcaaggtgagagaggtggccgccaccgtgcacagaaagctgaagaccttcatggagatcaccctggaggaggacagcatcgagagattcctgtacgagagcagcagcagaaccctgggcgagctgctgaacagctag

SEQ ID NO: 307321 - protein, 138 aa, Artificial Sequence
  derived and/or modified sequence
MGGTTSTRRVTFEADENENITVVKGIRLSENVIDRMKESSPSGSKSQRYSGAYGASVSDEELKRRVAEELALEQAKKESEDQKRLKQAKELDRERAAANEQLTRAILRERICSEEERAKAKHLIKVELLWVKPGVLTA

SEQ ID NO: 307322 - DNA, 417 bp, Artificial Sequence
  derived and/or modified sequence
atgggcgggacgactagcacaaggagggtgacctttgaggccgatgagaacgaaaacattacagtggtcaagggtataagactgagtgagaatgtcatcgaccgcatgaaggaatctagtccctctggctccaaatcacagaggtactctggtgcttatggcgcctccgtttctgacgaagagctgaagcgacgcgtggctgaagaactggccttagaacaggccaagaaggagtccgaagatcagaaaaggttgaagcaagccaaggaacttgatagggaaagagctgctgcgaacgagcagcttaccagagcgatcctgagagagaggatttgctccgaagaagagcgcgccaaagcgaagcatctgatcaaggtggaacttctgtgggtgaaacctggcgtcctcacagcatag

SEQ ID NO: 307323 - DNA, 417 bp, Artificial Sequence
  derived and/or modified sequence
atgggcggcaccaccagcacccggcgggtgacctttgaagcagatgaaaatgaaaacatcaccgtggtgaagggcatccggctgtctgaaaatgtgattgacaggatgaaggagagcagccccagcggcagcaagagccagcgctacagcggggcctatggagcctctgtgtctgatgaggagctgaagagaagagtggccgaggagctggccctggagcaggccaagaaggagagcgaggaccagaagaggctgaagcaggccaaggagctggaccgggagagagctgctgccaatgagcagctgacccgggccatcctgcgggagcgcatctgcagcgaggaggagcgggccaaggccaagcacctgatcaaggtggagctgctgtgggtgaagccaggagtgctgacagcctag

SEQ ID NO: 307324 - DNA, 417 bp, Artificial Sequence
  derived and/or modified sequence
atgggcggcaccaccagcacccggcgggtgaccttcgaggccgacgaaaatgaaaacatcactgtcgttaaaggcattaggttgagcgagaatgtgatagatcgcatgaaggagagcagtccaagtggatctaagtctcagcgatacagcggcgcatacggggccagcgtgtccgatgaagaactcaaacgcagggtcgctgaggagctagccctggaacaggctaaaaaagaaagtgaggatcagaaaaggctgaagcaggctaaggagctcgacagggaacgtgcagccgcaaatgagcagctgacccgcgccatcctgagggagcggatctgcagcgaggaggagagggccaaagctaagcacctgatcaaggtcgagctgctttgggtcaaacccggcgtgctcactgcatag

SEQ ID NO: 307325 - DNA, 417 bp, Artificial Sequence
  derived and/or modified sequence
atgggaggcacaacctcgacgaggagggtgacatttgaagcagatgagaacgagaacatcacagtggtcaaagggatcagactgtcggagaacgttattgataggatgaaagagtcctcacctagcggatcaaagtctcaaagatatagcggtgcttatggcgcatccgtctccgacgaggaactgaagcgcagagttgctgaggagctggcgttggaacaggccaagaaggagagcgaagaccagaagaggctcaaacaggcaaaggagctcgatagggaaagagccgctgcaaatgagcaactcaccagagcgattcttagggaaaggatttgcagtgaagaagagcgcgcaaaagctaagcacctgatcaaggtggaattactttgggtcaaacccggagtattgactgcctag

SEQ ID NO: 307326 - DNA, 898 bp, Artificial Sequence
  derived and/or modified sequence
gtgcgggaaaagaatccaggcccttccacgcgcgtgtgggtgcgggggccccgaagtgctcgtggttccccgctaggtctccgctggggcaggaaccggaatcatgggtgggaccaccagcacccgccgggtcaccttcgaggcggacgagaatgagaacatcaccgtggtgaagggcatccggctttcggaaaatgtgattgatcgaatgaaggaatcctctccatctggttcgaagtctcagcggtattctggtgcttatggtgcctcagtttctgatgaagaattgaaaagaagagtagctgaggagctggcattggagcaagccaagaaagaatccgaagatcagaaacgactaaagcaagccaaagagctggaccgagagagggctgctgccaatgagcagttaaccagagccatccttcgggagaggatatgtagcgaggaggaacgcgctaaggcaaagcacctgataaaagtggagctgctctgggtgaaacctggagtgttgactgcttagcctccacttcggccttcctagaaacccagatgttactcctcggaacctttagtcctcattggagcacagttgggaactcactggacagggaaaatgggaccatggaatggagaactttgaactgaagagtgagggggattttcctagttcactaggcaattgggaaacactaaaactttctaagaagaaggctcatttctagtctctcccattctttaccttagtcacttctctgaaagaccaacccatgaccagctgcaaacagagaacatgaaaggaagtccatgcgtaatgaatcagtttcttcagtgacaaatctggggtcccggttgcatgggcaaatagtgaagccagaatagaggtggtagaccaagaaag

SEQ ID NO: 307327 - DNA, 417 bp, Artificial Sequence
  derived and/or modified sequence
atgggcggcaccaccagcaccagaagagtgaccttcgaggccgacgagaacgagaacatcaccgtggtgaagggcatcagactgagcgagaacgtgatcgacagaatgaaggagagcagccccagcggcagcaagagccagagatacagcggcgcctacggcgccagcgtgagcgacgaggagctgaagagaagagtggccgaggagctggccctggagcaggccaagaaggagagcgaggaccagaagagactgaagcaggccaaggagctggacagagagagagccgccgccaacgagcagctgaccagagccatcctgagagagagaatctgcagcgaggaggagagagccaaggccaagcacctgatcaaggtggagctgctgtgggtgaagcccggcgtgctgaccgcctag

SEQ ID NO: 307328 - DNA, 456 bp, Artificial Sequence
  derived and/or modified sequence
tgaacccacaaggagaaggagaagggcaaggagaaggtgagagagaaggagaagcccgagaagaaggccacccacaaggagaagatcgagaagaaggagaagcccgagaccaagaccctggccaaggagcagaagaaggccaagaccgccgagaagagcgaggagaagaccaagaaggaggtgaagggcggcaagcaggagaaggtgaagcagaccgccgccaaggtgaaggaggtgcagaagacccccagcaagcccaaggagaaggaggacaaggagaaggccgccgtgagcaagcacgagcagaagggcttccccggccccggcatcagaaacagcagctactactgccagtacatcaagggccagatcaacgcctggaacgacctgagaaccagcctgctgcccatcccctacctgagctgcggcaagatgtgcagcaacttcaacaactag

SEQ ID NO: 307329 - DNA, 222 bp, Artificial Sequence
  derived and/or modified sequence
atgttgaagactgagagttccggagagcggaccacactgaggtctgcttcacctcaccgaaacgcttacaggaccgagtttcaggctctgaaaagcacatttgacaaaccaaagagtgatggcgaacagaagacaaaagaaggcgagggcagccagcagagccgcggaaggaagtatggatctaacgtcaatcgcatcaagaacctgtttatgcagatgtag

SEQ ID NO: 307330 - DNA, 126 bp, Artificial Sequence
  derived and/or modified sequence
atgctgaagacggagtcttctggtgagcggacgactctgcgcagcgcctctccgcatcgtaacgcataccgcacagagttccaggcccttaagtccacattcgataaaccgaaaagcgacgggtag

SEQ ID NO: 307331 - DNA, 222 bp, Artificial Sequence
  derived and/or modified sequence
atgctgaagacagagagcagtggagagaggaccaccctgcggagcgccagcccccacagaaatgcctacagaacagagttccaggccctgaagagcacctttgacaagcccaagagtgatggagagcagaagaccaaggagggggagggcagccagcagagccggggcaggaaatatggcagcaatgtgaaccgcatcaagaacctcttcatgcagatgtag

SEQ ID NO: 307332 - DNA, 126 bp, Artificial Sequence
  derived and/or modified sequence
atgctgaagacagagagcagtggagagaggaccaccctgcggagcgccagcccccacagaaatgcctacagaacagagttccaggccctgaagagcacctttgacaagcccaagagtgatggatag

SEQ ID NO: 307333 - DNA, 222 bp, Artificial Sequence
  derived and/or modified sequence
atgctgaagaccgagagcagcggcgagcggaccaccctgcggagcgcgtcaccgcacagaaatgcgtataggacagaatttcaggccctgaaatctaccttcgacaagccaaagtctgacggggagcaaaagactaaagagggggaaggatcccagcagtcgcggggacgaaagtatggaagcaacgtgaaccgcatcaaaaacttgttcatgcagatgtag

SEQ ID NO: 307334 - DNA, 126 bp, Artificial Sequence
  derived and/or modified sequence
atgctgaagaccgagagcagcggcgagcggaccaccctgcggagcgcctcgccccatcgcaacgcatatcgcaccgagtttcaggcactgaaaagtaccttcgacaagcctaagagtgacggatag

SEQ ID NO: 307335 - DNA, 222 bp, Artificial Sequence
  derived and/or modified sequence
atgctcaagacggagtcttctggggagcgaaccacacttcgctctgcatcacctcacaggaatgcatacaggacagaattccaggcgctgaaatccaccttcgataagcccaaaagcgatggagaacagaagactaaagagggtgagggcagtcagcagtctagagggagaaaatacgggagtaatgtgaaccggattaaaaacctgttcatgcagatgtag

SEQ ID NO: 307336 - DNA, 126 bp, Artificial Sequence
  derived and/or modified sequence
atgttgaaaactgaatcgagtggcgagaggacaactctgcggagcgcctccccccacaggaatgcctataggacagagtttcaggctctcaagtctacatttgacaagccgaaatcagatgggtag

SEQ ID NO: 307337 - DNA, 222 bp, Artificial Sequence
  derived and/or modified sequence
atgctgaagaccgagagcagcggcgagagaaccaccctgagaagcgccagcccccacagaaacgcctacagaaccgagttccaggccctgaagagcaccttcgacaagcccaagagcgacggcgagcagaagaccaaggagggcgagggcagccagcagagcagaggcagaaagtacggcagcaacgtgaacagaatcaagaacctgttcatgcagatgtag

SEQ ID NO: 307338 - DNA, 126 bp, Artificial Sequence
  derived and/or modified sequence
atgctgaagaccgagagcagcggcgagagaaccaccctgagaagcgccagcccccacagaaacgcctacagaaccgagttccaggccctgaagagcaccttcgacaagcccaagagcgacggctag

SEQ ID NO: 307339 - protein, 422 aa, Artificial Sequence
  derived and/or modified sequence
MTVFFKTLRNHWKKTTAGLCLLTWGGHWLYGKHCDNLLRRAACQEAQVFGNQLIPPNAQVKKATVFLNPAACKGKARTLFEKNAAPILHLSGMDVTIVKTDYEGQAKKLLELMENTDVIIVAGGDGTLQEVVTGVLRRTDEATFSKIPIGFIPLGETSSLSHTLFAESGNKVQHITDATLAIVKGETVPLDVLQIKGEKEQPVFAMTGLRWGSFRDAGVKVSKYWYLGPLKIKAAHFFSTLKEWPQTHQASISYTGPTERPPNEPEETPVQRPSLYRRILRRLASYWAQPQDALSQEVSPEVWKDVQLSTIELSITTRNNQLDPTSKEDFLNICIEPDTISKGDFITIGSRKVRNPKLHVEGTECLQASQCTLLIPEGAGGSFSIDSEEYEAMPVEVKLLPRKLQFFCDPRKREQMLTSPTQ

SEQ ID NO: 307340 - protein, 65 aa, Artificial Sequence
  derived and/or modified sequence
MTVFFKTLRNHWKKTTAGLCLLTWGGHWLYGKHCDNLLRRAACQEAQHYQDESRWEPTLSRTPGS

SEQ ID NO: 307341 - protein, 244 aa, Artificial Sequence
  derived and/or modified sequence
MTVFFKTLRNHWKKTTAGLCLLTWGGHWLYGKHCDNLLRRAACQEAQVFGNQLIPPNAQVKKATVFLNPAACKGTLFEKNAAPILHLSGMDVTIVKTDYEGQAKKLLELMENTDVIIVAGGDGTLQEVVTGVLRRTDEATFSKIPIGFIPLGETSSLSHTLFAESGNKVQHITDATLAIVKGETVPLDVLQIKGEKEQPVFAMTGLRWGSFRDAGVKVSKYWYLGPLKIKAAHFFSTLKPFPKR

SEQ ID NO: 307342 - DNA, 1269 bp, Artificial Sequence
  derived and/or modified sequence
atgacggtttttttcaagacactccgcaatcattggaaaaagaccaccgcgggcctgtgcctgctaacctggggaggccattggctatacggcaagcactgtgataacctcctgaggcgtgctgcctgccaagaggctcaagtgttcgggaaccagctgatcccccccaacgcccaagtcaagaaggccaccgtttttctaaacccggccgcttgtaagggcaaggcaagaactttgtttgagaagaatgcagcccccattctgcatttgagcggaatggacgtgaccattgtgaaaacagattatgaaggacaggccaagaaattactggagctgatggagaatacagatgtgattatcgtcgcaggcggtgatgggaccctgcaagaggttgtgacaggagtcctaaggcgcactgatgaggccaccttcagtaagattcccattggtttcatccctctgggggagacgtcaagcctgagccacacactgttcgccgagagcggcaacaaggtgcagcacattaccgacgctactctagcaatcgtcaaaggggaaacagtaccgctggatgtgctgcaaatcaaaggcgaaaaggagcagcctgtgtttgcgatgactgggctccggtgggggtcatttcgcgatgctggcgtgaaagttagtaagtactggtacttaggcccgctgaaaatcaaggcagcccacttcttttccaccctaaaggagtggcctcagacccaccaggccagcatcagctatactggcccaacagagcggcctcctaacgagccagaggagacacctgtgcagcggccttctttgtaccgcaggatcttgcggaggttagcaagttattgggcccagcctcaagacgcattgagtcaggaagtttctcctgaagtatggaaagacgtgcagctgtctacaattgaactgtctatcaccacgcgcaataaccagctggacccaacttctaaagaggacttcctcaatatttgtatcgagcctgatacaatctctaaaggcgactttatcaccattggctctcgaaaggtacgtaacccgaagttgcatgtggaaggcactgaatgcctccaggcttcacagtgtactctactgattcctgagggtgctggaggatcattctcgatagacagtgaggagtacgaagccatgccagtcgaagttaaactgctacctaggaagctgcagtttttctgcgacccccgaaagcgggagcagatgctgacgtctcccacccagtag

SEQ ID NO: 307343 - DNA, 1269 bp, Artificial Sequence
  derived and/or modified sequence
atgaccgtcttcttcaagaccctgaggaaccactggaagaagaccacagctggcctgtgcctgctgacctggggcggccactggctgtatggcaagcactgtgacaacctgctgcggcgggccgcctgccaggaggcccaggtgtttggaaaccagctgatccccccaaatgcccaggtgaagaaggccaccgtcttcctgaacccagctgcctgcaagggcaaggcccggaccctgtttgagaagaatgctgcccccatcctgcacctgagcggcatggatgtgaccatcgtgaagacagattatgagggccaggccaagaagctgctggagctgatggagaacacagatgtgatcatcgtggccggaggagatggcaccctgcaggaggtggtgactggagtgctgcggaggacagatgaggccaccttcagcaagatccccatcggcttcatccccctgggggagaccagcagcctgagccacaccctgtttgctgagagcggcaacaaggtgcagcacatcacagatgccaccctggccatcgtgaagggggagaccgtgcccctggatgtgctgcagatcaagggggagaaggagcagcctgtgtttgccatgacaggcctgcgctggggcagcttcagagatgctggggtgaaggtgtccaagtactggtacctgggccccctgaagatcaaggccgcccacttcttcagcaccctgaaggagtggccccagacccaccaggccagcatctcctacacaggccccacagagcggcccccaaatgaacctgaggagacccctgtgcagaggcccagcctgtaccgccgcatcctgcggcggctggccagctactgggcccagccccaggatgccctgagccaggaggtgtccccagaggtgtggaaggatgtgcagctgagcaccatcgagctgagcatcaccaccaggaacaaccagctggaccccaccagcaaggaggacttcctgaacatctgcattgaaccagacaccatcagcaagggggacttcatcaccatcggcagcaggaaggtgaggaaccccaagctgcacgtggagggcacagagtgcctgcaggccagccagtgcaccctgctgatccctgagggcgccggcggcagcttcagcattgattctgaggagtatgaggccatgcctgtggaggtgaagctgctgcccaggaagctgcagttcttctgtgaccccaggaagcgggagcagatgctgaccagccccacccagtag

SEQ ID NO: 307344 - DNA, 1269 bp, Artificial Sequence
  derived and/or modified sequence
atgaccgtgttcttcaagaccctgcggaaccactggaagaagaccacagccggcctgtgcttgctgacctggggaggtcactggctatacggtaagcactgtgacaacctgctgaggcgagcggcctgccaagaagcccaggtcttcggcaaccagctgatcccaccgaacgctcaggtgaaaaaggccaccgtgtttctgaaccccgcagcctgtaagggaaaggcaagaaccctgttcgagaagaatgccgcaccaatactccacctgtcggggatggatgttacaattgtcaagacagattatgagggacaggccaagaagcttctggaactcatggagaatacggatgttataatagttgcgggcggcgatgggacattgcaagaagtagtcaccggcgtgctgaggcgaacggacgaggctacattttcaaagataccaatcgggtttatcccactcggagagacctcatcactgtctcacacattgtttgctgagagtggaaacaaggttcagcacattaccgacgcgactctggccatcgtcaaaggagaaacagttcctctggatgtcctgcagatcaagggagaaaaagaacagcctgtatttgccatgacagggctgcgatggggcagcttcagagatgcaggggtgaaggtgagtaagtactggtacctcggtcccctcaagataaaggctgcgcatttcttctccacccttaaggagtggccacagactcaccaagcctccatatcatacaccggtcccactgagagacccccgaacgagccagaggaaacccctgtgcaaaggccttccctctatagaaggattctgcgtaggcttgcaagctactgggcacagcctcaagatgccctctcacaagaagtgagtccggaggtgtggaaggatgtccagctaagcaccatcgagctgagtattaccaccagaaacaaccagctcgatcccacctccaaagaggacttcctgaatatctgtatcgagccggacaccatctcgaaaggagacttcataactattggcagtagaaaggtcagaaatcccaagctccacgtggaggggactgagtgcctgcaggcatctcagtgcaccctacttatccctgaaggggctgggggttccttcagtattgactcggaggagtacgaagccatgccagtggaggtcaagttacttccacggaagttgcagtttttctgtgaccctaggaaacgcgagcagatgttaacatctccgacgcagtag

SEQ ID NO: 307345 - DNA, 1269 bp, Artificial Sequence
  derived and/or modified sequence
atgacagtttttttcaagaccctcaggaaccattggaaaaaaaccaccgcaggactctgtctgttgacctggggtgggcactggttatacggcaagcactgtgacaacttgttgaggagggcagcctgtcaagaagcacaggtttttgggaaccaactcataccccctaacgcccaggtaaaaaaagccacagtcttcttaaacccagctgcatgcaaaggtaaggctcgcactctgttcgagaagaacgccgcacctatactgcacctttccgggatggatgtgaccattgtcaagaccgattatgaggggcaggccaagaagctgctggagctgatggagaacaccgatgtgattatagtagcaggaggcgacggcactctgcaggaagtggttacaggcgtactcagacgtacagacgaggcaacattttccaagattcctattggctttattccactcggagagacgtcatccctgagtcacacactgttcgccgaatccggcaacaaggttcagcatatcactgatgctacactggccatagtgaagggggaaaccgttcctttggatgtgctccaaattaaaggtgagaaagaacagccagtctttgcaatgactggtctccgatgggggtcctttcgcgacgcaggtgttaaagtgtccaaatactggtacctggggcctctaaagattaaggctgcccacttcttcagtacgctgaaggagtggccacagacacaccaggcatctatctcttacactggcccaacagagcggccacctaacgagcctgaagagacccctgtgcaaaggccatccctgtatcgtagaatactccggaggctggccagctactgggcacagccgcaagacgcattgagccaggaagttagtccagaggtctggaaggatgtccagctgtctactatcgaactgtctataactacccgaaacaatcaactggaccctacatctaaagaggacttcctgaatatttgcattgagcctgacactatctcgaaaggagattttatcaccattggcagccgcaaggtgcggaacccaaaactccacgtggaaggaacagaatgtctgcaggcaagtcagtgcacgctactaattcctgagggggcaggtgggtcatttagcattgactcggaagaatatgaggccatgcccgtggaggtcaaactgttgccgcgtaaactgcagttcttctgtgacccaaggaagcgggagcagatgctgacaagcccgacccagtag

SEQ ID NO: 307346 - DNA, 1269 bp, Artificial Sequence
  derived and/or modified sequence
atgaccgtgttcttcaagaccctgagaaaccactggaagaagaccaccgccggcctgtgcctgctgacctggggcggccactggctgtacggcaagcactgcgacaacctgctgagaagagccgcctgccaggaggcccaggtgttcggcaaccagctgatcccccccaacgcccaggtgaagaaggccaccgtgttcctgaaccccgccgcctgcaagggcaaggccagaaccctgttcgagaagaacgccgcccccatcctgcacctgagcggcatggacgtgaccatcgtgaagaccgactacgagggccaggccaagaagctgctggagctgatggagaacaccgacgtgatcatcgtggccggcggcgacggcaccctgcaggaggtggtgaccggcgtgctgagaagaaccgacgaggccaccttcagcaagatccccatcggcttcatccccctgggcgagaccagcagcctgagccacaccctgttcgccgagagcggcaacaaggtgcagcacatcaccgacgccaccctggccatcgtgaagggcgagaccgtgcccctggacgtgctgcagatcaagggcgagaaggagcagcccgtgttcgccatgaccggcctgagatggggcagcttcagagacgccggcgtgaaggtgagcaagtactggtacctgggccccctgaagatcaaggccgcccacttcttcagcaccctgaaggagtggccccagacccaccaggccagcatcagctacaccggccccaccgagagaccccccaacgagcccgaggagacccccgtgcagagacccagcctgtacagaagaatcctgagaagactggccagctactgggcccagccccaggacgccctgagccaggaggtgagccccgaggtgtggaaggacgtgcagctgagcaccatcgagctgagcatcaccaccagaaacaaccagctggaccccaccagcaaggaggacttcctgaacatctgcatcgagcccgacaccatcagcaagggcgacttcatcaccatcggcagcagaaaggtgagaaaccccaagctgcacgtggagggcaccgagtgcctgcaggccagccagtgcaccctgctgatccccgagggcgccggcggcagcttcagcatcgacagcgaggagtacgaggccatgcccgtggaggtgaagctgctgcccagaaagctgcagttcttctgcgaccccagaaagagagagcagatgctgaccagccccacccagtag

SEQ ID NO: 307347 - DNA, 3849 bp, Artificial Sequence
  derived and/or modified sequence
atgaaaggaagagtgagccaataaacgagggaacgccgggaaaggcagcctcaagccggtgggccctgccacccccaccgtccctgagcatccgagccggttcccgcccccggcccgaactggcccgcgcgcgctcgcagccccgcggcggaacccgagggcggcggcagcggtttcccttgaacgagccggggaatctggagggagcacacaggaaaggcagagccgcgagctggaccagccgtgcaaatctctagaagatgacggtgttctttaaaacgcttcgaaatcactggaagaaaactacagctgggctctgcctgctgacctggggaggccattggctctatggaaaacactgtgataacctcctaaggagagcagcctgtcaagaagctcaggtgtttggcaatcaactcattcctcccaatgcacaagtgaagaaggccactgtttttctcaatcctgcagcttgcaaaggaaaagccaggactctatttgaaaaaaatgctgccccgattttacatttatctggcatggatgtgactattgttaagacagattatgagggacaagccaagaaactcctggaactgatggaaaacacggatgtgatcattgttgcaggaggagatgggacactgcaggaggttgttactggtgttcttcgacgaacagatgaggctaccttcagtaagattcccattggatttatcccactgggagagaccagtagtttgagtcataccctctttgccgaaagtggaaacaaagtccaacatattactgatgccacacttgccattgtgaaaggagagacagttccacttgatgtcttgcagatcaagggtgaaaaggaacagcctgtatttgcaatgaccggccttcgatggggatctttcagagatgctggcgtcaaagttagcaagtactggtatcttgggcctctaaaaatcaaagcagcccactttttcagcactcttaaggagtggcctcagactcatcaagcctctatctcatacacgggacctacagagagacctcccaatgaaccagaggagacccctgtacaaaggccttctttgtacaggagaatattacgaaggcttgcgtcctactgggcacaaccacaggatgccctttcccaagaggtgagcccggaggtctggaaagatgtgcagctgtccaccattgaactgtccatcacaacacggaataatcagcttgacccgacaagcaaagaagattttctgaatatctgcattgaacctgacaccatcagcaaaggagactttataactataggaagtcgaaaggtgagaaaccccaagctgcacgtggagggcacggagtgtctccaagccagccagtgcactttgcttatcccggagggagcagggggctcttttagcattgacagtgaggagtatgaagcgatgcctgtggaggtgaaactgctccccaggaagctgcagttcttctgtgatcctaggaagagagaacagatgctcacaagccccacccagtgagcagcagaagacaagcactctgagaccacactttaggccaccggtgggaccaaaagggaacaggtgcctcagccatcccaacagtgtcgtcagagggtccccagggcattttcatggcaagtacccctctgcccccactccagcagtgcttcccaaagtgtgctctgtcacctgctttgcaatcggcttccattagcgcatgttttattttggtgtgacggttggccctcctaaacacggactttcctcaggctggttcaagacggaaaaggactttcttctgttttcttccaaagtgcaaccacagtggagagcccacggtgggcttagcctgcctaggcccttccatttctcttctttgaccgtgctaggaattccaggaaagtgcattcctgccctggtgaccttttcctatgtctaggctcctccacaggtgctgctattttgtgagctccggctcctgtttagcttttatttcagttctaacctcagtccagaaacatatgtgaggttgtttccctcttcagccacggctacaataccggaaaatgctagtttttatttatttttttaagtagtgcttcctaaatggtttgcatgagagccacctggggtacatgttgaaaacttatttggggtctaccccaaacctaataacccaaatttggggatggggcccaggaatatgcatttttaaaaagtcatctgcccttcccaggtgattctgtaagttgtccctcaactgtacttggagaaatcgtgttttaaagcagtagtccacaaagtattctgctcatgtgcccccaaaagtattttgaaaaatcatgtataccctcacccatctaagttgatatctaaaattttatctaagttggtatctaaaatttttcatgggaagttaaatagttgacaaagtatgtatttgctggtgtcgtgtaaatattggtattttaaaataaaaactgttacatcactattttaaacatatccagtacaatttaaatatcacaacaatttgacacccttcattcatttataaaaataaatgagctagttctttagtagttaaacatttcaaattggcttttctccttctgtatttccataccacttttcagccaagaatcctatcataatgtaatctattatgcccgacatcttttaatcattcaccccattacttcttgtcaacaaaaaatataaatggaaattttttttttagctcttgctttaagtgtttgtttgttatctcagtccagaaccaatattatcgtaattaattattggtatataatgaaaacggtattaattcttggatgattaaaagtttttttattagaatgttctttatcctaattagttcatttatccaagaatacatgaatgtgatttacagctgagatggggttcaacctcagctgtattccttgtttctgtatagatgtaagcacataaattcgatggaatagaattacgttaacaatgtttttacagttctttggattcctttggcattttgacaaagatcacagtgctctatcatcaagaattattaatgatgatctatcaactaacaaacaacttgattagattctcctttagtctgttgaaagcagagaactgaaatccacctgatttaccatggctttgccagccagtcattagcaccatttacttttactatcgctgacattttcctttgttcagtggccctgaggttcttacactctagggggcagtgcaccacaggaagatagatcaatgagggaggattgcgagggggaaggggaggaagcagagctggcaggccttagctacaggctctctctcaggcagatcccttttaagatacatacaccatgcccacacatcccatggagagagaccaatgctttagtagattacagaacagctatgaaaagtccatgaatgaagatcacaaaaaggaaggctttcttatttcatactgtattcttcagggtggtaaaatttctgcttttggcaaaaacataacagacggttccaaacatcagcataaagatcactcatcccataccacccacaggtagggaggaaggatgctgtagtatatgaaaacaaaagttttcacctgagctgagagcatttagcatatcgtggttctgtaacaatatcaaggaccagtgcagaatctggctttcttttctgataggctaccagtgtgtgtttatgtgtgctcattttgtggttctaatcataatggtacatataattagggaaggatatggaagccactttagaatcttattcatttttaaatataaatatgccttgtttcaaa

SEQ ID NO: 307348 - protein, 133 aa, Artificial Sequence
  derived and/or modified sequence
MTLQWAAVATFLYAEIGLILIFCLPFIPPQRWQKIFSFNVWGKIATFWNKAFLTIIILLIVLFLDAVREVRKYSSVHTIEKSSTSRPDAYEHTQMKLFRSQRNLYISGFSLFFWLVLRRLVTLITQLAKELSN

SEQ ID NO: 307349 - protein, 230 aa, Artificial Sequence
  derived and/or modified sequence
MTLQWAAVATFLYAEIGLILIFCLPFIPPQRWQKIFSFNVWGKIATFWNKAFLTIIILLIVLFLDAVREVRKYSSVHTIEKSSTSRPDAYEHTQMKLFRSQRNLYISGFSLFFWLVLRRLVTLITQLAKELSNKGVLKTQAENTNKAAKKFMEENEKLKRILKSHGKDEECVLEAENKKLVEDQEKLKTELRKTSDALSKAQNDVMEMKMQSERLSKEYDQLLKEHSELQ

SEQ ID NO: 307350 - protein, 64 aa, Artificial Sequence
  derived and/or modified sequence
MTLQWAAVATFLYAEIGLILIFCLPFIPPQRWQKIFSFNVWGKIATFWNKAFLTIIILLIVLFL

SEQ ID NO: 307351 - protein, 196 aa, Artificial Sequence
  derived and/or modified sequence
MTLQWAAVATFLYAEIGLILIFCLPFIPPQRWQKIFSFNVWGKIATFWNKAFLTIIILLIVLFLDAVREVRKYSSVHTIEKSSTSRPDAYEHTQMKLFRSQRNLYISGFSLFFWLVLRRLVTLITQLAKELSNKGVLKTQAENTNKAAKKFMEENEKLKRILKSHGKDEECVLEAENKKLVEDQEKLKTELRKTSD

SEQ ID NO: 307352 - protein, 155 aa, Artificial Sequence
  derived and/or modified sequence
MKLFRSQRNLYISGFSLFFWLVLRRLVTLITQLAKELSNKGVLKTQAENTNKAAKKFMEENEKLKRILKSHGKDEECVLEAENKKLVEDQEKLKTELRKTSDALSKAQNDVMEMKMQSERLSKEYDQLLKEHSELQKSHSQPGAAAFLVKEVESF

SEQ ID NO: 307353 - protein, 163 aa, Artificial Sequence
  derived and/or modified sequence
  misc_feature (1)..(1): Xaa can be any naturally occurring amino acid
XDAYEHTQMKLFRSQRNLYISGFSLFFWLVLRRLVTLITQLAKELSNKGVLKTQAENTNKAAKKFMEENEKLKRILKSHGKDEECVLEAENKKLVEDQEKLKTELRKTSDALSKAQNDVMEMKMQSERLSKEYDQLLKEHSELQKSHSQPGAAAFLVKEVESF

SEQ ID NO: 307354 - DNA, 468 bp, Artificial Sequence
  derived and/or modified sequence
atgaagctgttcagaagccagagaaacctgtacatcagcggcttcagcctgttcttctggctggtgctgagaagactggtgaccctgatcacccagctggccaaggagctgagcaacaagggcgtgctgaagacccaggccgagaacaccaacaaggccgccaagaagttcatggaggagaacgagaagctgaagagaatcctgaagagccacggcaaggacgaggagtgcgtgctggaggccgagaacaagaagctggtggaggaccaggagaagctgaagaccgagctgagaaagaccagcgacgccctgagcaaggcccagaacgacgtgatggagatgaagatgcagagcgagagactgagcaaggagtacgaccagctgctgaaggagcacagcgagctgcagaagagccacagccagcccggcgccgccgccttcctggtgaaggaggtggagagcttctag

SEQ ID NO: 307355 - DNA, 492 bp, Artificial Sequence
  derived and/or modified sequence
tgagacgcctacgagcacacccagatgaagctgttcagaagccagagaaacctgtacatcagcggcttcagcctgttcttctggctggtgctgagaagactggtgaccctgatcacccagctggccaaggagctgagcaacaagggcgtgctgaagacccaggccgagaacaccaacaaggccgccaagaagttcatggaggagaacgagaagctgaagagaatcctgaagagccacggcaaggacgaggagtgcgtgctggaggccgagaacaagaagctggtggaggaccaggagaagctgaagaccgagctgagaaagaccagcgacgccctgagcaaggcccagaacgacgtgatggagatgaagatgcagagcgagagactgagcaaggagtacgaccagctgctgaaggagcacagcgagctgcagaagagccacagccagcccggcgccgccgccttcctggtgaaggaggtggagagcttctag

SEQ ID NO: 307356 - DNA, 468 bp, Artificial Sequence
  derived and/or modified sequence
atgaaactattccggtcacagcgaaacctatacatttcgggattttcattgttcttttggctcgttttgcgcagactagtgacattaattactcaactcgctaaagagttatcgaacaaaggtgttctaaagacacaagcagaaaatacaaacaaagcggctaagaagtttatggaagagaatgagaaactcaaaagaatacttaagagtcacggcaaagatgaggagtgtgtattggaggctgaaaataagaagttggttgaagaccaagaaaaactgaaaaccgagctccgtaagacctccgatgccctctccaaggcccaaaatgacgtgatggagatgaaaatgcagtccgagcgactgtcaaaagaatacgaccagcttttgaaggagcatagtgagctccaaaagagccactcacagcccggtgccgcggccttcctggtaaaagaagtcgaaagcttttag

SEQ ID NO: 307357 - DNA, 492 bp, Artificial Sequence
  derived and/or modified sequence
tgagacgcctatgagcacacccagatgaagctgtttcggtcccagcgcaatttatatatcagtggcttctcgctgttcttttggttggtgctcagacgcctggtgaccttgatcacccagttagccaaagaactgtccaataagggagtgctcaagacacaagccgaaaacaccaacaaagccgctaaaaaattcatggaggaaaacgagaagctgaagcgcatacttaaatcacacgggaaggacgaggaatgtgtcctggaagctgagaacaagaaactggtggaggatcaggagaaacttaaaacagaactcaggaagacgtctgacgcactgtcgaaggcccaaaatgatgtcatggagatgaaaatgcagagcgagaggctttctaaagagtatgatcagctgctcaaagagcactcggaattgcaaaaatcacattcccagcctggtgccgccgcattcctcgtcaaagaagttgagagcttctag

SEQ ID NO: 307358 - DNA, 468 bp, Artificial Sequence
  derived and/or modified sequence
atgaagctgttccgcagccagaggaacctgtacatcagcggcttcagcctcttcttctggctggtgctgcggcggctggtgaccctcatcacccagctggccaaggagctgagcaacaagggcgtgctgaagacccaggccgagaacaccaacaaggccgccaagaagttcatggaggagaatgagaagctgaagaggatcctgaagagccacggcaaggatgaggagtgtgtgctggaggccgagaacaagaagctggtggaggaccaggagaagctgaagacagagctgaggaagaccagtgatgccctgagcaaggcccagaatgatgtgatggagatgaagatgcagagcgagcggctgagcaaggagtatgaccagctgctgaaggagcacagcgagctgcagaagagccacagccagcccggggctgctgccttcctggtgaaggaggtggagagcttctag

SEQ ID NO: 307359 - DNA, 492 bp, Artificial Sequence
  derived and/or modified sequence
tgagatgcctatgagcacacccagatgaagctgttccgcagccagaggaacctgtacatcagcggcttcagcctcttcttctggctggtgctgcggcggctggtgaccctcatcacccagctggccaaggagctgagcaacaagggcgtgctgaagacccaggccgagaacaccaacaaggccgccaagaagttcatggaggagaatgagaagctgaagaggatcctgaagagccacggcaaggatgaggagtgtgtgctggaggccgagaacaagaagctggtggaggaccaggagaagctgaagacagagctgaggaagaccagtgatgccctgagcaaggcccagaatgatgtgatggagatgaagatgcagagcgagcggctgagcaaggagtatgaccagctgctgaaggagcacagcgagctgcagaagagccacagccagcccggggctgctgccttcctggtgaaggaggtggagagcttctag

SEQ ID NO: 307360 - DNA, 468 bp, Artificial Sequence
  derived and/or modified sequence
atgaagctgttccggagccagcggaacctgtacatcagcggcttctctcttttcttttggctggtcctccggcgactggtgacactgatcacccagcttgcaaaggagttatctaataagggggtgcttaagacacaggctgagaacacaaataaggccgcaaagaaattcatggaagagaacgaaaagctgaaaagaattctgaaaagccacggaaaagacgaagagtgcgttctagaagctgagaacaaaaagctcgtggaggaccaggagaagctaaagacagagttgagaaaaacctccgacgccctgagtaaggcccaaaacgatgtgatggaaatgaaaatgcagtctgaacggctgtctaaagaatacgatcagctcctgaaagaacactctgagctgcagaaaagccactcacagcctggggctgcagctttccttgttaaggaggtagagagcttctag

SEQ ID NO: 307361 - DNA, 492 bp, Artificial Sequence
  derived and/or modified sequence
tgagacgcctacgagcacacccagatgaagctgttccggagccagagaaacctctatatcagcggatttagcctcttcttttggctggtcttgagacggttggtgacgctgataacacagctggcaaaggaactcagcaataaaggggttctcaagactcaggccgaaaatacaaacaaggctgcaaagaagttcatggaggagaacgagaagctcaagcgcattctgaagagccacggcaaggacgaggaatgcgttctggaagccgaaaataagaaactcgttgaggaccaggagaagctcaaaacggagttacgtaaaacctcagatgctctgagcaaggcccagaacgatgtgatggagatgaaaatgcagagcgagaggttgtctaaagaatatgatcaactgctgaaggagcatagcgaactccagaagagccacagccagcccggggccgcagcctttctggtgaaggaagttgaatcgttctag

SEQ ID NO: 307362 - DNA, 468 bp, Artificial Sequence
  derived and/or modified sequence
atgaaactgtttcgctcccaacgcaacctgtacatctcggggttttcacttttcttctggcttgtacttcggagacttgtgactctgatcacccaactcgcaaaggagttgtcgaacaagggagttctgaagacccaggccgagaataccaacaaggccgcaaaaaagttcatggaggagaacgaaaagctgaaaaggatcctgaagagccacggtaaggacgaagagtgtgtgctcgaagcggaaaacaagaagctggttgaagatcaggagaaactcaagacagagctcaggaaaacatccgacgccttgagtaaggcgcagaatgacgtgatggaaatgaaaatgcagtcagaacgcctgtcaaaagagtacgatcagttgctcaaagaacactccgaattgcagaagtcacactctcagcctggagcagcagctttcctcgttaaggaggtggagagtttttag

SEQ ID NO: 307363 - DNA, 492 bp, Artificial Sequence
  derived and/or modified sequence
taagatgcctacgaacatacacaaatgaagctgtttcggtcgcagcgaaacctctacattagtggcttctcactgtttttctggctagtgctacgtcgcctggtgacccttattactcaactcgctaaagaactgagtaataaaggggtgttaaagacacaggccgagaatacaaataaggctgcaaagaaatttatggaagagaacgaaaagctgaagagaatccttaagagccacgggaaagacgaggagtgtgttctggaggccgagaacaagaaactagtcgaggatcaggaaaaattgaaaaccgaactgcgtaaaacttccgacgctttatccaaggctcaaaatgatgttatggaaatgaagatgcaatccgagagactgagcaaggagtacgatcagctactgaaggagcacagcgaactacaaaaatcacacagtcagccgggagccgctgcttttctcgtgaaagaagttgagtccttttag

SEQ ID NO: 307364 - DNA, 1059 bp, Artificial Sequence
  derived and/or modified sequence
tgatgcctatgaacacacacagatgaaactttttaggtctcaaagaaatctttacatttctggattttccctatttttttggctagttttgagacgtctggttacgcttattactcaactggcaaaagaactgtcaaacaaaggtgtacttaaaactcaagcagaaaatactaacaaggctgccaaaaaatttatggaagaaaacgaaaaactaaaaaggattttgaaaagccatggtaaagatgaagaatgtgttttggaagcagaaaataaaaaactagtagaagaccaggagaaactgaaaactgaattaaggaagacttcagatgccctttctaaggcacaaaatgatgtgatggaaatgaagatgcagtcagagagactttcgaaagaatatgatcaactcctgaaagaacactctgaacttcagaaaagccacagtcagcctggagctgctgcattcttggtaaaggaagtagaaagcttttaagagtgattcctggctgagcgtggtggctcacacctttctttaatcccagcactttggaaggctgaggcgggcggatcatgggagatcaagaccatcctggctaacaaggtgaaaccctgtctctactaaaaatacaaaaaattagccgggcatggtggcaagtgcctgtaatcccagctactcgggaggctgaggcaggagaatcacttgaacctgggaggcagaggttgcagtgagccgagatcgcgcttttgcactccagcctgggtgacagagcgagactccatctcagaaaaaaaaaaagtgattccttcccaagaaaatagttgttataatagttgtcatacctgtttctgtggaaaagaccccatcccagattatgccagacaccatgccgagagtagggccttgtttgatagcacttcaggacttgatctaatttctgcttgtatccagtttttgaaatatttaatagatgtcatttgttgagagtatgctctggactaagcacttggctaagggcttcgtatatgttgttttgtttactctccatgacagctcaataattg

SEQ ID NO: 307365 - protein, 114 aa, Artificial Sequence
  derived and/or modified sequence
MGTRLLCWVVLGFLGTDHTGAGVSQSPRYKVAKRGQDVALRCDPISGHVSLFWYQQALGQGPEFLTYFQNEAQLDKSGLPSDRFFAERPEGSVSTLKIQRTQQEDSAVYLCASS

SEQ ID NO: 307366 - protein, 130 aa, Artificial Sequence
  derived and/or modified sequence
METVVTTLPREGGVGPSRKMLLLLLLLGPGSGLSAVVSQHPSRVICKSGTSVNIECRSLDFQATTMFWYRQLRKQSLMLMATSNEGSEVTYEQGVKKDKFPINHPNLTFSALTVTSAHPEDSSFYICSAR

SEQ ID NO: 307367 - protein, 247 aa, Artificial Sequence
  derived and/or modified sequence
MNPLLILTFVAAALAAPFDDDDKIVGGYNCEENSVPYQVSLNSGYHFCGGSLINEQWVVSAGHCYKSRIQVRLGEHNIEVLEGNEQFINAAKIIRHPQYDRKTLNNDIMLIKLSSRAVINARVSTISLPTAPPATGTKCLISGWGNTASSGADYPDELQCLDAPVLSQAKCEASYPGKITSNMFCVGFLEGGKDSCQGDSGGPVVCNGQLQGVVSWGDGCAQKNKPGVYTKVYNYVKWIKNTIAANS

SEQ ID NO: 307368 - protein, 237 aa, Artificial Sequence
  derived and/or modified sequence
MNPLLILTFVAAALAAPFDDDDKIVGGYNCEENSVPYQVSLNSGYHFCGGSLINEQWVVSAGHCYKSRIQVRLGEHNINAAKIIRHPQYDRKTLNNDIMLIKLSSRAVINARVSTISLPTAPPATGTKCLISGWGNTASSGADYPDELQCLDAPVLSQAKCEASYPGKITSNMFCVGFLEGGKDSCQGDSGGPVVCNGQLQGVVSWGDGCAQKNKPGVYTKVYNYVKWIKNTIAANS

SEQ ID NO: 307369 - DNA, 345 bp, Artificial Sequence
  derived and/or modified sequence
atgggcaccagactgctgtgctgggtggtgctgggcttcctgggcaccgaccacaccggcgccggcgtgagccagagccccagatacaaggtggccaagagaggccaggacgtggccctgagatgcgaccccatcagcggccacgtgagcctgttctggtaccagcaggccctgggccagggccccgagttcctgacctacttccagaacgaggcccagctggacaagagcggcctgcccagcgacagattcttcgccgagagacccgagggcagcgtgagcaccctgaagatccagagaacccagcaggaggacagcgccgtgtacctgtgcgccagcagctag

SEQ ID NO: 307370 - DNA, 393 bp, Artificial Sequence
  derived and/or modified sequence
atggagaccgtggtgaccaccctgcccagagagggcggcgtgggccccagcagaaagatgctgctgctgctgctgctgctgggccccggcagcggcctgagcgccgtggtgagccagcaccccagcagagtgatctgcaagagcggcaccagcgtgaacatcgagtgcagaagcctggacttccaggccaccaccatgttctggtacagacagctgagaaagcagagcctgatgctgatggccaccagcaacgagggcagcgaggtgacctacgagcagggcgtgaagaaggacaagttccccatcaaccaccccaacctgaccttcagcgccctgaccgtgaccagcgcccaccccgaggacagcagcttctacatctgcagcgccagatag

SEQ ID NO: 307371 - DNA, 345 bp, Artificial Sequence
  derived and/or modified sequence
atgggcacaaggctcttatgctgggttgtgctcgggtttctggggactgaccacacgggcgccggagttagccaatctccacgttacaaggtcgcaaagcgggggcaagacgtggctctgaggtgtgaccctataagtgggcacgtctccctcttttggtaccagcaggccctaggtcagggccctgagtttctaacatacttccagaacgaggcacagctggataagtccgggctcccctcagacaggttcttcgccgagaggcctgagggctccgtgtccaccctgaagattcaaagaacccagcaggaagatagtgctgtgtacctgtgcgcttctagttag

SEQ ID NO: 307372 - DNA, 393 bp, Artificial Sequence
  derived and/or modified sequence
atggaaactgtggttaccacacttccaagggagggcggagtcgggcctagtcgcaagatgctcctcctgttattgctgctggggccgggatcaggcctgtcagctgtggtcagccagcatccaagtagggtgatctgtaagtctggcacaagtgtaaacatcgagtgtcgatcacttgattttcaggctacaaccatgttctggtataggcagcttcgtaaacagtctctgatgctgatggccaccagtaatgaaggaagcgaggttacttacgagcagggagtcaaaaaagacaagtttcccatcaatcaccctaatttaacattttctgccttgaccgttacttccgcgcaccccgaggattcaagcttttatatatgttccgctcggtag

SEQ ID NO: 307373 - DNA, 339 bp, Artificial Sequence
  derived and/or modified sequence
atgacaatccgatttttacgccaggtggcattctatttcctcgaagcaggtctcaaggaagccgagatctaccagaccccccgccatagagttatcggggcagggaagaaaattacactggagtgcagtcagacaatgggacatgataaaatgtattggtctaggtcaagaaacggaatcacaccgcaccccccttttctgtgggtaaacagcaccgaaaaaggagatttgtgcagcgaatctacagtttcaaggatccgcatagaaagattcccgctcactctggagtcggcaagtccttcccacacaagccagtatctatgcgccagctccgaatag

SEQ ID NO: 307374 - DNA, 345 bp, Artificial Sequence
  derived and/or modified sequence
atgggcacccggctgctgtgctgggtggtgctgggcttcctgggcacagaccacactggagctggggtgtcccagagcccccgctacaaggtggccaagaggggccaggatgtggccctgcgctgtgaccccatcagcggccacgtgtccctcttctggtaccagcaggccctgggccagggccctgagttcctgacctacttccagaatgaggcccagctggacaagagcggcctgcccagcgaccgcttctttgctgagaggcctgagggctctgtgtccaccctgaagatccagaggacccagcaggaggacagcgctgtgtacctgtgtgccagcagctag

SEQ ID NO: 307375 - DNA, 393 bp, Artificial Sequence
  derived and/or modified sequence
atggagaccgtggtgaccaccctgccccgggagggcggcgtgggccccagcaggaagatgctgctgctgctgctgctgctgggccctggcagcggcctgtctgctgtggtgtcccagcaccccagcagggtcatctgcaagagcggcacctctgtgaacattgaatgtcgcagcctggacttccaggccaccaccatgttctggtaccggcagctgaggaagcagagcctgatgctgatggccaccagcaatgaaggcagcgaggtgacctatgagcagggcgtgaagaaggacaagttccccatcaaccaccccaacctgaccttcagcgccctgactgtgaccagcgcccaccctgaggacagcagcttctacatctgcagcgccaggtag

SEQ ID NO: 307376 - DNA, 345 bp, Artificial Sequence
  derived and/or modified sequence
atgggcacccggctgctgtgctgggtggtgctgggcttcctgggcacggatcacactggagcgggagtgtcccaaagcccacggtataaagtggcgaagaggggccaggatgtcgccctcaggtgtgatcctatctccgggcatgtttctcttttttggtaccagcaggccctgggccaagggcctgagttcctgacctactttcagaacgaagcacagctggacaaatccgggctcccatccgatcgcttctttgccgagcgccccgagggctctgttagcacccttaaaatacagagaacccaacaggaggactcagccgtatacctttgtgccagctcctag

SEQ ID NO: 307377 - DNA, 393 bp, Artificial Sequence
  derived and/or modified sequence
atggagaccgtggtgaccaccctgccccgggagggcggcgtgggcccttccagaaagatgctcttactgttactactgctgggaccaggcagcggcttaagtgccgttgtatcacagcacccttcccgggtgatttgtaagtctgggacaagcgtgaacatagaatgccgttccctggattttcaggccaccactatgttctggtacaggcagctgcgcaagcaatctctgatgctgatggcaacttccaacgaagggagcgaagtgacttatgaacagggggtgaagaaggataagtttcccatcaaccaccccaacctaaccttttccgctttaacagtaacttctgcccacccagaagattctagtttttacatctgttccgcccggtag

SEQ ID NO: 307378 - DNA, 339 bp, Artificial Sequence
  derived and/or modified sequence
atgaccatccggttcctgcggcaggtggccttctacttcctggaggccgggctgaaagaggccgagatctatcagaccccacgtcacagggttataggcgccgggaagaagatcacactcgagtgtagccagacgatgggccatgacaaaatgtattggagccggtcccggaatggaataacgccccaccccccattcttgtgggtgaattctactgaaaagggcgacctgtgcagtgagtcaaccgtaagcagaatccgcatcgaacgctttcctcttacactcgaaagcgcctcccccagccacacatcccaatacctgtgtgcaagctcagaatag

SEQ ID NO: 307379 - DNA, 345 bp, Artificial Sequence
  derived and/or modified sequence
atgggcactcgcctgttatgctgggtggtgttgggctttctggggacagatcatacgggagcaggagttagccaatccccacgctataaagtagcaaagagggggcaggatgtggccttgcgatgtgacccaatcagtgggcacgtttccctattttggtaccaacaggccctaggccagggcccagaattcctcacctattttcaaaatgaagcccagctggacaagagtggattgcctagcgaccgcttttttgctgaaagacccgagggcagtgtctccacattaaagatccaacgtacccagcaagaggattccgctgtgtacctctgtgccagttcctag

SEQ ID NO: 307380 - DNA, 393 bp, Artificial Sequence
  derived and/or modified sequence
atggagactgttgtgaccacccttcctagggagggtggagtgggaccctctcgtaagatgttgctgctactgctgctcttaggcccaggaagcggtctttctgcagtagtgagtcagcacccatcccgcgtgatatgcaagagcggaaccagtgtgaatatcgagtgccggagtctcgactttcaggctaccacaatgttttggtataggcagctgaggaagcaatctctgatgctgatggccaccagcaacgagggcagtgaggttacatatgagcagggcgtgaaaaaagacaagtttccaatcaaccacccgaatctcacattcagtgcattaactgttacctccgcccaccctgaagactccagcttctatatctgttctgcccgatag

SEQ ID NO: 307381 - DNA, 339 bp, Artificial Sequence
  derived and/or modified sequence
atgaccattcggttcctcagacaagtcgccttttactttcttgaggcaggcttgaaggaggcggagatttatcaaaccccacggcatcgcgttatcggcgcagggaagaagataactcttgagtgtagccagaccatgggccatgacaaaatgtactggagtaggagtcgaaacgggattactcctcatcctcccttcctctgggtcaatagtacagaaaagggggatctgtgttcagagagcacggtgtctagaattagaatcgagcgctttcccctcacccttgagtccgcgtccccgtctcatacaagtcaatacctatgtgcctcgtccgaatag

SEQ ID NO: 307382 - DNA, 342 bp, Artificial Sequence
  derived and/or modified sequence
atgggcaccaggctcctctgctgggtggtcctgggtttcctagggacagatcacacaggtgctggagtctcccagtcccctaggtacaaagtcgcaaagagaggacaggatgtagctctcaggtgtgatccaatttcgggtcatgtatcccttttttggtaccaacaggccctggggcaggggccagagtttctgacttatttccagaatgaagctcaactagacaaatcggggctgcccagtgatcgcttctttgcagaaaggcctgagggatccgtctccactctgaagatccagcgcacacagcaggaggactccgccgtgtatctctgtgccagcagc

SEQ ID NO: 307383 - DNA, 390 bp, Artificial Sequence
  derived and/or modified sequence
atggagacagtggtcacaactctccccagagaaggtggtgtggggccatcacggaagatgctgctgcttctgctgcttctggggccaggctccgggcttagtgctgtcgtctctcaacatccgagcagggttatctgtaagagtggaacctctgtgaacatcgagtgccgttccctggactttcaggccacaactatgttttggtatcgtcagctccggaaacagagcctcatgctgatggcaacttccaatgagggctccgaggtcacatacgagcaaggcgtcaagaaggacaagtttcccatcaaccatccaaacctgaccttctccgctctgacagtgaccagtgcccatcctgaagacagcagcttctacatctgcagtgctaga

SEQ ID NO: 307384 - DNA, 349 bp, Artificial Sequence
  derived and/or modified sequence
ccccaactgtgccatgactatcaggttcctccgccaagtggccttttattttctggaggcaggccttaaggaagctgaaatctaccagaccccaagacaccgtgttataggggcaggaaagaagatcactctggaatgttctcaaaccatgggccatgacaaaatgtactggtcaagatccaggaatggaattacacctcatccaccattcctatgggttaattccacagagaagggagatctttgctctgagtcaacagtctccagaataaggatagagcgttttcccctgaccctggagtctgccagcccctcacatacctctcagtacctctgtgccagcagtgaa

SEQ ID NO: 307385 - DNA, 502 bp, Artificial Sequence
  derived and/or modified sequence
agcgaaggggccgtgaggtcaacagtcggtaatcgtttatcggtgcggccttagagaaaggacctccaagcccttgttcaatacatgttgggtggtggtcacaggtgccagtctccggacggatggcggcctagatttcctcccggactcggtggcacccaaggccccctgcacgccggcgctgtgcgtgccaggctgaccgcccgagtgcgacccggacctcgtccgcacgtgcagatggaaggggccacaaagacgataaggatccaggtctcccgcgtggaaggctcatctatcgacagaacctccactcaatacaccagaaaacagagagtatcttgcagaaattatgttcgaatcatttaacgttccaggactctacattgcagttcaggcagtgctggccttggcggcatcttggacatctcgacaagtgggtgaacgtacattaacggggatagtcattgacagcggagatggagtcacccatgttatcccagtg

SEQ ID NO: 307386 - protein, 471 aa, Artificial Sequence
  derived and/or modified sequence
MKGNYESLISMDYAINQPDVLSQIQPEGEHNTEDQAGPEESEIPTDPSEEPGISTSDILSWIKQEEEPQVGAPPESKESDVYKSTYADEELVIKAEGLARSSLCPEVPVPFSSPPAAAKDAFSDVAFKSQQSTSMTPFGRPATDLPEASEGQVTFTQLGSYPLPPPVGEQVFSCHHCGKNLSQDMLLTHQCSHATEHPLPCAQCPKHFTPQADLSSTSQDHASETPPTCPHCARTFTHPSRLTYHLRVHNSTERPFPCPDCPKRFADQARLTSHRRAHASERPFRCAQCGRSFSLKISLLLHQRGHAQERPFSCPQCGIDFNGHSALIRHQMIHTGERPYPCTDCSKSFMRKEHLLNHRRLHTGERPFSCPHCGKSFIRKHHLMKHQRIHTGERPYPCSYCGRSFRYKQTLKDHLRSGHNGGCGGDSDPSGQPPNPPGPLITGLETSGLGVNTEGLETNQWYGEGSGGGVL

SEQ ID NO: 307387 - protein, 647 aa, Artificial Sequence
  derived and/or modified sequence
MIGLIQGRRLAEQTSEWDSECLTSLQPLPLPTPPAANEAHLQTAAISLWTVVAAVQAIERKVEIHSRRLLHLEGRTGTAEKKLASCEKTVTELGNQLEGKWAVLGTLLQEYGLLQRRLENLENLLRNRNFWILRLPPGIKGDIPKVPVAFDDVSIYFSTPEWEKLEEWQKELYKNIMKGNYESLISMDYAINQPDVLSQIQPEGEHNTEDQAGPEESEIPTDPSEEPGISTSDILSWIKQEEEPQVGAPPESKESDVYKSTYADEELVIKAEGLARSSLCPEVPVPFSSPPAAAKDAFSDVAFKSQQSTSMTPFGRPATDLPEASEGQVTFTQLGSYPLPPPVGEQVFSCHHCGKNLSQDMLLTHQCSHATEHPLPCAQCPKHFTPQADLSSTSQDHASETPPTCPHCARTFTHPSRLTYHLRVHNSTERPFPCPDCPKRFADQARLTSHRRAHASERPFRCAQCGRSFSLKISLLLHQRGHAQERPFSCPQCGIDFNGHSALIRHQMIHTGERPYPCTDCSKSFMRKEHLLNHRRLHTGERPFSCPHCGKSFIRKHHLMKHQRIHTGERPYPCSYCGRSFRYKQTLKDHLRSGHNGGCGGDSDPSGQPPNPPGPLITGLETSGLGVNTEGLETNQWYGEGSGGGVL

SEQ ID NO: 307388 - DNA, 1944 bp, Artificial Sequence
  derived and/or modified sequence
atgatcggcctgatccagggcagaagactggccgagcagaccagcgagtgggacagcgagtgcctgaccagcctgcagcccctgcccctgcccaccccccccgccgccaacgaggcccacctgcagaccgccgccatcagcctgtggaccgtggtggccgccgtgcaggccatcgagagaaaggtggagatccacagcagaagactgctgcacctggagggcagaaccggcaccgccgagaagaagctggccagctgcgagaagaccgtgaccgagctgggcaaccagctggagggcaagtgggccgtgctgggcaccctgctgcaggagtacggcctgctgcagagaagactggagaacctggagaacctgctgagaaacagaaacttctggatcctgagactgccccccggcatcaagggcgacatccccaaggtgcccgtggccttcgacgacgtgagcatctacttcagcacccccgagtgggagaagctggaggagtggcagaaggagctgtacaagaacatcatgaagggcaactacgagagcctgatcagcatggactacgccatcaaccagcccgacgtgctgagccagatccagcccgagggcgagcacaacaccgaggaccaggccggccccgaggagagcgagatccccaccgaccccagcgaggagcccggcatcagcaccagcgacatcctgagctggatcaagcaggaggaggagccccaggtgggcgccccccccgagagcaaggagagcgacgtgtacaagagcacctacgccgacgaggagctggtgatcaaggccgagggcctggccagaagcagcctgtgccccgaggtgcccgtgcccttcagcagcccccccgccgccgccaaggacgccttcagcgacgtggccttcaagagccagcagagcaccagcatgacccccttcggcagacccgccaccgacctgcccgaggccagcgagggccaggtgaccttcacccagctgggcagctaccccctgcccccccccgtgggcgagcaggtgttcagctgccaccactgcggcaagaacctgagccaggacatgctgctgacccaccagtgcagccacgccaccgagcaccccctgccctgcgcccagtgccccaagcacttcaccccccaggccgacctgagcagcaccagccaggaccacgccagcgagaccccccccacctgcccccactgcgccagaaccttcacccaccccagcagactgacctaccacctgagagtgcacaacagcaccgagagacccttcccctgccccgactgccccaagagattcgccgaccaggccagactgaccagccacagaagagcccacgccagcgagagacccttcagatgcgcccagtgcggcagaagcttcagcctgaagatcagcctgctgctgcaccagagaggccacgcccaggagagacccttcagctgcccccagtgcggcatcgacttcaacggccacagcgccctgatcagacaccagatgatccacaccggcgagagaccctacccctgcaccgactgcagcaagagcttcatgagaaaggagcacctgctgaaccacagaagactgcacaccggcgagagacccttcagctgcccccactgcggcaagagcttcatcagaaagcaccacctgatgaagcaccagagaatccacaccggcgagagaccctacccctgcagctactgcggcagaagcttcagatacaagcagaccctgaaggaccacctgagaagcggccacaacggcggctgcggcggcgacagcgaccccagcggccagccccccaacccccccggccccctgatcaccggcctggagaccagcggcctgggcgtgaacaccgagggcctggagaccaaccagtggtacggcgagggcagcggcggcggcgtgctgtag

SEQ ID NO: 307389 - DNA, 1944 bp, Artificial Sequence
  derived and/or modified sequence
atgattgggctgatccagggccggcgcctcgccgaacagacctccgagtgggactccgagtgcctgactagccttcagcctctccctctacctacgccacccgccgccaacgaggcacatctgcagacagccgccatcagcctgtggacagtcgtggctgccgtccaagccattgagcgcaaggtggagatccacagccgcagactgctgcacctggaaggacggactggcacagccgagaaaaagctggcctcctgtgaaaagaccgtgactgagctggggaaccagttggaaggcaaatgggctgtactcggcaccctgctacaggagtacggtctgctgcagaggcgtctggagaatctggaaaatctcctccgcaacagaaacttctggatcctgagactgccccctggtataaagggagacatacctaaggtgccagtggccttcgacgatgttagcatttacttcagtacccccgaatgggagaaactggaagagtggcagaaagaactgtataagaacatcatgaaaggaaactacgagagcctgatcagcatggattacgctattaaccaaccggacgtgctgtcccagatccagccagagggcgagcacaacactgaagatcaggcagggcctgaggagtcagaaatcccgaccgatccttccgaagagccaggcatctctacctctgacatattaagctggattaaacaggaggaggagcctcaggtcggtgccccaccagaaagcaaggagtcggacgtatacaaatctacgtatgccgacgaagaactggttataaaggccgaggggctcgcccggtcttccctctgcccagaagtgcctgtaccgttttcctcccctcccgctgcagcaaaggacgcattctcggacgtggcatttaagtcacagcagagcaccagcatgaccccattcggacgacccgcaacagatcttcctgaagcatctgagggtcaggttacttttacgcagttggggagctacccccttcctcccccagttggtgaacaagttttcagttgccaccattgcggtaaaaacctgtctcaggacatgcttcttacccatcaatgctcacatgccacagaacatccacttccatgcgcccagtgtcctaagcacttcaccccgcaggccgacctaagcagcacctcccaggaccacgccagtgaaaccccacccacctgccctcattgtgctcggacttttacccacccatccagactaacctaccacctgcgcgtccacaactcgacagaaaggccgttcccgtgccccgattgcccgaaacgatttgcagaccaggcccggttgaccagccataggcgagcacacgctagcgagcgtccatttcgctgtgctcagtgcggccgaagcttcagcctcaaaatcagtctcctgctccatcaacggggtcatgcgcaggaacgccccttttcctgcccccagtgtggtatcgatttcaatgggcacagcgccctgattagacatcagatgatccatacaggcgagcggccttatccttgcaccgactgctcaaaatccttcatgagaaaggaacatctccttaatcacaggcggttacataccggtgagcgccccttcagctgtcctcattgtggcaaaagtttcattcgcaagcaccacctgatgaaacaccaacggattcacactggagaacggccctacccatgctcatattgcggacgttcattcaggtataagcaaacattgaaggaccacttgcggtctggacataatgggggctgcggaggggatagtgatcctagcggccaacctccaaatcctccagggccactgattactggacttgagactagtggtctgggcgtgaatactgaaggtttggagactaatcaatggtacggcgagggttccgggggcggagttctatag

SEQ ID NO: 307390 - DNA, 1944 bp, Artificial Sequence
  derived and/or modified sequence
atgattggcctcatccagggccggcggctggccgagcagaccagcgagtgggacagcgagtgcctgaccagcctgcagcccctgcccctgcccaccccacctgctgccaatgaggcccacctgcagacagctgccatcagcctgtggacagtggtggccgctgtgcaggccatcgagaggaaggtggagatccacagccggcggctgctgcacctggagggccgcactggaacagctgagaagaagctggccagctgtgagaagacagtgacagagctgggcaaccagctggagggcaagtgggccgtgctgggcaccctgctgcaggagtatggcctgctgcagaggcggctggagaacctggagaacctgctgaggaacagaaacttctggatcctgcggctgcccccaggcatcaagggggacatccccaaggtgcctgtggcctttgatgatgtgtccatctacttcagcaccccagagtgggagaagctggaggagtggcagaaggagctgtacaagaacatcatgaagggcaactatgagagcctcatctccatggactatgccatcaaccagccagatgtgctgagccagatccagcctgagggggagcacaacacagaggaccaggccggccctgaggagagcgagatccccacagaccccagcgaggagcccggcatcagcaccagtgacatcctgtcctggatcaagcaggaggaggagccccaggtgggcgcccctcctgagagcaaggagagtgatgtgtacaagagcacctatgcagatgaggagctggtgatcaaggccgagggcctggcccggagcagcctgtgcccagaggtgcctgtgcccttcagcagccccccagctgctgccaaggatgccttcagtgatgtggccttcaagagccagcagagcacctccatgacccccttcggccgcccagccacagacctgcctgaggccagcgagggccaggtgaccttcacccagctgggcagctaccccctgcccccacctgtgggggagcaggtgttcagctgccaccactgcggcaagaacctgagccaggacatgctgctgacccaccagtgcagccacgccacagagcaccccctgccctgtgcccagtgccccaagcacttcaccccccaggccgacctgagcagcaccagccaggaccacgccagcgagaccccacccacctgcccccactgtgcccggaccttcacccaccccagccggctgacctaccacctgcgggtgcacaacagcacagagcggcccttcccctgcccagactgccccaagagatttgctgaccaggcccggctgaccagccacagaagagcccacgccagcgagcggcccttccgctgtgcccagtgtggccgctccttcagcctgaagatcagcctgctgctgcaccagaggggccacgcccaggagcggcccttcagctgcccccagtgtggcatcgacttcaacggccacagcgccctgatccgccaccagatgatccacactggagagcggccctacccctgcacagactgcagcaagagcttcatgaggaaggagcacctgctgaaccaccggcggctgcacactggagagcggcccttcagctgcccccactgcggcaagagcttcatcaggaagcaccacctgatgaagcaccagaggatccacactggagagcggccctacccctgcagctactgcggccgctccttccgctacaagcagaccctgaaggaccacctgcggagcggccacaacggcggctgcggcggggacagcgaccccagcggccagccccccaaccccccaggccccctcatcaccggcctggagaccagcggcctgggcgtgaacacagagggcctggagaccaaccagtggtacggggagggcagcggcggcggcgtgctgtag

SEQ ID NO: 307391 - DNA, 1944 bp, Artificial Sequence
  derived and/or modified sequence
atgatcggcctgatccagggccggcggctggccgagcagaccagcgaatgggactcagagtgcctgacttctctgcagcctctccctcttcccacacctcccgcagccaatgaggctcacctgcagaccgcggctatctcgctctggaccgttgtggcagcagtccaggccatcgaacgcaaagtcgagatccatagtaggaggttgctccatctcgaggggcgcacaggaacggccgagaagaaactcgcctcttgtgaaaaaaccgtgacggaactaggcaaccagttggaagggaagtgggctgtccttggtacactgcttcaagaatacgggttgttgcagcggaggcttgagaatctggagaatctgctccgaaatcggaacttctggatcctacggctacctccaggaatcaagggcgacattccaaaggtccctgtagcgttcgatgacgtgtccatatatttttccacacctgagtgggagaaattggaggagtggcagaaggagttatataaaaatatcatgaagggcaactacgaatcattgataagcatggattatgcgattaatcagccggatgtgctctctcaaattcagccagagggtgaacataacacagaagatcaggccgggcctgaagaaagtgagatacccacagaccctagcgaggagccaggcatatctacctccgacattctgtcatggatcaaacaagaggaggaaccacaggttggcgctccaccagaaagtaaagagagcgacgtatataaaagtacttacgccgacgaagaactcgtgataaaagctgaaggacttgcccgatcctctctctgccccgaggttcccgtgcccttctccagcccaccagccgccgcgaaggatgccttttctgacgtcgctttcaaaagccagcagagtactagcatgacaccattcggaaggcctgctacagatctcccagaggcgtcagaaggccaggtgacatttacacagctgggaagctacccactcccacctcctgtcggggagcaggttttcagctgtcatcactgtggtaagaatttatctcaggatatgttactaactcaccagtgcagtcacgcaacagaacacccgttgccatgtgctcaatgtcctaaacattttacccctcaggctgacttatctagcacatcacaggaccatgcctccgaaactcctcctacgtgtcctcactgtgctagaacattcacacatccctccaggttgacttaccacctgcgtgtccacaactccacagagaggccattcccatgtccggactgccctaagcggttcgcggatcaagctcgattgacatcccatagacgggcacacgcttccgaaagaccctttaggtgcgctcagtgtggacgcagttttagccttaaaatttcattactgctgcatcagcgcgggcacgcccaggagaggcccttcagctgcccgcagtgtgggattgatttcaacggtcactccgctctcatccgccatcaaatgattcatactggagagagaccatacccatgtaccgattgctccaaaagctttatgagaaaagaacaccttctcaaccatcggcgactccacacaggggagcgaccattttcttgccctcattgtggcaaatcttttatcagaaagcatcatcttatgaaacaccagagaatacacactggcgaacgcccgtatccttgctcctactgcggccgttcatttaggtacaaacagaccctaaaggatcacctaagatccggccacaacggtgggtgtggaggggacagcgatccttccggtcagccccctaatcccccaggccctcttatcactggtctggagacatcgggcctaggcgttaatacggaaggactcgagaccaaccagtggtacggggaaggctctggaggcggtgtcctctag

SEQ ID NO: 307392 - DNA, 1944 bp, Artificial Sequence
  derived and/or modified sequence
atgataggcttgatacagggaaggagactggcagagcaaacaagcgagtgggatagtgagtgcctgaccagcttgcagcctctgcccctccccaccccaccagcagccaatgaagcccatctgcagactgcagcaatcagtctctggacagttgtagctgcagtccaagcaatcgagcggaaggtggagatccacagccggaggctgctgcacctggaaggtcgtaccgggactgctgagaaaaagcttgctagctgcgaaaaaacagtaacagaactgggaaaccagcttgagggcaaatgggcagtgctggggacactgttacaggaatacggactacttcaacggaggctcgagaacctggagaacctgttacgcaatcggaacttttggattctccggttgccacccggaatcaaaggcgatatccctaaagtgcccgtcgcctttgacgacgtctccatctacttctccactccagagtgggaaaagctggaagaatggcagaaggaattgtataagaatattatgaaagggaattacgaaagcttaatctctatggactacgcgataaatcagccagacgttctatcccagatccagcccgagggagagcacaacaccgaggaccaggcagggccagaagagtccgaaattcccactgaccctagcgaggaaccgggtatttccactagtgatatcctgtcatggataaagcaggaagaggagcctcaagtgggagctccacctgaatctaaggaatcagatgtgtacaaatctacctatgctgatgaggagctggttatcaaagccgaaggtctggcccgatcatccttatgtcccgaagtccccgtgcccttctcatcccctccagccgctgcaaaggatgccttctctgatgtggccttcaagagccagcaatcaacctctatgacccctttcgggaggcctgcaaccgatttgcctgaagcatcagaagggcaagtgacctttacacaattgggctcctaccccctccctccgcctgtgggcgaacaggttttttcttgtcaccattgcgggaaaaacctgtcccaggacatgctattgacccatcagtgttcacacgccactgaacaccccctcccatgtgctcagtgccccaaacactttacaccccaagctgatctcagctcaacgtcccaggatcacgcctccgaaacaccacccacttgtcctcactgtgcgaggacctttactcaccctagtcgcctgacctatcatctcagagtgcataactctactgaacgaccgttcccatgcccggactgtcctaaaaggttcgccgatcaggcccgactcactagccatagacgtgctcacgcttcagaacggccttttaggtgtgcccagtgcggacggagcttttcactgaagatatccctactgcttcatcaacgaggccatgctcaggagagaccatttagttgcccacagtgcggcatcgactttaacggccacagtgcgttgatccgccaccagatgatacataccggggaaaggccctacccctgcaccgactgttctaagtcatttatgcggaaagaacatcttctgaaccacaggcggctacacactggcgaacgccctttcagctgtccacattgcgggaagagcttcatccggaaacaccacctgatgaaacaccagcggatacataccggggaacgaccatacccttgttcatactgcggcaggtctttcagatataagcaaacgttgaaggatcatctcagatccgggcataacggagggtgcggtggtgacagtgacccgtccggccagccccctaatccccctggaccgttaatcactgggctggagacctcaggcctaggcgttaacaccgaggggctggaaaccaaccagtggtatggtgagggaagcggtgggggtgtgctgtag

SEQ ID NO: 307393 - DNA, 5251 bp, Artificial Sequence
  derived and/or modified sequence
gacggagttttgctcttattgcccaggctggaatgcaatgatgcgatctcggctcactgaaacctcggtctcctgggttcaagcgattgtcctgcctcagcctctgagtagctgagattacagacatctgaatgggactccgagtgccttacatccctgcagccccttcctcttcctacacccccagcagcaaatgaggcacacctgcagacagcagctatctctctgtggacagtggtggccgccgtgcaggctatagagaggaaggtggagatccacagccggcgactcctacacctggaaggtcggacagggacagcagagaagaaactagccagctgtgaaaagacagttaccgagcttgggaaccagctggagggcaagtgggccgtgctgggaaccctgctgcaggagtacgggctgctgcagaggcggctggagaacttggagaacctgctgcgcaacaggaacttctggatcctgcggctccctccaggtattaagggagatatcccaaaggtgcctgtggcatttgatgatgtctccatctacttttccactccagagtgggaaaaattagaagaatggcaaaaggaactttacaagaatatcatgaagggcaactacgagtctctcatctccatggattatgctataaatcaacctgatgtcttatctcagattcaaccagaaggggaacataatacagaggaccaggcagggccagaggaaagtgagattcccacagaccccagtgaagagcctggtatttcaacatcagatattctgtcttggattaaacaagaagaagagcctcaggttggggccccaccggagtccaaggagagtgacgtgtacaaaagcacttatgctgatgaagagcttgtcatcaaagctgaaggccttgctagatcctcgttgtgccctgaggttccagtccctttctcttctccaccagcagcagcaaaggatgctttttcagatgtggctttcaaaagccagcagtctacatccatgacaccttttggacgtccagccactgacctgcctgaagcctctgagggacaagtgacttttactcagttgggtagctatcccctcccacctccagttggcgagcaggtgttctcatgccaccactgtggcaagaatctcagccaagacatgttgctgacccaccaatgtagccatgctactgagcaccccttaccctgtgcccagtgccctaagcactttactccacaggcggacctcagcagcacctcccaggaccatgccagcgagacaccccccacctgcccacactgtgccaggacttttactcacccatcaagacttacctaccatcttcgggtccataacagcactgagcgtcctttcccctgtcctgattgccccaagcgctttgctgaccaggctcgactcaccagccaccggagagctcatgcaagcgaaaggcccttccgctgtgcccagtgcggcaggagcttcagcttgaaaatcagcctcctgctccaccagcggggtcatgcacaagagcgccctttctcctgccctcagtgtggcattgacttcaacggccactcggccctgatccgccaccagatgatccacacaggcgagcgtccttacccctgcactgactgcagtaagagcttcatgcgcaaggagcacctgctgaaccaccggcggctgcacacaggcgagcggcccttcagttgtcctcactgtggcaagagcttcatccgcaagcaccacctaatgaaacaccagcgcatccacaccggggagcggccctacccctgctcctactgtggcaggagcttccgctacaaacagacactcaaggaccacctccgttcaggccacaatggaggctgtgggggtgatagtgacccatcaggtcagccacccaacccaccaggtcccctcataactgggcttgaaacttctggcctgggtgtcaacactgaaggtctagagaccaaccagtggtatggggaagggagtggagggggagttttgtaaatccaaatctctgtggcttcatgcttgtatatgctcacagcagggcacaaaatccaagagaaggtctgtgagccccatccaacacccacagtaattattatctggcacatcaatgaatttggggtcctatacacttgactagagacatgcttgtgttttggaatttcacacccttacaagaataccacattttgaaacccagaaagacctggaaaggagcccagcatgtccatcttttcaaagatacaacaaaagcagaagttacaagaatattgcggagaggttggaaagcaggatttaacctctagttctcttgttctcagagaacagcaggttgatagtagattatgtctctaggtagagacagatacatgagaagagcctccaaaactggaagcccatcataaggcatgagaatgtttaactataaagccttttattagttctttgatagctaagatggttgttggagaaagtgcttaagccactgtttatgttgctgcctcctctctcaaaaccagccaagatctgttcacacacctctgtggctgtctttccctgaaacatggtaactcaagactgcctgcctaggtttcttagattaattattcacataaattttgtttaatattggttgaacaagaaatctgactttaaaagattattaaggagaatattccttaactatactggcttgatttgaaacaggctcttattgccatttaaactgccagaaatctttgccaaggtcctggttaaaaaaattggaaacggttttcttagccccagctttaaaagctagagatctcagagaaatagctggcttaacaatgacagaacagcttaaaatttgtgcctacaccatgttctgagagtcgttcacatcaaattcttatcttttccaagccagtaagttggcttctccattcctggtgtctgatattcttgacaatcatcagcaacaaagatcacagcactttccagaagcatggagcttcagaaagtgccagtgaactcttggtcctcagtagtgagatgataacagtgttataatgcagcttccttgagccatcagagagagtgtatgttcaccctatctggctgtatcccattggcagtggacagattgaggaaattcctagatcactgagagctaagcaccatgcatagacaacagtttgttcttgcctgtgttgcttttagggactttgactaccacatgttcttttcttggggtgatttaatcacctgggagcatctgagtctgctcctaagtggctttgcaactgggcctaagttctgtttcctttatggatctcaaattttcatctgcacaatgaggctgttgaaaggaaaaaaagtgagcctctaggaattattcaaaaaaagtctgtgatacattccttttcctgccaaagttctgtctctgtctttggcttctgtccaggcaaagctaaataagacagcaaagtcaaagcagataaattcttgttgaaacttgactaaaatttatttgatttgttgttttactcccacttggaatcctgaggtagaagacagaatgcagaagtcttacatcttgggcaggaaactggtttattcctatactcttgtttcctctgcttcttcctgaggtctagaacaaggtctggaaatgtttagacaggatattttcttgatgaagtgataaggaaaggacccatttttttgctcatcacctagcccatccttcactctctctagttatgcataacaacactagaagaaggtgttagcccagctaactttgcttctgggaaggctatgtctgaacatgttgctctgtaggataatcacacttagaaaacatctgctccatgacattcacaataccagggaccatgggagacacaagaaatgtgtgtctgctgtcataacttacagtgaaaaagcccaataatacagaacaagacatgatgggcaataccctagcatattgggattaagagctttctagccagaatctggacctataccatgggaaaatttaggggtgctgggaatcccaaagccaaggttctggcttcattggcaacccactaggaacttgaatgtgagattcagctctagtttgcaccttgatttccccagtgaaaagggagaagagccaaagtattgtctaggtgctgagttcccttttctgagtggatttcaagcatttgccagggtatgctggaggagggactcctaaagtaggtgagatgtgggactaggtaacactttaaatacttttttactcaaagatttgccaagaacacagcttattagtgaaagagacctgtggattgaaatggctgcagatagatcccgcagtcccttctgaaaggaactgtgtagccagcagggacctaaactttggcaaaaagtgaacacaattcaaatacgaatgaaggaagagccctcagatggaacgaaaggcgatgtgcaaggccatcccagagagacggaagcaggtgcgatactaagcctcagcccaagaataaaagagagttcaactgttactcttttctttcatcaatcccctatcagttagaactgcaggccagttccaaagagtgtttgcttaagattcaaaagtgggtaagtaaaatggatcagtgggaaggataaggtgtccaacagaaagtgtggaggagaaactcttggcctatcaagtgctcctgagagaaaccatgcaatttaacacttcagttaaagaaatacatgagaactgcttgtcatgaccagacaagataggaaaggggaaaccccagaaacgtgctcttcatctgtcagccttttggaccaagaagctgtcactatcacacataagcaccattcccttagagtggatccaggtgttgactataaccagatttactctttgcttactaggttttccattgtcaccattggatgaacctctggtttagccacagttgtgaaaataaatggaagttggttgattgtctagaaagtgcaagaagatggccctgctccttttctgctgaacatttagtattggaaactcctacttcccttttcattaataatgtgtgcaagtttcctattagcggggaaggtgtggggctctgctgggcttctcttgagcatatctgagaagtgatgttcatgtctatctcaaccaggaccagaccctgtgacttactcggtaataacagtccacacaagcctcgttgatatt

SEQ ID NO: 307394 - DNA, 2232 bp, Artificial Sequence
  derived and/or modified sequence
gcctgcacgcagccccgtagaatgagaaggggacggtcaggccgcggggaaagcactgatcgcatttgccacccaagaggtctttggtcacctctaggagagcaattgtactgggcacgcttactaatctgcttacaggaatggagaaagaatgattggactgattcaaggccggaggttagctgagcagacatctgaatgggactccgagtgccttacatccctgcagccccttcctcttcctacacccccagcagcaaatgaggcacacctgcagacagcagctatctctctgtggacagtggtggccgccgtgcaggctatagagaggaaggtggagatccacagccggcgactcctacacctggaaggtcggacagggacagcagagaagaaactagccagctgtgaaaagacagttaccgagcttgggaaccagctggagggcaagtgggccgtgctgggaaccctgctgcaggagtacgggctgctgcagaggcggctggagaacttggagaacctgctgcgcaacaggaacttctggatcctgcggctccctccaggtattaagggagatatcccaaaggtgcctgtggcatttgatgatgtctccatctacttttccactccagagtgggaaaaattagaagaatggcaaaaggaactttacaagaatatcatgaagggcaactacgagtctctcatctccatggattatgctataaatcaacctgatgtcttatctcagattcaaccagaaggggaacataatacagaggaccaggcagggccagaggaaagtgagattcccacagaccccagtgaagagcctggtatttcaacatcagatattctgtcttggattaaacaagaagaagagcctcaggttggggccccaccggagtccaaggagagtgacgtgtacaaaagcacttatgctgatgaagagcttgtcatcaaagctgaaggccttgctagatcctcgttgtgccctgaggttccagtccctttctcttctccaccagcagcagcaaaggatgctttttcagatgtggctttcaaaagccagcagtctacatccatgacaccttttggacgtccagccactgacctgcctgaagcctctgagggacaagtgacttttactcagttgggtagctatcccctcccacctccagttggcgagcaggtgttctcatgccaccactgtggcaagaatctcagccaagacatgttgctgacccaccaatgtagccatgctactgagcaccccttaccctgtgcccagtgccctaagcactttactccacaggcggacctcagcagcacctcccaggaccatgccagcgagacaccccccacctgcccacactgtgccaggacttttactcacccatcaagacttacctaccatcttcgggtccataacagcactgagcgtcctttcccctgtcctgattgccccaagcgctttgctgaccaggctcgactcaccagccaccggagagctcatgcaagcgaaaggcccttccgctgtgcccagtgcggcaggagcttcagcttgaaaatcagcctcctgctccaccagcggggtcatgcacaagagcgccctttctcctgccctcagtgtggcattgacttcaacggccactcggccctgatccgccaccagatgatccacacaggcgagcgtccttacccctgcactgactgcagtaagagcttcatgcgcaaggagcacctgctgaaccaccggcggctgcacacaggcgagcggcccttcagttgtcctcactgtggcaagagcttcatccgcaagcaccacctaatgaaacaccagcgcatccacaccggggagcggccctacccctgctcctactgtggcaggagcttccgctacaaacagacactcaaggaccacctccgttcaggccacaatggaggctgtgggggtgatagtgacccatcaggtcagccacccaacccaccaggtcccctcataactgggcttgaaacttctggcctgggtgtcaacactgaaggtctagagaccaaccagtggtatggggaagggagtggagggggagttttgtaaatccaaatctctgtggcttcatgcttgtatatgctcacagcagggcacaaaatccaagagaaggtctgtgagccccatccaacacccacagtaattattatctggcacatcaatgaatttggggtcctatacacttg

SEQ ID NO: 307395 - DNA, 2222 bp, Artificial Sequence
  derived and/or modified sequence
agccccgtagaatgagaaggggacggtcaggccgcggggaaagcactgatcgcatttgccacccaagaggtctttggtcacctctaggagagcaattgtactgggcacgcttactaatctgcttacaggaatggagaaagaatgattggactgattcaaggccggaggttagctgagcagacatctgaatgggactccgagtgccttacatccctgcagccccttcctcttcctacacccccagcagcaaatgaggcacacctgcagacagcagctatctctctgtggacagtggtggccgccgtgcaggctatagagaggaaggtggagatccacagccggcgactcctacacctggaaggtcggacagggacagcagagaagaaactagccagctgtgaaaagacagttaccgagcttgggaaccagctggagggcaagtgggccgtgctgggaaccctgctgcaggagtacgggctgctgcagaggcggctggagaacttggagaacctgctgcgcaacaggaacttctggatcctgcggctccctccaggtattaagggagatatcccaaaggtgcctgtggcatttgatgatgtctccatctacttttccactccagagtgggaaaaattagaagaatggcaaaaggaactttacaagaatatcatgaagggcaactacgagtctctcatctccatggattatgctataaatcaacctgatgtcttatctcagattcaaccagaaggggaacataatacagaggaccaggcagggccagaggaaagtgagattcccacagaccccagtgaagagcctggtatttcaacatcagatattctgtcttggattaaacaagaagaagagcctcaggttggggccccaccggagtccaaggagagtgacgtgtacaaaagcacttatgctgatgaagagcttgtcatcaaagctgaaggccttgctagatcctcgttgtgccctgaggttccagtccctttctcttctccaccagcagcagcaaaggatgctttttcagatgtggctttcaaaagccagcagtctacatccatgacaccttttggacgtccagccactgacctgcctgaagcctctgagggacaagtgacttttactcagttgggtagctatcccctcccacctccagttggcgagcaggtgttctcatgccaccactgtggcaagaatctcagccaagacatgttgctgacccaccaatgtagccatgctactgagcaccccttaccctgtgcccagtgccctaagcactttactccacaggcggacctcagcagcacctcccaggaccatgccagcgagacaccccccacctgcccacactgtgccaggacttttactcacccatcaagacttacctaccatcttcgggtccataacagcactgagcgtcctttcccctgtcctgattgccccaagcgctttgctgaccaggctcgactcaccagccaccggagagctcatgcaagcgaaaggcccttccgctgtgcccagtgcggcaggagcttcagcttgaaaatcagcctcctgctccaccagcggggtcatgcacaagagcgccctttctcctgccctcagtgtggcattgacttcaacggccactcggccctgatccgccaccagatgatccacacaggcgagcgtccttacccctgcactgactgcagtaagagcttcatgcgcaaggagcacctgctgaaccaccggcggctgcacacaggcgagcggcccttcagttgtcctcactgtggcaagagcttcatccgcaagcaccacctaatgaaacaccagcgcatccacaccggggagcggccctacccctgctcctactgtggcaggagcttccgctacaaacagacactcaaggaccacctccgttcaggccacaatggaggctgtgggggtgatagtgacccatcaggtcagccacccaacccaccaggtcccctcataactgggcttgaaacttctggcctgggtgtcaacactgaaggtctagagaccaaccagtggtatggggaagggagtggagggggagttttgtaaatccaaatctctgtggcttcatgcttgtatatgctcacagcagggcacaaaatccaagagaaggtctgtgagccccatccaacacccacagtaattattatctggcacatcaatgaatttggggtcctatacacttg

SEQ ID NO: 307396 - protein, 4968 aa, Artificial Sequence
  derived and/or modified sequence
MSSEEDKSVEQPQPPPPPPEEPGAPAPSPAAADKRPRGRPRKDGASPFQRARKKPRSRGKTAVEDEDSMDGLETTETETIVETEIKEQSAEEDAEAEVDNSKQLIPTLQRSVSEESANSLVSVGVEAKISEQLCAFCYCGEKSSLGQGDLKQFRITPGFILPWRNQPSNKKDIDDNSNGTYEKMQNSAPRKQRGQRKERSPQQNIVSCVSVSTQTASDDQAGKLWDELSLVGLPDAIDIQALFDSTGTCWAHHRCVEWSLGVCQMEEPLLVNVDKAVVSGSTERCAFCKHLGATIKCCEEKCTQMYHYPCAAGAGTFQDFSHIFLLCPEHIDQAPERSKEDANCAVCDSPGDLLDQFFCTTCGQHYHGMCLDIAVTPLKRAGWQCPECKVCQNCKQSGEDSKMLVCDTCDKGYHTFCLQPVMKSVPTNGWKCKNCRICIECGTRSSSQWHHNCLICDNCYQQQDNLCPFCGKCYHPELQKDMLHCNMCKRWVHLECDKPTDHELDTQLKEEYICMYCKHLGAEMDRLQPGEEVEIAELTTDYNNEMEVEGPEDQMVFSEQAANKDVNGQESTPGIVPDAVQVHTEEQQKSHPSESLDTDSLLIAVSSQHTVNTELEKQISNEVDSEDLKMSSEVKHICGEDQIEDKMEVTENIEVVTHQITVQQEQLQLLEEPETVVSREESRPPKLVMESVTLPLETLVSPHEESISLCPEEQLVIERLQGEKEQKENSELSTGLMDSEMTPTIEGCVKDVSYQGGKSIKLSSETESSFSSSADISKADVSSSPTPSSDLPSHDMLHNYPSALSSSAGNIMPTTYISVTPKIGMGKPAITKRKFSPGRPRSKQGAWSTHNTVSPPSWSPDISEGREIFKPRQLPGSAIWSIKVGRGSGFPGKRRPRGAGLSGRGGRGRSKLKSGIGAVVLPGVSTADISSNKDDEENSMHNTVVLFSSSDKFTLNQDMCVVCGSFGQGAEGRLLACSQCGQCYHPYCVSIKITKVVLSKGWRCLECTVCEACGKATDPGRLLLCDDCDISYHTYCLDPPLQTVPKGGWKCKWCVWCRHCGATSAGLRCEWQNNYTQCAPCASLSSCPVCYRNYREEDLILQCRQCDRWMHAVCQNLNTEEEVENVADIGFDCSMCRPYMPASNVPSSDCCESSLVAQIVTKVKELDPPKTYTQDGVCLTESGMTQLQSLTVTVPRRKRSKPKLKLKIINQNSVAVLQTPPDIQSEHSRDGEMDDSREGELMDCDGKSESSPEREAVDDETKGVEGTDGVKKRKRKPYRPGIGGFMVRQRSRTGQGKTKRSVIRKDSSGSISEQLPCRDDGWSEQLPDTLVDESVSVTESTEKIKKRYRKRKNKLEETFPAYLQEAFFGKDLLDTSRQSKISLDNLSEDGAQLLYKTNMNTGFLDPSLDPLLSSSSAPTKSGTHGPADDPLADISEVLNTDDDILGIISDDLAKSVDHSDIGPVTDDPSSLPQPNVNQSSRPLSEEQLDGILSPELDKMVTDGAILGKLYKIPELGGKDVEDLFTAVLSPANTQPTPLPQPPPPTQLLPIHNQDAFSRMPLMNGLIGSSPHLPHNSLPPGSGLGTFSAIAQSSYPDARDKNSAFNPMASDPNNSWTSSAPTVEGENDTMSNAQRSTLKWEKEEALGEMATVAPVLYTNINFPNLKEEFPDWTTRVKQIAKLWRKASSQERAPYVQKARDNRAALRINKVQMSNDSMKRQQQQDSIDPSSRIDSELFKDPLKQRESEHEQEWKFRQQMRQKSKQQAKIEATQKLEQVKNEQQQQQQQQFGSQHLLVQSGSDTPSSGIQSPLTPQPGNGNMSPAQSFHKELFTKQPPSTPTSTSSDDVFVKPQAPPPPPAPSRIPIQDSLSQAQTSQPPSPQVFSPGSSNSRPPSPMDPYAKMVGTPRPPPVGHSFSRRNSAAPVENCTPLSSVSRPLQMNETTANRPSPVRDLCSSSTTNNDPYAKPPDTPRPVMTDQFPKSLGLSRSPVVSEQTAKGPIAAGTSDHFTKPSPRADVFQRQRIPDSYARPLLTPAPLDSGPGPFKTPMQPPPSSQDPYGSVSQASRRLSVDPYERPALTPRPIDNFSHNQSNDPYSQPPLTPHPAVNESFAHPSRAFSQPGTISRPTSQDPYSQPPGTPRPVVDSYSQSSGTARSNTDPYSQPPGTPRPTTVDPYSQQPQTPRPSTQTDLFVTPVTNQRHSDPYAHPPGTPRPGISVPYSQPPATPRPRISEGFTRSSMTRPVLMPNQDPFLQAAQNRGPALPGPLVRPPDTCSQTPRPPGPGLSDTFSRVSPSAARDPYDQSPMTPRSQSDSFGTSQTAHDVADQPRPGSEGSFCASSNSPMHSQGQQFSGVSQLPGPVPTSGVTDTQNTVNMAQADTEKLRQRQKLREIILQQQQQKKIAGRQEKGSQDSPAVPHPGPLQHWQPENVNQAFTRPPPPYPGNIRSPVAPPLGPRYAVFPKDQRGPYPPDVASMGMRPHGFRFGFPGGSHGTMPSQERFLVPPQQIQGSGVSPQLRRSVSVDMPRPLNNSQMNNPVGLPQHFSPQSLPVQQHNILGQAYIELRHRAPDGRQRLPFSAPPGSVVEASSNLRHGNFIPRPDFPGPRHTDPMRRPPQGLPNQLPVHPDLEQVPPSQQEQGHSVHSSSMVMRTLNHPLGGEFSEAPLSTSVPSETTSDNLQITTQPSDGLEEKLDSDDPSVKELDVKDLEGVEVKDLDDEDLENLNLDTEDGKVVELDTLDNLETNDPNLDDLLRSGEFDIIAYTDPELDMGDKKSMFNEELDLPIDDKLDNQCVSVEPKKKEQENKTLVLSDKHSPQKKSTVTNEVKTEVLSPNSKVESKCETEKNDENKDNVDTPCSQASAHSDLNDGEKTSLHPCDPDLFEKRTNRETAGPSANVIQASTQLPAQDVINSCGITGSTPVLSSLLANEKSDNSDIRPSGSPPPPTLPASPSNHVSSLPPFIAPPGRVLDNAMNSNVTVVSRVNHVFSQGVQVNPGLIPGQSTVNHSLGTGKPATQTGPQTSQSGTSSMSGPQQLMIPQTLAQQNRERPLLLEEQPLLLQDLLDQERQEQQQQRQMQAMIRQRSEPFFPNIDFDAITDPIMKAKMVALKGINKVMAQNNLGMPPMVMSRFPFMGQVVTGTQNSEGQNLGPQAIPQDGSITHQISRPNPPNFGPGFVNDSQRKQYEEWLQETQQLLQMQQKYLEEQIGAHRKSKKALSAKQRTAKKAGREFPEEDAEQLKHVTEQQSMVQKQLEQIRKQQKEHAELIEDYRIKQQQQCAMAPPTMMPSVQPQPPLIPGATPPTMSQPTFPMVPQQLQHQQHTTVISGHTSPVRMPSLPGWQPNSAPAHLPLNPPRIQPPIAQLPIKTCTPAPGTVSNANPQSGPPPRVEFDDNNPFSESFQERERKERLREQQERQRIQLMQEVDRQRALQQRMEMEQHGMVGSEISSSRTSVSQIPFYSSDLPCDFMQPLGPLQQSPQHQQQMGQVLQQQNIQQGSINSPSTQTFMQTNERRQVGPPSFVPDSPSIPVGSPNFSSVKQGHGNLSGTSFQQSPVRPSFTPALPAAPPVANSSLPCGQDSTITHGHSYPGSTQSLIQLYSDIIPEEKGKKKRTRKKKRDDDAESTKAPSTPHSDITAPPTPGISETTSTPAVSTPSELPQQADQESVEPVGPSTPNMAAGQLCTELENKLPNSDFSQATPNQQTYANSEVDKLSMETPAKTEEIKLEKAETESCPGQEEPKLEEQNGSKVEGNAVACPVSSAQSPPHSAGAPAAKGDSGNELLKHLLKNKKSSSLLNQKPEGSICSEDDCTKDNKLVEKQNPAEGLQTLGAQMQGGFGCGNQLPKTDGGSETKKQRSKRTQRTGEKAAPRSKKRKKDEEEKQAMYSSTDTFTHLKQVRQLSLLPLMEPIIGVNFAHFLPYGSGQFNSGNRLLGTFGSATLEGVSDYYSQLIYKQNNLSNPPTPPASLPPTPPPMACQKMANGFATTEELAGKAGVLVSHEVTKTLGPKPFQLPFRPQDDLLARALAQGPKTVDVPASLPTPPHNNQEELRIQDHCGDRDTPDSFVPSSSPESVVGVEVSRYPDLSLVKEEPPEPVPSPIIPILPSTAGKSSESRRNDIKTEPGTLYFASPFGPSPNGPRSGLISVAITLHPTAAENISSVVAAFSDLLHVRIPNSYEVSSAPDVPSMGLVSSHRINPGLEYRQHLLLRGPPPGSANPPRLVSSYRLKQPNVPFPPTSNGLSGYKDSSHGIAESAALRPQWCCHCKVVILGSGVRKSFKDLTLLNKDSRESTKRVEKDIVFCSNNCFILYSSTAQAKNSENKESIPSLPQSPMRETPSKAFHQYSNNISTLDVHCLPQLPEKASPPASPPIAFPPAFEAAQVEAKPDELKVTVKLKPRLRAVHGGFEDCRPLNKKWRGMKWKKWSIHIVIPKGTFKPPCEDEIDEFLKKLGTSLKPDPVPKDYRKCCFCHEEGDGLTDGPARLLNLDLDLWVHLNCALWSTEVYETQAGALINVELALRRGLQMKCVFCHKTGATSGCHRFRCTNIYHFTCAIKAQCMFFKDKTMLCPMHKPKGIHEQELSYFAVFRRVYVQRDEVRQIASIVQRGERDHTFRVGSLIFHTIGQLLPQQMQAFHSPKALFPVGYEASRLYWSTRYANRRCRYLCSIEEKDGRPVFVIRIVEQGHEDLVLSDISPKGVWDKILEPVACVRKKSEMLQLFPAYLKGEDLFGLTVSAVARIAESLPGVEACENYTFRYGRNPLMELPLAVNPTGCARSEPKMSAHVKRFVLRPHTLNSTSTSKSFQSTVTGELNAPYSKQFVHSKSSQYRKMKTEWKSNVYLARSRIQGLGLYAARDIEKHTMVIEYIGTIIRNEVANRKEKLYESQNRGVYMFRMDNDHVIDATLTGGPARYINHSCAPNCVAEVVTFERGHKIIISSSRRIQKGEELCYDYKFDFEDDQHKIPCHCGAVNCRKWMN

SEQ ID NO: 307397 - DNA, 14907 bp, Artificial Sequence
  derived and/or modified sequence
atgagcagcgaagaggataagagcgtggagcagccccagcctcctccgcccccgccagaggaacctggtgccccagcaccctcacccgctgccgccgataaaaggcctcggggaagaccccgcaaagacggcgctagccctttccagcgtgcccgaaagaaaccgagatcccgcggaaagaccgctgttgaagacgaggacagcatggacggattagagacaaccgaaaccgaaaccatagtcgagactgagattaaagaacagtccgctgaggaagatgcggaggccgaagtggacaacagcaagcagctgattcccaccctccagagaagtgtgagcgaagagagtgccaatagcttggtgagcgtcggagtagaggctaaaatctctgaacagctgtgtgcattttgctactgtggggagaaaagctcgctcggccagggtgacctgaagcaattcagaataacacctggcttcattcttccttggcggaaccagccatcaaacaagaaggatattgacgacaattccaatggaacctatgaaaagatgcaaaactccgccccaagaaaacagaggggccaacgtaaggagcggtcaccacagcagaatattgtgagctgcgtgagtgtgtctacgcagaccgcctcggacgatcaggccggaaagctttgggatgaactttctctcgtcgggttgcccgacgcgatagacattcaggccctctttgactctacagggacatgctgggctcatcatcgctgcgtggaatggagtctgggggtgtgtcagatggaagagccactcctagtgaatgtggataaggctgtggtctccggctccacggaaagatgtgccttttgtaagcatctgggggctaccattaagtgctgcgaagagaaatgcactcagatgtaccactacccgtgcgccgccggcgcaggcaccttccaggacttctctcacatctttctgctttgtccagagcatatcgatcaggccccagagagatccaaggaagacgccaattgtgcggtttgtgacagtcccggcgatttgctagaccaattcttctgtactacgtgcgggcaacattatcatggtatgtgcctggatattgccgtcaccccactgaaaagggctgggtggcagtgtccggagtgtaaggtgtgccagaactgtaaacagagcggtgaagatagcaagatgctggtgtgtgacacctgtgacaagggctaccacaccttctgtctgcagccagtgatgaagagcgttcctaccaatggttggaagtgtaagaactgtaggatctgtatcgagtgcgggaccaggtcctcttcacagtggcatcacaactgtttgatctgtgataactgctaccaacagcaagacaatctttgtccattttgtggcaagtgctaccatccggagctccagaaggacatgctgcattgcaacatgtgcaagagatgggtccatttagaatgcgacaaacctactgatcacgagctggatacccaactaaaggaggagtacatttgtatgtactgcaagcatttgggcgccgagatggacagactccagcctggagaggaagttgaaatcgcagagcttaccactgactataacaacgaaatggaagtggaaggccctgaagaccagatggtcttctcagaacaagccgccaataaagatgtgaacggccaagagagtacacctggaatcgtacctgatgctgtgcaggtacacacagaggaacagcagaagtcccacccttccgaatcactggataccgactccttgctgatcgccgttagcagccagcataccgtgaatacagagctggagaagcaaatcagtaacgaagtcgactctgaagatctgaaaatgagctcggaggttaagcatatttgtggtgaagaccagatcgaggacaagatggaagtgacagagaacattgaggtcgtaactcatcagatcactgtacaacaggaacaactgcaattgttggaggagccggaaacagtcgtgtcccgcgaggaaagtcgccctccaaagctggtgatggaatccgtgactctgcctctggaaaccctggtttccccccatgaagagtccatctctttgtgccctgaggaacaactggtcattgagcgcctccaaggagaaaaggagcagaaagagaactcggagctatcgacagggcttatggattcagaaatgacgcccactattgaaggttgcgtcaaggacgtttcgtatcaaggggggaagtcaatcaaactttcatctgagacggaatcatcattctccagctccgccgatattagcaaggctgatgtcagttcctctcctacccctagtagcgatcttcctagtcatgacatgttgcacaattacccttctgcattgtccagtagcgcaggaaacatcatgccgacaacttacatctctgtcactcccaaaatcggtatgggtaaacctgctatcaccaaacgcaaattttcacccggcagaccacgctctaagcaaggagcctggtccacccacaacactgtgtctcctcccagctggtcgcctgacatcagcgagggccgtgaaatattcaaaccaaggcagctccctggctcagctatttggtcaattaaggttggccgggggagcggattcccggggaagcggcggccacgaggagccggactgtccggaagaggcggacgcggtcgctcaaaactgaaatccgggattggggccgtcgtcctcccaggggtttccacggccgacattagttctaacaaggacgatgaagaaaacagcatgcataacacagtggttttgttctcttcttcagataagttcacacttaaccaggacatgtgcgtggtttgtgggagcttcggccagggggcagagggaagattgctggcttgtagccagtgtggccagtgctatcacccatactgtgtcagtatcaaaattacaaaagtcgtcctttctaaaggttggcggtgcctggagtgcaccgtgtgtgaagcatgcggaaaggccacagatcccggcaggctattgctgtgcgatgactgcgacatctcttaccatacttattgtctagacccacctttgcagactgtacctaagggagggtggaagtgtaagtggtgtgtttggtgtagacattgcggagccacaagcgcgggcctaaggtgcgaatggcagaataattacacacagtgcgccccatgcgcatccctctctagttgtcctgtgtgttacaggaattatcgcgaagaggatctcatactgcagtgccgacaatgtgacaggtggatgcatgctgtatgccagaaccttaacacagaagaagaggtcgaaaacgtcgccgatatcggcttcgattgttctatgtgtaggccctatatgcccgcgtctaatgtgccaagtagcgactgctgtgagagtagtttagttgctcagatcgtgacaaaagtgaaggaactcgaccctcctaagacttacacacaagacggcgtctgcctgaccgagtctggtatgacccagcttcaatcgctgactgtcaccgtgcccagacgtaaaagatcaaaaccaaagctgaaattgaagatcataaaccagaactcagtggcagtgctccagactcctcctgatatacagtctgagcatagccgtgatggcgaaatggatgatagccgagaaggcgaactaatggactgcgacggaaagtctgagtctagtccggaacgggaagccgtcgacgacgaaacaaaaggcgttgagggtacagacggtgtcaaaaagaggaaacgcaagccttacaggccgggcatcggggggtttatggtgcggcagcgatccaggacgggacaaggaaaaactaagagatccgtgattagaaaagattcctctggctccatatccgagcagctgccatgtagagatgacggatggtctgagcaactgcccgacaccctagtcgacgaaagcgtttctgtgactgaaagcacagagaagatcaaaaagaggtatcggaagcgcaaaaacaaattggaagagaccttccccgcttacctacaggaagcattcttcgggaaagatctcctggacacctcgcgtcagtccaagatatctctggacaatttgtccgaggacggagcccagctgctttacaagaccaacatgaacaccggattccttgacccctccttagacccgctcttatcgtcctcgtctgcaccaacgaagtcaggcactcatgggcccgcggatgatcctcttgccgacattagcgaagtgcttaataccgatgacgacattctggggatcattagtgacgacctggcaaaaagtgtggatcattctgacataggccccgtgacagatgacccctctagtctcccacagccaaatgtgaaccagtcctccaggccactttcagaagaacagttagacgggatcctctcacccgaattggacaagatggtgacggacggagccatcttaggcaagctctataagatcccagagctgggtggaaaggatgtggaggacctgtttaccgccgtgctgagccccgcaaatacacagcccacccccctgccacagcccccaccacccacccagctgctgccaatacataaccaagacgccttcagtagaatgcctttaatgaatgggctcatcggatcaagcccgcacctccctcacaattccctcccaccaggatcagggctgggtacttttagtgcaattgcacagtcttcttacccagacgcccgagataaaaattctgcgttcaatcccatggcttccgaccccaataatagttggacctcgagtgcccccactgtcgaaggcgagaacgatactatgtcaaacgcacaacgcagcaccctgaagtgggaaaaggaggaagccctgggggaaatggccaccgtggccccggtgctgtacaccaatattaacttccctaacctcaaggaagagtttccagactggacaacaagggtgaaacagattgctaagctctggcgcaaagcctcctcgcaggagcgcgcaccatatgttcagaaggcaagggacaaccgtgctgccctgcggattaataaggttcagatgtccaacgatagtatgaagagacagcagcaacaagattcaatcgatccaagctcccgcatcgactctgagctcttcaaagacccgctgaagcagagagagagcgagcacgagcaagagtggaagttcagacagcagatgagacagaagtccaagcaacaagcgaagattgaggcaacccagaagcttgagcaggttaaaaacgagcaacagcagcagcaacagcagcaattcggaagccagcacctgctggtacagagtgggagcgatactccctcttctgggatccaatcccctctgaccccccaaccagggaatggcaatatgtcccctgctcaatcttttcacaaggaactgtttactaagcaaccccccagcactcccacctcaacatcgagcgatgatgtgttcgtgaaaccgcaggccccgcctccccctccagctccatccaggattccaatacaggatagcctgagccaggcccagacttctcaaccgccctccccccaggtcttcagtcctggatcctccaatagccgaccccccagcccgatggatccatatgctaaaatggtcggcacaccacggcctcctccggtgggccactccttcagtcgcagaaattcagcagcccccgtggagaactgtacgcctcttagttcggtgtctagaccccttcagatgaacgaaactactgccaatagaccttcccctgttagagatttgtgctccagttcaaccacgaataacgacccgtacgcgaagcctcctgacacccctagacctgtcatgaccgatcagtttcctaagtccctggggctgtcacggagccctgtggtgtcggaacagacagccaagggcccaatcgccgccggtacatctgaccacttcactaagccgagtccccgtgcggacgtgtttcagagacagcggatccccgactcatatgcccgtcctttgctgacaccggcccccctggactctggaccaggtccttttaaaactcccatgcaaccacccccctcctcccaagacccatacggaagtgtttcccaagcatcgcggcgattgagtgtggacccttacgaacgtccagccctgacgccacggccgatagataatttctctcacaatcagtctaacgacccctactcacagccacccctcaccccacatccggcggtcaatgagagctttgctcatccctctcgtgccttttcacagccaggcaccatcagcagaccaacatctcaggacccctactcccaaccgccggggactcccaggcccgttgttgatagctactctcaaagctcgggcaccgcccgctccaacaccgacccctattcacaaccgccgggtactcccaggcctactacagtcgacccctactcccagcaaccccagactccaagacctagcacacagaccgacctctttgtcacgcctgtcacaaatcagcgccactctgatccctatgcccatcccccaggaacgcctcgcccggggatctcagtaccttatagtcagccgccagccactccaaggccccgcatctccgaggggtttactagaagtagtatgactcgacctgtcctgatgcccaatcaagacccctttctccaggccgctcagaatagaggccccgctctgccaggcccacttgtccgacctccagatacttgcagtcagactccaaggccccccgggcctggccttagcgacacatttagcagggtgagtccaagcgctgcccgggatccatacgatcagagccccatgacccctcgtagtcagagtgactcgtttgggacgagccagaccgcacacgatgtcgcagaccagccccggcctgggtccgagggatctttttgcgcatcttccaatagccccatgcactcccaggggcaacaattcagtggtgtgtcacaattgcctggccctgtcccaactagcggcgtcaccgacacccagaatacagtcaatatggcacaggctgacaccgaaaagcttcggcagcgccagaaactgagagagattatcctacagcagcagcagcagaaaaaaatcgctggaagacaggaaaagggatctcaagattcccccgccgtgcctcatccaggcccactgcaacattggcagccagagaatgttaaccaagcctttactcgtcctcctcctccatacccagggaacattaggagtcccgtcgctccacccctgggaccccggtatgcggtgttcccaaaggatcagaggggtccctacccccccgacgtcgcctctatggggatgaggccacatggatttcggttcggcttcccagggggcagccatggcacaatgccctctcaggaacgtttcctggtaccgccccagcaaattcagggttctggcgtgagccctcagttacgccggtctgtgagcgttgacatgcctcgtccactgaacaattctcaaatgaataatcctgttggcttgccacaacacttttctccacagtctttgccagttcagcagcacaacattctaggacaggcatacatcgagctaaggcatcgtgctcctgacggtcggcaaaggctaccctttagtgccccacctggctcggttgtggaggcttctagcaatctccggcacgggaatttcatccccagacccgatttccccggacctcggcacaccgaccctatgcggcgaccaccccaggggctgcccaatcagctccccgtgcacccggacctggagcaggtgccaccttcccagcaggagcagggacacagcgtacactcctccagcatggtgatgcgcaccctcaatcaccctctaggaggagagttttccgaagctcccctttctacaagcgtgcctagcgaaactacgtccgataacttgcagatcaccacccaaccatccgacggactagaggagaagttggactcagacgacccttccgtcaaagagctcgacgtaaaagacctggaaggcgtggaggtcaaggatctggacgatgaggatctcgaaaacctgaacctggataccgaggatggcaaagtggtcgaactagatacccttgacaacctggaaactaatgacccgaatctagatgatctgctgaggtctggggaatttgatatcatcgcatacaccgaccctgagctcgacatgggagataagaaatccatgttcaacgaagaactggatctccccattgatgataaactggacaatcaatgcgtttcagtggaacctaagaagaaagaacaagagaacaagaccctggtgttgagtgacaagcacagccctcagaaaaagagtaccgtgaccaacgaggtgaaaacagaggtactaagccctaactcaaaagtcgaaagtaaatgcgaaaccgagaagaatgacgaaaacaaagacaatgtggacactccgtgctcccaagcttcggcccatagcgacctcaatgatggtgaaaagacatccttacacccctgtgatcccgatctctttgaaaagcgcaccaaccgcgaaaccgcgggcccctcggctaacgtaattcaagcgtccacccagttgcctgcccaggatgtaatcaattcatgcggaatcaccggatctactcctgttctatcttccttacttgctaatgagaaatcagacaacagtgacatccgcccttcgggttccccaccgccccctacattgccagcaagcccctcgaaccatgtatctagtctgcctccatttatcgcgcctcctggccgcgttctcgataacgctatgaacagcaacgtcacagtggtaagccgcgtgaatcacgtgttcagccagggcgttcaggtgaatccgggactgatccctggccagtctacagtaaaccatagcctcggtacaggcaaacccgctacacaaaccggccctcagacatctcagtcaggcacaagtagcatgagtgggccgcagcagctcatgataccacagacactcgcacagcaaaatcgtgaacgacctctcttgttggaggaacaacctctcctgcttcaagacctgctggatcaggagcgccaagagcagcagcagcagcgccaaatgcaagcaatgatccgccagcgatctgagcctttttttcctaatattgattttgacgcgatcactgaccccattatgaaggccaagatggtggcgctcaagggaattaataaggtgatggcgcagaacaacttaggaatgcctcccatggtgatgtctcgatttccatttatgggtcaagtggtaaccggtacccaaaactccgagggccagaatctgggaccacaggccattccccaggacggcagtatcacccatcagatcagcagaccaaacccacccaacttcggccccgggtttgtgaatgattctcaaaggaaacagtacgaggaatggctgcaggagacacagcagttactacagatgcagcaaaaatatttggaagaacagattggcgcccatcgtaaaagtaagaaggcgctttctgcgaagcagcggacggccaagaaggcaggaagggaatttcctgaggaagacgccgaacagttgaagcacgtgaccgaacagcaaagtatggtacaaaaacagctagagcagattcgcaaacagcagaaagaacatgctgagctgatagaggactatagaatcaaacaacagcaacagtgcgctatggcgccccccacgatgatgcctagcgttcaaccgcagcccccactgatcccaggagcaaccccgcccacaatgtctcaacccacatttcccatggtcccccaacaactccaacatcaacagcacaccactgtgattagtggacacacctccccagtgagaatgccctcgctacctggttggcagccgaactccgcccccgctcaccttccacttaatcctcctcgcattcagcctccaatcgcccagttgccgattaagacctgtacacctgcccccggtaccgtcagtaacgccaatccacagtcagggccccctcctcgcgtggagtttgatgacaacaatcctttcagcgaatccttccaagagcgggaacgcaaggagaggctgagagagcagcaggaacgacagcggattcaattaatgcaggaggtggacaggcagcgcgcactccaacagcgtatggaaatggaacagcatggcatggtcggatcggaaatcagtagctcccggacaagcgtctctcagatccctttctacagctctgacctgccatgtgactttatgcagcctctgggaccattacaacagtcccctcagcaccaacagcagatgggtcaggttttgcagcagcaaaatatacaacaaggaagtatcaattcgccttctacccagacattcatgcagaccaacgaaagacggcaagtaggaccccctagctttgttccggattcaccctcaattcccgtcggcagcccgaatttttcatccgtgaaacaggggcatggcaacttatctggcactagctttcagcagtcacccgtgcgccccagcttcacaccggccctacccgccgctccccctgtggccaattcctcccttccatgcgggcaagacagcactattacgcacggacattcttatcccggaagcactcaaagtctgatccagctctattccgacataataccagaagagaagggaaaaaagaagagaacccggaaaaaaaaaagggatgacgatgcggagtctaccaaagctccttccacgccacattcggacattacagccccgcctacacccggtatcagcgagacgacgtcaacacctgctgtgagcacaccatccgaactacctcagcaggccgatcaggaaagtgtagagcccgtaggaccgtccacacccaatatggctgcgggccagctgtgcacagaactggagaacaagcttccgaatagtgacttcagccaggccactcctaaccagcagacctacgcaaactcggaggtggataagctgagtatggaaactcctgccaagacagaggagatcaagcttgagaaggcagagactgagagttgtcctgggcaggaggaaccaaaactggaggaacagaacggcagcaaagttgaggggaatgcagtagcgtgccctgtatcgagcgcgcagagcccacctcactctgcgggggcgcctgcggctaaaggagacagtgggaacgagttactgaaacatttgctaaagaacaaaaagtcatcttccttactcaaccagaagccggaaggcagcatctgcagtgaggacgactgcactaaggacaataaactcgtcgagaagcagaatcccgcggagggcctgcagacactcggggcccagatgcaaggcggattcggatgcggcaatcagctgccaaagactgatggggggagcgagacgaaaaaacagcgctctaaacggacgcagcggacaggtgaaaaagctgcgcccagaagcaagaagcggaagaaggacgaagaagaaaaacaagccatgtatagttctacggataccttcactcatttgaagcaggttcgtcaattatctctgctgcccctgatggaaccgataattggggtcaattttgcccacttcctgccatacggaagcggccagttcaactctggaaaccggctgctgggaacctttggatccgccacactggaaggtgtcagtgactactactcccagctaatttacaagcagaataacctgagcaatccaccaacccctccagcctccctgccaccaacaccccccccaatggcttgtcagaagatggctaacgggtttgccactaccgaagagctagcaggcaaggccggtgtgctggtcagccacgaggtgacgaagacactagggccaaaaccgtttcagttgccgtttaggcctcaggacgatttgctggccagggctttagcccaaggacctaagactgtagacgtgccagcctctctgcccaccccaccacataataatcaggaggagttaagaatccaggaccactgcggggaccgggacaccccagactcctttgttccatccagctctcccgagtcagtggttggcgtggaagtgagtcgctatcctgatctgtccctggtaaaggaggagcctcctgagcctgtgccttcccctattattccaattctcccttctacagctggcaagagcagcgagtctagacgcaacgatataaaaacagaacctggtacactgtatttcgccagcccgtttggacctagccccaacggcccccgatctgggttaatttctgtggctatcaccctgcacccaactgcagccgagaatatttcaagcgtcgtggccgcctttagcgacttactccacgttcggataccaaactcatatgaagtatcctcagctcctgatgtccccagcatgggcctggtaagcagccataggatcaatccagggcttgagtacaggcagcacctgctgttgagaggccctccacctggatctgccaatcccccgaggctcgtgtcctcctatagactgaaacagcccaatgtgccttttccgcctacctccaatggcttatccgggtataaggactcctcccacgggatagctgagagtgccgctctgagacctcagtggtgttgtcattgtaaagtagtgatccttggctcaggggtgcggaaatcatttaaggacctcacactcctgaataaagactcccgcgagtctactaaacgggtggagaaagatattgtgttctgttccaataactgctttatattgtatagcagcactgcacaggccaaaaattccgagaacaaggagtcaatcccaagcctccctcagtccccgatgcgagaaacacctagcaaagctttccatcagtacagcaacaacatttccactctggacgtgcactgtctccctcagctgccagagaaggcctcaccacccgcgagtccccccatagcgttccctcctgccttcgaagccgcccaggttgaagccaagcccgatgagctgaaggtgaccgttaagctgaaacctcggctgcgagcagtacacggaggatttgaggattgtcgcccgctgaacaagaagtggcggggtatgaagtggaagaagtggtcaattcacatagtgattccaaaggggacattcaagcccccatgtgaagacgaaatagatgagtttctcaaaaagcttggcaccagtttaaagccggacccggtgcctaaagattatagaaaatgttgcttctgccatgaagaaggagatggactaaccgacgggccagctcgactcttaaacctggacctggacctttgggtgcacctcaactgcgccctgtggtcaaccgaggtatacgagacacaggctggggctctcattaacgtagagctggctctgaggagaggacttcagatgaaatgcgtgttctgccacaagacaggggcaacatctggctgtcaccggtttaggtgtacaaatatctatcatttcacatgtgccatcaaggcacagtgcatgttttttaaagacaaaacaatgttgtgtccgatgcacaagccaaagggcattcacgaacaggagctgtcctacttcgcagtcttcagaagggtgtacgttcagcgagacgaagtgagacaaatcgccagcatcgttcagaggggcgagagggaccatacctttcgggtgggctctttgatctttcacacgatcggacagctgttgcctcaacagatgcaggcattccattcccccaaagccctcttccccgtcgggtatgaggcctccaggctgtattggagtactcgctacgctaatcgacgctgcagatatctgtgttctatcgaggaaaaggacggcagacccgtttttgtgattagaatcgttgagcagggacatgaagatttggtgctgagtgatatctcacctaaaggagtttgggacaaaatcctagaaccagtggcctgcgtgagaaagaaaagcgaaatgctgcaactgttccccgcctatctcaagggcgaggacctttttggacttaccgtttccgccgtggcacgtatcgctgaatccctacctggtgtggaggcatgcgagaactacacatttcgctacgggaggaacccactgatggaactgccccttgccgtcaaccccacaggatgcgctcggagcgaacccaagatgagcgcccacgtgaaaaggttcgtccttaggccacatacccttaactcaactagtacctctaagtctttccagtccacagtgacaggagagttgaatgcaccatactccaaacagtttgtgcactccaaatcttctcagtacaggaaaatgaagacagagtggaagagcaatgtgtaccttgccagatctagaatccaggggctgggattatatgcggctcgggatattgaaaaacacaccatggtcatcgagtatatcggcacaattatccggaacgaggttgcaaatagaaaagagaagctatacgaatcgcaaaatagaggtgtgtacatgttcaggatggacaacgatcatgtcatcgatgccactctgacaggtggacctgccagatacatcaaccactcttgcgccccaaactgtgttgcagaggtggttacttttgagcggggccataagattatcataagcagctcccgccgaatccaaaaaggtgaagaactgtgctacgactataagtttgacttcgaggacgatcagcataagatcccttgtcactgcggtgccgtgaattgccgcaagtggatgaattag

SEQ ID NO: 307398 - DNA, 14907 bp, Artificial Sequence
  derived and/or modified sequence
atgagcagcgaggaggacaagtctgtggagcagccccagcccccacctcctcctcctgaggagcccggggccccagcccccagccctgctgctgctgacaagaggccccggggccggcccaggaaggatggagccagccccttccagagggccaggaagaagcccaggagccggggcaagacagctgtggaggatgaggacagcatggatggcctggagaccacagaaacagagaccatcgtggagacagagatcaaggagcagagcgctgaggaggatgctgaggccgaggtggacaacagcaagcagctgatccccaccctgcagaggtctgtgtctgaggagagcgccaacagcctggtgtctgtgggcgtggaggccaagatcagcgagcagctgtgtgccttctgctactgtggggagaagagcagcctgggccagggcgacctgaagcagttccgcatcaccccaggcttcatcctgccctggaggaaccagcccagcaacaagaaggacattgatgacaacagcaatggcacctatgagaagatgcagaacagcgcccccaggaagcagaggggccagaggaaggagaggagcccccagcagaacatcgtgtcctgtgtgtctgtgtccacccagacagccagtgatgaccaggccggcaagctgtgggatgagctgagcctggtgggcctgcctgatgccatcgacatccaggccctgtttgacagcacaggcacctgctgggcccaccaccgctgtgtggagtggagcctgggcgtgtgccagatggaggagcccctgctggtgaatgtggacaaggctgtggtgtctggcagcacagagcgctgtgccttctgcaagcacctgggcgccaccatcaagtgctgtgaggagaagtgcacccagatgtaccactacccctgtgccgccggggccggcaccttccaggacttcagccacatcttcctgctgtgcccagagcacatcgaccaggcccctgagaggagcaaggaggatgccaactgtgctgtgtgtgacagccctggggacctgctggaccagttcttctgcaccacctgtggccagcactaccacggcatgtgcctggacattgctgtgacccccctgaagagagctggctggcagtgcccagagtgcaaggtgtgccagaactgcaagcagagcggggaggacagcaagatgctggtgtgtgacacctgtgacaagggctaccacaccttctgcctgcagcctgtgatgaagtctgtgcccaccaacggctggaagtgcaagaactgccgcatctgcattgaatgtggcaccaggagcagcagccagtggcaccacaactgcctgatctgtgacaactgctaccagcagcaggacaacctgtgccccttctgtgggaagtgctaccaccctgagctgcagaaggacatgctgcactgcaacatgtgcaagcgctgggtgcacctggagtgtgacaagcccacagaccacgagctggacacccagctgaaggaggagtacatctgcatgtactgcaagcacctgggcgctgagatggaccggctgcagcctggagaggaggtggagattgctgagctgaccacagactacaacaatgagatggaggtggagggccctgaggaccagatggtgttcagcgagcaggccgccaacaaggatgtgaatggccaggagagcaccccaggcatcgtgcctgatgctgtgcaggtgcacacagaggagcagcagaagagccaccccagcgagagcctggacacagacagcctgctgattgctgtgagcagccagcacacagtgaacacagagctggagaagcagatcagcaatgaggtggacagcgaggacctgaagatgagcagcgaggtgaagcacatctgtggggaggaccagatcgaggacaagatggaggtgacagaaaatattgaggtggtgacccaccagatcaccgtgcagcaggagcagctgcagctgctggaggagcctgagaccgtggtgtcccgggaggagagccggccccccaagctggtgatggagagcgtgaccctgcccctggagaccctggtgagcccccatgaggagagcatcagcctgtgcccagaggagcagctggtgattgagcggctgcagggcgagaaggagcagaaggagaacagcgagctgagcacaggcctgatggattctgagatgacccccaccatcgagggctgtgtgaaggatgtgtcctaccagggcggcaagagcatcaagctgagcagcgagacagagagcagcttcagcagcagcgctgacatcagcaaggcagatgtgagcagcagccccacccccagcagtgacctgcccagccatgacatgctgcacaactaccccagcgccctgagcagcagcgctggcaacatcatgcccaccacctacatctctgtgacccccaagattggcatgggcaagccagccatcaccaagaggaagttcagccctggccggcccaggagcaagcagggcgcctggagcacccacaacacagtgtccccacccagctggagcccagacatcagcgagggccgggagatcttcaagccccggcagctgcccggcagcgccatctggagcatcaaggtgggccggggcagcggcttccctgggaagaggcggcccagaggagctggcctgagcggccggggcggccggggccgcagcaagctgaagagcggcatcggggctgtggtgctgcccggggtgtccacagctgacatcagcagcaacaaggatgatgaagaaaattccatgcacaacacagtggtgctcttcagcagcagtgacaagttcaccctgaaccaggacatgtgtgtggtgtgtggcagctttggccagggcgctgagggccgcctgctggcctgcagccagtgtggccagtgctaccacccctactgtgtgtccatcaagatcaccaaggtggtgctgagcaagggctggcgctgcctggagtgcaccgtgtgtgaggcctgtgggaaggccacagatcctggccgcctgctgctgtgtgatgactgtgacatctcctaccacacctactgcctggacccccccctgcagacagtgcccaagggcggctggaagtgcaagtggtgtgtgtggtgccgccactgtggggccaccagcgctggcctgcgctgtgagtggcagaacaactacacccagtgtgccccctgtgccagcctgagcagctgccctgtgtgctacagaaactaccgggaggaggacctgatcctgcagtgccggcagtgtgaccgctggatgcatgctgtgtgccagaacctgaacacagaggaggaggtggagaatgtggccgacattggatttgactgcagcatgtgccggccctacatgcctgccagcaatgtgcccagcagtgactgctgtgagagcagcctggtggcccagatcgtgaccaaggtgaaggagctggacccccccaagacctacacccaggatggagtgtgcctgacagagagcggcatgacccagctgcagagcctgactgtgacagtgcccaggaggaagaggagcaagcccaagctgaagctgaagatcatcaaccagaacagcgtggccgtgctgcagaccccaccagacatccagagcgagcacagcagagatggagagatggatgacagccgggagggggagctgatggactgtgatggcaagtctgagagcagccctgagcgggaggccgtggatgatgagaccaagggcgtggagggcacagatggagtgaagaagaggaagaggaagccctaccggcccggcatcggcggcttcatggtgcggcagaggagcaggacaggccagggcaagaccaagaggagcgtcatcaggaaggacagcagcggcagcatcagcgagcagctgccctgcagagatgatggctggagcgagcagctgcctgacaccctggtggatgagagcgtgtctgtgacagagagcacagagaagatcaagaagcgctacaggaagaggaagaacaagctggaggagaccttccctgcctacctgcaggaggccttcttcggcaaggacctgctggacaccagccggcagagcaagatcagcctggacaacctgtctgaagatggagcccagctgctgtacaagaccaacatgaacacaggcttcctggaccccagcctggaccccctgctgagcagcagcagcgcccccaccaagagcggcacccacggccctgcagatgaccccctggccgacatcagcgaggtgctgaacacagatgatgacatcctgggcatcatcagtgatgacctggccaagtctgtggaccacagcgacatcggccctgtgacagatgaccccagcagcctgccccagcccaacgtgaaccagagcagccggcccctgtctgaggagcagctggatggcatcctgagccctgagctggacaagatggtgacagatggagccatcctgggcaagctgtacaagatccctgagctgggcggcaaggatgtggaggacctcttcaccgctgtgctgagccctgccaacacccagcccacccccctgccccagcccccaccacccacccagctgctgcccatccacaaccaggatgccttcagcaggatgcccctgatgaatggcctcatcggcagcagcccccacctgccccacaacagcctgcccccaggcagcggcctgggcaccttcagcgccatcgcccagagcagctacccagatgcccgggacaagaacagcgccttcaaccccatggccagtgaccccaacaacagctggaccagcagcgcccccaccgtggagggagaaaatgacaccatgagcaatgcccagaggagcaccctgaagtgggagaaggaggaggccctgggggagatggccaccgtggcccctgtgctgtacaccaacatcaacttccccaacctgaaggaggagttcccagactggaccaccagggtgaagcagatcgccaagctgtggaggaaggccagcagccaggagcgggccccctacgtgcagaaggcccgggacaacagagctgccctgcgcatcaacaaggtgcagatgagcaatgacagcatgaagaggcagcagcagcaggacagcattgaccccagcagcagaattgattctgagctgttcaaggaccccctgaagcagcgggagagcgagcacgagcaggagtggaagttccggcagcagatgaggcagaagagcaagcagcaggccaagattgaggccacccagaagctggagcaggtgaagaatgagcagcagcagcagcagcagcagcagtttggcagccagcacctgctggtgcagagcggcagtgacacccccagcagcggcatccagagccccctgaccccccagcctggaaatggaaacatgagccctgcccagagcttccacaaggagctgttcaccaagcagccccccagcacccccaccagcaccagcagtgatgatgtgtttgtgaagccccaggcccctcctcctcctccagcccccagccgcatccccatccaggacagcctgagccaggcccagaccagccagccccccagcccccaggtgttcagccctggcagcagcaacagcaggcctcccagccccatggacccctatgccaagatggtgggcacccccaggcctcctcctgtgggccacagcttcagcagaagaaattctgctgcccctgtggagaactgcacccccctgagctctgtgtcccggcccctgcagatgaatgagaccacagccaaccggcccagccctgtgcgggacctgtgcagcagcagcaccaccaacaatgacccctatgccaagcccccagacacccccaggcctgtgatgacagaccagttccccaagagcctgggcctgagccgcagccctgtggtgtctgagcagacagccaagggccccatcgctgctggcaccagtgaccacttcaccaagcccagccccagggcagatgtgttccagaggcagaggatcccagacagctatgcccggcccctgctgaccccagcccccctggacagcggccctggccccttcaagacccccatgcagcccccacccagcagccaggacccctacggctctgtgtcccaggccagccggcggctgtctgtggacccctatgaaagacctgccctgaccccccggcccatcgacaacttcagccacaaccagagcaatgacccctacagccagccccccctgaccccccaccctgctgtgaatgaaagctttgcccaccccagccgggccttcagccagcccggcaccatcagccggcccaccagccaggacccctacagccagcccccaggcacccccaggcctgtggtggacagctacagccagagcagcggcacagcccggagcaacacagacccctacagccagcccccaggcaccccccggcccaccaccgtggacccctacagccagcagccccagaccccccggcccagcacccagacagacctgtttgtgacccctgtgaccaaccagaggcacagcgacccctatgcccaccccccaggcaccccccggcccggcatctctgtgccctacagccagcccccagccaccccccggccccgcatcagcgagggcttcaccaggagctccatgaccaggcctgtgctgatgcccaaccaggaccccttcctgcaggccgcccagaacagaggccctgccctgcccggccccctggtgcggcccccagacacctgcagccagaccccccggcccccaggccctggcctgagtgacaccttcagccgggtgagccccagcgctgcccgggacccctatgaccagagccccatgacccccaggagccagagcgacagctttggcaccagccagacagcccatgatgtggccgaccagccccggcccggcagcgagggcagcttctgtgccagcagcaacagccccatgcacagccagggccagcagttcagcggcgtgtcccagctgcccggccctgtgcccaccagcggcgtgacagacacccagaacacagtgaacatggcccaggccgacacagagaagctgcggcagaggcagaagctgcgggagatcatcctgcagcagcagcagcagaagaagattgctggccggcaggagaagggcagccaggacagccctgctgtgccccaccctggccccctgcagcactggcagccagaaaatgtgaaccaggccttcaccaggcctcctccaccctacccaggcaacatccgcagccctgtggccccacccctgggccccaggtatgctgtgttccccaaggaccagaggggcccctaccccccagatgtggcctccatgggcatgaggccccacggcttccgcttcggcttccctgggggcagccacggcaccatgcccagccaggagcgcttcctggtgcccccccagcagatccagggcagcggcgtgagcccccagctgcggcgctctgtgtctgtggacatgccccggcccctgaacaacagccagatgaacaaccctgtgggcctgccccagcacttcagcccccagagcctgcctgtgcagcagcacaacatcctgggccaggcctacatcgagctgcggcaccgggccccagatggccggcagaggctgcccttcagcgcccctcctggctctgtggtggaggccagcagcaacctgcggcacggcaacttcatccccaggccagacttccctggccccaggcacacagaccccatgagaagaccaccccagggcctgcccaaccagctgcctgtgcacccagacctggagcaggtgccccccagccagcaggagcagggccacagcgtgcacagcagctccatggtgatgaggaccctgaaccaccccctgggcggggagttcagcgaggcccccctgagcacctctgtgcccagcgagaccaccagtgacaacctgcagatcaccacccagcccagtgatggcctggaggagaagctggacagtgatgaccccagcgtgaaggagctggatgtgaaggacctggagggcgtggaggtgaaggacctggatgatgaggacctggagaacctgaacctggacacagaagatggcaaggtggtggagctggacaccctggacaacctggagaccaatgaccccaacctggatgacctgctgcggtctggagaatttgacatcatcgcctacacagatcctgagctggacatgggagacaagaagtccatgtttaatgaggagctggacctgcccattgatgacaagctggacaaccagtgtgtgtctgtggagcccaagaagaaggagcaggagaacaagaccctggtgctgagtgacaagcacagcccccagaagaagagcacagtgaccaatgaggtgaagacagaggtgctgagccccaacagcaaggtggagagcaaatgtgaaacagagaagaatgatgagaacaaggacaacgtggacaccccctgcagccaggccagcgcccacagcgacctgaatgatggagagaagaccagcctgcacccctgtgaccctgacctgtttgagaagaggaccaaccgggagacagctggccccagcgccaacgtcatccaggccagcacccagctgcctgcccaggacgtcatcaacagctgtggcatcaccggcagcacccctgtgctgagcagcctgctggccaatgagaagagtgacaacagcgacatccggcccagcggcagccccccaccacccaccctgcctgccagccccagcaaccacgtgagcagcctgccccccttcatcgcccctcctggccgggtgctggacaatgccatgaacagcaatgtgacagtggtgtcccgggtgaaccacgtgttcagccagggcgtgcaggtgaaccctggcctcatccctggccagagcacagtgaaccacagcctgggcaccgggaagccagccacccagacaggcccccagaccagccagagcggcaccagctccatgagcggcccccagcagctgatgatcccccagaccctggcccagcagaaccgggagcggcccctgctgctggaggagcagcccctgctgctgcaggacctgctggaccaggagcggcaggagcagcagcagcagaggcagatgcaggccatgatccggcagaggtctgagcccttcttccccaacatcgactttgatgccatcacagaccccatcatgaaggccaagatggtggccctgaagggcatcaacaaggtgatggcccagaacaacctgggcatgccacccatggtgatgagccgcttccccttcatgggccaggtggtgacaggcacccagaacagcgagggccagaacctgggcccccaggccatcccccaggacggcagcatcacccaccagatcagccggcccaacccccccaactttggacctggctttgtgaatgacagccagaggaagcagtatgaggagtggctgcaggagacccagcagctgctgcagatgcagcagaagtacctggaggagcagatcggggcccacaggaagagcaagaaggccctgagcgccaagcagaggacagccaagaaggccggccgggagttcccagaagaagatgctgagcagctgaagcacgtgacagagcagcagagcatggtgcagaagcagctggagcagatcaggaagcagcagaaggagcacgccgagctgattgaggactaccgcatcaagcagcagcagcagtgtgccatggccccacccaccatgatgcccagcgtgcagccccagcccccactcatccctggggccaccccacccaccatgagccagcccaccttccccatggtgccccagcagctgcagcaccagcagcacaccaccgtcatcagcggccacaccagccctgtgaggatgcccagcctgcccggctggcagcccaacagcgccccagcccacctgcccctgaaccccccacgcatccagccccccatcgcccagctgcccatcaagacctgcaccccagcccctggcaccgtgtccaatgccaacccccagagcggccccccaccccgggtggagtttgatgacaacaaccccttcagcgagagcttccaggagcgggagaggaaggagcggctgcgggagcagcaggagcggcagaggatccagctgatgcaggaggtggaccggcagagggccctgcagcagaggatggagatggagcagcacggcatggtgggcagcgagatcagcagcagcaggacctctgtgtcccagatccccttctacagcagtgacctgccctgtgacttcatgcagcccctgggccccctgcagcagagcccccagcaccagcagcagatgggccaggtgctgcagcagcagaacatccagcagggcagcatcaacagccccagcacccagaccttcatgcagaccaatgaaagacggcaggtgggcccccccagctttgtgcctgacagccccagcatccctgtgggcagccccaacttcagctctgtgaagcagggccacggcaacctgagcggcaccagcttccagcagagccctgtgcggcccagcttcaccccagccctgcctgctgcccctcctgtggccaacagcagcctgccctgtggccaggacagcaccatcacccacggccacagctacccaggcagcacccagagcctcatccagctgtacagcgacatcatccctgaggagaagggcaagaagaagaggaccaggaagaagaagagagatgatgatgctgagagcaccaaggcccccagcaccccccacagcgacatcacagccccacccaccccaggcatcagcgagaccaccagcaccccagctgtgtccacccccagcgagctgccccagcaggccgaccaggagagcgtggagcctgtgggccccagcacccccaacatggctgctggccagctgtgcacagagctggagaacaagctgcccaacagcgacttcagccaggccacccccaaccagcagacctacgccaacagcgaggtggacaagctgtccatggagaccccagccaagacagaggagatcaagctggagaaggccgagacagagagctgccccggccaggaggagcccaagctggaggagcagaatggcagcaaggtggagggcaatgctgtggcctgccctgtgtcctctgcccagagccccccccacagcgctggggccccagctgccaagggggacagcggaaatgagctgctgaagcacctgctgaagaacaagaagagcagcagcctgctgaaccagaagccagagggcagcatctgcagtgaagatgactgcaccaaggacaacaagctggtggagaagcagaacccagctgagggcctgcagaccctgggcgcccagatgcagggcggcttcggctgcggcaaccagctgcccaagacagatggcggcagcgagaccaagaagcagaggagcaagaggacccagaggactggagagaaggccgcccccaggagcaagaagaggaagaaggatgaggaggagaagcaggccatgtacagcagcacagacaccttcacccacctgaagcaggtgcggcagctgagcctgctgcccctgatggagcccatcatcggcgtgaactttgcccacttcctgccctacggcagcggccagttcaacagcggcaaccggctgctgggcacctttggaagtgccaccctggagggcgtgtctgactactacagccagctgatctacaagcagaacaacctgagcaacccccccaccccaccagccagcctgccccccaccccaccacccatggcctgccagaagatggccaatggatttgccaccacagaggagctggccggcaaggccggcgtgctggtgtcccatgaggtgaccaagaccctgggccccaagcccttccagctgcccttccggccccaggatgacctgctggcccgggccctggcccagggccccaagacagtggatgtgcctgccagcctgcccaccccaccccacaacaaccaggaggagctgcgcatccaggaccactgtggggaccgggacaccccagacagctttgtgcccagcagcagccctgagagcgtggtgggcgtggaggtgagccgctacccagacctgagcctggtgaaggaggagcccccagagcctgtgcccagccccatcatccccatcctgcccagcacagctgggaagagcagcgagagcagaagaaatgacatcaagacagagcccggcaccctgtactttgccagccccttcggccccagccccaacggccccaggagcggcctcatctctgtggccatcaccctgcaccccacagctgctgagaacatcagctctgtggtggccgccttcagtgacctgctgcacgtgcgcatccccaacagctatgaggtgagcagcgccccagatgtgcccagcatgggcctggtgagcagccaccgcatcaaccctggcctggagtaccggcagcacctgctgctgcggggccccccacctggcagcgccaaccccccccggctggtgtcctcctaccgcctgaagcagcccaacgtgcccttcccccccaccagcaatggcctgagcggctacaaggacagcagccacggcattgctgagagcgctgccctgcggccccagtggtgctgccactgcaaggtggtgatcctgggcagcggcgtgaggaagagcttcaaggacctgaccctgctgaacaaggacagccgggagagcaccaagagggtggagaaggacatcgtgttctgcagcaacaactgcttcatcctgtacagcagcacagcccaggccaagaacagcgagaacaaggagagcatccccagcctgccccagagccccatgagggagacccccagcaaggccttccaccagtacagcaacaacatcagcaccctggatgtgcactgcctgccccagctgcctgagaaggccagccccccagccagcccccccatcgccttccccccagcctttgaggccgcccaggtggaggccaagccagatgagctgaaggtgacagtgaagctgaagccccggctgcgggctgtgcacggcggctttgaggactgccggcccctgaacaagaagtggaggggcatgaagtggaagaagtggagcatccacatcgtcatccccaagggcaccttcaagccaccctgtgaagatgaaattgatgagttcctgaagaagctgggcaccagcctgaagccagaccctgtgcccaaggactacaggaagtgctgcttctgccacgaggagggagatggcctgacagatggccctgcccggctgctgaacctggacctggacctgtgggtgcacctgaactgtgccctgtggagcacagaggtgtatgagacccaggccggggccctgatcaacgtggagctggccctgcggcggggcctgcagatgaagtgtgtgttctgccacaagacaggagccaccagcggctgccaccgcttccgctgcaccaacatctaccacttcacctgtgccatcaaggcccagtgcatgttcttcaaggacaagaccatgctgtgccccatgcacaagcccaagggcatccacgagcaggagctgagctactttgctgtgttccggcgggtgtatgtgcagagagatgaggtgcggcagatcgccagcatcgtgcagagaggagagcgggaccacaccttccgggtgggcagcctcatcttccacaccatcggccagctgctgccccagcagatgcaggccttccacagccccaaggccctcttccctgtgggctatgaggccagccggctgtactggagcaccaggtatgccaacagacgctgccgctacctgtgcagcattgaggagaaggatggccggcctgtgtttgtgatccgcatcgtggagcagggccacgaggacctggtgctgagtgacatcagccccaagggcgtgtgggacaagatcctggagcctgtggcctgtgtgaggaagaagtctgagatgctgcagctgtttcctgcctacctgaagggggaggacctgtttggcctgactgtgtctgctgtggccagaattgctgagagcctgcccggggtggaggcctgtgagaactacaccttccgctatggcaggaaccccctgatggagctgcccctggccgtgaaccccaccggctgtgcccggtctgagcccaagatgtctgcccacgtgaagagatttgtgctgcggccccacaccctgaacagcaccagcaccagcaagagcttccagagcacagtgactggagagctgaatgccccctacagcaagcagtttgtgcacagcaagagcagccagtacaggaagatgaagacagagtggaagagcaatgtgtacctggcccggagccgcatccagggcctgggcctgtatgctgcccgggacatcgagaagcacaccatggtgattgagtacatcggcaccatcatcagaaatgaggtggccaacaggaaggagaagctgtatgagagccagaacagaggagtgtacatgttcaggatggacaatgaccacgtgattgatgccaccctgactggaggccctgcccgctacatcaaccacagctgtgcccccaactgtgtggccgaggtggtgacctttgagcggggccacaagatcatcatcagcagcagccgccgcatccagaagggggaggagctgtgctatgactacaagtttgattttgaagatgaccagcacaagatcccctgccactgtggggctgtgaactgcaggaagtggatgaactag

SEQ ID NO: 307399 - DNA, 17029 bp, Artificial Sequence
  derived and/or modified sequence
gaggtgcgcgcgcccgcgccgatgtgtgtgagtgcgtgtcctgctcgctccatgttgccgcctctcccggtacctgctgctgctcccggggctgcgggaaatgcgagaggctgagccggggaggaggaacccgagcagcagcggcggcggcggcggccgcggcggcgggagccccccaggaggaggaccgggatccatgtgtctttcctggtgactaggatgtcgtcggaggaggacaagagcgtggagcagccgcagccgccgccaccaccccccgaggagcctggagccccggccccgagccccgcagccgcagacaaaagacctcggggccggcctcgcaaagatggcgcttcccctttccagagagccagaaagaaacctcgaagtagggggaaaactgcagtggaagatgaggacagcatggatgggctggagacaacagaaacagaaacgattgtggaaacagaaatcaaagaacaatctgcagaagaggatgctgaagcagaagtggataacagcaaacagctaattccaactcttcagcgatctgtgtctgaggaatcggcaaactccctggtctctgttggtgtagaagccaaaatcagtgaacagctctgcgctttttgttactgtggggaaaaaagttccttaggacaaggagacttaaaacaattcagaataacgcctggatttatcttgccatggagaaaccaaccttctaacaagaaggacattgatgacaacagcaatggaacctatgagaaaatgcaaaactcagcaccacgaaaacaaagaggacagagaaaagaacgatctcctcagcagaatatagtatcttgtgtaagtgtaagcacccagacagcttcagatgatcaagctggtaaactgtgggatgaactcagtctggttgggcttccagatgccattgatatccaagccttatttgattctacaggcacttgttgggctcatcaccgttgtgtggagtggtcactaggagtatgccagatggaagaaccattgttagtgaacgtggacaaagctgttgtctcagggagcacagaacgatgtgcattttgtaagcaccttggagccactatcaaatgctgtgaagagaaatgtacccagatgtatcattatccttgtgctgcaggagccggcacctttcaggatttcagtcacatcttcctgctttgtccagaacacattgaccaagctcctgaaagatcgaaggaagatgcaaactgtgcagtgtgcgacagcccgggagacctcttagatcagttcttttgtactacttgtggtcagcactatcatggaatgtgcctggatatagcggttactccattaaaacgtgcaggttggcaatgtcctgagtgcaaagtgtgccagaactgcaaacaatcgggagaagatagcaagatgctagtgtgtgatacgtgtgacaaagggtatcatactttttgtcttcaaccagttatgaaatcagtaccaaccaatggctggaaatgcaaaaattgcagaatatgtatagagtgtggcacacggtctagttctcagtggcaccacaattgcctgatatgtgacaattgttaccaacagcaggataacttatgtcccttctgtgggaagtgttatcatccagaattgcagaaagacatgcttcattgtaatatgtgcaaaaggtgggttcacctagagtgtgacaaaccaacagatcatgaactggatactcagctcaaagaagagtatatctgcatgtattgtaaacacctgggagctgagatggatcgtttacagccaggtgaggaagtggagatagctgagctcactacagattataacaatgaaatggaagttgaaggccctgaagatcaaatggtattctcagagcaggcagctaataaagatgtcaacggtcaggagtccactcctggaattgttccagatgcggttcaagtccacactgaagagcaacagaagagtcatccctcagaaagtcttgacacagatagtcttcttattgctgtatcatcccaacatacagtgaatactgaattggaaaaacagatttctaatgaagttgatagtgaagacctgaaaatgtcttctgaagtgaagcatatttgtggcgaagatcaaattgaagataaaatggaagtgacagaaaacattgaagtcgttacacaccagatcactgtgcagcaagaacaactgcagttgttagaggaacctgaaacagtggtatccagagaagaatcaaggcctccaaaattagtcatggaatctgtcactcttccactagaaaccttagtgtccccacatgaggaaagtatttcattatgtcctgaggaacagttggttatagaaaggctacaaggagaaaaggaacagaaagaaaattctgaactttctactggattgatggactctgaaatgactcctacaattgagggttgtgtgaaagatgtttcataccaaggaggcaaatctataaagttatcatctgagacagagtcatcattttcatcatcagcagacataagcaaggcagatgtgtcttcctccccaacaccttcttcagacttgccttcgcatgacatgctgcataattacccttcagctcttagttcctctgctggaaacatcatgccaacaacttacatctcagtcactccaaaaattggcatgggtaaaccagctattactaagagaaaattttctcctggtagacctcggtccaaacagggggcttggagtacccataatacagtgagcccaccttcctggtccccagacatttcagaaggtcgggaaatttttaaacccaggcagcttcctggcagtgccatttggagcatcaaagtgggccgtgggtctggatttccaggaaagcggagacctcgaggtgcaggactgtcggggcgaggtggccgaggcaggtcaaagctgaaaagtggaatcggagctgttgtattacctggggtgtctactgcagatatttcatcaaataaggatgatgaagaaaactctatgcacaatacagttgtgttgttttctagcagtgacaagttcactttgaatcaggatatgtgtgtagtttgtggcagttttggccaaggagcagaaggaagattacttgcctgttctcagtgtggtcagtgttaccatccatactgtgtcagtattaagatcactaaagtggttcttagcaaaggttggaggtgtcttgagtgcactgtgtgtgaggcctgtgggaaggcaactgacccaggaagactcctgctgtgtgatgactgtgacataagttatcacacctactgcctagaccctccattgcagacagttcccaaaggaggctggaagtgcaaatggtgtgtttggtgcagacactgtggagcaacatctgcaggtctaagatgtgaatggcagaacaattacacacagtgcgctccttgtgcaagcttatcttcctgtccagtctgctatcgaaactatagagaagaagatcttattctgcaatgtagacaatgtgatagatggatgcatgcagtttgtcagaacttaaatactgaggaagaagtggaaaatgtagcagacattggttttgattgtagcatgtgcagaccctatatgcctgcgtctaatgtgccttcctcagactgctgtgaatcttcacttgtagcacaaattgtcacaaaagtaaaagagctagacccacccaagacttatacccaggatggtgtgtgtttgactgaatcagggatgactcagttacagagcctcacagttacagttccaagaagaaaacggtcaaaaccaaaattgaaattgaagattataaatcagaatagcgtggccgtccttcagacccctccagacatccaatcagagcattcaagggatggtgaaatggatgatagtcgagaaggagaacttatggattgtgatggaaaatcagaatctagtcctgagcgggaagctgtggatgatgaaactaagggagtggaaggaacagatggtgtcaaaaagagaaaaaggaaaccatacagaccaggtattggtggatttatggtgcggcaaagaagtcgaactgggcaagggaaaaccaaaagatctgtgatcagaaaagattcctcaggctctatttccgagcagttaccttgcagagatgatggctggagtgagcagttaccagatactttagttgatgaatctgtttctgttactgaaagcactgaaaaaataaagaagagataccgaaaaaggaaaaataagcttgaagaaactttccctgcctatttacaagaagctttctttggaaaagatcttctagatacaagtagacaaagcaagataagtttagataatctgtcagaagatggagctcagcttttatataaaacaaacatgaacacaggtttcttggatccttccttagatccactacttagttcatcctcggctccaacaaaatctggaactcacggtcctgctgatgacccattagctgatatttctgaagttttaaacacagatgatgacattcttggaataatttcagatgatctagcaaaatcagttgatcattcagatattggtcctgtcactgatgatccttcctctttgcctcagccaaatgtcaatcagagttcacgaccattaagtgaagaacagctagatgggatcctcagtcctgaactagacaaaatggtcacagatggagcaattcttggaaaattatataaaattccagagcttggcggaaaagatgttgaagacttatttacagctgtacttagtcctgcgaacactcagccaactccattgccacagcctcccccaccaacacagctgttgccaatacacaatcaggatgctttttcacggatgcctctcatgaatggccttattggatccagtcctcatctcccacataattctttgccacctggaagcggactgggaactttctctgcaattgcacaatcctcttatcctgatgccagggataaaaattcagcctttaatccaatggcaagtgatcctaacaactcttggacatcatcagctcccactgtggaaggagaaaatgacacaatgtcgaatgcccagagaagcacgcttaagtgggagaaagaggaggctctgggtgaaatggcaactgttgccccagttctctacaccaatattaatttccccaacttaaaggaagaattccctgattggactactagagtgaagcaaattgccaaattgtggagaaaagcaagctcacaagaaagagcaccatatgtgcaaaaagccagagataacagagctgctttacgcattaataaagtacagatgtcaaatgattccatgaaaaggcagcaacagcaagatagcattgatcccagctctcgtattgattcggagctttttaaagatcctttaaagcaaagagaatcagaacatgaacaggaatggaaatttagacagcaaatgcgtcagaaaagtaagcagcaagctaaaattgaagccacacagaaacttgaacaggtgaaaaatgagcagcagcagcagcaacaacagcaatttggttctcagcatcttctggtgcagtctggttcagatacaccaagtagtgggatacagagtcccttgacacctcagcctggcaatggaaatatgtctcctgcacagtcattccataaagaactgtttacaaaacagccacccagtacccctacgtctacatcttcagatgatgtgtttgtaaagccacaagctccacctcctcctccagccccatcccggattcccatccaggatagtctttctcaggctcagacttctcagccaccctcaccgcaagtgttttcacctgggtcctctaactcacgaccaccatctccaatggatccatatgcaaaaatggttggtacccctcgaccacctcctgtgggccatagtttttccagaagaaattctgctgcaccagtggaaaactgtacacctttatcatcggtatctaggccccttcaaatgaatgagacaacagcaaataggccatcccctgtcagagatttatgttcttcttccacgacaaataatgacccctatgcaaaacctccagacacacctaggcctgtgatgacagatcaatttcccaaatccttgggcctatcccggtctcctgtagtttcagaacaaactgcaaaaggccctatagcagctggaaccagtgatcactttactaaaccatctcctagggcagatgtgtttcaaagacaaaggatacctgactcatatgcacgacccttgttgacacctgcacctcttgatagtggtcctggaccttttaagactccaatgcaacctcctccatcctctcaggatccttatggatcagtgtcacaggcatcaaggcgattgtctgttgacccttatgaaaggcctgctttgacaccaagacctatagataatttttctcataatcagtcaaatgatccatatagtcagcctccccttaccccacatccagcagtgaatgaatcttttgcccatccttcaagggctttttcccagcctggaaccatatcaaggccaacatctcaggacccatactcccaacccccaggaactccacgacctgttgtagattcttattcccaatcttcaggaacagctaggtccaatacagacccttactctcaacctcctggaactccccggcctactactgttgacccatatagtcagcagccccaaaccccaagaccatctacacaaactgacttgtttgttacacctgtaacaaatcagaggcattctgatccatatgctcatcctcctggaacaccaagacctggaatttctgtcccttactctcagccaccagcaacaccaaggccaaggatttcagagggttttactaggtcctcaatgacaagaccagtcctcatgccaaatcaggatcctttcctgcaagcagcacaaaaccgaggaccagctttacctggcccgttggtaaggccacctgatacatgttcccagacacctaggccccctggacctggtctttcagacacatttagccgtgtttccccatctgctgcccgtgatccctatgatcagtctccaatgactccaagatctcagtctgactcttttggaacaagtcaaactgcccatgatgttgctgatcagccaaggcctggatcagaggggagcttctgtgcatcttcaaactctccaatgcactcccaaggccagcagttctctggtgtctcccaacttcctggacctgtgccaacttcaggagtaactgatacacagaatactgtaaatatggcccaagcagatacagagaaattgagacagcggcagaagttacgtgaaatcattctccagcagcaacagcagaagaagattgcaggtcgacaggagaaggggtcacaggactcacccgcagtgcctcatccagggcctcttcaacactggcaaccagagaatgttaaccaggctttcaccagacccccacctccctatcctgggaacattaggtctcctgttgcccctcctttaggacctagatatgctgttttcccaaaagatcagcgtggaccctatcctcctgatgttgctagtatggggatgagacctcatggatttagatttggatttccaggaggtagtcatggtaccatgccgagtcaagagcgcttccttgtgcctcctcagcaaatacagggatctggagtttctccacagctaagaagatcagtatctgtagatatgcctaggcctttaaataactcacaaatgaataatccagttggacttcctcagcatttttcaccacagagcttgccagttcagcagcacaacatactgggccaagcatatattgaactgagacatagggctcctgacggaaggcaacggctgcctttcagtgctccacctggcagcgttgtagaggcatcttctaatctgagacatggaaacttcattccccggccagactttccgggccctagacacacagaccccatgcgacgacctccccagggtctacctaatcagctacctgtgcacccagatttggaacaagtgccaccatctcaacaagagcaaggtcattctgtccattcatcttctatggtcatgaggactctgaaccatccactaggtggtgaattttcagaagctcctttgtcaacatctgtaccgtctgaaacaacgtctgataatttacagataaccacccagccttctgatggtctagaggaaaaacttgattctgatgacccttctgtgaaggaactggatgttaaagaccttgagggggttgaagtcaaagacttagatgatgaagatcttgaaaacttaaatttagatacagaggatggcaaggtagttgaattggatactttagataatttggaaactaatgatcccaacctggatgacctcttaaggtcaggagagtttgatatcattgcatatacagatccagaacttgacatgggagataagaaaagcatgtttaatgaggaactagaccttccaattgatgataagttagataatcagtgtgtatctgttgaaccaaaaaaaaaggaacaagaaaacaaaactctggttctctctgataaacattcaccacagaaaaaatccactgttaccaatgaggtaaaaacggaagtactgtctccaaattctaaggtggaatccaaatgtgaaactgaaaaaaatgatgagaataaagataatgttgacactccttgctcacaggcttctgctcactcagacctaaatgatggagaaaagacttctttgcatccttgtgatccagatctatttgagaaaagaaccaatcgagaaactgctggccccagtgcaaatgtcattcaggcatccactcaactacctgctcaagatgtaataaactcttgtggcataactggatcaactccagttctctcaagtttacttgctaatgagaaatctgataattcagacattaggccatcggggtctccaccaccaccaactctgccggcctccccatccaatcatgtgtcaagtttgcctcctttcatagcaccgcctggccgtgttttggataatgccatgaattctaatgtgacagtagtctctagggtaaaccatgttttttctcagggtgtgcaggtaaacccagggctcattccaggtcaatcaacagttaaccacagtctggggacaggaaaacctgcaactcaaactgggcctcaaacaagtcagtctggtaccagtagcatgtctggaccccaacagctaatgattcctcaaacattagcacagcagaatagagagaggccccttcttctagaagaacagcctctacttctacaggatcttttggatcaagaaaggcaagaacagcagcagcaaagacagatgcaagccatgattcgtcagcgatcagaaccgttcttccctaatattgattttgatgcaattacagatcctataatgaaagccaaaatggtggcccttaaaggtataaataaagtgatggcacaaaacaatctgggcatgccaccaatggtgatgagcaggttcccttttatgggccaggtggtaactggaacacagaacagtgaaggacagaaccttggaccacaggccattcctcaggatggcagtataacacatcagatttctaggcctaatcctccaaattttggtccaggctttgtcaatgattcacagcgtaagcagtatgaagagtggctccaggagacccaacagctgcttcaaatgcagcagaagtatcttgaagaacaaattggtgctcacagaaaatctaagaaggccctttcagctaaacaacgtactgccaagaaagctgggcgtgaatttccagaggaagatgcagaacaactcaagcatgttactgaacagcaaagcatggttcagaaacagctagaacagattcgtaaacaacagaaagaacatgctgaattgattgaagattatcggatcaaacagcagcagcaatgtgcaatggccccacctaccatgatgcccagtgtccagccccagccacccctaattccaggtgccactccacccaccatgagccaacccacctttcccatggtgccacagcagcttcagcaccagcagcacacaacagttatttctggccatactagccctgttagaatgcccagtttacctggatggcaacccaacagtgctcctgcccacctgcccctcaatcctcctagaattcagcccccaattgcccagttaccaataaaaacttgtacaccagccccagggacagtctcaaatgcaaatccacagagtggaccaccacctcgggtagaatttgatgacaacaatccctttagtgaaagttttcaagaacgggaacgtaaggaacgtttacgagaacagcaagagagacaacggatccaactcatgcaggaggtagatagacaaagagctttgcagcagaggatggaaatggagcagcatggtatggtgggctctgagataagtagtagtaggacatctgtgtcccagattcccttctacagttccgacttaccttgtgattttatgcaacctctaggaccccttcagcagtctccacaacaccaacagcaaatggggcaggttttacagcagcagaatatacaacaaggatcaattaattcaccctccacccaaactttcatgcagactaatgagcgaaggcaggtaggccctccttcatttgttcctgattcaccatcaatccctgttggaagcccaaatttttcttctgtgaagcagggacatggaaatctttctgggaccagcttccagcagtccccagtgaggccttcttttacacctgctttaccagcagcacctccagtagctaatagcagtctcccatgtggccaagattctactataacccatggacacagttatccgggatcaacccaatcgctcattcagttgtattctgatataatcccagaggaaaaagggaaaaagaaaagaacaagaaagaagaaaagagatgatgatgcagaatccaccaaggctccatcaactccccattcagatataactgccccaccgactccaggcatctcagaaactacctctactcctgcagtgagcacacccagtgagcttcctcaacaagccgaccaagagtcggtggaaccagtcggcccatccactcccaatatggcagcaggccagctatgtacagaattagagaacaaactgcccaatagtgatttctcacaagcaactccaaatcaacagacgtatgcaaattcagaagtagacaagctctccatggaaacccctgccaaaacagaagagataaaactggaaaaggctgagacagagtcctgcccaggccaagaggagcctaaattggaggaacagaatggtagtaaggtagaaggaaacgctgtagcctgtcctgtctcctcagcacagagtcctccccattctgctggggcccctgctgccaaaggagactcagggaatgaacttctgaaacacttgttgaaaaataaaaagtcatcttctcttttgaatcaaaaacctgagggcagtatttgttcagaagatgactgtacaaaggataataaactagttgagaagcagaacccagctgaaggactgcaaactttgggggctcaaatgcaaggtggttttggatgtggcaaccagttgccaaaaacagatggaggaagtgaaaccaagaaacagcgaagcaaacggactcagaggacgggtgagaaagcagcacctcgctcaaagaaaaggaaaaaggacgaagaggagaaacaagctatgtactctagcactgacacgtttacccacttgaaacaggtgaggcagctctctctgctccctctaatggaaccaatcattggagtgaactttgcgcactttcttccttatggcagtggccaatttaatagtgggaatcgacttctaggaacttttggcagtgctaccctggaaggggtttcggactactattctcagttgatctacaagcagaataatttaagtaatcctccaacaccccctgcctctcttcctcctacaccacctcctatggcttgtcagaagatggccaatggttttgcaacaactgaagaacttgctggaaaagccggagtgttagtgagccatgaagttaccaaaactctaggacctaaaccatttcagctgcccttcagaccccaggacgacttgttggcccgagctcttgctcagggccccaagacagttgatgtgccagcctccctcccaacaccacctcataacaatcaggaagaattaaggatacaggatcactgtggtgatcgagatactcctgacagttttgttccctcatcctctcctgagagtgtggttggggtagaagtgagcaggtatccagatctgtcattggtcaaggaggagcctccagaaccggtgccgtcccccatcattccaattcttcctagcactgctgggaaaagttcagaatcaagaaggaatgacatcaaaactgagccaggcactttatattttgcgtcaccttttggtccttccccaaatggtcccagatcaggtcttatatctgtagcaattactctgcatcctacagctgctgagaacattagcagtgttgtggctgcattttccgaccttcttcacgtccgaatccctaacagctatgaggttagcagtgctccagatgtcccatccatgggtttggtcagtagccacagaatcaacccgggtttggagtatcgacagcatttacttctccgtgggcctccgccaggatctgcaaaccctcccagattagtgagctcttaccggctgaagcagcctaatgtaccatttcctccaacaagcaatggtctttctggatataaggattctagtcatggtattgcagaaagcgcagcactcagaccacagtggtgttgtcattgtaaagtggttattcttggaagtggtgtgcggaaatctttcaaagatctgacccttttgaacaaggattcccgagaaagcaccaagagggtagagaaggacattgtcttctgtagtaataactgctttattctttattcatcaactgcacaagcgaaaaactcagaaaacaaggaatccattccttcattgccacaatcacctatgagagaaacgccttccaaagcatttcatcagtacagcaacaacatctccactttggatgtgcactgtctcccccagctcccagagaaagcttctccccctgcctcaccacccatcgccttccctcctgcttttgaagcagcccaagtcgaggccaagccagatgagctgaaggtgacagtcaagctgaagcctcggctaagagctgtccatggtgggtttgaagattgcaggccgctcaataaaaaatggagaggaatgaaatggaagaagtggagcattcatattgtaatccctaaggggacatttaaaccaccttgtgaggatgaaatagatgaatttctaaagaaattgggcacttcccttaaacctgatcctgtgcccaaagactatcggaaatgttgcttttgtcatgaagaaggtgatggattgacagatggaccagcaaggctactcaaccttgacttggatctgtgggtccacttgaactgcgctctgtggtccacggaggtctatgagactcaggctggtgccttaataaatgtggagctagctctgaggagaggcctacaaatgaaatgtgtcttctgtcacaagacgggtgccactagtggatgccacagatttcgatgcaccaacatttatcacttcacttgcgccattaaagcacaatgcatgttttttaaggacaaaactatgctttgccccatgcacaaaccaaagggaattcatgagcaagaattaagttactttgcagtcttcaggagggtctatgttcagcgtgatgaggtgcgacagattgctagcatcgtgcaacgaggagaacgggaccatacctttcgcgtgggtagcctcatcttccacacaattggtcagctgcttccacagcagatgcaagcattccattctcctaaagcactcttccctgtgggctatgaagccagccggctgtactggagcactcgctatgccaataggcgctgccgctacctgtgctccattgaggagaaggatgggcgcccagtgtttgtcatcaggattgtggaacaaggccatgaagacctggttctaagtgacatctcacctaaaggtgtctgggataagattttggagcctgtggcatgtgtgagaaaaaagtctgaaatgctccagcttttcccagcgtatttaaaaggagaggatctgtttggcctgaccgtctctgcagtggcacgcatagcggaatcacttcctggggttgaggcatgtgaaaattataccttccgatacggccgaaatcctctcatggaacttcctcttgccgttaaccccacaggttgtgcccgttctgaacctaaaatgagtgcccatgtcaagaggtttgtgttaaggcctcacaccttaaacagcaccagcacctcaaagtcatttcagagcacagtcactggagaactgaacgcaccttatagtaaacagtttgttcactccaagtcatcgcagtaccggaagatgaaaactgaatggaaatccaatgtgtatctggcacggtctcggattcaggggctgggcctgtatgctgctcgagacattgagaaacacaccatggtcattgagtacatcgggactatcattcgaaacgaagtagccaacaggaaagagaagctttatgagtctcagaaccgtggtgtgtacatgttccgcatggataacgaccatgtgattgacgcgacgctcacaggagggcccgcaaggtatatcaaccattcgtgtgcacctaattgtgtggctgaagtggtgacttttgagagaggacacaaaattatcatcagctccagtcggagaatccagaaaggagaagagctctgctatgactataagtttgactttgaagatgaccagcacaagattccgtgtcactgtggagctgtgaactgccggaagtggatgaactgaaatgcattccttgctagctcagcgggcggcttgtccctaggaagaggcgattcaacacaccattggaattttgcagacagaaagagatttttgttttctgttttatgactttttgaaaaagcttctgggagttctgatttcctcagtcctttaggttaaagcagcgccaggaggaagctgacagaagcagcgttcctgaagtggccgaggttaaacggaatcacagaatggtccagcacttttgcttttttttcttttccttttcttttttttttgtttgttttttgttttgtttttcccttgtgggtgggtttcattgttttggttttctagtctcactaaggagaaacttttactggggcaaagagccgatggctgccctgccccgggcaggggccttcctatgaatgtaagactgaaatcaccagcgagggggacagagagtgctggccacggccttattaaaaaggggcaggccctctaacttcaaaatgtttttaaataaagtagacaccactgaacaaggaatgtactgaaatgacttccttagggatagagctaagggataataacttgcactaaatacatttaaatacttgattccatgagtcagtttattgtagtttttgatttctgtaaaataagagaaacttttgtatttattattgaataagtgaatgaagctatttttaaataaagttagaagaaagccaagctgctgctgttacctgcagaactaacaaaccctgttactttgtacagatatgtaaatattttgagaaaaaatacagtataaaaatagttattgaccaaatgctaccaggctctgcagcagctcgggggcttataaaatgttcatagggatgttacaatataattttgtgttataaaatatgccattataattatgtaataaccaaaatttcaacctagagtgttgggggttttttggaaaccgcagtctattagtactcaatggttttatacaccttacttctgacagagcggggcgtatgctacgactacaacttttatagctgttttggtaatttaaactaattttttcatattatattgttgcatccctacttcttcagtcaggtttttttgtgcttacaatttgtgataactgtgaataactgcttaaaaatacacccaaatggaggctgaattttttcttcagcaaaagtagttttgattagaactttgtttcagccacagagaatcatgtaaacgtaataggatcatgtagcagaaacttaaatctaaccctttagccttctatttaacacaaaaatttgaaaaagttaaaaaaaaaaaggagatgtgattatgcttacagctgcaggactctggcaatagggtttttggaagatgtaattttaaaatgtgtttgtatgaactgtttgtttacatttctttaataaaaaaaacactgttttgtgtttgcttgtagaaacttaatcagcattttgaaccaggttagctttttattttgtacttaaaattctggtactgacacttcacaggctaagtataaaatgaagttttgtgtgcacaattcaagtggactgtaaactgttggtatattcagtgatgcagttctgaacttgtatatggcatgatgtatttttatcttacagaataaatcaattgtatatatttttctcttgataaatagctgtatgaaatttgtttcctgaatatttttcttctcttgtacaatatcctgacatcctaccagtatttgtcctaccgggtttttgttgttttctgttctgtataatagtatctaatgttggcaaaaattgaattttttgaagtatacagagtgttatgggttttggaatttgtggacacagatttagaagatcaccatttacaaataaaatattttacatct

SEQ ID NO: 307400 - DNA, 14907 bp, Artificial Sequence
  derived and/or modified sequence
atgagcagcgaggaggacaagagcgtggagcagccccagccccccccccccccacctgaagagcctggcgcccccgcacctagcccagccgcagcagacaagcgccctcgtggcagaccaaggaaagatggagcgtccccgtttcagagggcccgcaaaaagcctcgatccagaggaaagaccgccgtagaggacgaggactccatggatgggctcgaaaccacggaaacggagaccattgttgagacggagataaaggagcagagcgctgaggaggatgccgaggccgaagttgataactctaaacagctgatcccaacactgcagcgctccgtttctgaggagagtgctaattccctcgtttccgtgggtgtggaagctaagattagcgagcagttgtgcgccttttgttattgtggcgaaaagagcagcctaggccaaggggatttaaagcagtttcggattacaccggggttcattctgccttggaggaaccagcccagtaataagaaggacattgatgacaatagcaacggcacctacgaaaagatgcagaacagcgcacctcgcaagcaaagggggcagcgcaaggaaaggagcccacagcagaatatcgtgtcttgtgtcagtgtttctacccagacggcttctgatgaccaggctggcaagctgtgggatgagctgagtcttgtaggactgcccgacgctatagacattcaggccctgtttgacagtaccggcacctgctgggcgcatcacaggtgcgtggaatggtcccttggagtatgccaaatggaggaacctttactggtgaacgtagacaaagcagttgtctctggatcaacagaacgatgcgccttttgtaagcacctcggagctaccatcaagtgttgcgaagagaagtgcacacagatgtatcattacccctgtgcggcaggcgccggcaccttccaggacttcagccatatttttttattatgccctgagcacatagaccaagcccctgagagaagcaaggaagacgcgaattgcgcagtctgtgacagtcccggtgatttgttggaccaattcttctgcactacttgtggccaacattatcacggaatgtgtctggatattgcagtgacccccctgaagagagccggatggcagtgtccagagtgtaaagtttgccaaaactgtaagcagagcggggaagactcgaaaatgttggtgtgtgacacctgcgataaaggctatcacacattctgcctgcagcctgtgatgaagtcagtcccaactaatgggtggaagtgcaagaattgccgcatctgtatcgagtgtggcacccggagttctagtcagtggcaccacaattgcctcatatgtgataattgttaccagcagcaagacaatttgtgccccttttgcggcaagtgttaccaccccgagctgcagaaagatatgcttcattgcaacatgtgtaaaagatgggtccaccttgagtgtgataagccaacagatcatgagctcgacacccagctcaaagaggaatatatctgcatgtattgtaaacatctgggcgccgaaatggatcgcctgcagccaggagaagaagtggagatcgcagagctcactaccgactataataatgagatggaagtggagggacctgaggatcagatggtgttctctgagcaagccgcaaacaaggatgtcaacggacaggagagcacccccgggatcgttcccgatgccgtgcaggttcacaccgaggaacagcagaagtctcatccaagtgagagcttagataccgacagcttactgatcgcagtgagttcacagcataccgttaacactgaactggagaagcaaatctctaacgaggtggacagtgaagatctaaagatgtcttcggaagtgaaacacatctgtggcgaggatcagatcgaggacaagatggaagtgaccgagaatattgaggtagtgacccatcagataacagtccagcaggaacaactgcaactgttggaggaacctgagacggtagtgagtcgtgaagagagccggcctcctaagctggtaatggagagtgttacactccctctggaaacactggtgtcgccgcatgaggagtcaatctcgctgtgccctgaggagcagctagtaatcgaacggctgcagggagagaaggagcagaaggagaatagcgagctgtctaccggcctgatggatagcgaaatgacaccaactatcgaaggatgcgttaaggatgtatcgtaccaggggggcaaaagcataaagttatcaagtgagaccgagtcctccttctcatcctctgcagatatatcaaaggcagacgtaagctcaagcccaacgccaagttccgatcttcctagtcacgacatgctgcacaactatccctccgctctgtcctcatcggccggaaacattatgcccaccacttatatttccgtgacacccaaaatcggcatggggaaaccagctatcacaaagcggaagttcagtcctggtaggccgagatctaaacagggtgcatggtctacacacaatacggtgtcacctccatcatggagcccagatatctccgaggggcgggaaatctttaaaccacgacagctgcccggctcagccatctggagcattaaagtcggacgtggaagcggatttcctggcaagaggcgaccaaggggtgctggattgtccggccgtggggggagaggaaggtccaagctcaaatcaggaatcggagctgtagttctacccggcgtcagcaccgcagacattagcagcaataaagacgatgaagaaaattccatgcataacacagtagtcctgttctcctcctctgacaagtttacccttaaccaagatatgtgcgtggtgtgtggatctttcggtcagggagctgaaggcagactgctggcttgttcgcagtgtggtcagtgctatcacccatactgtgttagcattaagatcacaaaggttgtgctctcaaaaggctggcgttgtctggaatgtaccgtgtgcgaagcctgtggcaaggcaacagatccaggtaggcttctgctctgcgatgattgtgatattagttaccatacctattgcctggacccaccacttcaaaccgtccccaaaggaggttggaagtgcaaatggtgcgtgtggtgtcgccattgcggtgccacaagtgctggcttaaggtgtgaatggcagaataactatacccagtgcgccccatgtgcaagtctttcctcttgccccgtgtgttatcggaactacagagaagaggacctgatcctccagtgcagacagtgcgatcgctggatgcatgccgtttgtcaaaatctaaacacagaggaggaggtggaaaatgtcgccgatattggcttcgactgctccatgtgtcggccgtatatgcccgccagcaacgtccctagctccgactgttgcgaaagttccctagtcgctcagatcgtaactaaggtcaaggaactcgaccctcccaagacctacacacaggatggggtgtgcttaacagaatcagggatgacacagctccaatcactgactgtgactgtcccccggcgaaaacgcagcaagccgaagctgaaactaaagatcataaaccaaaactccgtagcagttctccagaccccacctgacatccagtcagaacactcacgcgatggtgagatggatgactcaagggagggcgagctgatggactgtgatgggaagtcggagtcctcccccgagagggaagccgtcgatgatgaaaccaagggcgtcgaaggaactgacggcgtgaagaaaaggaaaagaaaaccatatagaccaggtattggaggatttatggttagacaaaggagtagaactggccagggcaaaaccaaacgttccgtcattcggaaggatagtagcgggtcgatatccgagcagctgccttgtcgtgacgacgggtggagcgaacagctccccgacaccctcgtcgatgagtctgtctctgtcacggaatcgaccgagaagataaagaagcggtaccggaagagaaagaacaagctcgaggagactttccctgcatacctgcaagaggcctttttcggtaaagacctgcttgataccagcagacaatctaagatctctctagataatctctccgaggatggcgcacaactcttatacaagactaacatgaacaccggtttcctcgatccatcattagaccctctcctgtcctcaagctctgctccgaccaaatctggcacacatggcccggctgacgacccgttagcagatatttccgaggtgctgaataccgatgatgatattctggggatcatcagtgacgatctggctaagtccgtggaccattcggatattggccctgtaacagacgatccgtcttccctgccgcaacccaacgtgaatcagtctagcagaccactttccgaggaacagttggatggcatactctcgcccgagctggacaagatggtaacagacggcgcaatcctcggaaagctgtacaagatccccgagctgggaggcaaagacgtggaagatctgttcacagcggtgttgtcccctgcaaacacccagcccacaccactgccccagccgcctcccccgacgcaattattaccaatccataaccaagacgcctttagtcgcatgcctctcatgaatggactcatcggctcctctcctcacttacctcataacagtttgcctccaggcagtggactcggcacctttagtgctatagcgcaaagttcataccccgacgcacgagataagaacagcgcgtttaatcccatggcctcagacccaaataacagctggaccagtagcgcccctacggttgaaggcgagaatgacaccatgtccaatgctcagcggtcaacgcttaagtgggaaaaggaggaagcccttggtgagatggcaaccgttgctcctgtgctctacactaacatcaatttccccaatctgaaggaagaatttcctgactggacaacccgcgttaagcaaatcgctaagctgtggcgaaaagcctctagtcaggaacgagccccatacgttcaaaaggccagggacaatagagctgcgctgaggataaataaagtgcaaatgagtaatgacagtatgaagcggcagcagcagcaggacagtatagacccctcttcccgcattgacagtgagttgttcaaggaccctctgaaacagagggagagtgagcacgagcaggagtggaagtttaggcagcagatgcgtcagaagtcgaagcagcaggcgaaaattgaggccacacaaaaacttgaacaagtgaaaaatgaacagcaacagcagcaacaacagcagttcgggtcccagcatctgctggtgcagtctggctccgatactccatcttcaggtatccagagcccgcttacacctcagcctggtaatggtaatatgtccccagcccagtcttttcacaaagaactatttacgaagcagccacctagcacgccaacatcgactagtagtgatgatgtgttcgttaagcctcaggctccccctccaccaccagcccccagtagaatccccatacaggatagtctctctcaagcccaaacctctcaacctccctcccctcaggtgttctctcctggatcctctaacagccggccaccttcgccgatggacccatacgcgaaaatggtgggaaccccccgaccccctccggtgggccacagtttctcccgcaggaactctgccgcccccgtggagaactgtacccctctctcaagtgtaagtcgcccattgcagatgaacgagacaacagccaacaggcccagtcctgtaagagatctatgcagctcaagcaccactaataatgatccctacgccaagcctccagacactcctcgccctgtcatgacagaccagtttcctaagagtctgggcctgtcccggtcccccgtcgtgtccgagcagaccgcaaagggaccaatagccgcgggaactagcgatcacttcacgaagccaagcccacgggctgacgtgttccagcggcagcgcatcccggactcttatgccaggccactccttactccagcaccgttggactcaggacccgggccattcaagacacccatgcagccaccaccctcttctcaggacccttacggttctgtgtcccaggcttcacgacggctgtcagtggatccctatgagcggccagccctgaccccacgacccatcgacaatttctctcacaatcagtctaatgatccatatagtcagcccccgttgacccctcatcctgccgtcaatgaatcatttgcccaccccagtagggcgtttagtcagccgggtacaatctcgcgcccaacctctcaggacccctacagtcagccccccggcacaccccgccccgtggtggattcctattcccagagttccggcacagcccgatcaaacaccgatccctacagccagcccccgggcacgcctcgcccgaccaccgtggatccatacagccagcagcctcagaccccgagaccctctacccagactgatttgttcgtgacaccagtgacaaaccaaagacatagcgacccctatgcccaccctcctggaactcctaggcccggaatttctgtcccttattctcagcccccagctactccgcgccctaggatatctgagggatttacacgaagcagtatgacaaggccagttctcatgccaaatcaggatccttttctgcaggccgcgcagaaccgtggcccagccttaccggggccacttgtccggcctccagacacctgtagccagacacctcgacctcctgggcctgggttatcagacaccttcagcagggtgtccccatctgctgctcgcgatccttatgatcagtccccaatgacccctcgaagccagtcagacagctttggcacttcgcagacggctcatgacgtggcagatcagcccaggcccggttccgagggttctttttgtgcctcctctaatagcccaatgcatagtcagggccagcagttttcaggggtgtctcagttgcctggacctgtacctacatccggcgttaccgatacacagaacaccgtgaatatggcacaggctgacacagagaagttgcggcagcgccagaaactgcgcgaaattatattgcagcagcagcaacagaagaagattgctggtcggcaagaaaaaggcagtcaggactcccctgctgtgccccaccctggaccgttacagcattggcaacccgaaaacgtgaaccaagccttcacacggccaccacctccataccctggcaacatacggagccccgtggcccctccgctcggacctaggtacgccgtgttccctaaagaccagcgggggccatatcctcccgacgttgcctccatgggcatgagacctcacggctttcgctttggttttcccggtgggagtcatggcacaatgccttctcaggagcggtttctagttccaccccaacaaattcagggatctggtgtgtctccccagctccgtcgatctgtgtccgtcgacatgccccgaccacttaataattcacagatgaacaacccagtgggacttcctcagcacttctcccctcagagcctccctgtgcagcagcataacattctgggacaggcctacatcgaactgcgccatcgcgcccccgatgggcgacagcgactacctttctcggccccgccaggttctgtcgtggaggcatcatccaacctgcggcacgggaactttatccccagacctgattttcccggccctagacataccgatcctatgcgccggcctccacaggggttaccaaaccagctgccggtgcatcccgatctggagcaagtgcccccctcccagcaggaacagggccacagtgtgcacagctcttcgatggtgatgagaacgctgaaccatcctcttggcggcgagttttcagaagcgcccctatctacatctgtgccatctgaaacaacgtctgacaatctccagatcacgacccaaccctccgacgggcttgaggagaagttagattcagacgacccctccgtgaaagagttggacgtaaaggatctcgagggcgttgaagtcaaggacttagacgatgaggatctggagaacctcaatctcgacaccgaagacggcaaggtagtggagcttgacaccttagataacttggaaacaaacgatccaaatctggacgatcttctacggtctggagagttcgatattattgcgtatacagatcctgagttagatatgggcgacaagaagtccatgtttaacgaagaactggacctcccaatcgacgataagctggacaatcagtgtgtgagcgttgagccgaagaagaaggagcaagagaacaagactttggtgctgagcgataagcactcaccccaaaaaaaaagcaccgttacgaatgaagtgaagacagaagtgctgagcccgaatagcaaggtggaaagcaaatgcgaaaccgagaaaaacgatgaaaacaaggataacgtcgacaccccttgttctcaggcttccgcacacagtgatttgaacgacggtgagaagacttccctacacccgtgcgacccagacctctttgagaagcggactaatcgtgagaccgccggtccctccgccaacgtgattcaggctagcacccagttgcctgctcaggacgttattaacagctgcggcataacaggtagcacgcccgtgctgagttcactgctggccaacgaaaagtcagacaatagcgatattagaccctcaggatccccaccacccccgaccctgcccgcctcaccatcaaaccatgtgagctccctgccaccctttatcgctccaccaggaagggttttagacaacgcgatgaacagtaatgtgaccgttgtctcaagagtcaaccatgtgttttcgcagggagttcaagtaaatcccggccttatacccggccagtctactgtcaaccactcattgggcaccggaaaacccgccacacagaccgggccacaaacaagtcagagtggaactagtagcatgtccggccctcagcagttaatgattccgcagaccttggcacagcagaacagggagaggccccttctcctcgaagagcagccgctgctgctgcaggatttgctggaccaagagagacaagagcagcagcagcaaaggcagatgcaggctatgatccgccaaaggagcgagccattcttcccaaacatcgattttgacgctattacagacccaattatgaaggctaaaatggtcgcattgaagggtattaataaagtgatggcgcagaacaacctgggtatgcccccaatggtaatgtcccgatttccgtttatggggcaggttgtgaccgggacccaaaactcagagggtcaaaacctgggcccccaagctatcccgcaggatggaagcataactcaccagatttctcgccccaacccccctaacttcgggcctggattcgtcaatgattcacagcgcaaacagtacgaagagtggcttcaggagactcagcagctcttgcagatgcaacagaagtacctggaagagcagatcggtgctcatagaaagagcaaaaaagccctctccgctaagcagagaactgctaagaaggctggcagggagtttccagaagaagacgcagaacaactaaagcacgtcaccgaacagcaaagcatggtgcagaaacaactggaacagatccgcaagcagcagaaggagcatgccgaactgattgaggactatagaatcaagcaacagcaacagtgtgcgatggcgccaccgaccatgatgccatccgttcagcctcagcctcctctgattccaggcgccacacccccaaccatgtcccagcccactttccctatggtcccccagcagctgcagcatcagcagcacacaacagtgatcagcggccacacaagccccgttcggatgcccagtttacccggatggcagcccaactcggcccctgctcatctacctcttaatcccccaaggattcaacctcccatcgcccagctcccaattaaaacgtgtactcccgccccaggcaccgtgtcaaacgcaaacccacaaagcggacctcccccgcgggtggagttcgacgataataatcctttttcagaaagcttccaggaacgggaacgcaaggaaagactgagggaacagcaagaacgacagcgcatacagttgatgcaagaggtcgacaggcaacgagcgttgcagcaaaggatggaaatggagcagcacggcatggtcggttccgagatctcaagtagtagaaccagtgtctcccagatccccttttactcatctgacctgccctgtgattttatgcagcccctaggacccctacaacagtccccccagcatcagcaacagatgggacaggttctgcagcaacagaacatccagcaggggagtataaacagcccatccacccagactttcatgcaaacaaacgagcggcgacaggtcggacccccttctttcgttccggactcccctagcatcccagtaggaagcccaaacttctcaagcgttaaacaggggcacggaaatctctcgggcactagttttcagcagtcacctgttcgtccctcctttacaccagctttgcccgccgcaccccccgtggctaactctagtttaccctgcggtcaagattcgactataacccatgggcatagttaccccggatccacgcagagcttgatacagctgtattctgacattatcccagaagaaaagggcaaaaaaaagcggacaagaaagaaaaagagagacgatgatgcagagtcgacgaaagctccttccacgccgcacagtgatatcactgcaccacccactcccgggattagcgaaaccacctctacaccggcagtgagcaccccatctgaactgccgcagcaggctgaccaggagtccgtggagcctgtgggtcccagcacccctaatatggccgccgggcagctctgtacagagttggagaataagctgccaaacagcgatttcagccaggcaactcccaatcagcagacctatgcaaatagtgaagtggataaactctcaatggaaacccctgcaaaaacagaagagattaaattggagaaagccgagaccgaaagctgtcccggacaggaggagccgaaactggaagaacagaatggcagcaaggtcgaagggaacgctgtggcgtgccccgtctcctcagctcaatcgcctccacacagtgcaggagcacccgcagccaaaggagactcaggaaatgagctgctaaagcacctgcttaaaaataagaagtcctcatctcttctgaatcagaagcctgagggatcgatctgcagtgaggacgactgcacaaaggataacaaactggtcgagaaacaaaaccctgccgagggtctgcagactttaggggcacaaatgcagggcggattcggatgcggtaatcaattgccaaagactgacgggggctctgaaacaaaaaagcagcgcagcaaacgcacacagaggacgggagagaaggcggccccacggtccaaaaaacgtaaaaaggatgaggaagagaaacaagctatgtattcatctactgacacgtttacgcatctcaagcaggttagacagctgagcctcctccctctcatggaacccatcattggagttaactttgcccattttcttccgtacggaagcggtcaattcaatagtgggaaccgcctgctgggaaccttcgggtccgcaaccctggaaggggtcagcgattattattcccagctgatttacaaacaaaacaatctgtctaacccacccacacctcccgcctctctgcctcctacacccccccctatggcctgtcaaaaaatggctaacggctttgctactactgaagagctggccggaaaggctggcgtcctggtttctcatgaggtgacaaagacccttggccccaagcccttccagcttcctttccgcccccaagatgatctcttagcccgtgcgctggcacaaggacctaaaactgtggacgtccccgcctcactgcctactccaccccacaacaaccaggaggagttacgcatccaagaccactgcggggaccgcgacacccccgatagcttcgtcccgtcgtcttcaccagagagtgtggtgggtgtcgaagtgagccgatacccagacctgtcattagtgaaggaagaaccaccagagcccgtgcccagccctatcattcccatccttccttctactgctggtaaaagctcagagtcccggagaaatgacattaaaacagaacccgggacactgtacttcgcttccccctttgggccttcaccgaatggcccacggtcaggtctcattagcgtcgctataacacttcacccgaccgctgccgagaatatttcctccgtggtggcagcgttctcagacctgttacacgtgcgtatacctaacagttatgaggtgagctccgcccctgatgtgccctctatgggcctcgtgtcaagccatcgcataaacccagggctggagtacaggcagcacctactgttgcggggcccgccccctggtagcgcaaatcccccccgccttgtgtcatcgtacagactgaagcagccgaatgtgcccttcccccctactagtaacggcttatcgggatataaagatagctcacacgggatcgccgaatctgcggctctgagaccccagtggtgttgccactgtaaggtggtcattctgggatcaggagtgcgtaagtccttcaaggatcttaccctcttaaacaaagatagccgcgagtctacgaaaagagtggagaaggacattgtcttctgcagtaacaattgtttcatcctctactcatccacggcccaggccaagaactccgaaaataaggagtccatccctagcctgcctcaaagcccaatgagggaaacccccagtaaagccttccaccagtatagcaataacatcagtacactcgacgtgcattgtctgccccaactgcccgagaaggcgagtccccccgcttctcctcctatcgcattcccgcctgcgtttgaggcagcccaagtggaagctaagcccgatgaactcaaagtgaccgttaaacttaagccaaggctgcgagccgtacacggcggtttcgaagattgcagacccctgaacaagaaatggcggggaatgaagtggaagaaatggagcatccatattgtcatacctaagggaaccttcaaaccaccttgcgaggacgaaatcgacgagttcctgaagaaattggggaccagccttaagcctgatccagtgccaaaagactatcgaaagtgttgcttctgtcatgaggagggcgacggacttaccgacgggcctgcccgcttgcttaatttggacttagacctctgggtgcacctcaactgcgccctgtggtccactgaggtgtacgaaacccaggccggggctctgatcaatgttgaactcgcccttcgcagaggactccaaatgaagtgcgttttttgccataaaactggggccaccagcggttgccacaggttccggtgcacaaatatctatcacttcacctgcgctattaaagcccagtgcatgttctttaaggataaaaccatgctgtgccctatgcacaaaccgaaaggcattcacgaacaggaactaagttacttcgcagtgtttaggcgagtgtatgttcagagggatgaggtccggcagatcgcttctatagtccagcggggggaacgggaccacacttttcgtgtgggtagtctgatcttccatacaatcggacagttactcccccagcagatgcaagcttttcacagtccaaaagccctgtttcccgtgggatacgaggcatcgcggctttactggtcgacacggtacgccaaccgtcggtgcagatatctatgcagtattgaagagaaggacggacggccagtcttcgtgataaggattgtggagcagggtcatgaggacctcgttctgagcgacatcagccctaagggagtgtgggataaaatcctcgagcctgtggcctgcgtcagaaaaaaaagtgagatgttacagctgtttccagcatatctcaagggagaggatctcttcggcctgaccgtgagcgccgtcgcccgtattgccgagtctctgccaggagtagaggcctgtgaaaactatactttcaggtacggaaggaatcccctgatggaactgcctctagcagtgaacccaactggctgtgctaggtccgaacctaaaatgtcagcccatgttaagcggttcgtattgcggcctcacactctgaattccacctcaacctcaaagtctttccaatctacagttactggtgaacttaacgctccatactcaaagcagttcgtgcattccaagtcatctcagtataggaaaatgaagactgagtggaagtcaaacgtgtatctggctcgctctcggatccagggcctcggcctttacgctgccagggacattgagaaacacaccatggttatagaatatatcggcacaatcattagaaatgaagttgcaaaccgcaaagaaaagctgtacgaatctcagaatcgcggcgtctatatgttccggatggataacgatcatgtgatagatgcgactctgaccggcgggcccgccagatatattaatcatagctgcgcacctaactgtgttgccgaagtggtgacctttgaacggggccataaaattattatttcatccagcaggcggatccagaaaggggaggaactttgttatgactacaaatttgactttgaagatgaccagcacaagattccgtgtcactgtggcgccgtgaattgtagaaaatggatgaactag

SEQ ID NO: 307401 - DNA, 14907 bp, Artificial Sequence
  derived and/or modified sequence
atgagctcagaagaagataagagtgtagagcagccccaacccccaccaccaccacctgaggaacccggagctcccgctccttctcccgctgctgcagataagcggcctaggggcagacctcgcaaggacggggcatcccctttccagagagcgaggaaaaagcctcggtcaaggggcaaaaccgccgtcgaagacgaggatagcatggacggtttggaaacaactgagacagagacgatcgttgaaacagagattaaagagcagtccgctgaggaggacgccgaagccgaggttgataacagcaagcagctgataccgaccttacagcgatcagtctccgaagaatcagcaaacagtctggtaagtgtgggagttgaagctaagatttctgagcagttgtgcgcattctgttactgcggcgagaagtctagtctgggacagggcgacctcaaacaatttcgaatcactcccggatttatacttccctggcgcaaccagccctctaacaagaaggacattgacgacaatagcaatggaacctatgaaaagatgcagaattcggctccaaggaagcagcgtggacagaggaaggagcggtctccccagcagaacatcgtgagttgcgtatcagtgagtactcagactgcctctgacgaccaagctgggaaactttgggatgagctgtcgctggtcgggttgcccgacgccattgacattcaggcgctcttcgattccaccgggacctgctgggcccatcaccgatgtgtcgaatggagtttgggggtttgccagatggaggaacctttgttagtaaatgttgataaggcggttgtctcaggttctaccgagagatgtgccttctgtaagcacctgggtgctaccattaaatgttgtgaagagaagtgtacccagatgtaccattatccatgcgccgctggcgcagggactttccaggatttcagtcatattttcctgctctgtcctgagcatattgatcaggccccagagcgaagcaaggaagacgccaactgtgccgtgtgtgattcgcccggtgacttgctggaccagtttttctgcaccacctgtggacagcattatcacggcatgtgtctggacatcgccgttactccactgaagcgagcagggtggcagtgtcccgagtgcaaggtgtgtcagaactgtaaacagagtggcgaggacagcaagatgctggtttgcgatacatgcgacaagggataccataccttttgtctgcagcctgtcatgaaaagtgtgccaacaaacgggtggaagtgtaagaattgcagaatctgcatcgagtgcggaactagatccagcagccagtggcaccataactgtctaatttgcgacaattgctaccaacagcaagacaatctgtgccccttttgcgggaaatgttaccaccccgagctgcagaaggatatgctacactgtaacatgtgtaaacggtgggttcacctggaatgtgataagccaacggaccatgaactggacacacaattaaaagaagaatacatttgcatgtattgcaagcatctgggcgctgagatggaccgtttacaacccggagaggaggttgaaattgcagaactcacaaccgattacaacaatgagatggaggtggagggtcctgaggaccaaatggtattctcagaacaggccgctaacaaagatgtgaacggtcaggagtctacgcctgggatcgtcccagacgctgtgcaggtgcacacagaagaacaacaaaaaagccacccatctgagtctctggatacggactccctgcttatagccgttagcagccaacatactgttaacactgaactcgagaagcagatttctaatgaagttgattcagaggacttaaaaatgtcatccgaggttaaacacatctgcggagaggatcaaattgaggacaagatggaggtgactgaaaacattgaagtggtgactcatcagataaccgtccaacaggaacagttgcagttgctagaggaaccggagaccgttgttagcagggaagaaagtcgaccaccaaagctcgtgatggagagcgttacattgccgcttgagaccctggtgtcccctcacgaagagtcgatctctctgtgtccagaggagcagctcgtgatagaaagattgcagggcgaaaaagagcagaaggagaactccgagctatctacagggttgatggactcggaaatgacccctactatcgaaggatgcgtaaaagatgtatcctaccaggggggtaagagcatcaaactgtccagtgaaacagagtctagcttttcctccagtgcggatatctctaaggccgacgtttccagcagccctacaccctctagtgacctcccgtcacacgacatgctgcacaactatccctccgcactcagcagttctgccggtaacatcatgccaactacatatattagcgtcactcccaaaattggcatgggcaaacccgcaatcaccaagcgaaaattctcaccaggtaggcccagaagcaagcagggggcatggtccacccacaacacagtatcacctccgtcctggtcccctgatatttccgaaggcagagaaatatttaagcctcgtcagctgcccggaagtgcgatttggagcatcaaggtgggacgaggcagtggcttccctggcaagcgtcgccctcgcggtgcaggtctctccggtcggggtgggagagggagatccaaattaaagtctggaatcggtgctgtggttctgcccggtgtgtcaactgctgatatttcctcgaacaaggacgatgaagaaaatagcatgcataatacagtggtcctgttctcatcctctgataaatttaccctgaatcaggacatgtgtgtggtgtgcggttcctttgggcagggagctgaaggacgccttctggcctgctcccagtgcgggcaatgttatcacccctactgcgtgagcattaaaattactaaggtggtgctgagcaagggctggaggtgcctggagtgcactgtctgcgaggcatgcggtaaggccacagatcctgggaggctgctgttatgcgatgactgtgacatcagctaccacacttactgcctggaccctccgctgcagacagtacctaaagggggttggaaatgtaagtggtgcgtgtggtgcagacactgtggagctacaagcgccggattaagatgcgaatggcagaataactacacccagtgtgcaccctgcgcttcactgtctagctgcccagtctgttataggaactaccgcgaagaagatttaatactgcaatgtcggcagtgcgaccggtggatgcacgccgtctgccaaaatctgaacacagaagaggaagtagaaaacgtggccgatattgggtttgattgcagtatgtgccgcccatatatgcctgcgtctaacgtcccaagttcagattgctgcgagtcttccctcgtggctcagattgtcactaaggtgaaggagctggacccccctaaaacttacactcaggatggcgtgtgcctcacagagtcaggcatgacacaacttcagagtctgacagtcactgtccctagaaggaagcggtcaaagccgaaactgaagctgaagataattaaccagaattccgtggccgtcctacagaccccacctgacatccagtccgagcactcccgcgatggagaaatggacgattcaagagagggcgagctaatggattgcgatgggaaaagtgagtctagccccgagcgcgaggccgtggacgatgaaacaaagggcgtcgagggcactgatggtgtcaagaaaagaaaacggaagccttacaggcccggtatcggcggttttatggtgcggcaacgcagccgcaccgggcagggtaaaaccaagaggagtgtcataaggaaggactcctcaggctccatttccgagcagttgccatgtcgggacgacgggtggagcgaacagctccccgatactcttgtcgacgaatccgtgtctgtaacggagtccacggagaagatcaagaaaagataccgaaagcgtaagaacaagcttgaagagactttccctgcatatctgcaagaggcctttttcggaaaggacctcttagatacttcccgccaatctaagatctcccttgataacttatccgaagatggggctcagctgctctacaagacaaatatgaataccggcttccttgatcccagtctggacccattgttatcttcatcctccgctccgacaaaatcaggcacgcacggtcccgctgatgatcccttagccgatatatcagaggtgttgaacaccgacgacgacatcttgggaatcatctctgatgatctggccaagtcagtggaccactctgatattgggccagtcacagatgaccctagttcattaccccagccaaacgtgaaccagagctcccgtcccctgagcgaggaacagcttgatggaatcttgagccctgagctggacaagatggtgacagacggcgcaattctcgggaagctatataagatccctgaactgggaggcaaagacgtcgaggacctcttcaccgcagtgctctcaccggctaatacgcagcccaccccactgccgcagcctccaccccctacccagctgctccctatccataaccaggatgctttttcccgcatgcctctgatgaacggactcatcggtagttctcctcacctcccccataactctttgccccctggatccggcttaggcactttctccgctatcgcacagagtagctacccagatgcacgcgacaagaatagtgcctttaaccctatggcatccgacccaaacaatagctggacctctagcgcccctaccgtggagggagagaacgacactatgagcaacgctcagcgaagtacattgaaatgggaaaaggaagaggccctgggagaaatggcgacagtggcaccagtcctctatacaaacattaactttccaaaccttaaggaggagtttcctgattggaccacgcgtgtgaagcagattgctaaactgtggaggaaagcatcgtctcaggaacgcgctccgtacgtccagaaggcacgtgacaacagagccgctctgcgtatcaataaggtccaaatgtctaacgatagtatgaagagacagcagcaacaggacagtatcgaccctagctcccgcatcgacagcgaactctttaaagatcctctaaaacagagagagagcgaacatgagcaggagtggaagttcaggcaacaaatgaggcagaagagtaagcagcaggcaaagattgaggccactcaaaagctggagcaggtgaaaaacgaacagcagcagcagcagcaacaacaattcggtagccagcatcttttggtacagtccggatctgatacaccctctagtggtatacagagccccctgacccctcaacccggtaacggcaatatgtcccctgcccagtcttttcacaaggagctcttcacgaagcagcctcccagtactcccacgtctacctcgagcgacgatgttttcgtgaaacctcaagcccctcctccacctccagcaccaagtcgaatcccaatccaggactccctgtcccaggcccagacctcacaaccacccagccctcaggttttttccccagggtcctctaactccagacccccttctccaatggatccttatgcgaaaatggtcggcacaccgagaccgcctccagtgggccattcattctcgcgacgaaatagcgcagctcccgtggagaattgtactcctctctcatctgtaagtcgtcccttacagatgaatgaaaccaccgccaacaggccttccccagtgcgggacctctgctccagctcaacgacgaacaatgacccttatgccaaacctcccgatacacccagacccgttatgaccgaccagtttccaaagtcacttgggctgagccggtctcctgtagtgtcagaacagacagcgaaaggtccaatcgctgccggaacaagcgatcacttcacaaaaccgtccccacgagccgacgtttttcagagacagagaataccagactcctacgcacgaccactcctcacacccgctccactcgattctgggccaggcccattcaaaaccccaatgcaaccgccacctagctcacaagatccatatggttcagtgagtcaggccagccgtcggctgagcgtggacccatacgagcgacccgcactcactcctcgcccaattgataatttttctcataatcagtcaaatgacccatactcccagccaccgctcactccacacccagccgtgaacgaaagctttgctcacccttctagagcattcagccagcctggcactatctcgcggccaaccagccaggatccatatagccagccacccggaactccacggccagtggtggattcttattcacaatcaagcggaaccgcacgtagcaataccgacccttattcccagcctccaggcacaccaagaccaaccactgtggatccctattcccagcagccacaaaccccacgcccttcaacacagactgatctctttgtcacaccagtgactaatcagcgccacagcgacccctacgcccaccctcccggaacccctaggcctgggattagcgtgccttacagccagccgcctgcaacacccagacctaggatcagtgaaggcttcacacgctcttcaatgacaagacctgtgcttatgccgaaccaggacccgttcctccaggcagcccagaaccggggaccagctctgcctggccctcttgtcagaccgccagatacttgttcccagacacctcgaccacccggtcccggtctgagcgataccttctctcgtgtgagccctagtgccgctcgggatccatatgatcagagcccaatgacacctagaagtcagtcagacagcttcggcacatcccagactgctcacgacgtggccgaccagccccgacctgggtccgagggatccttctgtgcgagcagcaactcacccatgcattctcagggtcagcagttctccggtgtgtcgcagctgccaggcccagtgcctacaagcggagtgactgatacgcagaatacggtgaatatggcccaggcggataccgaaaagctccgtcagagacaaaaattgcgtgaaattattctgcagcagcaacaacagaagaagatagccggacggcaagaaaaaggatcacaagactcccccgcagtgccccatccaggccctctgcaacactggcagccagagaacgtcaaccaggcatttactaggcctcctccgccttatccgggtaatataagatccccagtagcgcctcctctcgggcctcggtacgcagtgttcccaaaggaccagaggggaccataccctcccgacgtcgctagcatgggtatgcgaccccatgggtttaggttcgggttcccagggggatcacacgggaccatgccctctcaagagcggttcctggtcccccctcagcagatccaagggtcgggggttagtccccagcttcgaagatcagtctccgtggacatgccaagaccgctgaacaactcacagatgaataacccggtaggactgccccagcacttttctcctcagtccctgccagtgcagcagcacaatatccttggccaggcttatattgagctgcgacacagggcgcctgatggcagacaacggttacccttctcagcccctccagggagcgtcgtagaggctagttccaatcttcgacatgggaacttcatacctcggcctgattttcctggacccaggcatacagaccctatgcggagacctcctcagggactcccaaatcaactacctgttcatcccgacttagaacaggtgccacccagtcagcaggagcagggacacagtgtgcacagctcaagtatggtaatgcgaactctaaaccaccctctgggaggggagttctctgaagccccattgagtacctcggtgccctccgagaccacatctgacaatctgcaaatcacaacccagccctccgacgggctggaggaaaagctggatagtgacgatccctccgtgaaagagctggatgtgaaagatctggagggggttgaggtcaaggatctcgatgacgaagatctcgaaaatctgaaccttgacaccgaggacggaaaggttgtcgaattggacacactggacaatctggaaaccaacgatcctaacctggatgacctgctgcgctcaggagagttcgacatcatcgcctatacggatcccgagctggatatgggagataaaaaatctatgtttaacgaagaattggatctgccgattgatgacaagctggacaaccagtgtgtttctgtcgaaccgaagaaaaaggagcaggaaaataaaaccctcgttctgtccgataagcactcccctcagaagaagtcgacagtgacaaacgaagtcaaaaccgaagttctaagcccaaattcaaaggtcgagtctaaatgcgaaacggagaaaaatgatgaaaacaaggataatgtggatactccatgtagccaggctagtgctcattccgatcttaacgacggtgagaaaacttccctacatccctgcgaccccgatcttttcgagaagcggaccaatagggagacagctggacccagcgctaatgtgatccaggccagcacgcaactaccagcccaagatgtaatcaacagctgcggaattacaggttctacgcccgtgctcagctccctgctggctaacgagaaaagcgacaatagtgatatcagaccgtccggaagcccccctcctcccaccctgcctgcatccccgtctaatcatgtgtcaagtctccctcccttcattgctccacctggtcgagtactggacaatgctatgaatagtaacgtgactgtggtgtcaagggtgaaccatgtcttcagccagggggtccaagttaacccaggactgattccaggtcagagtaccgttaatcatagcttgggaaccggcaagccggctactcagacaggcccacagacaagccagagcggaacttcttctatgtccggccctcaacaactcatgatcccgcagactctcgcccagcaaaacagggagaggcctctgctcctggaggaacagccactgttgcttcaagacctgcttgaccaggaacgtcaggaacagcagcagcagcggcagatgcaggccatgatccgccagaggtcggagccgttcttccccaacattgacttcgacgcgatcaccgatccgatcatgaaggctaagatggtggctctgaagggcataaataaggtgatggcccagaataatcttggcatgccacctatggtgatgtccagattcccgttcatgggtcaggtggtgacgggaactcagaattcagagggacagaacttaggccctcaggcaatcccccaggacggatctattactcaccagatctctagacctaatcccccaaactttgggcctggattcgtaaacgattcccagcgaaaacaatatgaggaatggttgcaggagacccaacaactcctgcagatgcagcagaagtatctggaagagcagatcggcgctcaccgaaaatctaaaaaagctctctccgctaagcagcgtaccgcgaagaaagccggaagagaatttcccgaagaggacgcggaacagttaaagcacgtgacagaacaacagtctatggtacagaaacagctagagcagatacgaaagcaacagaaggagcacgctgaacttatagaagattatagaattaagcagcaacagcagtgcgcaatggctccgcctactatgatgccaagtgtgcaaccacagccgcctctgatccctggcgcaacgcccccaactatgtctcagccaacttttccaatggtgccccagcagttgcagcaccaacagcatactacggtgataagtggtcacacatctcccgtcagaatgccttctctgcccggatggcagcccaactcagcccctgcgcatctacctctgaacccccctaggatccagccaccaatcgcacaactgcccatcaagacctgcactcccgcaccaggaactgtgtctaacgcaaacccacagtccgggccacctccccgagtggagtttgacgataacaatccattctccgagtcattccaggaaagagaaagaaaggaaagactgagagagcagcaggaaagacaaaggatccagttgatgcaggaagtcgaccggcaacgcgctctacaacaacgtatggaaatggaacaacatggaatggtaggaagcgagatctcatctagcagaacctcagtcagccaaatcccattctattcttctgatcttccatgcgacttcatgcagcccctgggccctctgcagcagtcccctcagcatcaacagcagatgggacaagtgttgcagcaacagaacattcaacagggctccataaattcaccctccactcagactttcatgcagacaaatgagcggcgacaagttggacccccttcttttgttcctgactcccctagtatcccagtgggaagtccaaacttcagctctgtcaagcagggccacggaaatctgagcgggacctcctttcaacaaagccctgtgaggccaagctttactcctgcgttgccagcggctccaccagtggcaaacagctctctcccctgtggtcaggactccaccatcacgcatggccacagctaccccggttcaacacagtcattgattcagctctatagtgatataatccccgaagaaaaagggaagaagaagaggacacgtaagaagaagcgtgatgacgatgctgaaagtaccaaggctccttctacacctcatagcgatatcactgcccctccaacccccggaatatccgagacaacaagtactcctgctgtatccacaccgagtgaacttccgcagcaggccgatcaggaatcggtggaacctgtggggccttccacacctaatatggccgctggacaactctgcaccgagctcgaaaacaagttgcctaattccgatttttcccaggccacgcctaatcagcagacatacgctaattccgaagtggataagcttagtatggaaacccctgccaaaacagaggagattaagttggagaaggccgagacagaaagctgtccgggtcaggaggaacccaagctggaagagcagaacggatctaaggtggaaggaaacgcggttgcctgccccgtttcctccgcccaatctccacctcatagcgctggggcacccgcagctaagggcgactccggtaacgagctcctgaaacacttgctaaagaataagaaaagctccagtttactgaaccagaagcctgaggggagtatctgttcggaggatgattgtacaaaagacaataagcttgtcgagaagcagaaccccgctgagggcttgcagactcttggggctcaaatgcagggtggattcgggtgtggcaaccagctgcccaaaacagatggtggctcagaaacaaaaaagcagcgatctaagcggacgcaacgtaccggagaaaaagcagcccctagaagcaaaaaacgcaagaaagatgaagaggagaagcaggccatgtactccagcacggacacattcacccatctaaaacaggtgcgccaactatctctgctgcctctaatggagccaattatcggcgtgaactttgctcacttcctgccctacggttcagggcagttcaatagtggcaacaggctactggggacctttggatctgcgactttggaaggcgtatccgattactacagccagttaatctacaaacaaaacaatctctcaaaccccccaactcccccagcctcgctgcctcctacccctccacccatggcttgtcagaaaatggctaacggcttcgcgactactgaggagctagccggaaaagccggtgttctcgtttcacacgaggtgaccaagactctggggcctaaaccctttcagctcccttttcgtccccaggacgaccttttggcaagggccctggcacagggcccaaaaaccgtggatgtgcccgcatctctcccaactccccctcataacaatcaggaagagttgcgcatccaggaccactgcggtgatagggacacccctgattccttcgtgccaagtagcagccccgaatcagtggtaggagtggaagtgtcgcgatatcccgacctgagtctagtgaaagaggagccaccagagcccgtaccaagtcccatcataccgattttgccgagtaccgccggaaagagctctgagtcgagaagaaacgatataaaaactgaaccgggaactctgtacttcgcaagcccatttggaccttcaccaaacggcccaaggagtgggctgatatccgtcgccatcacccttcaccccacagccgctgaaaacatttccagcgtggtggcagcgttctctgaccttttgcacgtgcgcatccctaactcctacgaagtcagctctgccccagacgtcccatccatgggtttggtgtcatcacaccgcataaatcccggtctcgagtaccgtcagcacttactcttgaggggaccgcctcccggatccgccaatccccctcggctggttagctcataccgcctgaaacagccgaacgtcccattcccccctacatctaatggcctgagcggctataaagattctagccatggaatcgcggagagtgccgctctacggccacaatggtgctgccactgtaaagtggtgatcctagggtcaggggtgcgcaaatcattcaaggacttaacgctcctgaacaaggactccagggaaagtaccaaaagagttgaaaaggatattgtgttttgttccaacaattgctttatcctgtatagcagcacagctcaagctaaaaacagtgagaataaggaatctatcccttcgctccctcagtcccctatgcgtgaaacaccttctaaagcattccatcagtattctaataatattagcacattagacgtccactgccttccacagctccctgaaaaggctagtcctccagcctcacccccaatagccttcccaccggcattcgaagctgctcaggttgaggccaaacctgacgaactcaaagtgaccgttaagctaaaacctcgactgcgcgcagtgcatggcggattcgaagactgtcgacccctgaataagaaatggcgaggaatgaagtggaagaagtggtcgatccacattgtgatccctaaagggacatttaagcctccctgcgaagatgaaatcgatgagttccttaaaaagcttgggaccagccttaaaccagacccagtccccaaggactatagaaagtgctgcttctgtcatgaggagggcgacggactgacagatggaccagcacggcttttgaatctcgatctggacctgtgggtccatctcaactgcgcactgtggagcaccgaagtgtatgagactcaggcaggcgcactgattaacgtagagctcgcccttcggagggggctgcagatgaagtgtgttttctgccacaagacgggagccacctccggctgccataggttccggtgtaccaacatttaccattttacatgcgctatcaaggcacagtgcatgtttttcaaagataagacaatgctgtgccctatgcacaagcccaaagggattcatgagcaggaattgtcttattttgccgttttccgcagggtctacgtgcagagggatgaggtgcggcagatcgcaagtatcgtgcaacgaggcgaaagagatcacacgtttcgcgtcggcagtctgatttttcacactatcgggcagctgctgccacaacagatgcaagcattccactcacccaaggcactctttcctgtagggtatgaagccagcagactctattggtccaccaggtacgctaatagaaggtgcagatacctgtgcagcatcgaagagaaagatggcaggcccgtgttcgtgatccgaattgtagagcagggccatgaggatttggtcctcagcgacatttcccctaaaggcgtgtgggacaagattcttgagcctgtggcctgcgttcgcaagaagtctgaaatgttgcagttattccctgcatacctgaagggcgaagacctgttcggcctgaccgtctctgcagtggctcgaattgcggagagcttaccgggagtggaggcctgcgaaaactataccttccgttacggtagaaatcccctaatggagttacccttggccgttaaccccacgggctgcgcgcgtagcgagcctaagatgagtgctcatgttaaacgctttgtgttacgccctcatacccttaactccacctcaacatctaagagctttcaaagtacggtgacaggcgagctcaatgcaccttacagcaaacaatttgtccacagcaaatcttcgcagtaccgaaaaatgaaaactgaatggaagagtaacgtgtacctcgctagatcacgtatccaaggcctgggcctctatgccgctagggatattgagaagcacaccatggtgatcgaatatatcgggactataattagaaacgaggttgctaacagaaaagaaaagctttacgagtcgcaaaaccggggtgtatacatgtttcgcatggataacgatcatgtcattgacgccaccctcacaggtggcccagctagatacattaatcatagctgtgcgcctaactgcgtagccgaagtggtgacgttcgaaagaggccacaagataatcatctccagtagcaggaggatccaaaagggagaggaactttgctacgactataaattcgactttgaagatgatcaacacaagatcccgtgccattgcggagcggttaattgtaggaagtggatgaactaa

SEQ ID NO: 307402 - DNA, 14907 bp, Artificial Sequence
  derived and/or modified sequence
atgagcagcgaggaggacaagagcgtggagcagccccagccccccccccccccccccgaggagcccggcgcccccgcccccagccccgccgccgccgacaagagacccagaggcagacccagaaaggacggcgccagccccttccagagagccagaaagaagcccagaagcagaggcaagaccgccgtggaggacgaggacagcatggacggcctggagaccaccgagaccgagaccatcgtggagaccgagatcaaggagcagagcgccgaggaggacgccgaggccgaggtggacaacagcaagcagctgatccccaccctgcagagaagcgtgagcgaggagagcgccaacagcctggtgagcgtgggcgtggaggccaagatcagcgagcagctgtgcgccttctgctactgcggcgagaagagcagcctgggccagggcgacctgaagcagttcagaatcacccccggcttcatcctgccctggagaaaccagcccagcaacaagaaggacatcgacgacaacagcaacggcacctacgagaagatgcagaacagcgcccccagaaagcagagaggccagagaaaggagagaagcccccagcagaacatcgtgagctgcgtgagcgtgagcacccagaccgccagcgacgaccaggccggcaagctgtgggacgagctgagcctggtgggcctgcccgacgccatcgacatccaggccctgttcgacagcaccggcacctgctgggcccaccacagatgcgtggagtggagcctgggcgtgtgccagatggaggagcccctgctggtgaacgtggacaaggccgtggtgagcggcagcaccgagagatgcgccttctgcaagcacctgggcgccaccatcaagtgctgcgaggagaagtgcacccagatgtaccactacccctgcgccgccggcgccggcaccttccaggacttcagccacatcttcctgctgtgccccgagcacatcgaccaggcccccgagagaagcaaggaggacgccaactgcgccgtgtgcgacagccccggcgacctgctggaccagttcttctgcaccacctgcggccagcactaccacggcatgtgcctggacatcgccgtgacccccctgaagagagccggctggcagtgccccgagtgcaaggtgtgccagaactgcaagcagagcggcgaggacagcaagatgctggtgtgcgacacctgcgacaagggctaccacaccttctgcctgcagcccgtgatgaagagcgtgcccaccaacggctggaagtgcaagaactgcagaatctgcatcgagtgcggcaccagaagcagcagccagtggcaccacaactgcctgatctgcgacaactgctaccagcagcaggacaacctgtgccccttctgcggcaagtgctaccaccccgagctgcagaaggacatgctgcactgcaacatgtgcaagagatgggtgcacctggagtgcgacaagcccaccgaccacgagctggacacccagctgaaggaggagtacatctgcatgtactgcaagcacctgggcgccgagatggacagactgcagcccggcgaggaggtggagatcgccgagctgaccaccgactacaacaacgagatggaggtggagggccccgaggaccagatggtgttcagcgagcaggccgccaacaaggacgtgaacggccaggagagcacccccggcatcgtgcccgacgccgtgcaggtgcacaccgaggagcagcagaagagccaccccagcgagagcctggacaccgacagcctgctgatcgccgtgagcagccagcacaccgtgaacaccgagctggagaagcagatcagcaacgaggtggacagcgaggacctgaagatgagcagcgaggtgaagcacatctgcggcgaggaccagatcgaggacaagatggaggtgaccgagaacatcgaggtggtgacccaccagatcaccgtgcagcaggagcagctgcagctgctggaggagcccgagaccgtggtgagcagagaggagagcagaccccccaagctggtgatggagagcgtgaccctgcccctggagaccctggtgagcccccacgaggagagcatcagcctgtgccccgaggagcagctggtgatcgagagactgcagggcgagaaggagcagaaggagaacagcgagctgagcaccggcctgatggacagcgagatgacccccaccatcgagggctgcgtgaaggacgtgagctaccagggcggcaagagcatcaagctgagcagcgagaccgagagcagcttcagcagcagcgccgacatcagcaaggccgacgtgagcagcagccccacccccagcagcgacctgcccagccacgacatgctgcacaactaccccagcgccctgagcagcagcgccggcaacatcatgcccaccacctacatcagcgtgacccccaagatcggcatgggcaagcccgccatcaccaagagaaagttcagccccggcagacccagaagcaagcagggcgcctggagcacccacaacaccgtgagcccccccagctggagccccgacatcagcgagggcagagagatcttcaagcccagacagctgcccggcagcgccatctggagcatcaaggtgggcagaggcagcggcttccccggcaagagaagacccagaggcgccggcctgagcggcagaggcggcagaggcagaagcaagctgaagagcggcatcggcgccgtggtgctgcccggcgtgagcaccgccgacatcagcagcaacaaggacgacgaggagaacagcatgcacaacaccgtggtgctgttcagcagcagcgacaagttcaccctgaaccaggacatgtgcgtggtgtgcggcagcttcggccagggcgccgagggcagactgctggcctgcagccagtgcggccagtgctaccacccctactgcgtgagcatcaagatcaccaaggtggtgctgagcaagggctggagatgcctggagtgcaccgtgtgcgaggcctgcggcaaggccaccgaccccggcagactgctgctgtgcgacgactgcgacatcagctaccacacctactgcctggacccccccctgcagaccgtgcccaagggcggctggaagtgcaagtggtgcgtgtggtgcagacactgcggcgccaccagcgccggcctgagatgcgagtggcagaacaactacacccagtgcgccccctgcgccagcctgagcagctgccccgtgtgctacagaaactacagagaggaggacctgatcctgcagtgcagacagtgcgacagatggatgcacgccgtgtgccagaacctgaacaccgaggaggaggtggagaacgtggccgacatcggcttcgactgcagcatgtgcagaccctacatgcccgccagcaacgtgcccagcagcgactgctgcgagagcagcctggtggcccagatcgtgaccaaggtgaaggagctggacccccccaagacctacacccaggacggcgtgtgcctgaccgagagcggcatgacccagctgcagagcctgaccgtgaccgtgcccagaagaaagagaagcaagcccaagctgaagctgaagatcatcaaccagaacagcgtggccgtgctgcagaccccccccgacatccagagcgagcacagcagagacggcgagatggacgacagcagagagggcgagctgatggactgcgacggcaagagcgagagcagccccgagagagaggccgtggacgacgagaccaagggcgtggagggcaccgacggcgtgaagaagagaaagagaaagccctacagacccggcatcggcggcttcatggtgagacagagaagcagaaccggccagggcaagaccaagagaagcgtgatcagaaaggacagcagcggcagcatcagcgagcagctgccctgcagagacgacggctggagcgagcagctgcccgacaccctggtggacgagagcgtgagcgtgaccgagagcaccgagaagatcaagaagagatacagaaagagaaagaacaagctggaggagaccttccccgcctacctgcaggaggccttcttcggcaaggacctgctggacaccagcagacagagcaagatcagcctggacaacctgagcgaggacggcgcccagctgctgtacaagaccaacatgaacaccggcttcctggaccccagcctggaccccctgctgagcagcagcagcgcccccaccaagagcggcacccacggccccgccgacgaccccctggccgacatcagcgaggtgctgaacaccgacgacgacatcctgggcatcatcagcgacgacctggccaagagcgtggaccacagcgacatcggccccgtgaccgacgaccccagcagcctgccccagcccaacgtgaaccagagcagcagacccctgagcgaggagcagctggacggcatcctgagccccgagctggacaagatggtgaccgacggcgccatcctgggcaagctgtacaagatccccgagctgggcggcaaggacgtggaggacctgttcaccgccgtgctgagccccgccaacacccagcccacccccctgccccagccccccccccccacccagctgctgcccatccacaaccaggacgccttcagcagaatgcccctgatgaacggcctgatcggcagcagcccccacctgccccacaacagcctgccccccggcagcggcctgggcaccttcagcgccatcgcccagagcagctaccccgacgccagagacaagaacagcgccttcaaccccatggccagcgaccccaacaacagctggaccagcagcgcccccaccgtggagggcgagaacgacaccatgagcaacgcccagagaagcaccctgaagtgggagaaggaggaggccctgggcgagatggccaccgtggcccccgtgctgtacaccaacatcaacttccccaacctgaaggaggagttccccgactggaccaccagagtgaagcagatcgccaagctgtggagaaaggccagcagccaggagagagccccctacgtgcagaaggccagagacaacagagccgccctgagaatcaacaaggtgcagatgagcaacgacagcatgaagagacagcagcagcaggacagcatcgaccccagcagcagaatcgacagcgagctgttcaaggaccccctgaagcagagagagagcgagcacgagcaggagtggaagttcagacagcagatgagacagaagagcaagcagcaggccaagatcgaggccacccagaagctggagcaggtgaagaacgagcagcagcagcagcagcagcagcagttcggcagccagcacctgctggtgcagagcggcagcgacacccccagcagcggcatccagagccccctgaccccccagcccggcaacggcaacatgagccccgcccagagcttccacaaggagctgttcaccaagcagccccccagcacccccaccagcaccagcagcgacgacgtgttcgtgaagccccaggcccccccccccccccccgcccccagcagaatccccatccaggacagcctgagccaggcccagaccagccagccccccagcccccaggtgttcagccccggcagcagcaacagcagaccccccagccccatggacccctacgccaagatggtgggcacccccagacccccccccgtgggccacagcttcagcagaagaaacagcgccgcccccgtggagaactgcacccccctgagcagcgtgagcagacccctgcagatgaacgagaccaccgccaacagacccagccccgtgagagacctgtgcagcagcagcaccaccaacaacgacccctacgccaagccccccgacacccccagacccgtgatgaccgaccagttccccaagagcctgggcctgagcagaagccccgtggtgagcgagcagaccgccaagggccccatcgccgccggcaccagcgaccacttcaccaagcccagccccagagccgacgtgttccagagacagagaatccccgacagctacgccagacccctgctgacccccgcccccctggacagcggccccggccccttcaagacccccatgcagcccccccccagcagccaggacccctacggcagcgtgagccaggccagcagaagactgagcgtggacccctacgagagacccgccctgacccccagacccatcgacaacttcagccacaaccagagcaacgacccctacagccagccccccctgaccccccaccccgccgtgaacgagagcttcgcccaccccagcagagccttcagccagcccggcaccatcagcagacccaccagccaggacccctacagccagccccccggcacccccagacccgtggtggacagctacagccagagcagcggcaccgccagaagcaacaccgacccctacagccagccccccggcacccccagacccaccaccgtggacccctacagccagcagccccagacccccagacccagcacccagaccgacctgttcgtgacccccgtgaccaaccagagacacagcgacccctacgcccacccccccggcacccccagacccggcatcagcgtgccctacagccagccccccgccacccccagacccagaatcagcgagggcttcaccagaagcagcatgaccagacccgtgctgatgcccaaccaggaccccttcctgcaggccgcccagaacagaggccccgccctgcccggccccctggtgagaccccccgacacctgcagccagacccccagaccccccggccccggcctgagcgacaccttcagcagagtgagccccagcgccgccagagacccctacgaccagagccccatgacccccagaagccagagcgacagcttcggcaccagccagaccgcccacgacgtggccgaccagcccagacccggcagcgagggcagcttctgcgccagcagcaacagccccatgcacagccagggccagcagttcagcggcgtgagccagctgcccggccccgtgcccaccagcggcgtgaccgacacccagaacaccgtgaacatggcccaggccgacaccgagaagctgagacagagacagaagctgagagagatcatcctgcagcagcagcagcagaagaagatcgccggcagacaggagaagggcagccaggacagccccgccgtgccccaccccggccccctgcagcactggcagcccgagaacgtgaaccaggccttcaccagacccccccccccctaccccggcaacatcagaagccccgtggccccccccctgggccccagatacgccgtgttccccaaggaccagagaggcccctacccccccgacgtggccagcatgggcatgagaccccacggcttcagattcggcttccccggcggcagccacggcaccatgcccagccaggagagattcctggtgcccccccagcagatccagggcagcggcgtgagcccccagctgagaagaagcgtgagcgtggacatgcccagacccctgaacaacagccagatgaacaaccccgtgggcctgccccagcacttcagcccccagagcctgcccgtgcagcagcacaacatcctgggccaggcctacatcgagctgagacacagagcccccgacggcagacagagactgcccttcagcgccccccccggcagcgtggtggaggccagcagcaacctgagacacggcaacttcatccccagacccgacttccccggccccagacacaccgaccccatgagaagacccccccagggcctgcccaaccagctgcccgtgcaccccgacctggagcaggtgccccccagccagcaggagcagggccacagcgtgcacagcagcagcatggtgatgagaaccctgaaccaccccctgggcggcgagttcagcgaggcccccctgagcaccagcgtgcccagcgagaccaccagcgacaacctgcagatcaccacccagcccagcgacggcctggaggagaagctggacagcgacgaccccagcgtgaaggagctggacgtgaaggacctggagggcgtggaggtgaaggacctggacgacgaggacctggagaacctgaacctggacaccgaggacggcaaggtggtggagctggacaccctggacaacctggagaccaacgaccccaacctggacgacctgctgagaagcggcgagttcgacatcatcgcctacaccgaccccgagctggacatgggcgacaagaagagcatgttcaacgaggagctggacctgcccatcgacgacaagctggacaaccagtgcgtgagcgtggagcccaagaagaaggagcaggagaacaagaccctggtgctgagcgacaagcacagcccccagaagaagagcaccgtgaccaacgaggtgaagaccgaggtgctgagccccaacagcaaggtggagagcaagtgcgagaccgagaagaacgacgagaacaaggacaacgtggacaccccctgcagccaggccagcgcccacagcgacctgaacgacggcgagaagaccagcctgcacccctgcgaccccgacctgttcgagaagagaaccaacagagagaccgccggccccagcgccaacgtgatccaggccagcacccagctgcccgcccaggacgtgatcaacagctgcggcatcaccggcagcacccccgtgctgagcagcctgctggccaacgagaagagcgacaacagcgacatcagacccagcggcagcccccccccccccaccctgcccgccagccccagcaaccacgtgagcagcctgccccccttcatcgccccccccggcagagtgctggacaacgccatgaacagcaacgtgaccgtggtgagcagagtgaaccacgtgttcagccagggcgtgcaggtgaaccccggcctgatccccggccagagcaccgtgaaccacagcctgggcaccggcaagcccgccacccagaccggcccccagaccagccagagcggcaccagcagcatgagcggcccccagcagctgatgatcccccagaccctggcccagcagaacagagagagacccctgctgctggaggagcagcccctgctgctgcaggacctgctggaccaggagagacaggagcagcagcagcagagacagatgcaggccatgatcagacagagaagcgagcccttcttccccaacatcgacttcgacgccatcaccgaccccatcatgaaggccaagatggtggccctgaagggcatcaacaaggtgatggcccagaacaacctgggcatgccccccatggtgatgagcagattccccttcatgggccaggtggtgaccggcacccagaacagcgagggccagaacctgggcccccaggccatcccccaggacggcagcatcacccaccagatcagcagacccaacccccccaacttcggccccggcttcgtgaacgacagccagagaaagcagtacgaggagtggctgcaggagacccagcagctgctgcagatgcagcagaagtacctggaggagcagatcggcgcccacagaaagagcaagaaggccctgagcgccaagcagagaaccgccaagaaggccggcagagagttccccgaggaggacgccgagcagctgaagcacgtgaccgagcagcagagcatggtgcagaagcagctggagcagatcagaaagcagcagaaggagcacgccgagctgatcgaggactacagaatcaagcagcagcagcagtgcgccatggccccccccaccatgatgcccagcgtgcagccccagccccccctgatccccggcgccaccccccccaccatgagccagcccaccttccccatggtgccccagcagctgcagcaccagcagcacaccaccgtgatcagcggccacaccagccccgtgagaatgcccagcctgcccggctggcagcccaacagcgcccccgcccacctgcccctgaacccccccagaatccagccccccatcgcccagctgcccatcaagacctgcacccccgcccccggcaccgtgagcaacgccaacccccagagcggccccccccccagagtggagttcgacgacaacaaccccttcagcgagagcttccaggagagagagagaaaggagagactgagagagcagcaggagagacagagaatccagctgatgcaggaggtggacagacagagagccctgcagcagagaatggagatggagcagcacggcatggtgggcagcgagatcagcagcagcagaaccagcgtgagccagatccccttctacagcagcgacctgccctgcgacttcatgcagcccctgggccccctgcagcagagcccccagcaccagcagcagatgggccaggtgctgcagcagcagaacatccagcagggcagcatcaacagccccagcacccagaccttcatgcagaccaacgagagaagacaggtgggcccccccagcttcgtgcccgacagccccagcatccccgtgggcagccccaacttcagcagcgtgaagcagggccacggcaacctgagcggcaccagcttccagcagagccccgtgagacccagcttcacccccgccctgcccgccgccccccccgtggccaacagcagcctgccctgcggccaggacagcaccatcacccacggccacagctaccccggcagcacccagagcctgatccagctgtacagcgacatcatccccgaggagaagggcaagaagaagagaaccagaaagaagaagagagacgacgacgccgagagcaccaaggcccccagcaccccccacagcgacatcaccgccccccccacccccggcatcagcgagaccaccagcacccccgccgtgagcacccccagcgagctgccccagcaggccgaccaggagagcgtggagcccgtgggccccagcacccccaacatggccgccggccagctgtgcaccgagctggagaacaagctgcccaacagcgacttcagccaggccacccccaaccagcagacctacgccaacagcgaggtggacaagctgagcatggagacccccgccaagaccgaggagatcaagctggagaaggccgagaccgagagctgccccggccaggaggagcccaagctggaggagcagaacggcagcaaggtggagggcaacgccgtggcctgccccgtgagcagcgcccagagccccccccacagcgccggcgcccccgccgccaagggcgacagcggcaacgagctgctgaagcacctgctgaagaacaagaagagcagcagcctgctgaaccagaagcccgagggcagcatctgcagcgaggacgactgcaccaaggacaacaagctggtggagaagcagaaccccgccgagggcctgcagaccctgggcgcccagatgcagggcggcttcggctgcggcaaccagctgcccaagaccgacggcggcagcgagaccaagaagcagagaagcaagagaacccagagaaccggcgagaaggccgcccccagaagcaagaagagaaagaaggacgaggaggagaagcaggccatgtacagcagcaccgacaccttcacccacctgaagcaggtgagacagctgagcctgctgcccctgatggagcccatcatcggcgtgaacttcgcccacttcctgccctacggcagcggccagttcaacagcggcaacagactgctgggcaccttcggcagcgccaccctggagggcgtgagcgactactacagccagctgatctacaagcagaacaacctgagcaacccccccaccccccccgccagcctgccccccacccccccccccatggcctgccagaagatggccaacggcttcgccaccaccgaggagctggccggcaaggccggcgtgctggtgagccacgaggtgaccaagaccctgggccccaagcccttccagctgcccttcagaccccaggacgacctgctggccagagccctggcccagggccccaagaccgtggacgtgcccgccagcctgcccacccccccccacaacaaccaggaggagctgagaatccaggaccactgcggcgacagagacacccccgacagcttcgtgcccagcagcagccccgagagcgtggtgggcgtggaggtgagcagataccccgacctgagcctggtgaaggaggagccccccgagcccgtgcccagccccatcatccccatcctgcccagcaccgccggcaagagcagcgagagcagaagaaacgacatcaagaccgagcccggcaccctgtacttcgccagccccttcggccccagccccaacggccccagaagcggcctgatcagcgtggccatcaccctgcaccccaccgccgccgagaacatcagcagcgtggtggccgccttcagcgacctgctgcacgtgagaatccccaacagctacgaggtgagcagcgcccccgacgtgcccagcatgggcctggtgagcagccacagaatcaaccccggcctggagtacagacagcacctgctgctgagaggccccccccccggcagcgccaacccccccagactggtgagcagctacagactgaagcagcccaacgtgcccttcccccccaccagcaacggcctgagcggctacaaggacagcagccacggcatcgccgagagcgccgccctgagaccccagtggtgctgccactgcaaggtggtgatcctgggcagcggcgtgagaaagagcttcaaggacctgaccctgctgaacaaggacagcagagagagcaccaagagagtggagaaggacatcgtgttctgcagcaacaactgcttcatcctgtacagcagcaccgcccaggccaagaacagcgagaacaaggagagcatccccagcctgccccagagccccatgagagagacccccagcaaggccttccaccagtacagcaacaacatcagcaccctggacgtgcactgcctgccccagctgcccgagaaggccagcccccccgccagcccccccatcgccttcccccccgccttcgaggccgcccaggtggaggccaagcccgacgagctgaaggtgaccgtgaagctgaagcccagactgagagccgtgcacggcggcttcgaggactgcagacccctgaacaagaagtggagaggcatgaagtggaagaagtggagcatccacatcgtgatccccaagggcaccttcaagcccccctgcgaggacgagatcgacgagttcctgaagaagctgggcaccagcctgaagcccgaccccgtgcccaaggactacagaaagtgctgcttctgccacgaggagggcgacggcctgaccgacggccccgccagactgctgaacctggacctggacctgtgggtgcacctgaactgcgccctgtggagcaccgaggtgtacgagacccaggccggcgccctgatcaacgtggagctggccctgagaagaggcctgcagatgaagtgcgtgttctgccacaagaccggcgccaccagcggctgccacagattcagatgcaccaacatctaccacttcacctgcgccatcaaggcccagtgcatgttcttcaaggacaagaccatgctgtgccccatgcacaagcccaagggcatccacgagcaggagctgagctacttcgccgtgttcagaagagtgtacgtgcagagagacgaggtgagacagatcgccagcatcgtgcagagaggcgagagagaccacaccttcagagtgggcagcctgatcttccacaccatcggccagctgctgccccagcagatgcaggccttccacagccccaaggccctgttccccgtgggctacgaggccagcagactgtactggagcaccagatacgccaacagaagatgcagatacctgtgcagcatcgaggagaaggacggcagacccgtgttcgtgatcagaatcgtggagcagggccacgaggacctggtgctgagcgacatcagccccaagggcgtgtgggacaagatcctggagcccgtggcctgcgtgagaaagaagagcgagatgctgcagctgttccccgcctacctgaagggcgaggacctgttcggcctgaccgtgagcgccgtggccagaatcgccgagagcctgcccggcgtggaggcctgcgagaactacaccttcagatacggcagaaaccccctgatggagctgcccctggccgtgaaccccaccggctgcgccagaagcgagcccaagatgagcgcccacgtgaagagattcgtgctgagaccccacaccctgaacagcaccagcaccagcaagagcttccagagcaccgtgaccggcgagctgaacgccccctacagcaagcagttcgtgcacagcaagagcagccagtacagaaagatgaagaccgagtggaagagcaacgtgtacctggccagaagcagaatccagggcctgggcctgtacgccgccagagacatcgagaagcacaccatggtgatcgagtacatcggcaccatcatcagaaacgaggtggccaacagaaaggagaagctgtacgagagccagaacagaggcgtgtacatgttcagaatggacaacgaccacgtgatcgacgccaccctgaccggcggccccgccagatacatcaaccacagctgcgcccccaactgcgtggccgaggtggtgaccttcgagagaggccacaagatcatcatcagcagcagcagaagaatccagaagggcgaggagctgtgctacgactacaagttcgacttcgaggacgaccagcacaagatcccctgccactgcggcgccgtgaactgcagaaagtggatgaactag

SEQ ID NO: 307403 - DNA, 4835 bp, Artificial Sequence
  derived and/or modified sequence
taatcagaggtccctctcgatcaactgacgtagcttcatttcattcttttgaatggttacctgatgttccatagtgttgatgaactgcagttaaaccattgcattactgatgagtgtgtatttgatttataatttttctcataacaaacagtgttgctatatcttgtacaaatatcacaatgaattaatagtttcactcctatggggtatattcccaaacgtgaggtttctgtgtaaaagcgtgtgtacttttcatttaaatagatattgccagttttctaaaaagtctcttactgcacacttcttcctgcagcatgtgagactgttttcttgtttcccatttgtagctggtgttactatttttttgtttagttggtctgataaatatagactgatgttaccttaattgaataggcagcttttcatgtccgccatttggatttgctttcataggaattgcgtattcatatcctttgtccatttttcaatttttagcagtttacactattcagaattttcccctacaaaatatcctttgcctaccagcaagtgtgacatcttttttcttgtaaaagttactgtttatataaacaaacatacataattttctgttgcatctagtcttggtcaagaccctagattatatacggattctagaggttttcttgcataacatttttaaaatacaatttcgctttcttccattggataaccagttgttgaagggccatttagaagtaacccactcatttttaactgattttctttcttcttctttgagacagggtctcactgtgtcgcccaggctggagtgcggtggcacaatctcagctcactgcagcttcgatctcctgggctcaagcgatcctcttacctcagcctcctgagtagccagggctacaggcgcatgccacaatacttggctaatttttaaaaatatttatttagagatgaggttttgccatgttgtccaggctggtcttgaacttctgaactcaagcaattcacctgcctcggcctcccaaagtgctgggattacaggcatgagcccccgtggctggcatgaattttttttttttttttttttgagacagagtcttcctctgtcacccaggctggagtgcagtggcacgatctcggctcactgcaacctctgcctcccaggttcaagcgattcttctgcctcagcctcccaagtaactgggactacaggtgtgtactaccatgcccggctaattttttttttttttttaagtagagatgggatttcaccatattggccaggctggtcttgaactcctgacctcaagggatctgcctgccttggcttcccaaagtggtgggattataggcatgagtcaccacgcctggcccatttggaatctcttcatttccactgatcttgtttattcttaaaccacactctattgatctccatacatactttttgtgtgttctggttcattcacttgtgagttgtatctggagtagaacagataatcaaagatgcttgttcagaggataaatcagttcacatactaaagtctctcacatggcccttcccaccatgtgctcccggatgtgcttcatgaggatgcagctggggcagcacatggtcctcctagtaattccgactagaatgcagttgatttctgcattctagaattcagttcaattctagaattgcattctagtctagtacttctgattcagttgcatctagtctagtacttttgcattcagttgccttctagtcagaattaagtgcaaaaacccaaaattgggacaagaaaatacaactatttatggcaaagacccatattttgttagtatgtttctctacaagttgtgctaccaacctgaatagtgcacctggcaggccaccagcacgggagtacaagctgcgcagtgagagctgcttccatttcagcccgttcaaacttctttcccagcctcagaattttgtattagtgaaaaatttaccttccccaagagcttcatttgtttccaacattcctgatatttacagcagagtgacgtttcctgtgtctgctctttgccctggctgctgggaaactcagagccaagtctgaaccctgtttacagtatcagtgattggttatagttagcctgatttctatgttattgaatttattatgtcttttttgaaatagtattggggtaaaataaacaccacaagtcaataagcttatttagttggtgggaactcagctatctcatctggaaggttagatagcctaatacataagacagccaagccacagtactactttatacatagactctaagaatttagtgctaaaaaagatgtaggaataagctagtgatggcatagttttaagtagtaaaaatgtccaatttttaaaatttcagaaaatagcatattcaaaaatgatttgagttcaagtgaaacttaagtatggcttctaataagacccgagggtgaaacctttgtatgaaaaacagaaaaaagacttgttgtcacataaattggaagtatgtacacacttttttttaggggctgggcctgtatgctgctcgagacattgagaaacacaccatggtcattgagtacatcgggactatcattcgaaacgaagtagccaacaggaaagagaagctttatgagtctcagaaccgtggtgtgtacatgttccgcatggataacgaccatgtgattgacgcgacgctcacaggagggcccgcaaggtatatcaaccattcgtgtgcacctaattgtgtggctgaagtggtgacttttgagagaggacacaaaattatcatcagctccagtcggagaatccagaaaggagaagagctctgctatgactataagtttgactttgaagatgaccagcacaagattccgtgtcactgtggagctgtgaactgccggaagtggatgaactgaaatgcattccttgctagctcagcgggcggcttgtccctaggaagaggcgattcaacacaccattggaattttgcagacagaaagagatttttgttttctgttttatgactttttgaaaaagcttctgggagttctgatttcctcagtcctttaggttaaagcagcgccaggaggaagctgacagaagcagcgttcctgaagtggccgaggttaaacggaatcacagaatggtccagcacttttgcttttttttcttttccttttcttttttttttgtttgttttttgttttgtttttcccttgtgggtgggtttcattgttttggttttctagtctcactaaggagaaacttttactggggcaaagagccgatggctgccctgccccgggcaggggccttcctatgaatgtaagactgaaatcaccagcgagggggacagagagtgctggccacggccttattaaaaaggggcaggccctctaacttcaaaatgtttttaaataaagtagacaccactgaacaaggaatgtactgaaatgacttccttagggatagagctaagggataataacttgcactaaatacatttaaatacttgattccatgagtcagtttattgtagtttttgatttctgtaaaataagagaaacttttgtatttattattgaataagtgaatgaagctatttttaaataaagttagaagaaagccaagctgctgctgttacctgcagaactaacaaaccctgttactttgtacagatatgtaaatattttgagaaaaaatacagtataaaaatagttattgaccaaatgctaccaggctctgcagcagctcgggggcttataaaatgttcatagggatgttacaatataattttgtgttataaaatatgccattataattatgtaataaccaaaatttcaacctagagtgttgggggttttttggaaaccgcagtctattagtactcaatggttttatacaccttacttctgacagagcggggcgtatgctacgactacaacttttatagctgttttggtaatttaaactaattttttcatattatattgttgcatccctacttcttcagtcaggtttttttgtgcttacaatttgtgataactgtgaataactgcttaaaaatacacccaaatggaggctgaattttttcttcagcaaaagtagttttgattagaactttgtttcagccacagagaatcatgtaaacgtaataggatcatgtagcagaaacttaaatctaaccctttagccttctatttaacacaaaaatttgaaaaagttaaaaaaaaaaaggagatgtgattatgcttacagctgcaggactctggcaatagggtttttggaagatgtaattttaaaatgtgtttgtatgaactgtttgtttacatttctttaataaaaaaaacactgttttgtgtttgcttgtagaaacttaatcagcattttgaaccaggttagctttttattttgtacttaaaattctggtactgacacttcacaggctaagtataaaatgaagttttgtgtgcacaattcaagtggactgtaaactgttggtatattcagtgatgcagttctgaacttgtatatggcatgatgtatttttatcttacagaataaatcaattgtatatatttttctcttgataaatagctgtatgaaatttgtttcctgaatatttttcttctcttgtacaatatcctgacatcctaccagtatttgtcctaccgggtttttgttgttttctgttctgtataatagtatctaatgttggcaaaaattgaattttttgaagtatacagagtgttatgggttttggaatttgtggacacagatttagaagatcaccatttacaaataaaatattttacatct

SEQ ID NO: 307404 - protein, 116 aa, Artificial Sequence
  derived and/or modified sequence
MVIEYIGTIIRNEVANRKEKLYESQNRGVYMFRMDNDHVIDATLTGGPARYINHSCAPNCVAEVVTFERGHKIIISSSRRIQKGEELCYDYKFDFEDDQHKIPCHCGAVNCRKWMN

SEQ ID NO: 307405 - DNA, 740 bp, Artificial Sequence
  derived and/or modified sequence
gccaggcagtcgcctagcaacagcgggacgcggagcgatggagaccagcagcagggagctccaagccgcggagtatttggaaaagcatcagatcaaggaggtggttagctacctcaccagcgccctccttttctttcggccggaaaaaccaaaagaatatttaatatctctattggaacgactgagaattgcaaaagtaacaggcgtggcgtttcctttctttatggataactctaacattgtggctatgtttgagatgatggactcctcaggcagaggcaccatatcatttgtgcagtataaagaagccctaaaaaccctgggtctatgcactgaagatgaagatttacaagatgatggacataaaataactttggataaattcaaggaggaagtgaacaagaggatgaaggaaatatgatgtatacatccagcttctctacaagcatttgccagaaaattttaaataaggagaaacaaagctgctgctccaactgaagtaaatggtctcgtaacgtcagcagcaacgggcaagccgaactggacagggacatcactgcctgctctgactgagatggcaaggacaaccatctggaaaaaacacatttttaccaaaaaattttcatcagtttctatttttcaagtttttaaatcattttaaatttgaggaagtgttctgtcctagggcattttggataagaaaaaatatacagcctaacattaaaagctctatcagaaaa

SEQ ID NO: 307406 - protein, 119 aa, Artificial Sequence
  derived and/or modified sequence
MAGLMTIVTSLLFLGVCAHHIIPTGSVVIPSPCCMFFVSKRIPENRVVSYQLSSRSTCLKAGVIFTTKKGQQFCGDPKQEWVQRYMKNLDAKQKKASPRARAVAVKGPVQRYPGNQTTC

SEQ ID NO: 307407 - DNA, 360 bp, Artificial Sequence
  derived and/or modified sequence
atggcagggttgatgactatagttacatccctgctgtttctgggcgtgtgtgcccaccatattattccaacagggagtgtcgtgatcccatccccgtgttgtatgttttttgtgtcaaagcgaattcccgaaaacagggtggtgtcctatcaattatcctcacggagcacctgtctcaaggccggtgtgatctttaccacaaagaagggacagcagttttgcggtgacccgaaacaggaatgggtccagcggtacatgaaaaacctagacgccaagcagaaaaaggcaagcccacgggcgagggcagttgcagtgaagggccctgtccagcgctatccaggcaaccagaccacctgttag

SEQ ID NO: 307408 - DNA, 360 bp, Artificial Sequence
  derived and/or modified sequence
atggccggcctgatgaccatcgtgaccagcctgctcttcctgggcgtgtgtgcccaccacatcatccccaccggctctgtggtgatccccagcccctgctgcatgttctttgtgtccaagagaattcctgagaacagagtggtgtcctaccagctgagcagccgcagcacctgcctgaaggccggggtcatcttcaccaccaagaagggccagcagttctgtggggaccccaagcaggagtgggtgcagcgctacatgaagaacctggatgccaagcagaagaaggccagcccccgggcccgggctgtggccgtgaagggccctgtgcagcgctacccaggcaaccagaccacctgctag

SEQ ID NO: 307409 - DNA, 360 bp, Artificial Sequence
  derived and/or modified sequence
atggccggcctgatgaccatcgtgaccagcctgctgttcctgggcgtttgtgcccaccacattatccccacaggctctgtggtgataccctctccatgttgtatgttttttgtgtcgaagcgcataccagaaaaccgtgtcgtgtcgtaccagctatccagcagatcaacctgcctcaaagccggcgttattttcactacaaaaaagggacagcaattttgcggagatcctaagcaagagtgggtccaacgatacatgaagaacctcgacgccaaacaaaagaaggccagtccacgggctagagccgttgctgtgaaaggcccagtccagagatatcctggaaaccaaaccacttgttag

SEQ ID NO: 307410 - DNA, 360 bp, Artificial Sequence
  derived and/or modified sequence
atggccggtcttatgacaatcgtcacaagcctgctgttcctcggtgtgtgcgctcatcacattattccaaccgggtccgtggttataccttccccatgctgtatgtttttcgtctccaaacggattcccgaaaatcgcgtggtgagctaccagttgagctcgagatctacctgtttgaaggccggtgtcatctttacaacgaaaaaggggcagcagttttgtggcgacccgaaacaggagtgggtacagagatacatgaaaaacctcgatgctaaacagaagaaggctagcccacgcgctcgggctgttgccgtgaagggacccgtccaacgctaccccggtaatcagacaacttgctag

SEQ ID NO: 307411 - DNA, 360 bp, Artificial Sequence
  derived and/or modified sequence
atggccggcctgatgaccatcgtgaccagcctgctgttcctgggcgtgtgcgcccaccacatcatccccaccggcagcgtggtgatccccagcccctgctgcatgttcttcgtgagcaagagaatccccgagaacagagtggtgagctaccagctgagcagcagaagcacctgcctgaaggccggcgtgatcttcaccaccaagaagggccagcagttctgcggcgaccccaagcaggagtgggtgcagagatacatgaagaacctggacgccaagcagaagaaggccagccccagagccagagccgtggccgtgaagggccccgtgcagagataccccggcaaccagaccacctgctag

SEQ ID NO: 307412 - DNA, 360 bp, Artificial Sequence
  derived and/or modified sequence
atggctgggctgatgacgatcgtgacctctctcctgttcttaggagtgtgcgcccatcatatcatcccaacaggtagcgttgttatcccctctccttgttgcatgtttttcgtcagcaaacggatcccagaaaaccgcgtcgtgtcttaccagctctcgtcgaggagcacttgtctgaaggcaggcgtaatttttactaccaagaagggccagcaattctgtggagaccctaaacaggaatgggtccagaggtacatgaagaacctcgacgctaaacaaaagaaggcttctccacgcgccagagcggtcgccgtgaagggacccgttcagaggtacccaggtaatcaaacgacgtgttag

SEQ ID NO: 307413 - DNA, 360 bp, Artificial Sequence
  derived and/or modified sequence
atggccggcctgatgaccatcgtgaccagcctgctgttcctgggcgtctgtgctcatcatattattcccactggctccgtagtgataccgagcccttgttgtatgttttttgtctccaagcgtatcccggaaaatcgagtggtctcttatcagctgagcagtaggagcacatgcttgaaagctggtgtgattttcaccactaagaaggggcagcagttctgtggcgatccaaagcaggaatgggtacagcgttacatgaagaacctggatgcaaaacagaagaaggccagccctagggcgcgcgcagtcgccgtcaaagggcccgtgcaaaggtaccccggcaatcagacgacatgttag

SEQ ID NO: 307414 - DNA, 360 bp, Artificial Sequence
  derived and/or modified sequence
atggctggcctcatgactattgtgaccagcctgctgtttctaggagtgtgcgcacaccacataatacccactggaagtgtggtcataccgtcaccctgttgcatgttcttcgtctccaagcgcatccccgaaaacagggtcgtgtcgtaccagctgtcaagtaggtccacatgccttaaggcaggtgtgatttttaccacgaaaaagggacaacagttttgcggggaccccaagcaggaatgggtccagaggtacatgaaaaacctggatgctaagcaaaagaaggcttctccaagagctcgggctgtggccgtgaagggaccggttcagagatatcctggtaatcaaacgacctgttag

SEQ ID NO: 307415 - DNA, 582 bp, Artificial Sequence
  derived and/or modified sequence
actctgcaaggacccgagctatttatccctaggtcctttcctcctgcacgtcagctttgagccccgagctggtgcttctgctctctgagacatggcaggcctgatgaccatagtaaccagccttctgttccttggtgtctgtgcccaccacatcatccctacgggctctgtggtcatcccctctccctgctgcatgttctttgtttccaagagaattcctgagaaccgagtggtcagctaccagctgtccagcaggagcacatgcctcaaggcaggagtgatcttcaccaccaagaagggccagcagttctgtggcgaccccaagcaggagtgggtccagaggtacatgaagaacctggacgccaagcagaagaaggcttcccctagggccagggcagtggctgtcaagggccctgtccagagatatcctggcaaccaaaccacctgctaatccccgcccagccctccagccctgagtttgggcctgagctgcttggcgggctactcggggcctggagaagccacagtgatggggggaagagctaattttcctgtttcttagcaacactctccagggatgtg

SEQ ID NO: 307416 - DNA, 585 bp, Artificial Sequence
  derived and/or modified sequence
acttggcaccaaggctgtcaccctgttacctccgggtcctttcctcctgcacgtcagctttgagccccgagctggtgcttctgctctctgagacatggcaggcctgatgaccatagtaaccagccttctgttccttggtgtctgtgcccaccacatcatccctacgggctctgtggtcatcccctctccctgctgcatgttctttgtttccaagagaattcctgagaaccgagtggtcagctaccagctgtccagcaggagcacatgcctcaaggcaggagtgatcttcaccaccaagaagggccagcagttctgtggcgaccccaagcaggagtgggtccagaggtacatgaagaacctggacgccaagcagaagaaggcttcccctagggccagggcagtggctgtcaagggccctgtccagagatatcctggcaaccaaaccacctgctaatccccgcccagccctccagccctgagtttgggcctgagctgcttggcgggctactcggggcctggagaagccacagtgatggggggaagagctaattttcctgtttcttagcaacactctccagggatgtg

SEQ ID NO: 307417 - protein, 653 aa, Artificial Sequence
  derived and/or modified sequence
MKLLWQVTVHHHTWNAILLPFVYLTAQVWILCAAIAAAASAGPQNCPSVCSCSNQFSKVVCTRRGLSEVPQGIPSNTRYLNLMENNIQMIQADTFRHLHHLEVLQLGRNSIRQIEVGAFNGLASLNTLELFDNWLTVIPSGAFEYLSKLRELWLRNNPIESIPSYAFNRVPSLMRLDLGELKKLEYISEGAFEGLFNLKYLNLGMCNIKDMPNLTPLVGLEELEMSGNHFPEIRPGSFHGLSSLKKLWVMNSQVSLIERNAFDGLASLVELNLAHNNLSSLPHDLFTPLRYLVELHLHHNPWNCDCDILWLAWWLREYIPTNSTCCGRCHAPMHMRGRYLVEVDQASFQCSAPFIMDAPRDLNISEGRMAELKCRTPPMSSVKWLLPNGTVLSHASRHPRISVLNDGTLNFSHVLLSDTGVYTCMVTNVAGNSNASAYLNVSTAELNTSNYSFFTTVTVETTEISPEDTTRKYKPVPTTSTGYQPAYTTSTTVLIQTTRVPKQVAVPATDTTDKMQTSLDEVMKTTKIIIGCFVAVTLLAAAMLIVFYKLRKRHQQRSTVTAARTVEIIQVDEDIPAATSAAATAAPSGVSGEGAVVLPTIHDHINYNTYKPAHGAHWTENSLGNSLHPTVTTISEPYIIQTHTKDKVQETQI

SEQ ID NO: 307418 - protein, 94 aa, Artificial Sequence
  derived and/or modified sequence
MKLLWQVTVHHHTWNAILLPFVYLTAQVWILCAAIAAAASAGPQNCPSVCSCSNQFSKVVCTRRGLSEVPQGIPSNTRYLNLMENNIQMIQADT

SEQ ID NO: 307419 - protein, 51 aa, Artificial Sequence
  derived and/or modified sequence
MKLLWQVTVHHHTWNAILLPFVYLTAQVWILCAAIAAAASAGPQNCPSVCS

SEQ ID NO: 307420 - DNA, 1962 bp, Artificial Sequence
  derived and/or modified sequence
atgaagctgctgtggcaggtgaccgtgcaccaccacacctggaacgccatcctgctgcccttcgtgtacctgaccgcccaggtgtggatcctgtgcgccgccatcgccgccgccgccagcgccggcccccagaactgccccagcgtgtgcagctgcagcaaccagttcagcaaggtggtgtgcaccagaagaggcctgagcgaggtgccccagggcatccccagcaacaccagatacctgaacctgatggagaacaacatccagatgatccaggccgacaccttcagacacctgcaccacctggaggtgctgcagctgggcagaaacagcatcagacagatcgaggtgggcgccttcaacggcctggccagcctgaacaccctggagctgttcgacaactggctgaccgtgatccccagcggcgccttcgagtacctgagcaagctgagagagctgtggctgagaaacaaccccatcgagagcatccccagctacgccttcaacagagtgcccagcctgatgagactggacctgggcgagctgaagaagctggagtacatcagcgagggcgccttcgagggcctgttcaacctgaagtacctgaacctgggcatgtgcaacatcaaggacatgcccaacctgacccccctggtgggcctggaggagctggagatgagcggcaaccacttccccgagatcagacccggcagcttccacggcctgagcagcctgaagaagctgtgggtgatgaacagccaggtgagcctgatcgagagaaacgccttcgacggcctggccagcctggtggagctgaacctggcccacaacaacctgagcagcctgccccacgacctgttcacccccctgagatacctggtggagctgcacctgcaccacaacccctggaactgcgactgcgacatcctgtggctggcctggtggctgagagagtacatccccaccaacagcacctgctgcggcagatgccacgcccccatgcacatgagaggcagatacctggtggaggtggaccaggccagcttccagtgcagcgcccccttcatcatggacgcccccagagacctgaacatcagcgagggcagaatggccgagctgaagtgcagaaccccccccatgagcagcgtgaagtggctgctgcccaacggcaccgtgctgagccacgccagcagacaccccagaatcagcgtgctgaacgacggcaccctgaacttcagccacgtgctgctgagcgacaccggcgtgtacacctgcatggtgaccaacgtggccggcaacagcaacgccagcgcctacctgaacgtgagcaccgccgagctgaacaccagcaactacagcttcttcaccaccgtgaccgtggagaccaccgagatcagccccgaggacaccaccagaaagtacaagcccgtgcccaccaccagcaccggctaccagcccgcctacaccaccagcaccaccgtgctgatccagaccaccagagtgcccaagcaggtggccgtgcccgccaccgacaccaccgacaagatgcagaccagcctggacgaggtgatgaagaccaccaagatcatcatcggctgcttcgtggccgtgaccctgctggccgccgccatgctgatcgtgttctacaagctgagaaagagacaccagcagagaagcaccgtgaccgccgccagaaccgtggagatcatccaggtggacgaggacatccccgccgccaccagcgccgccgccaccgccgcccccagcggcgtgagcggcgagggcgccgtggtgctgcccaccatccacgaccacatcaactacaacacctacaagcccgcccacggcgcccactggaccgagaacagcctgggcaacagcctgcaccccaccgtgaccaccatcagcgagccctacatcatccagacccacaccaaggacaaggtgcaggagacccagatctag

SEQ ID NO: 307421 - DNA, 285 bp, Artificial Sequence
  derived and/or modified sequence
atgaagctgctgtggcaggtgaccgtgcaccaccacacctggaacgccatcctgctgcccttcgtgtacctgaccgcccaggtgtggatcctgtgcgccgccatcgccgccgccgccagcgccggcccccagaactgccccagcgtgtgcagctgcagcaaccagttcagcaaggtggtgtgcaccagaagaggcctgagcgaggtgccccagggcatccccagcaacaccagatacctgaacctgatggagaacaacatccagatgatccaggccgacacctag

SEQ ID NO: 307422 - DNA, 156 bp, Artificial Sequence
  derived and/or modified sequence
atgaagctgctgtggcaggtgaccgtgcaccaccacacctggaacgccatcctgctgcccttcgtgtacctgaccgcccaggtgtggatcctgtgcgccgccatcgccgccgccgccagcgccggcccccagaactgccccagcgtgtgcagctag

SEQ ID NO: 307423 - DNA, 1962 bp, Artificial Sequence
  derived and/or modified sequence
atgaagctgctttggcaggttactgtccatcaccacacttggaatgccatattgttgccctttgtgtatctgacagcacaggtttggattttatgtgcagccatcgctgctgctgcaagtgccgggccccagaactgtcccagtgtgtgcagctgctccaatcagttctcgaaggtggtgtgcaccagaaggggcctgtcagaagtaccccaaggaatcccatctaatacgaggtatcttaacctgatggaaaacaatatacagatgatccaggccgacactttcaggcacttacaccatcttgaggtgctgcagctcggtaggaactcaattcggcagattgaggtcggcgcctttaacggcctggcgagcctcaatactttggagctgttcgataactggctgacagtaattcccagtggagcatttgagtatttgtcgaaattgagggaactctggctgcgcaacaacccgatcgagtctatcccttcttacgctttcaaccgggtgccttcgcttatgagactagatctcggggagctcaaaaaactcgaatacatatccgaaggtgctttcgaaggactatttaacctgaagtacctgaacctcggaatgtgtaacataaaagatatgccaaatctgacacccctcgtaggtctcgaggagctggagatgagcgggaaccattttcccgagattaggccagggagtttccacggtttgtctagcttaaaaaaattgtgggtgatgaactcccaggtcagcctaatcgagcgcaacgccttcgacgggctggccagcctcgtggaactgaatctcgcgcataacaacctgtcctcactgccccatgatctttttactcctcttcgctacctggtggagctgcacctgcatcacaacccttggaattgtgattgtgacatcctgtggctcgcttggtggttgagagaatacattcccaccaattccacctgttgtggaagatgtcatgccccaatgcacatgcgcggacgttatcttgtggaggtggaccaggcttcgtttcagtgttcggcccctttcattatggacgcgccaagggaccttaacatctcggaagggcgtatggccgaacttaaatgcaggacgccacccatgtccagtgtgaagtggctccttcctaatggtacggttctgtcacacgcatctaggcatccccgcatctctgttttaaatgacgggactctcaactttagccacgtgctgctgagtgacacgggggtgtatacatgtatggtcaccaatgtcgccggcaattctaacgcgagcgcctacctgaatgtcagtaccgctgagctgaacaccagtaattacagtttcttcactacagtaaccgtggagaccaccgagatctcacccgaggacacaactagaaaatataaacccgtgcctactacgagcaccggttaccagcccgcctacaccacttccactactgtactgattcagactactcgggttcctaaacaggtggccgtccccgcaaccgacacaaccgataagatgcagacttcactcgatgaggtgatgaagaccactaagatcatcatcggctgctttgttgccgtaaccctgttagctgcagcaatgctgatagtgttttataaactccgcaagcgccaccagcagcgaagtaccgttacagcagctaggacagtagaaattatacaagtagacgaggatattcccgcggctactagcgctgcggccactgcagctccaagtggcgtgagtggcgaaggggcagtggtcctcccaaccattcacgaccacattaactacaatacttacaagcccgcacacggggcgcactggactgaaaacagccttggcaacagcctacaccccacggtcaccaccatttctgaaccttatattatccagactcacacgaaggataaggtgcaggaaacgcagatttag

SEQ ID NO: 307424 - DNA, 285 bp, Artificial Sequence
  derived and/or modified sequence
atgaaactcttatggcaggtcaccgtccaccaccacacgtggaacgccatccttttaccttttgtgtacctcactgcccaagtttggatactgtgtgccgcaatcgcggcggcagcctctgctggaccccaaaattgtccaagtgtgtgtagttgctcaaatcagttcagtaaggtggtgtgtacacgccgcggactttctgaggttccccaagggatcccttcgaatactcgttacctcaacctgatggaaaacaacattcagatgatccaggcagatacgtag

SEQ ID NO: 307425 - DNA, 156 bp, Artificial Sequence
  derived and/or modified sequence
atgaaactcttatggcaagttaccgtccaccaccacacttggaatgccattctgcttccattcgtctacttgacagctcaggtgtggatattatgcgcagcaattgccgctgccgcctcagccggccctcagaattgtccttcagtgtgctcgtag

SEQ ID NO: 307426 - DNA, 3828 bp, Artificial Sequence
  derived and/or modified sequence
tccctcccctcccctcccctcccctctgccctccccgcccccaccacttcccccttttgttaattaaaactaagaagtcggaatgggaacgaggtgcccagctcccgtggagaaagcttaaggacaccacgccagtgctttcctgccttccttccgagatggaaagaggagctcctagctcacttaagccggggtagggctggttctcctttccgagccaaaatcccaggcgatggtgaattatgaacgtgccacaccatgaagctcttgtggcaggtaactgtgcaccaccacacctggaatgccatcctgctcccgttcgtctacctcacggcgcaagtgtggattctgtgtgcagccatcgctgctgccgcctcagccgggccccagaactgcccctccgtctgctcgtgcagtaaccagttcagcaaggtggtgtgcacgcgccggggcctctccgaggtcccgcagggtattccctcgaacacccggtacctcaacctcatggagaacaacatccagatgatccaggccgacaccttccgccacctccaccacctggaggtcctgcagttgggcaggaactccatccggcagattgaggtgggggccttcaacggcctggccagcctcaacaccctggagctgttcgacaactggctgacagtcatccctagcggggcctttgaatacctgtccaagctgcgggagctctggcttcgcaacaaccccatcgaaagcatcccctcttacgccttcaaccgggtgccctccctcatgcgcctggacttgggggagctcaagaagctggagtatatctctgagggagcttttgaggggctgttcaacctcaagtatctgaacttgggcatgtgcaacattaaagacatgcccaatctcacccccctggtggggctggaggagctggagatgtcagggaaccacttccctgagatcaggcctggctccttccatggcctgagctccctcaagaagctctgggtcatgaactcacaggtcagcctgattgagcggaatgcttttgacgggctggcttcacttgtggaactcaacttggcccacaataacctctcttctttgccccatgacctctttaccccgctgaggtacctggtggagttgcatctacaccacaacccttggaactgtgattgtgacattctgtggctagcctggtggcttcgagagtatatacccaccaattccacctgctgtggccgctgtcatgctcccatgcacatgcgaggccgctacctcgtggaggtggaccaggcctccttccagtgctctgcccccttcatcatggacgcacctcgagacctcaacatttctgagggtcggatggcagaacttaagtgtcggactccccctatgtcctccgtgaagtggttgctgcccaatgggacagtgctcagccacgcctcccgccacccaaggatctctgtcctcaacgacggcaccttgaacttttcccacgtgctgctttcagacactggggtgtacacatgcatggtgaccaatgttgcaggcaactccaacgcctcggcctacctcaatgtgagcacggctgagcttaacacctccaactacagcttcttcaccacagtaacagtggagaccacggagatctcgcctgaggacacaacgcgaaagtacaagcctgttcctaccacgtccactggttaccagccggcatataccacctctaccacggtgctcattcagactacccgtgtgcccaagcaggtggcagtacccgcgacagacaccactgacaagatgcagaccagcctggatgaagtcatgaagaccaccaagatcatcattggctgctttgtggcagtgactctgctagctgccgccatgttgattgtcttctataaacttcgtaagcggcaccagcagcggagtacagtcacagccgcccggactgttgagataatccaggtggacgaagacatcccagcagcaacatccgcagcagcaacagcagctccgtccggtgtatcaggtgagggggcagtagtgctgcccacaattcatgaccatattaactacaacacctacaaaccagcacatggggcccactggacagaaaacagcctggggaactctctgcaccccacagtcaccactatctctgaaccttatataattcagacccataccaaggacaaggtacaggaaactcaaatatgactcccctcccccaaaaaacttataaaatgcaatagaatgcacacaaagacagcaacttttgtacagagtggggagagactttttcttgtatatgcttatatattaagtctatgggctggttaaaaaaaacagattatattaaaatttaaagacaaaaagtcaaaacaaaaatattttctaacttgtaagttctatttaaagggggtgggggggaatcttgggaacgttgtggggtacaagccacaagttaacttgctatgctgccagaagggatttctggtataaggttgaaattgctgagataaaataaactaaaacaacaaacatccttaaagaggtagggtgtgggctgctgagggggcaagagggatagactgaatctgtcattttttagaagatgcttcataggacacaggactatccatttctacagacatctttcttaagccgagagctgtctttgcagaattatcttattaaaaaaaaatacaaaaaaaaagcaccatgaatttgtactgtgccaaaatgatagtggcaataatatttttcttcagaggctaaggggaagatagacctgtacatgtattttaagcaggaaaaccaccaaaattcaaacgaacccttaaaggggctgagtctttgtccatgtgcacaagtcttgggggtctgtgcactggacacacatgtgccttgcctgacagaattgcttagaaaggagcagagaaggacgggagctggcgtagctctcagtctaatgctttcacattgcaccagattcctgcagttgggcttaacccactctgcaaggcatgtgtctattcagggtttcccaggaggaggaggcccctgaaggggtgcggcagcaggggggtgggaagggagggtaaagcagagagaatgtattcacaggaggccataaattagcattgtgccatgtccacctgttgttcctggactctgacacatgattgtagacaatgatggcattttatgatttttaaaaaagattttgtttgttttaaggtggagagggaggagaagcctgaattggggagcttgggagtggaagcttttctcatgcttgtgatttggtgactcttctaaatgctgattcattagggattattacagcggatgtcaactggttgtggtgatggggtgggggcagaacatgagtagcaaagaaaagggagagacgaaaagggtacaggctcacgtaaagtaatgaagcctttcccaaccaggatggttcacaaaaaagctgtgagatccacagttacaagtgacacgcatgcacacatggagttccacatggggtactgttgaatggagcacactgatgggaagcttccctctcccaggccccctcaggagaaggtggaagagaaagggtgggcgtgggtggggaaggcagagatctctgttattctggtccatctaatgatgtaacttctttcagttattattttagctttaaaaggaaataaggggttcagatttgaaagggggtggtatgggtgggggaggggaattgccaacaaaagaacactgattgtaatgtgagaaaagtgtatttttgtattttaataaatattgttgaatttttaa

SEQ ID NO: 307427 - DNA, 561 bp, Artificial Sequence
  derived and/or modified sequence
acattcacgttctgactgaaggacaaaaggatgagagagcagtctgcgtggctgccgcctgcaacaccgcgagcccggcgcgaggaggagacgaagtcggaatgggaacgaggtgcccagctcccgtggagaaagcttaaggacaccacgccagtgctttcctgccttccttccgagatggaaagaggagctcctagctcacttaagccggggtagggctggttctcctttccgagccaaaatcccaggcgatggtgaattatgaacgtgccacaccatgaagctcttgtggcaggtaactgtgcaccaccacacctggaatgccatcctgctcccgttcgtctacctcacggcgcaagtgtggattctgtgtgcagccatcgctgctgccgcctcagccgggccccagaactgcccctccgtctgctcgtgcagtaaccagttcagcaaggtggtgtgcacgcgccggggcctctccgaggtcccgcagggtattccctcgaacacccggtacctcaacctcatggagaacaacatccagatgatccaggccgacacctt

SEQ ID NO: 307428 - DNA, 451 bp, Artificial Sequence
  derived and/or modified sequence
tggtcctcgggggccggacggagcgccgccccgcgtgccggcagccggcggactggagaactgaccccccgtttttgtctcttccaccctccgagaagaggcgaggagaaaggggaagtcggaatgggaacgaggtgcccagctcccgtggagaaagcttaaggacaccacgccagtgctttcctgccttccttccgagatggaaagaggagctcctagctcacttaagccggggtagggctggttctcctttccgagccaaaatcccaggcgatggtgaattatgaacgtgccacaccatgaagctcttgtggcaggtaactgtgcaccaccacacctggaatgccatcctgctcccgttcgtctacctcacggcgcaagtgtggattctgtgtgcagccatcgctgctgccgcctcagccgggccccagaactgcccctccgtctgctc

SEQ ID NO: 307429 - DNA, 1962 bp, Artificial Sequence
  derived and/or modified sequence
atgaagctgctgtggcaggtgacagtgcaccaccacacctggaatgccatcctgctgccctttgtgtacctgacagcccaggtgtggatcctgtgtgccgccatcgctgctgctgccagcgctggcccccagaactgccccagcgtgtgcagctgcagcaaccagttcagcaaggtggtgtgcacccggcggggcctgtctgaggtgccccagggcatccccagcaacacccgctacctgaacctgatggagaacaacatccagatgatccaggccgacaccttccgccacctgcaccacctggaggtgctgcagctgggcaggaacagcatccggcagatcgaggtgggcgccttcaacggcctggccagcctgaacaccctggagctgtttgacaactggctgaccgtcatccccagcggggcctttgagtacctgagcaagctgcgggagctgtggctgaggaacaaccccatcgagagcatccccagctatgccttcaacagagtgcccagcctgatgaggctggacctgggggagctgaagaagctggagtacatcagcgagggcgcctttgagggcctcttcaacctgaagtacctgaacctgggcatgtgcaacatcaaggacatgcccaacctgacccccctggtgggcctggaggagctggagatgagcggcaaccacttccctgagatccggcccggcagcttccacggcctgagcagcctgaagaagctgtgggtgatgaacagccaggtgtccctgattgaaagaaatgcctttgatggcctggccagcctggtggagctgaacctggcccacaacaacctgagcagcctgccccatgacctcttcacccccctgcgctacctggtggagctgcacctgcaccacaacccctggaactgtgactgtgacatcctgtggctggcctggtggctgcgggagtacatccccaccaacagcacctgctgcggccgctgccacgcccccatgcacatgaggggccgctacctggtggaggtggaccaggccagcttccagtgcagcgcccccttcatcatggatgccccccgggacctgaacatcagcgagggccgcatggccgagctgaagtgcaggaccccacccatgagctctgtgaagtggctgctgcccaacggcaccgtgctgagccacgccagccgccacccccgcatctctgtgctgaatgatggcaccctgaacttcagccacgtgctgctgagtgacacaggagtgtacacctgcatggtgaccaacgtggccggcaacagcaatgccagcgcctacctgaatgtgtccacagctgagctgaacaccagcaactacagcttcttcaccaccgtgacagtggagaccacagagatcagccctgaggacaccaccaggaagtacaagcctgtgcccaccaccagcacaggctaccagcctgcctacaccaccagcaccaccgtgctgatccagaccaccagggtgcccaagcaggtggccgtgcctgccacagacaccacagacaagatgcagaccagcctggatgaggtgatgaagaccaccaagatcatcatcggctgctttgtggccgtgaccctgctggccgccgccatgctgattgtgttctacaagctgaggaagaggcaccagcagaggagcacagtgacagctgccaggacagtggagatcatccaggtggatgaggacatcccagctgccaccagcgctgctgccacagctgcccccagcggcgtgtctggagagggcgctgtggtgctgcccaccatccatgaccacatcaactacaacacctacaagccagcccacggggcccactggacagagaacagcctgggcaacagcctgcaccccaccgtgaccaccatcagcgagccctacatcatccagacccacaccaaggacaaggtgcaggagacccagatctag

SEQ ID NO: 307430 - DNA, 285 bp, Artificial Sequence
  derived and/or modified sequence
atgaagctgctgtggcaggtgacagtgcaccaccacacctggaatgccatcctgctgccctttgtgtacctgacagcccaggtgtggatcctgtgtgccgccatcgctgctgctgccagcgctggcccccagaactgccccagcgtgtgcagctgcagcaaccagttcagcaaggtggtgtgcacccggcggggcctgtctgaggtgccccagggcatccccagcaacacccgctacctgaacctgatggagaacaacatccagatgatccaggccgacacctag

SEQ ID NO: 307431 - DNA, 156 bp, Artificial Sequence
  derived and/or modified sequence
atgaagctgctgtggcaggtgacagtgcaccaccacacctggaatgccatcctgctgccctttgtgtacctgacagcccaggtgtggatcctgtgtgccgccatcgctgctgctgccagcgctggcccccagaactgccccagcgtgtgcagctag

SEQ ID NO: 307432 - DNA, 1962 bp, Artificial Sequence
  derived and/or modified sequence
atgaagctgctgtggcaggtgaccgtgcaccaccacacctggaacgccatactgctgccgtttgtgtacctgactgcacaggtgtggatcttgtgcgctgcgatcgcagcagcagcctctgctggccctcagaactgcccttctgtgtgctcatgtagtaatcaattctccaaagtggtttgcactcgccggggcctctcggaagtgccccagggcatcccatccaatactcgatatctgaaccttatggagaacaacatccagatgattcaggccgacacgtttaggcacctgcatcatttggaggtactgcaattggggcgaaatagtatcaggcagatcgaggtgggcgcctttaatgggctggccagtctcaacacactggaactcttcgataattggctgacagttatccctagcggggcgttcgagtacctctccaaattgagagaactgtggctgcgtaataaccccattgagtctataccttcctacgcctttaaccgggtccccagcctcatgcgactggaccttggcgaactcaagaaactcgagtacatctctgagggggctttcgagggcctattcaatttaaagtacctgaacctgggtatgtgcaacatcaaggatatgccgaatctgacacccttagtgggattggaggaacttgagatgtctggtaatcattttcccgagataagacccgggagttttcacggcctgagcagccttaaaaaactgtgggtaatgaactctcaagttagcctgatcgagcgcaacgccttcgacggcctggcttctcttgtggaactcaatctagcacacaataatctctcatccttaccccacgatctatttacacccctgaggtacttggtggagctgcacctacatcacaatccatggaactgtgactgtgacattttgtggctggcttggtggctgcgcgaatatatccccacaaacagtacatgttgcggaagatgccacgccccaatgcatatgagaggtcgctacctcgtagaggtcgaccaggcgtcctttcagtgcagtgcccccttcattatggacgcccctcgggatcttaatatcagtgaaggaaggatggccgaattgaagtgcaggacacccccaatgtcctccgtgaagtggctcttgccaaacgggacggtgctgagccacgccagtcgtcacccccgaattagtgtcttgaacgacggtacgctcaatttttctcacgtgttgttgtcagacacaggtgtgtacacatgcatggtcaccaatgtcgccggtaattccaacgcgtcagcatacctgaatgtttccaccgccgagctgaacacaagcaattatagtttcttcacgacagtgaccgtcgagaccactgaaatctctcccgaagatactactaggaaatacaagcccgtgcccactaccagtacggggtaccagcccgcctacaccacatcaaccacagtcctcattcagacaacgcgcgtccctaaacaggtggctgtgcctgccacggatacaacggataaaatgcaaacaagcttggacgaggtcatgaagaccactaaaatcatcataggatgtttcgtagccgtaacgctcctcgccgccgcaatgctaatcgtcttctacaagctccgtaagcgccatcagcagaggtctactgtgactgccgcccgcaccgtagaaatcatccaggtggacgaggatatccccgcagctactagtgccgccgctactgccgctccttctggggtttcaggagaaggcgccgtggtgctgcctacaattcatgaccacattaactataacacttacaagccagcgcacggggctcactggacagaaaatagcctcggaaatagtctgcacccgacagtgacaacaatttcagagccttatataatccagacgcacaccaaggacaaagtgcaagagacacagatctag

SEQ ID NO: 307433 - DNA, 285 bp, Artificial Sequence
  derived and/or modified sequence
atgaagctgctgtggcaggtgaccgtgcaccaccacacctggaacgccattttgctgccttttgtatatctgacagctcaggtttggatcctctgcgccgcaatagctgctgcagcttccgctggtccccagaattgtccctccgtgtgtagctgcagcaaccagttttccaaggtggtttgcacccgtcgtggacttagcgaagttccacaaggaattccaagcaataccaggtatctcaacctcatggagaataacattcaaatgatccaggctgacacttag

SEQ ID NO: 307434 - DNA, 156 bp, Artificial Sequence
  derived and/or modified sequence
atgaagctgctgtggcaggtgaccgtgcaccaccacacctggaacgccattctgctgcctttcgtgtacctgactgcgcaagtgtggattctgtgcgccgccattgcggccgccgcatctgcagggcctcaaaactgtccttctgtctgttcatag

SEQ ID NO: 307435 - DNA, 1962 bp, Artificial Sequence
  derived and/or modified sequence
atgaagctgctctggcaggtgactgtacaccaccatacctggaacgctatattactgcccttcgtctatttgaccgcgcaggtgtggatattgtgcgctgccatcgcagcagctgcttctgctggacctcaaaattgcccatcagtctgctcttgttccaatcaattcagcaaagtagtgtgcacgcgcagaggcctgtcggaggtgccccagggcattccctctaacaccagatacctgaacctgatggagaataatatccaaatgatacaggcagacacattccggcacctgcatcacctggaggtcctccagttgggtcggaattcaatccgacagatcgaagtcggagcctttaatggactagcatccctgaacaccctggaactattcgataattggctgaccgtgatcccgtcaggcgctttcgagtacctcagcaaactgcgcgaactgtggttgaggaacaacccaatcgagtctataccttcctacgcgtttaacagagtgccctctttaatgcgcctagatcttggcgaattgaagaagctagagtatataagcgagggcgcttttgagggcctgtttaatctgaaatacctgaatctaggaatgtgtaatatcaaggatatgccaaacctgactcctctcgtgggcttggaagagttagagatgagcgggaatcattttcctgaaattcggcctggttcctttcatggattgtccagcctgaagaagttatgggtgatgaatagtcaagtatctctgattgaacgtaatgcattcgacggactggcctctctggtcgaattgaacctagcccataacaacctgtcttctttaccgcacgacctctttacccccctgcggtatttggtagaactgcacctccaccacaacccgtggaactgtgactgtgatatcctgtggcttgcatggtggctgcgggaatacatccctaccaatagtacgtgctgtggaaggtgccacgcaccaatgcacatgaggggcaggtatctggtggaggtggatcaagcgagttttcaatgtagtgcaccgttcatcatggatgcccctagggaccttaatattagcgagggtagaatggccgaactcaaatgtcgtaccccaccaatgagttcggtgaaatggctcctaccaaatggtaccgtgctatcgcacgccagccgccacccaagaatatctgtgctgaatgacggtaccctaaatttctcacacgtcctcctgagcgacactggcgtgtacacatgtatggtcacgaacgttgccggtaatagcaatgcaagcgcctatcttaacgtttcaaccgccgaacttaacacatcaaactacagctttttcactacggtcaccgtcgaaacaacagagatatcccccgaggatacaacaaggaagtacaagcctgtccctacgacgtcaaccggctaccagcccgcatacacaacatctaccacagtgttgattcagacgactagggttccaaagcaggttgcggtccccgctaccgatactactgacaagatgcaaactagtctggatgaggtgatgaagactaccaaaatcattattggctgctttgtggctgttacactcctggccgctgctatgttgatagtgttctacaaacttaggaagaggcaccaacaaagaagtacagtgacagcggcacgtacggtggaaattattcaggtcgatgaggacataccagcggcaacaagcgccgcagccactgctgctccctcaggcgtgtctggagagggagccgtggttctgcccacaatacatgaccatattaattacaatacatataagcctgcccatggtgcccattggaccgagaacagtctggggaattccctgcaccctactgtcactacgatctccgagccttacatcattcagacccacacaaaggacaaggtgcaagaaactcaaatatag

SEQ ID NO: 307436 - DNA, 285 bp, Artificial Sequence
  derived and/or modified sequence
atgaaactcttgtggcaggttacagtgcatcatcatacctggaacgctattctcttgccttttgtgtacctcactgcccaggtgtggatcctctgcgcagccatcgctgccgctgcatctgccggtccacagaattgcccatccgtgtgttcttgcagcaaccagttttctaaggtggtctgtacccggagggggttatccgaggtcccacagggaattccatcaaatactagatacctaaatctaatggaaaataatatacagatgattcaggccgacacctag

SEQ ID NO: 307437 - DNA, 156 bp, Artificial Sequence
  derived and/or modified sequence
atgaaactgctgtggcaggtcacagttcatcaccacacatggaacgccatcctcctccccttcgtctaccttactgcccaggtctggattctgtgtgcagccattgccgctgccgcatctgctgggccacagaattgcccttcagtgtgctcgtag

SEQ ID NO: 307438 - protein, 63 aa, Artificial Sequence
  derived and/or modified sequence
MQAMEGEVLLPALYEEEEEEEEEEEEVEEEEEQVQKGGSVGSLSVNKHRGLSLTETELEELRA

SEQ ID NO: 307439 - protein, 39 aa, Artificial Sequence
  derived and/or modified sequence
MDLIPNLAVETWLLLAVSLVLLYLMRVPKSAKSPLTKQT

SEQ ID NO: 307440 - protein, 280 aa, Artificial Sequence
  derived and/or modified sequence
MNLETGNGPHHFPMWRYVGEKPEAGSREQQVHQLERFLWGLHHGCNHWHIIWSELGFSQQSTRSLSEKYEEAFKIGFFGSLFTLNIQSLAVLPRPECMVRSGLTETSTSWVRVILLPQPPEELGLQHRVDFFQQMIDSQNSKETKSHKALSDLELVAQSIIIIFAAYDTTSTTLPFIMYELATHPDVQQKLQEEIDAVLPNKAPVTYDALVQMEYLDMVVNETLRLFPVVSRVTRVCKKDIEINGVFIPKGLAVMVPIYALHHDPKYWTEPEKFCPERSH

SEQ ID NO: 307441 - DNA, 843 bp, Artificial Sequence
  derived and/or modified sequence
atgaatctggaaaccgggaacgggccccaccatttcccaatgtggcgttacgtgggagagaaaccggaggccggaagtagggagcaacaagtacatcaactggaacgtttcctttggggtctgcaccacggatgcaaccattggcacataatttggagcgaactcggcttcagccagcaaagcacgagatccctgagcgagaaatacgaagaggcctttaaaatcgggttcttcggatctctgttcacgctaaatatccagtccctagctgtgctgccaagacctgaatgtatggtcaggagtggcttaaccgagacatcaacatcatgggtgagagtaattctactgccacagccacctgaagagctgggcttgcagcacagggtggacttttttcaacaaatgattgattcacagaactcaaaagaaacaaagagccacaaggcgttgtcagacttggagctggttgcccagtctataattatcatattcgcagcttacgacactacatccaccactcttccattcatcatgtacgagctcgccacacatcccgacgtgcaacagaaactgcaggaggagattgacgcagtgctacccaataaggcccccgtgacatacgacgcccttgtccagatggaatacctggacatggtcgtcaatgaaacactcagactcttccccgtggtgagcagagtcaccagagtttgcaaaaaagacatagaaatcaacggagtctttatacccaagggcctggccgttatggttccgatctacgcattgcaccacgaccctaagtattggacagaacccgaaaagttctgtccagaacggagtcactag

SEQ ID NO: 307442 - DNA, 843 bp, Artificial Sequence
  derived and/or modified sequence
atgaacctggagactggaaatggcccccaccacttccccatgtggaggtatgtgggggagaagccagaggccggcagccgggagcagcaggtgcaccagctggagcgcttcctgtggggcctgcaccacggctgcaaccactggcacatcatctggagcgagctgggcttcagccagcagagcaccaggagcctgtctgagaagtatgaggaggccttcaagattggcttcttcggcagcctcttcaccctgaacatccagagcctggccgtgctgcccaggcctgagtgcatggtgcgcagcggcctgacagagaccagcacctcctgggtgcgggtcatcctgctgccccagcccccagaggagctgggcctgcagcaccgggtggacttcttccagcagatgattgacagccagaacagcaaggagaccaagagccacaaggccctgagtgacctggagctggtggcccagagcatcatcatcatctttgctgcctatgacaccaccagcaccaccctgcccttcatcatgtatgagctggccacccacccagatgtgcagcagaagctgcaggaggagattgatgctgtgctgcccaacaaggcccctgtgacctatgatgccctggtgcagatggagtacctggacatggtggtgaatgagaccctgcggctcttccctgtggtgtcccgggtgaccagggtgtgcaagaaggacatcgagatcaacggggtcttcatccccaagggcctggccgtgatggtgcccatctatgccctgcaccacgaccccaagtactggacagagcctgagaagttctgcccagagaggagccactag

SEQ ID NO: 307443 - DNA, 843 bp, Artificial Sequence
  derived and/or modified sequence
atgaacctggagaccggcaacggcccccaccacttccccatgtggcggtatgtcggcgagaaacccgaagcgggctcccgtgaacagcaagtgcatcaactggagagatttctgtgggggctccaccacgggtgtaaccattggcatatcatttggtccgagctggggttctctcagcagagtacccggtcacttagcgagaaatacgaagaagcgttcaaaattggcttcttcggaagtctgtttactctgaacatacaatcactggccgtgctgcccaggcctgagtgtatggttaggagcggtctgactgagacctccacaagttgggtacgggtgatcctacttccgcagccaccagaggagctgggactgcaacatcgcgtggactttttccagcagatgattgatagtcaaaatagtaaagagaccaagagtcataaggccttgagcgacctggagctcgttgcccagagtattattatcattttcgctgcctatgacactacaagcaccactttacccttcatcatgtacgagctagccacccatccagacgttcagcagaagttacaggaggagatcgatgcagtcctgcccaataaagctccagttacctacgacgccctggttcagatggagtacttggacatggtggtaaatgaaactctccgcctcttcccggtggtgtccagagtcacacgagtgtgtaagaaggacatagaaatcaatggggttttcatccccaagggcctagccgtcatggtcccgatctatgcactgcaccatgatcctaagtactggacagaacctgagaagttttgcccagagcgtagtcactag

SEQ ID NO: 307444 - DNA, 843 bp, Artificial Sequence
  derived and/or modified sequence
atgaatctggagaccggtaatgggccacaccacttcccgatgtggcgctatgtaggagagaagcctgaggccggatctagggaacaacaagtgcaccaactcgagagatttctgtggggcctgcatcacggctgcaaccattggcatatcatctggagcgaactcggtttttctcagcagagcacgcgatctttgtcagagaagtacgaagaggcttttaagattgggttcttcggatcattgttcaccttaaatatacagtcattggcagtgctcccacgacctgaatgtatggtgcggtcagggctcaccgagaccagcacatcttgggtgcgcgttattttgttacctcagcccccagaggagctcgggcttcagcaccgagttgatttctttcagcagatgatcgactcccagaattcaaaggaaaccaaaagccataaagccctaagcgatctagaattggtggctcagtccattattattattttcgccgcttacgataccacatcgacaaccttgccatttataatgtatgaactcgcaacacatccggatgtacagcagaaactgcaagaggagatcgacgcagtgttgccaaacaaagcgccagtgacttacgatgcactggtgcagatggagtaccttgatatggtcgtgaacgaaaccctacgcctcttcccagtggttagccgagtgacaagggtctgcaaaaaagacatagaaattaacggagtgttcattccaaaagggctggctgttatggtgcctatctacgcactccatcatgatccaaagtactggacagagccagagaaattctgtccagagagatctcactag

SEQ ID NO: 307445 - DNA, 1279 bp, Artificial Sequence
  derived and/or modified sequence
gcacagcccagcaaagagcagcacacagctgaaagaaaaactcagaagacagagctgaaaaagaaaactggtgatggatctcattccaaactttgccatggaaacatgggttcttgtggctaccagcctggtactcctctatatggtctttggaattttgacagagaatgtaatgaaaaatacggagaaatgtggggcctttaggtccaatgggatttctgaaaagtgccttaagttttgctgaagatgaagaatggaagagaatacgaacattgctatctccagctttcaccagtgtaaaattcaaggaagtaagaaaataaggtgatttataattagaaacttaaaggatgaatctggagacaggtaatggtccccatcatttcccaatgtggagatatgttggtgagaagcctgaggcaggaagcagagaacagcaagtccatcaacttgaaagatttctttggggcctacaccatggatgtaatcactggcacattatttggagtgaacttggattctctcaacaatccacaagatccctttctgaaaaatatgaagaagcttttaaaattggattttttggatccctttttactcttaatatacagagtctcgctgtgttgcctaggccggagtgcatggtgcgatctgggctcactgaaacctccacctcctgggttcgagtgattctcctgcctcagcctcctgaggagctgggattacagcatcgagtagatttctttcaacagatgatcgactcccagaattccaaagaaacaaagtcccataaagctctgtctgatctggagcttgtggcccagtcaattatcatcatttttgctgcctatgacacaactagcaccactctccccttcattatgtatgaactggccactcaccctgatgtccagcagaaactgcaggaggagattgacgcagttttacccaataaggcacctgtcacctacgatgccctggtacagatggagtaccttgacatggtggtgaatgaaacgctcagattattcccagttgttagtagagttacgagagtctgcaagaaagatattgaaatcaatggagtgttcattcccaaagggttagcagtgatggttccaatctatgctcttcaccatgacccaaagtactggacagagcctgagaagttctgccctgaaagatcccactgaaattagacaatctaccaattcttcaaccagaaaaacctattgttctaaaagtgcacttaagagatgggattacaagtggaccctga

SEQ ID NO: 307446 - DNA, 843 bp, Artificial Sequence
  derived and/or modified sequence
atgaacctggagaccggcaacggcccccaccacttccccatgtggagatacgtgggcgagaagcccgaggccggcagcagagagcagcaggtgcaccagctggagagattcctgtggggcctgcaccacggctgcaaccactggcacatcatctggagcgagctgggcttcagccagcagagcaccagaagcctgagcgagaagtacgaggaggccttcaagatcggcttcttcggcagcctgttcaccctgaacatccagagcctggccgtgctgcccagacccgagtgcatggtgagaagcggcctgaccgagaccagcaccagctgggtgagagtgatcctgctgccccagccccccgaggagctgggcctgcagcacagagtggacttcttccagcagatgatcgacagccagaacagcaaggagaccaagagccacaaggccctgagcgacctggagctggtggcccagagcatcatcatcatcttcgccgcctacgacaccaccagcaccaccctgcccttcatcatgtacgagctggccacccaccccgacgtgcagcagaagctgcaggaggagatcgacgccgtgctgcccaacaaggcccccgtgacctacgacgccctggtgcagatggagtacctggacatggtggtgaacgagaccctgagactgttccccgtggtgagcagagtgaccagagtgtgcaagaaggacatcgagatcaacggcgtgttcatccccaagggcctggccgtgatggtgcccatctacgccctgcaccacgaccccaagtactggaccgagcccgagaagttctgccccgagagaagccactag

SEQ ID NO: 307447 - protein, 1241 aa, Artificial Sequence
  derived and/or modified sequence
MSSAPRRPAKGADSFCTPEPESLGPGTPGFPEQEEDELHRTLGVERFEEILQEAGSRGGEEPGRSYGEEDFEYHRQSSHHIHHPLSTHLPPDARRRKTPQGPGRKPRRRPGASPTGETPTIEEGEEDEDEASEAEGARALTQPSPVSTPSSVQFFLQEDDSADRKAERTSPSSPAPLPHQEATPRASKGAQAGTQVEEAEAEAVAVASGTAGGDDGGASGRPLPKAQPGHRSYNLQERRRIGSMTGAEQALLPRVPTDEIEAQTLATADLDLMKSHRFEDVPGVRRHLVRKNAKGSTQSGREGREPGPTPRARPRAPHKPHEVFVELNELLLDKNQEPQWRETARWIKFEEDVEEETERWGKPHVASLSFRSLLELRRTLAHGAVLLDLDQQTLPGVAHQVVEQMVISDQIKAEDRANVLRALLLKHSHPSDEKDFSFPRNISAGSLGSLLGHHHGQGAESDPHVTEPLMGGVPETRLEVERERELPPPAPPAGITRSKSKHELKLLEKIPENAEATVVLVGCVEFLSRPTMAFVRLREAVELDAVLEVPVPVRFLFLLLGPSSANMDYHEIGRSISTLMSDKQFHEAAYLADEREDLLTAINAFLDCSVVLPPSEVQGEELLRSVAHFQRQMLKKREEQGRLLPTGAGLEPKSAQDKALLQMVEAAGAAEDDPLRRTGRPFGGLIRDVRRRYPHYLSDFRDALDPQCLAAVIFIYFAALSPAITFGGLLGEKTQDLIGVSELIMSTALQGVVFCLLGAQPLLVIGFSGPLLVFEEAFFSFCSSNHLEYLVGRVWIGFWLVFLALLMVALEGSFLVRFVSRFTQEIFAFLISLIFIYETFYKLVKIFQEHPLHGCSASNSSEVDGGENMTWAGARPTLGPGNRSLAGQSGQGKPRGQPNTALLSLVLMAGTFFIAFFLRKFKNSRFFPGRIRRVIGDFGVPIAILIMVLVDYSIEDTYTQKLSVPSGFSVTAPEKRGWVINPLGEKSPFPVWMMVASLLPAILVFILIFMETQITTLIISKKERMLQKGSGFHLDLLLIVAMGGICALFGLPWLAAATVRSVTHANALTVMSKAVAPGDKPKIQEVKEQRVTGLLVALLVGLSIVIGDLLRQIPLAVLFGIFLYMGVTSLNGIQFYERLHLLLMPPKHHPDVTYVKKVRTLRMHLFTALQLLCLALLWAVMSTAASLAFPFILILTVPLRMVVLTRIFTDREMKCLDANEAEPVFDEREGVDEYNEMPMPV

SEQ ID NO: 307448 - protein, 151 aa, Artificial Sequence [sequence omitted]

SEQ ID NO: 307449 - protein, 127 aa, Artificial Sequence
  derived and/or modified sequence
MSSAPRRPAKGADSFCTPEPESLGPGTPGFPEQEEDELHRTLGVERFEEILQEAGSRGGEEPGRSYGEEDFEYHRQSSHHIHHPLSTHLPPDARRRKTPQGPGRKPRRRPGASPTGETPTIEEGEED

SEQ ID NO: 307450 - protein, 145 aa, Artificial Sequence
  derived and/or modified sequence
MSSAPRRPAKGADSFCTPEPESLGPGTPGFPEQEEDELHRTLGVERFEEILQEAGSRGGEEPGRSYGEEDFEYHRQSSHHIHHPLSTHLPPDARRRKTPQGPGRKPRRRPGASPTGETPTIEEGEEDEDEASEAEGARALTQPSP

SEQ ID NO: 307451 - protein, 70 aa, Artificial Sequence
  derived and/or modified sequence
MSSAPRRPAKGADSFCTPEPESLGPGTPGFPEQEEDELHRTLGVERFEEILQEAGSRGGEEPGRSYGEED

SEQ ID NO: 307452 - protein, 169 aa, Artificial Sequence
  derived and/or modified sequence
MSSAPRRPAKGADSFCTPEPESLGPGTPGFPEQEEDELHRTLGVERFEEILQEAGSRGGEEPGRSYGEEDFEYHRQSSHHIHHPLSTHLPPDARRRKTPQGPGRKPRRRPGASPTGETPTIEEGEEDEDEASEAEGARALTQPSPVSTPSSVQFFLQEDDSADRKAERT

SEQ ID NO: 307453 - DNA, 3480 bp, Artificial Sequence
  derived and/or modified sequence
atgtcttcggccccacggaggccggcaaaaggtgcagactcattctgcacccccggccccgggcgtaaacccagaaggaggccaggtgcttcacccactggggagacccctacgatcgaggaaggagaagaagacgaagacgaggcttcagaggctgagggtgcccgggcccttacacagccaagtccggtcagtacaccgtcttctgtgcagtttttcctccaggaggatgatagtgctgatcgtaaggccgagcggaccagcccaagcagcccagccccgctcccacaccaggaggctactcccagagcaagcaagggagctcaagctggtactcaagtggaagaggccgaagccgaagccgtagcggtagctagcgggacagctgggggcgatgatggtggtgcatccggcagaccattgcctaaggcgcagccgggtcaccgatcctacaatttacaagagagacgccgaatcggcagtatgaccggcgccgaacaggccctgctccccagggtaccaaccgacgagattgaagctcagaccctggcaactgcagatctagacctgatgaaatcccatagatttgaggatgtgccaggcgtgagacgccatctggtccgcaaaaatgccaagggctctacgcagagcgggagagagggacgtgaaccaggcccaaccccaagagcccgaccgagagctcctcacaagcctcacgaggtgtttgtcgagcttaacgagctgctactagacaagaatcaagaaccacagtggagggagactgcccgatggatcaagtttgaagaggacgtggaagaagagactgagagatggggaaagccacatgtggcctccttgtctttccgtagcctccttgagctgcggaggactctcgcacatggagccgtgctgctggacctggaccaacagaccctacctggggtggctcaccaggtggtggagcagatggtcatctcagaccagataaaggctgaagaccgagccaacgtcttaagggccctgctcctgaaacactcccatccttcggatgagaaggacttttccttccctcgcaacatctctgcagggtcccttgggagtctgctgggtcatcaccacggccagggtgctgagtctgatccacacgtgaccgaacctttgatggggggtgtacctgagacgcgattggaggtagaacgggaaagagagctgccacctccagctccccctgccgggataacaaggagcaagtctaagcatgaattaaaacttctggaaaaaattccagagaatgccgaagcgaccgtcgtgctagtgggctgtgtagaattcctgagtagaccaactatggccttcgtaaggctgcgcgaggcagtggagctcgatgccgtcctggaagtgcccgttcctgtgaggtttcttttcttgctcctaggccccagcagtgccaatatggactaccatgagatcggaagatcaatatccacccttatgtcagacaagcaattccacgaagccgcgtatttagccgacgagagagaggacctccttacggccattaacgcattcctggattgttccgtggtgctgccgcctagtgaggtccagggagaggaacttctgcgttcagttgcccattttcaaaggcagatgctgaagaagcgggaagaacagggccgtctcctgccaaccggcgcaggcttggagcccaaatccgctcaggacaaggctctgctgcagatggtggaggccgctggtgctgcggaggacgatcctctgagaaggaccggccgaccttttggtgggcttataagagatgtgagaagacgttacccccattatctctccgacttccgggacgcccttgacccacagtgtctggcagccgttatttttatatactttgctgccctttcacccgctatcaccttcggggggctgttgggagagaagacccaggacctgattggcgtgagcgagctgatcatgtccactgcactgcaaggagtcgttttttgccttttgggcgctcagccattgttggtgatcggcttctctgggcccctcctggtgtttgaggaggctttcttttctttctgttccagcaaccacttagagtaccttgtgggcagggtgtggataggtttctggctggtcttccttgccctgctaatggtggcccttgaggggagctttctggtgcgattcgtatctcgattcacgcaggaaatattcgcgttcctcatcagcttgatcttcatttacgagactttttataaactagtgaagatcttccaagaacatccactgcacggatgttcggcctcgaactcttcagaggtagatgggggggagaacatgacatgggccggagcccggccaactctcggtccagggaatcgctccttggctgggcagtccggccaggggaagcctaggggccaacccaacacagctctcctgtcactcgtgctcatggctggtacgtttttcatcgccttttttctgagaaaattcaaaaatagtcgctttttccccgggagaatcaggcgagtcatcggcgattttggcgtgcccattgctatcctgatcatggtgcttgtagactactctattgaagatacatacactcagaaactgtccgtgccctcggggttttcagtgacagctccagaaaaaaggggttgggtaatcaaccctcttggagagaagtcaccctttcccgtgtggatgatggtcgccagtctactgcctgcaatcctggtgttcatcctcatttttatggagactcagatcactacactgattatttctaaaaaagagcgtatgcttcaaaaaggctcaggttttcacctagatctgcttctcatagtcgccatgggagggatctgtgctctgttcggactcccgtggctggccgcagcaacagtccgaagcgtcacacatgctaatgccctgaccgtcatgagtaaagcggtggcccccggggataagcctaaaattcaggaggtgaaggaacaaagggtcacaggccttttggtcgccctgcttgtggggctcagcattgtaatcggtgatctactgcgccagatcccattggcagtgctctttggcattttcctgtatatgggggtcacaagcctgaatggaatacaattctacgagcgcctgcacctcctgctaatgccacccaaacatcacccggacgtcacctatgtgaaaaaggtccgtacccttagaatgcacttgttcactgcgttacagctgctgtgcctcgctctgctgtgggccgtcatgtccacagccgccagtctcgccttccccttcatcctcattttgactgttcccttaaggatggttgtcctgacaagaatctttactgatcgcgaaatgaagtgcctcgatgctaacgaggccgaacctgtttttgacgagagggaaggagttgacgaatataatgagatgcctatgccagtctag

SEQ ID NO: 307454 - DNA, 3726 bp, Artificial Sequence
  derived and/or modified sequence
atgagctccgccccacggaggcccgccaagggggcagactcgttttgtactcccgagccggaaagcttggggcccggcacccctgggttccctgagcaggaggaagacgagctgcatcggacactaggagttgagagatttgaggagatcctgcaggaggccggctctagggggggggaggaacccgggcggagctatggagaggaggattttgagtatcacaggcagtcctcacaccacatccaccatcccctgagcacccatctgccacctgatgccaggaggagaaagacaccccaaggccctggccggaaacccagacggcggcctggagcttctccaacaggagaaactcctacgatcgaggaaggggaggaagatgaagatgaggcctccgaagcagagggcgctcgagcactgacccaaccctcccccgtgtcaacaccctcatccgtccagtttttcttacaggaagacgactcggccgatagaaaagccgaaagaacgagccctagctccccggctcccctgccacatcaggaggccacacccagagcttcaaagggggcccaggccggcactcaggttgaagaggcagaagctgaagccgttgccgtggccagcggaactgccggtggcgacgacggaggcgcaagcggccgccccctgcctaaggcgcagcctgggcatcgttcctacaatctgcaggaacgcaggcgtattggttcgatgacaggcgccgagcaggccctgctgccgagggtaccaaccgatgagattgaggcccagaccctggccacagctgacctggacctgatgaagtcacaccgcttcgaagatgtgcccggtgtgcggcggcatctggtgagaaagaacgcaaagggatcaacccagtcaggccgggagggacgggagcccggacccacccctagggcccgtcccagagcccctcataaaccacacgaggtatttgtcgagctcaatgagctcctcctggataagaaccaggagccacaatggagagagacagcgcgctggatcaagtttgaagaagacgtggaagaggagacagaaagatggggcaaaccacacgttgcctccctgtcttttcgctcccttttggagctccgacgcacactcgctcacggagccgttcttctcgacctcgatcagcagacgctgccaggggtggcacaccaggtagttgagcagatggttatcagtgaccaaataaaagcggaggacagagccaatgtgctgcgggcactgctgctgaagcacagccacccatccgatgagaaggacttttcctttcccaggaatatatctgccgggagcctgggctctctcctaggacatcatcatggacagggggccgaatctgatccgcatgtgaccgaaccattgatgggcggtgtccccgaaactaggctcgaagtggaacgcgaacgggagctccctcctccagctcctcctgctgggattacccgcagcaagtcaaagcacgaactgaagctccttgaaaagataccagaaaatgcagaagctactgtagtgctcgtgggatgcgttgagtttctcagtcgccctacgatggccttcgtgcgattgagagaagcagttgagcttgacgccgtcctagaggtgccagtgcctgtgaggtttctattcctgcttttgggcccttctagcgcaaatatggactaccatgagattgggagatctatttctacgcttatgagcgataagcagttccatgaagccgcctatctcgccgacgaaagagaggatcttttgacggccatcaacgcctttctcgattgttctgtcgtcctccctccatctgaggtgcaaggcgaggagctcctccggagcgtagcacacttccaaagacaaatgctaaagaagcgggaggagcagggccggctcctacctacgggcgctgggctcgagccaaaatccgcacaggacaaggctttgctccagatggttgaggccgctggcgccgccgaggacgatccactcaggagaaccgggcggcctttcggcggcctaataagagatgtacgacggagatacccccactatctgagcgattttagggacgcacttgacccgcagtgtctggcggccgtcatttttatatacttcgctgctctatctccagctatcactttcggcggcctgctgggggagaagactcaggacctgatcggagtgagtgaactgattatgtcaacagcccttcaaggcgtagtcttttgtctcctcggtgctcagcccttgctcgtcataggcttctctggtcctcttctcgttttcgaggaggcctttttctccttctgcagttctaaccacttagagtacctggtcgggcgggtatggataggattctggcttgtgttccttgcactcttgatggtcgcactggagggcagttttctcgtaagatttgtgagcagattcacccaggaaatttttgcctttctgatctcactgatcttcatttacgagaccttctacaaacttgttaagatattccaggagcaccccctgcatggctgcagtgcatcaaactctagtgaagtagatggcggggagaatatgacctgggccggcgcacgccccacgttggggcccggtaaccgcagtctggccggccagtctggtcaggggaagcctcggggccagcccaatactgcccttcttagcctcgtgctgatggctggtacgttcttcatcgccttttttctccgcaagttcaaaaactctcgctttttcccaggacgtatacgacgggtgatcggcgacttcggggttcctatagcgatcctcatcatggtattggtggactactcaatagaggacacatatacacagaagctgagcgtgccctcgggattctctgtgacagctcccgaaaagagaggctgggtgatcaacccgctgggtgaaaagtctcctttccctgtctggatgatggtggctagcctactcccggctattctggtgtttatcctcatcttcatggaaacacagataaccactctgatcatttcaaaaaaggaacgaatgctacaaaagggctccggatttcaccttgacctgctgctgattgtggccatgggcgggatttgtgcattatttggcttgccatggctggccgcggcaaccgttcgatccgttacgcacgctaatgccctgacagttatgtctaaggccgtcgctcccggtgacaaacctaaaatccaggaggtaaaagagcaacgtgttacaggacttcttgtggccctgctggttgggttgagtattgtgatcggtgatctcctgaggcaaatacccctggctgtactgtttggcattttcctttacatgggcgtgacctcacttaatggcattcagttttatgaaaggcttcaccttttgctcatgcccccaaagcatcacccggatgtgacgtacgttaaaaaggtccggacactccggatgcatcttttcactgctctgcagctcctctgtctcgccctcctctgggctgttatgtcgactgctgcctccctggcctttccttttatactgattctcacagtgcctttacggatggtggttctcacccgaatattcactgatcgcgagatgaagtgtttggatgccaatgaagctgagcccgtattcgacgaaagggagggcgtggacgagtacaatgaaatgcctatgcctgtctag

SEQ ID NO: 307455 - DNA, 3726 bp, Artificial Sequence
  derived and/or modified sequence
atgtcctctgcccctaggcgcccagccaaaggtgctgacagcttttgtacccccgagcccgaatccctcggaccgggtaccccgggctttcccgagcaagaggaagatgaactgcacagaaccctcggcgtggagcgtttcgaggagatcttacaagaagctgggagcagggggggcgaggaacccggccggtcctacggagaagaggattttgagtaccaccggcaatctagtcatcacattcatcacccactctcaacacacttaccccccgacgcccgcaggcgcaagacaccacaggggccaggccggaaacctagaaggcgacctggtgcctcgcctacaggggagactcccaccatcgaggagggggaggaagatgaggacgaagcatccgaagccgagggagcacgcgcactgacacagccttctccggtttctacaccatctagcgtgcagtttttcctgcaggaagacgactcagcagaccggaaagccgagaggacatcaccatcttctcctgctcccctccctcatcaggaggcgactcctcgggcgtcaaagggtgcacaggctggaacgcaagtggaggaagccgaggcggaggcagtcgccgtggcatcaggtactgctggaggggacgatggtggagcctctggtcggcccctgccgaaggcccagccagggcatcgcagttataacctccaagaaagacgtcgaattggttcaatgacgggtgcagagcaggctctgctgcctagggttcccacagacgaaattgaggcccagacactcgctaccgctgatctcgacctgatgaagagccacagattcgaagacgttccaggcgtccggcgtcaccttgttagaaagaacgcaaaaggttctacccagagcggacgtgagggacgcgagccgggaccaacacctcgcgcacgccctagagcaccgcataaaccacatgaggtttttgtggagctgaacgagctgctgctcgataagaatcaagagccacagtggcgggagacagcccgctggatcaagttcgaagaagacgttgaagaggagacggaaagatggggcaagccccacgtggcctcactttcattccgaagtcttctggaactaagacggacactggctcacggtgctgtcctgcttgacctggaccagcaaaccctgcccggtgtcgcccaccaagttgtggagcagatggtcatttcagatcagataaaagccgaggatagagcaaatgtgcttcgggcgctattgttgaaacactctcatcctagtgacgaaaaagatttttccttcccacggaatatctccgcagggagccttggttctctgctcggccatcaccacgggcagggggctgaatctgatccccatgtaacagagcccctgatgggcggagtcccggaaaccagactggaggtcgagcgagagagagagcttccgccaccagccccaccggctggtatcacgcgctctaagtcaaaacacgaacttaaattgcttgaaaagatccctgaaaacgctgaggccacagtggtgcttgtcgggtgtgttgaattcctcagccggccaaccatggcattcgtgcgattacgggaagcggtggaactggatgctgtgttggaggtgccagtacccgttagatttctcttcctcctgctgggaccctcatctgctaatatggattatcatgaaataggtaggtccatctctacactgatgtcagataagcagttccacgaggccgcctatttggccgacgaacgagaagacttgctcaccgcaataaatgctttcttggattgctcggttgtgctccctccctcagaggtacaaggtgaagagctgctgcgcagcgtggcgcattttcaaagacagatgttaaagaagcgcgaagagcagggccggctcttaccaacgggtgctggcctggaacccaaatccgcccaggacaaggctctcctgcagatggttgaagctgcaggcgccgctgaagatgaccccctccggagaaccggtcggccgttcggaggcttgatccgcgatgtccggcgtcgttatccacactatctcagtgattttcgcgacgcactggatccacaatgtttagccgcggtgatcttcatatactttgcggcgctgagcccagcaataactttcggcggcttacttggagagaagacacaagatctaattggagtgtctgagctgatcatgtccaccgccctgcagggcgtggtgttctgcttgctgggtgcccagcccctgctcgtgatcggatttagcggtccactgctggtctttgaagaagcgtttttctctttttgcagttctaatcacctggagtatttggttggtagagtttggattggattctggctcgtgtttctagctctgctgatggtcgcactagaaggctcatttctagttcggttcgtgagcaggtttactcaggaaatcttcgccttccttattagtctgattttcatttatgagaccttttataaattggtgaaaattttccaggagcatcccctgcatgggtgttcggcctccaattctagtgaagtggatggcggtgagaatatgacttgggctggggcccgcccaactctgggacccggcaataggtctctggcaggtcagagcggacagggaaaacccaggggacagcctaataccgccctcctcagtcttgtgctgatggctggcacatttttcattgccttctttttacgaaaatttaaaaattccagatttttccccggacggataaggcgggtgatcggtgacttcggagtccctatcgccatactaattatggtcctcgttgactattccattgaggacacatacacccagaagctgagcgtgccatcgggtttctcagtcacagcgcctgagaaacgcggctgggtgataaaccccctcggagagaagagtcccttccccgtgtggatgatggttgccagccttcttcctgcgattctggtctttatcctgatattcatggagacccaaatcaccacactgatcatctcaaagaaggaacgcatgctccagaaaggtagcggattccacctagacctgctgctgatcgtcgcaatgggcggcatttgcgccttattcggactaccgtggctcgccgccgccacagttaggtctgtgacccacgcaaacgctttgactgtcatgtctaaagccgtggcccccggggataagcccaaaattcaagaagttaaagagcagagagtaacaggattgctggtagctctcctcgtgggactgtctatcgtaatcggtgaccttctgagacaaatcccgttagccgtgctcttcggaatctttttgtatatgggagttacctccctgaacggaattcaattttacgaacgccttcacctgcttttgatgccccccaagcaccaccccgatgtcacgtatgttaagaaggtacgaacattaaggatgcatctgtttacagccttacagctgctgtgtctcgccctcttatgggcagtgatgtctacagctgcgagcctggcattcccattcatcctgatattgactgtccccctgaggatggtagttctcacaagaattttcaccgatagagagatgaaatgtctagatgccaacgaggccgagcccgtgtttgacgagcgtgaaggcgtggatgaatacaacgagatgcccatgcccgtctag

SEQ ID NO: 307456 - DNA, 3480 bp, Artificial Sequence
  derived and/or modified sequence
atgagcagcgccccccggcggcctgccaagggagctgacagcttctgcaccccaggccctggcaggaagccccggcggcggcctggggccagccccactggagagacccccaccatcgaggagggggaggaggatgaagatgaggccagcgaggccgagggcgcccgggccctgacccagcccagccctgtgtccacccccagctctgtgcagttcttcctgcaggaggatgattctgctgacaggaaggccgagaggaccagccccagcagccctgcccccctgccccaccaggaggccaccccccgggccagcaagggggcccaggccggcacccaggtggaggaggccgaggccgaggccgtggccgtggccagcggcacagctggaggagatgatggaggagccagcggccggcccctgcccaaggcccagcccggccacaggagctacaacctgcaggagaggagaagaattggctccatgactggagctgagcaggccctgctgccccgggtgcccacagatgaaattgaggcccagaccctggccacagctgacctggacctgatgaagagccacagatttgaagatgtgcctggggtgagaagacacctggtgaggaagaatgccaagggcagcacccagagcggccgggagggccgggagcccggccccaccccccgggcccggccccgggccccccacaagccccatgaggtgtttgtggagctgaatgagctgctgctggacaagaaccaggagccccagtggagggagacagcccgctggatcaagtttgaagaagatgtggaggaggagacagagcgctggggcaagccccacgtggccagcctgtccttccgcagcctgctggagctgcggaggaccctggcccacggggctgtgctgctggacctggaccagcagaccctgcccggggtggcccaccaggtggtggagcagatggtgatcagtgaccagatcaaggccgaggaccgggccaacgtgctgcgggccctgctgctgaagcacagccaccccagtgatgagaaggacttctccttccccaggaacatctctgctggcagcctgggcagcctgctgggccaccaccacggccagggcgctgagagtgacccccacgtgacagagcccctgatgggcggcgtgcctgagacccggctggaggtggagcgggagcgggagctgcccccaccagcccctcctgctggcatcaccaggagcaagagcaagcatgagctgaagctgctggagaagatcccagaaaatgctgaggccaccgtggtgctggtgggctgtgtggagttcctgagccggcccaccatggcctttgtgcggctgcgggaggccgtggagctggatgctgtgctggaggtgcctgtgcctgtgcgcttcctgttcctgctgctgggccccagcagcgccaacatggactaccacgagatcggccgcagcatcagcaccctgatgtctgacaagcagttccacgaggccgcctacctggctgatgagcgggaggacctgctgacagccatcaatgccttcctggactgcagcgtggtgctgcccccatctgaggtgcagggcgaggagctgctgcggtctgtggcccacttccagaggcagatgctgaagaagcgggaggagcagggccgcctgctgcccaccggggccggcctggagcccaagagcgcccaggacaaggccctgctgcagatggtggaggccgccggggctgctgaagatgaccccctgcggaggacaggccggccctttggaggcctcatcagagatgtgagaagacgctacccccactacctgagtgacttcagagatgccctggacccccagtgcctggccgctgtgatcttcatctactttgctgccctgagccctgccatcaccttcggcggcctgctgggggagaagacccaggacctgattggagtgtctgagctgatcatgagcacagccctgcagggcgtggtgttctgcctgctgggcgcccagcccctgctggtgattggcttcagcggccccctgctggtgtttgaggaggccttcttctccttctgcagcagcaaccacctggagtacctggtgggccgggtgtggattggcttctggctggtgttcctggccctgctgatggtggccctggagggcagcttcctggtgcgctttgtgagccgcttcacccaggagatctttgccttcctgatcagcctcatcttcatctatgagaccttctacaagctggtgaagatcttccaggagcaccccctgcacggctgcagcgccagcaacagcagcgaggtggatggaggagagaacatgacctgggccggggcccggcccaccctgggccctggcaacagaagcctggccggccagagcggccagggcaagccccggggccagcccaacacagccctgctgagcctggtgctgatggccggcaccttcttcatcgccttcttcctgaggaagttcaagaacagccgcttcttccctggccgcatccggcgggtgattggagactttggagtgcccatcgccatcctgatcatggtgctggtggactacagcattgaggacacctacacccagaagctgtctgtgcccagcggcttctctgtgacagcccctgagaagaggggctgggtgatcaaccccctgggggagaagagccccttccctgtgtggatgatggtggccagcctgctgcctgccatcctggtgttcatcctgatcttcatggagacccagatcaccaccctcatcatcagcaagaaggagaggatgctgcagaagggcagcggcttccacctggacctgctgctgattgtggccatgggcggcatctgtgccctgtttggcctgccctggctggccgccgccaccgtgcgctctgtgacccacgccaatgccctgactgtgatgagcaaggctgtggcccctggggacaagcccaagatccaggaggtgaaggagcagagggtgacaggcctgctggtggccctgctggtgggcctgagcatcgtcatcggggacctgctgcggcagatccccctggccgtgctgtttggcatcttcctgtacatgggcgtgaccagcctgaatggcatccagttctatgaaaggctgcacctgctgctgatgccacccaagcaccacccagatgtgacctacgtgaagaaggtgaggaccctgaggatgcacctgttcaccgccctgcagctgctgtgcctggccctgctgtgggccgtgatgagcacagctgccagcctggccttccccttcatcctgatcctgactgtgcccctgaggatggtggtgctgacccgcatcttcacagaccgggagatgaagtgcctggatgccaatgaagctgagcctgtgtttgatgagcgggagggcgtggatgagtacaatgagatgcccatgcctgtgtag

SEQ ID NO: 307457 - DNA, 3726 bp, Artificial Sequence
  derived and/or modified sequence
atgagcagcgccccccggcggcctgccaagggagctgacagcttctgcaccccagagcctgagagcctgggccctggcaccccaggcttccctgagcaggaggaggatgagctgcacaggaccctgggcgtggagagatttgaggagatcctgcaggaggccggcagccggggcggggaggagcccggccgctcctatggagaagaagattttgagtaccaccggcagagcagccaccacatccaccaccccctgagcacccacctgcccccagatgcccggcggaggaagaccccccagggccctggcaggaagccccggcggcggcctggggccagccccactggagagacccccaccatcgaggagggggaggaggatgaagatgaggccagcgaggccgagggcgcccgggccctgacccagcccagccctgtgtccacccccagctctgtgcagttcttcctgcaggaggatgattctgctgacaggaaggccgagaggaccagccccagcagccctgcccccctgccccaccaggaggccaccccccgggccagcaagggggcccaggccggcacccaggtggaggaggccgaggccgaggccgtggccgtggccagcggcacagctggaggagatgatggaggagccagcggccggcccctgcccaaggcccagcccggccacaggagctacaacctgcaggagaggagaagaattggctccatgactggagctgagcaggccctgctgccccgggtgcccacagatgaaattgaggcccagaccctggccacagctgacctggacctgatgaagagccacagatttgaagatgtgcctggggtgagaagacacctggtgaggaagaatgccaagggcagcacccagagcggccgggagggccgggagcccggccccaccccccgggcccggccccgggccccccacaagccccatgaggtgtttgtggagctgaatgagctgctgctggacaagaaccaggagccccagtggagggagacagcccgctggatcaagtttgaagaagatgtggaggaggagacagagcgctggggcaagccccacgtggccagcctgtccttccgcagcctgctggagctgcggaggaccctggcccacggggctgtgctgctggacctggaccagcagaccctgcccggggtggcccaccaggtggtggagcagatggtgatcagtgaccagatcaaggccgaggaccgggccaacgtgctgcgggccctgctgctgaagcacagccaccccagtgatgagaaggacttctccttccccaggaacatctctgctggcagcctgggcagcctgctgggccaccaccacggccagggcgctgagagtgacccccacgtgacagagcccctgatgggcggcgtgcctgagacccggctggaggtggagcgggagcgggagctgcccccaccagcccctcctgctggcatcaccaggagcaagagcaagcatgagctgaagctgctggagaagatcccagaaaatgctgaggccaccgtggtgctggtgggctgtgtggagttcctgagccggcccaccatggcctttgtgcggctgcgggaggccgtggagctggatgctgtgctggaggtgcctgtgcctgtgcgcttcctgttcctgctgctgggccccagcagcgccaacatggactaccacgagatcggccgcagcatcagcaccctgatgtctgacaagcagttccacgaggccgcctacctggctgatgagcgggaggacctgctgacagccatcaatgccttcctggactgcagcgtggtgctgcccccatctgaggtgcagggcgaggagctgctgcggtctgtggcccacttccagaggcagatgctgaagaagcgggaggagcagggccgcctgctgcccaccggggccggcctggagcccaagagcgcccaggacaaggccctgctgcagatggtggaggccgccggggctgctgaagatgaccccctgcggaggacaggccggccctttggaggcctcatcagagatgtgagaagacgctacccccactacctgagtgacttcagagatgccctggacccccagtgcctggccgctgtgatcttcatctactttgctgccctgagccctgccatcaccttcggcggcctgctgggggagaagacccaggacctgattggagtgtctgagctgatcatgagcacagccctgcagggcgtggtgttctgcctgctgggcgcccagcccctgctggtgattggcttcagcggccccctgctggtgtttgaggaggccttcttctccttctgcagcagcaaccacctggagtacctggtgggccgggtgtggattggcttctggctggtgttcctggccctgctgatggtggccctggagggcagcttcctggtgcgctttgtgagccgcttcacccaggagatctttgccttcctgatcagcctcatcttcatctatgagaccttctacaagctggtgaagatcttccaggagcaccccctgcacggctgcagcgccagcaacagcagcgaggtggatggaggagagaacatgacctgggccggggcccggcccaccctgggccctggcaacagaagcctggccggccagagcggccagggcaagccccggggccagcccaacacagccctgctgagcctggtgctgatggccggcaccttcttcatcgccttcttcctgaggaagttcaagaacagccgcttcttccctggccgcatccggcgggtgattggagactttggagtgcccatcgccatcctgatcatggtgctggtggactacagcattgaggacacctacacccagaagctgtctgtgcccagcggcttctctgtgacagcccctgagaagaggggctgggtgatcaaccccctgggggagaagagccccttccctgtgtggatgatggtggccagcctgctgcctgccatcctggtgttcatcctgatcttcatggagacccagatcaccaccctcatcatcagcaagaaggagaggatgctgcagaagggcagcggcttccacctggacctgctgctgattgtggccatgggcggcatctgtgccctgtttggcctgccctggctggccgccgccaccgtgcgctctgtgacccacgccaatgccctgactgtgatgagcaaggctgtggcccctggggacaagcccaagatccaggaggtgaaggagcagagggtgacaggcctgctggtggccctgctggtgggcctgagcatcgtcatcggggacctgctgcggcagatccccctggccgtgctgtttggcatcttcctgtacatgggcgtgaccagcctgaatggcatccagttctatgaaaggctgcacctgctgctgatgccacccaagcaccacccagatgtgacctacgtgaagaaggtgaggaccctgaggatgcacctgttcaccgccctgcagctgctgtgcctggccctgctgtgggccgtgatgagcacagctgccagcctggccttccccttcatcctgatcctgactgtgcccctgaggatggtggtgctgacccgcatcttcacagaccgggagatgaagtgcctggatgccaatgaagctgagcctgtgtttgatgagcgggagggcgtggatgagtacaatgagatgcccatgcctgtgtag

SEQ ID NO: 307458 - DNA, 3480 bp, Artificial Sequence
  derived and/or modified sequence
atgagcagcgccccccggcggcccgccaagggcgccgacagcttctgtaccccaggcccaggtcgtaagccccgtaggcgtcctggtgcttctccgactggagagacccccaccatcgaagaaggagaagaggacgaggatgaggcctccgaagctgagggggcccgggccctgactcagccgtcccccgtgtcgacaccttcaagtgtgcagttcttcctacaggaagacgacagtgcagatcgaaaagccgagcgcacgtctccgtcctccccagcccctttacctcaccaagaggctaccccccgcgcctccaaaggcgcccaggctggcacccaggttgaagaggcggaagccgaggccgtggccgttgcctccggcaccgctgggggcgatgatggcggtgcatcaggtagacctctaccaaaggcacagccaggacacagaagctataacctgcaggagcgccgacggatcggatcaatgacaggcgcagaacaggctctcttgccaagggtccctacagacgaaattgaagcacaaaccctggccacggccgatctggacctgatgaaaagccaccgatttgaggacgtcccaggagttcgacgccacctagtgcgcaaaaacgccaaggggtctacgcagtctggtagggagggcagagaacccggtcccaccccacgcgctcgccctcgcgccccccacaaacctcacgaagtcttcgttgaactgaacgaactcctcctggacaagaaccaggaaccacaatggcgggagacggcccgctggattaagttcgaggaagacgtcgaggaagagacagagcgatggggcaagcctcacgtcgctagcctgtcgtttaggagcctgcttgagctccggcgtaccctggctcatggggccgtcctgctcgatctagaccaacaaacactgcctggggtggctcatcaagttgtagagcagatggtcatctcagaccagatcaaagccgaagacagagccaatgtgcttagggctctgctcttaaagcatagtcacccaagtgacgaaaaggacttttccttcccaagaaacatcagtgccgggtcccttggcagtctgttaggccatcaccatggccagggagctgagtcagatccgcatgtcaccgaaccccttatgggcggtgtaccagagacacggctcgaggtcgaaagggagcgagagctccctcctcctgcccccccagccggaatcacacggtcaaaaagcaagcatgaacttaaattgctggaaaagatacctgagaatgcagaggcaacagttgtccttgtgggttgtgtggaatttctgtccaggcccacaatggcttttgtcaggttgagagaggccgtcgaattggacgctgtgcttgaggttccagtaccagttcgctttctgtttctcctgctgggtccaagtagtgctaacatggactaccacgaaatcgggaggagcatctctacactgatgtcagataagcagttccacgaggccgcctaccttgcggatgaacgcgaggatctactgacggcgatcaatgctttcctggactgctccgtcgttctgccacctagcgaggtgcagggagaggagttattgcggagcgtggcccactttcagcgacagatgcttaagaagcgggaagagcagggccgcttactaccaaccggggccggactagagccaaaatctgcgcaagacaaagctctgcttcagatggtggaagctgccggtgctgcagaagacgatcctctgaggcgaactgggaggccattcggcgggctgataagggatgtgcgcaggagatacccgcattacctgtctgatttcagggatgctctcgaccctcaatgtttggctgccgtgatcttcatatactttgcagcacttagcccagcaattaccttcggcggtttactgggggagaagacacaagatttgataggagtctctgaactcatcatgtcaaccgcactgcagggcgttgtgttttgcctgctgggggcgcagccgttattagtgattggcttctccggcccactcctggtgttcgaggaggcctttttttcgttctgttcttccaaccatttagaatacctggttgggcgagtctggattgggttttggttagtattcctcgccctgcttatggtcgcccttgagggctcatttctcgtgcgctttgtttctcggtttacccaagaaatctttgctttcttgatctcgctgatatttatttacgagacgttctataagctagtgaaaatattccaggaacaccccctgcacggatgctccgcctctaacagcagcgaggttgacggaggtgagaatatgacgtgggccggagccaggccaacgctgggaccaggtaataggtccctggctggacaatctgggcaagggaagcctcgcggccagccaaacaccgctttgctcagtcttgtgctgatggccggaaccttttttatcgcatttttcctccgcaagtttaaaaactctcgtttctttccaggtcgcatcaggagagtaattggagattttggcgttcctatcgccattctgatcatggtgctggtggattactcaattgaggatacctatacccaaaaactctcagtgcctagtggcttctctgtgaccgcccccgagaagcgtggttgggtcatcaaccctttaggcgagaagtcccctttcccggtgtggatgatggtggcatcccttctgccagccatcctcgtctttattttaattttcatggagacgcagataacaacactgataatctccaagaaagagagaatgctgcagaagggttccggcttccacttggacctgctcttgatcgtggctatgggcggaatttgcgccctttttgggctgccttggctggcagctgctacagttcggagtgttactcacgcaaatgccctgacggttatgagcaaagctgtagctcctggggacaaacccaagatccaggaggtgaaggagcagcgggtgaccggcctcttggtggcactgctcgtgggtctaagcattgtcataggagacctgcttcgccagatccctctggcagtactgttcggcatctttctatacatgggagtcacctccctcaatggtatccagttttacgaacgcctgcacctacttctgatgccaccaaagcaccatcccgatgtcacttatgtgaaaaaggtgaggacactcagaatgcacctgttcaccgccctacaactactttgcctggctctgttatgggctgtcatgtccactgcagccagtctggcattccctttcattttgatcttaaccgtgccactacgaatggtcgttctaactagaattttcaccgacagggagatgaaatgcctcgacgctaacgaggccgagcctgtgttcgatgagcgcgaaggagtggacgaatacaatgagatgcccatgcccgtgtag

SEQ ID NO: 307459 - DNA, 3726 bp, Artificial Sequence
  derived and/or modified sequence
atgagcagcgccccccggcggcccgccaagggcgccgacagcttctgcacacccgagcccgagtctctgggtccaggtactccgggattccctgaacaggaggaagacgagctccatcgcacacttggagtagaacggttcgaagaaattctacaagaggccggatcccgaggaggcgaagaaccgggtcgcagttacggagaagaagattttgaataccaccgacagtcatctcatcatatccaccaccccctgagtacccatctgcctcctgacgccagaaggaggaaaacaccgcaggggccagggcggaaaccgcgtcggcggccaggtgcctcccccactggtgagacgcccaccatcgaggagggcgaggaggacgaagacgaggcatcagaggccgaaggagcgcgcgccctcacccagccttcccctgtttcaacccccagttctgtgcaattcttcctgcaggaggacgattctgctgacagaaaagctgaaagaactagcccctccagccccgctccactgccccaccaggaagcgacaccaagggcttccaagggtgcacaggcaggaacccaagtcgaggaggccgaggccgaagctgttgccgttgctagcgggaccgctggaggcgacgacgggggcgcttctggccgtcccctccccaaagctcaacccggccatagaagctacaatctccaggaacgcagacgaattggctcaatgacaggggccgagcaggccctgctgccaagggttcctacggatgaaatcgaagcccaaactctagcaactgccgatttagatttgatgaagtctcatagattcgaggatgtaccaggcgtaagacgccacctggtgagaaagaatgccaagggtagcacacaatcgggccgtgaggggcgagaacctggccctactccacgagcccgccctagggccccccataagcctcacgaagtttttgtagaactgaacgaactcctgctagataagaatcaggagccccaatggcgggagacggctaggtggatcaaattcgaggaggatgtggaagaagaaaccgaaagatggggaaagcctcacgtagctagtctgtcgttccgtagcttactcgagctccgcaggaccctcgcgcacggtgctgtgctcctggatcttgaccagcagacattgcctggtgtggcccaccaggttgtggagcaaatggttatatcggaccagataaaggccgaggacagagcgaatgtgctgagggcactcctgcttaaacattcacacccaagcgatgaaaaggactttagctttcccaggaatatcagcgccggatccctgggcagcctgcttggccaccatcacgggcagggagccgagtctgatccacatgtcacggaacccctgatgggtggcgtgccagaaacgaggctcgaagtcgagcgcgagagagagctccccccgccggcgcctcctgccgggatcacccgctccaagtcaaagcatgaactaaagttgctcgagaagatccccgaaaatgccgaggctactgttgtactggtggggtgcgtggaattcctatctcggccgactatggcctttgttcgactccgggaggccgtcgaacttgatgctgttctagaagtccctgtcccagtgcggttcctgtttctgctgctgggcccatcttcagctaatatggactaccacgagatcggtagaagcatctccacattgatgtccgacaaacagttccacgaagctgcatacctcgcggatgagcgggaagacctgctgactgcgattaacgcctttctggattgctccgtggtgctccctccctctgaagtgcagggagaagaactactccggagcgtggcccatttccagagacagatgctgaagaagagagaggaacaaggtaggctcctgcctaccggtgcaggtcttgagcctaagagcgcacaagataaggccctcttgcagatggttgaggcagctggcgccgcggaagatgatccgttgagaaggaccggccggccatttggggggctcatccgcgacgtgaggaggcgttacccacactatctgtccgactttagagacgcactggatccacagtgcctggcggctgttatctttatctacttcgccgcccttagtcccgcaattacatttggagggctccttggtgaaaagacacaggatctgattggcgtctccgaactgatcatgagcacggctcttcagggggttgtattttgcctgctcggagcccagcccttacttgtgatcggcttcagcggacctctcctcgtgttcgaagaggcctttttttctttctgcagttctaaccacctggaatatctcgtcggccgagtgtggatcggattctggctggtatttcttgctttactgatggtcgccttggagggctccttcctggtgcgcttcgtgtcgaggttcacccaggaaatttttgcttttttgataagcctcatttttatctacgagaccttctacaagctggtgaaaatcttccaggaacacccgctgcatggctgctcagccagtaatagttccgaggtggatgggggagagaacatgacctgggcaggagctagacccactctggggccaggaaataggagcctggccggtcagagcggacagggcaaacccaggggccagcccaataccgcattgctgtctctggttttaatggccggcacctttttcatcgccttcttcctccgaaagttcaagaactctaggttttttcctgggcgtatccggcgggtgatcggcgattttggcgtcccaatcgcaatcctcatcatggtcctcgtcgactactcaatagaggatacttacacacagaagctgtctgtgccttcgggtttcagtgttactgctccagaaaagcgcgggtgggtcattaaccctctgggggagaagtcaccctttccagtgtggatgatggtagcctccctgctgcccgccatcctggtgtttatcttgatttttatggagacacagataacgaccctaatcatctctaaaaaggaaaggatgctgcagaaaggtagcggttttcacttagacctgctgttgatagtggcaatgggaggtatctgtgctctgttcggcctcccatggctcgcagcagctaccgtgagatctgtgactcacgcgaatgccctcacagtgatgtccaaggctgtggcccccggcgataagcctaagatccaagaagtgaaagaacagcgcgtgactggcctgctagtagcacttcttgtgggcctgtcaatcgtgattggtgacctacttcgacaaatacctctggctgttctgttcgggatttttctgtacatgggggtaaccagtctcaacggcattcagttttatgagcggcttcacctgctgctcatgccccctaagcaccacccggatgtcacctacgtcaaaaaggtccgaacccttcggatgcacctgttcacagcactgcagcttctctgtctcgctctgctctgggcagtgatgtctacggcagcttccttagcatttcccttcatcttgatactgactgtgccgttacggatggttgtgttgaccaggatcttcactgacagagaaatgaagtgtctggatgccaacgaagcagaacccgtgtttgacgaaagggaaggggtggacgaatacaacgagatgcccatgcccgtctag

SEQ ID NO: 307460 - DNA, 3726 bp, Artificial Sequence
  derived and/or modified sequence
atgagcagcgccccccggcggcccgccaagggcgccgacagcttctgtacccctgagcccgagtccctagggccaggtacgccaggatttccagagcaggaagaagatgaactccaccgcacactgggcgttgaacgctttgaggagatccttcaagaggcaggttcacggggcggcgaagaaccggggcgctcctacggcgaagaagattttgagtatcatcggcagagctcacaccacatccaccaccctctgagcacccacctgccccctgacgccagacgcagaaaaacacctcaaggacctggacgaaagcctagacgccgtcctggggcttcacccacaggcgagactcccaccattgaggagggtgaggaggatgaagacgaagccagcgaggcagaaggcgcacgggcactaacacagccttcacctgttagcactcctagcagcgtccagttttttctccaggaggacgatagcgcggacaggaaggcagagcgcacttctccctccagtcccgctccgctgccacatcaggaggcaacccccagagcttccaagggggcgcaggctggcactcaggtggaagaggccgaagcggaggctgtcgctgtggcttcagggacagctggcggtgatgatggcggtgccagtggccgacccctcccaaaagcccagccaggacaccgcagctataatttgcaggagaggagacgcatcggttctatgaccggggctgagcaggcactgctgccacgagtgcctaccgatgagattgaagcccagactctggccacggctgatctcgacctgatgaaaagtcaccgattcgaagacgtgccaggcgtacggagacacctcgtccgtaagaatgccaaagggagtactcagtcgggccgtgagggccgcgaaccagggcctacccctcgtgcccgaccccgagctccgcacaagcctcatgaggtatttgtggagctcaacgaacttctgcttgacaagaaccaggaacctcagtggagggagacagcacggtggatcaagttcgaagaagacgtggaggaagagactgaacgctggggcaagcctcatgtggccagtctctccttccgtagcttattggaactgcgccggacactcgcacatggtgcagtgctcctggacctggatcagcagacactcccaggagtagcccaccaagttgtggaacagatggtgatttcggaccagatcaaggctgaggatagagccaacgtgttacgcgccctgctcttgaagcactctcatccaagcgacgagaaagacttttccttcccccgaaatatctctgccggctccctcggatccttgcttggccatcaccacggtcagggtgccgaatcggacccacacgtgaccgagccactgatgggcggagtccccgagacgcgcctggaagtcgagcgagagagagaattgcccccacctgcgccgccagccggtattaccaggagtaaaagcaagcacgaattaaagctcctggaaaagatccctgagaacgcagaagcgacagtagtcctggtcggctgcgtagaattcctgtcccgccctacaatggcctttgtgcgtctgcgagaggccgtggagttagacgccgtgttggaggtccccgtaccagttaggtttctgtttctcctgctaggcccatcttcagctaatatggattatcacgaaatcggccggtctatcagcaccctcatgtctgacaagcaatttcatgaggctgcatacttagcggatgagcgagaagatctcctgactgccatcaatgcattcctagactgctctgtggttcttccaccttccgaagtccagggtgaggagcttttgagatccgtggcacactttcagcgacagatgctcaaaaagagagaggagcaaggcagactgcttccaaccggggcggggctggaacctaagtccgcccaggacaaggcactgctccagatggtggaggccgcaggggcagccgaagacgaccccctcaggagaactggaaggccttttggaggactgataagggacgtgcggagaaggtacccacattatctaagcgatttcagagatgctctggatcctcaatgcctagccgccgttatttttatatatttcgctgcactatctcccgccatcacattcggaggcttgctgggagagaagactcaggatttgatcggggtatcagagctgataatgtctaccgcactgcaaggggtggtattttgtctgctgggtgcccaaccccttctcgttataggcttttccggtcccctcctggtattcgaggaggcgttcttctccttttgttcctccaatcatctggaatacctggtggggagagtgtggatcggcttctggctggtgtttctggccctgcttatggtcgccctagaaggctctttcctcgtgaggtttgtgtctcggttcacccaggagatctttgcgttcctcatctccctgatcttcatttatgagacgttctacaaactggtgaagatcttccaggagcatcccctccatgggtgcagtgctagcaattcctctgaagtcgacggtggtgagaacatgacatgggcgggagccagacccacattagggcccggcaaccgcagcctggccggacaaagtggacagggaaagcctcgtggacaacctaatactgccctgctttctctcgtgcttatggctgggaccttctttatcgccttttttctccggaagttcaagaactcaaggttttttcccggcaggataaggcgggtcattggcgactttggagtacccattgccatccttatcatggtgctggtggattacagtatcgaagatacttatacgcagaaactgtcagtgccctcaggttttagcgtgacagccccggaaaaacgaggttgggtaattaatcccctcggagagaagagccccttcccagtgtggatgatggtcgcgagtctgttgccggcaatcttggtgttcatcctgatttttatggaaacacaaataacgaccctcatcatcagtaagaaagagagaatgctgcagaaaggcagcgggtttcacctagatttgttgttaattgttgctatgggaggtatctgcgccctcttcggactgccctggctcgccgctgctacagtcagatctgtcacgcatgccaacgcgttgacggtcatgtccaaagccgtggctcctggggacaagcccaagatccaggaggtcaaggagcagagggttactggcctgttggttgccctgctagttggcttatctattgttatcggcgacttattgcgacagatcccacttgccgtgctattcggaatcttcttgtacatgggagtgactagcctgaacggtatccagttctatgagaggttgcatcttttgctcatgccacccaaacaccaccctgacgttacctacgtgaagaaggtcagaactttgcggatgcacctgttcactgccttacagttactgtgtctggctctgctgtgggccgtcatgagcacagcagccagcctggcgttccccttcatccttatccttactgtgcccctccgcatggtagtgcttaccagaatttttactgatcgggaaatgaaatgcctagacgccaatgaagccgagccagtatttgacgaaagagagggggtggatgagtataacgagatgccgatgcctgtctag

SEQ ID NO: 307461 - DNA, 3480 bp, Artificial Sequence
  derived and/or modified sequence
atgtcctcagctccacgtcggcctgccaagggtgctgattcattctgcactcctggcccaggccgaaagcccagaagacgcccaggggcatcgcccaccggtgaaacacctactatagaagaaggcgaggaggatgaagacgaggcatccgaggccgagggggctcgagctctgacgcaaccatcccctgtctcgacaccatcaagtgtccagttttttctgcaagaggacgactctgccgatcggaaagcagagagaacttctcctagcagtcctgctcccctcccacaccaggaggctacccccagggccagcaagggcgctcaggctggcactcaggtggaggaagccgaagctgaagccgttgccgtggccagcgggacagccggaggcgacgatggtggagcttcaggccgtccgcttcccaaagcgcaacctggccataggagctataaccttcaggagcgtcgtagaatcggttctatgacgggtgctgaacaggctttacttccccgagttcctaccgacgaaatcgaggcccagactcttgccactgcagacttagaccttatgaagtcacaccgttttgaagacgtgccaggtgttcgcagacatctcgttaggaaaaatgccaagggatctacacagagtgggcgtgaaggacgagaacccggaccaacgccccgagctcgcccaagggcaccacataaaccacacgaagtgttcgtggaacttaacgaactgctactggataaaaatcaggagcctcagtggagagagacagctcggtggattaagttcgaagaagatgtggaagaggaaacagagaggtgggggaaaccgcacgtggcctccctatcgttccgctcattactggagcttaggcggacgctcgcccatggggctgtcctcttagacctggatcagcagactctccctggcgtggctcatcaggtggtggaacagatggttatatcagatcagatcaaggctgaagatcgggctaacgtgcttcgcgctctgctacttaagcattctcacccttccgatgagaaggacttttccttcccgagaaacatttctgcaggctcacttggcagcctgcttggccaccatcacggccagggcgctgagtccgatcctcacgtgactgagcctctgatggggggtgttcccgagacccggctggaggtagagcgagagcgagagctcccaccgcctgcccctccagctggtattactcgcagtaagagcaaacatgagctgaaactactggagaaaattcctgagaatgccgaagcaactgtagtgctggtgggctgcgttgagttcctatcccgcccaaccatggcattcgtgaggctccgggaagcggtcgagttggacgccgtactcgaggttcccgttcctgtgcggttcctgttcctgctgctggggccttctagcgctaatatggattatcatgagattggtcgatctatcagtactttgatgtcagacaagcagttccacgaagctgcctatctcgcagacgaacgtgaagatctgttgactgccatcaatgcatttctagactgttccgtggttttgccccctagcgaggttcagggcgaggagctcctgcggtctgtcgcccactttcagcgacagatgctaaagaaacgcgaagaacagggacgccttctcccaaccggcgctggtttggaacctaagtccgcccaagataaagcactcctgcagatggtagaagcggctggagctgcagaagacgatcctctaagaagaaccgggcgacctttcgggggtctgatcagggatgtgagacggcgatacccacactatctgtcagactttagagatgcccttgatccacagtgcctagctgccgttattttcatctattttgccgcactgtcgcccgctatcaccttcggcggtttgttgggggagaagacccaggatctcataggcgtgagtgagttgatcatgtctaccgccctgcaaggagttgtgttctgccttctgggcgcacagcccctgctggtgatcggattctctgggcctctactcgtgtttgaggaggcatttttctcattctgtagtagcaatcatcttgaataccttgtgggacgtgtctggatcgggttctggcttgtgtttctggccctccttatggtcgctctggaaggcagcttcctcgtccgcttcgttagccggtttactcaggaaatcttcgcatttctgatcagtttaatttttatttatgagacattttacaaacttgtgaagatctttcaggaacaccctttgcatggctgttctgcctccaattcttcagaggtcgacggaggagaaaatatgacttgggcaggagcacggcctaccctaggtcctggcaacaggagcctcgcagggcaaagcggccagggcaagcctagaggccagcctaatacagctctattgtccctggtccttatggccggaacctttttcatcgccttttttttgcgcaagttcaagaactccaggttctttccaggcagaatacgaagagtgattggcgactttggggtacctatcgcaatcctgattatggtgctcgtggattatagcatagaggatacgtatacacagaaactgtcagtcccaagcggcttctccgtgacagcacctgagaaacgtgggtgggtcattaaccccttgggagagaagagtcccttccccgtatggatgatggtggcctccctccttcccgcaatcttggtgttcatccttatctttatggagacacagatcaccactcttataatctcaaaaaaggaacgcatgctgcaaaaagggtctgggtttcacctcgacctattgttgattgtcgctatgggcggtatttgcgctctgtttggactcccctggttggcggcagcgactgtcaggtcagtcacacacgccaatgccttgacagtgatgagcaaagccgttgcccctggagataagccgaagattcaagaggtgaaggagcagcgggtgaccgggttgttggtggcattgctggtcggattgtccatcgtgatcggcgacttactgagacaaattccactggccgtcttatttggtatcttcttatacatgggtgtgacaagcctaaatggaatacaattttacgagcgcctacaccttcttctgatgcccccaaagcatcatcccgatgtcacatacgttaagaaagtgagaacccttcggatgcacctcttcaccgccctgcagctgctttgcttggctctgctatgggccgtgatgtctaccgcagctagcctggcttttcctttcattctgatcctcaccgtacccctgcgcatggtagtcctgacgcgaatattcaccgaccgtgagatgaaatgcctggatgctaacgaggcagagcccgtcttcgatgaaagagagggggtggatgagtataatgaaatgcctatgcctgtgtag

SEQ ID NO: 307462 - DNA, 3726 bp, Artificial Sequence
  derived and/or modified sequence
atgtcttctgcgcctcgcagacccgcaaaaggcgcagatagcttttgtacgcccgagcctgagtccttggggcctggcacaccaggtttccctgagcaggaagaggacgagctccacagaacacttggtgttgaacgatttgaggaaatactgcaggaggccggttcacgtggtggggaggagcctgggaggtcctacggagaggaagactttgaataccaccggcagagttcccaccacatccatcacccattgtcgactcacctcccaccagacgccaggagaagaaagactccacagggcccaggcagaaagccacgaagaagacctggcgctagtcctacaggtgagacgcccacaatcgaggaaggggaggaagacgaagacgaggctagcgaggctgaaggagcccgagccctgactcaaccaagtccagtcagcactcccagttccgtgcagttcttcttacaggaagacgactccgccgataggaaagcagaacgcactagtccaagctcccctgccccactccctcaccaggaggctacacctagggcttcaaaaggagcacaggccggtacccaggtggaagaggcggaagcggaagcagttgcagtggccagcggaaccgccggaggcgatgacgggggtgcctcgggacgaccccttcccaaagcccaaccaggccataggagctataacctgcaagagcggagacgtattggaagcatgacaggggctgaacaagccctgctgccgagagtccctacagatgaaattgaagcacagactttggccacagccgacctggacctgatgaaaagtcaccgtttcgaagatgtccctggagtgaggcggcaccttgtgaggaagaatgccaaagggtccacacagagcggaagagaggggcgagagcctggacccactcctcgtgctcggccaagggctccacataaacctcacgaagtcttcgtagagctgaacgaactgttgttggataaaaaccaggaaccccaatggcgtgagactgcacggtggatcaagtttgaagaggacgtggaagaggagacagagaggtggggaaagccgcacgtagccagtctttcattcaggagtctgcttgaactacgcagaacattagctcatggcgctgtgttgctagatctggaccaacagactctcccaggtgtggcccaccaggtggtggagcagatggtgatttctgatcagataaaagccgaagatcgggcaaatgtccttagagcactgcttctgaaacatagtcacccaagtgacgagaaggacttttcctttccgaggaacatctctgcgggatccttaggttctctgctggggcaccatcatggccaaggcgcagaatctgatccacacgtcaccgaacccctcatgggaggagtacctgaaacccggcttgaggtcgagagagagcgcgaactgccgcctccagcccctcccgctggtatcacaaggtccaagtccaagcacgaactgaagttactcgaaaaaatcccagagaacgctgaggcaaccgtagtgctggttggctgcgtggaattcctaagtagaccgaccatggcattcgtgcgtcttagagaggcagtggagctggatgctgtgctcgaagtgcctgtgcccgtgcggttcctgttcctcctactgggaccatccagcgctaatatggactaccacgaaatcggaagatctattagcactctgatgtctgacaaacagtttcacgaggcggcatatctggccgatgagcgcgaggatttgctcaccgctataaacgctttcttggactgcagcgtggttcttcctccatcagaggtccagggcgaagaattgttgaggagcgtcgcccattttcagcgccaaatgctgaaaaaaagagaggaacaggggaggctgctgcccaccggagccggtctggagcccaaatctgcgcaggacaaagcactgctgcaaatggtggaagcagccggagccgctgaagacgacccgctgcgacggactggacggcctttcggaggtctgatccgggacgtgcggagacggtacccccactatctgagcgactttagggacgcacttgacccacagtgtttagcagccgtcatctttatctacttcgccgcacttagcccagccattacattcggcggtctgctgggagagaagacccaggacctaatcggcgtgagcgagctaattatgtctacggccctccaaggcgtcgtattctgcctcttgggagcacagccactattggttattgggttttccggccctctgctggtcttcgaggaggcattctttagtttttgctctagcaaccacctggaatatctggtgggtcgggtgtggattggattctggttagtgttcctagctcttctgatggtagctctcgagggatcttttctagtacgttttgttagtcgcttcacccaggagatttttgccttcctgatctcactgatatttatctacgagacattctacaaattggtgaagatttttcaagagcaccccctgcacggctgcagtgcctccaactcctctgaggtcgatggaggggagaacatgacctgggcgggagctcggccaacgctgggaccgggtaatcgatccctagcagggcagtccgggcagggaaaacctagagggcaaccgaacacagctctgctgagcctagtgctgatggcgggtacattctttattgcttttttcctgcgtaagtttaagaatagccgcttctttcctgggcgtatccgccgtgtcattggggacttcggagtgcctattgccatcctcattatggtcctggttgattattccatcgaggacacctatacacagaagctgagcgtacccagtggcttcagtgtgactgcccctgaaaagagggggtgggtcataaatccactcggcgagaaatcccccttcccggtctggatgatggtggcctcattgctccccgcaatcctggtattcatactgattttcatggagactcagattaccacccttattatctcaaagaaggagcgtatgctgcaaaagggcagtgggttccacctggacctgctgttgatcgtcgccatggggggaatctgcgctcttttcggccttccctggctggctgctgccaccgtgcgatctgtgacccatgcaaacgccctcaccgtgatgagcaaggccgtcgcacctggcgataagccaaagatccaggaagtgaaggagcaacgggtgacaggcctcctggttgctctcctagtgggactctccatagtgatcggcgaccttctgcgccagatccccctggctgtattatttggtatcttcttgtacatgggggtgacctccctgaacggcattcaattctatgaacgtctccatctgttattgatgcctcctaagcaccaccctgacgtcacgtacgttaagaaggtgcggactttaagaatgcacctttttacagccctgcagctgttgtgcctcgcattattgtgggctgttatgtcgactgcagcaagcctggccttccccttcatcttgatactaaccgttcctctgcggatggtagtgttgacacggatttttaccgatagagaaatgaagtgcctagatgccaacgaggctgagcctgtgttcgacgaaagggaaggcgtcgatgaatataacgagatgcccatgcccgtgtag

SEQ ID NO: 307463 - DNA, 3726 bp, Artificial Sequence
  derived and/or modified sequence
atgagcagcgctcctaggcgcccagccaaaggggcagacagcttttgcactccagagcctgaaagtctggggcctggcactcccggttttccagagcaagaggaggacgagctgcatagaacacttggagttgagcgattcgaagaaattctccaggaagccggttccagaggtggggaagagccagggaggagctatggcgaagaggactttgagtatcaccgtcaatcctcacaccacatccatcaccccctctccactcatttgccccctgatgcacgacgccgtaaaacccctcaagggcctggccgtaagcctagacgcaggccaggggcatctccaaccggcgaaacccccactatcgaggagggcgaagaggacgaggatgaggcgagtgaggccgagggcgcacgtgccctgacacagccgtccccggtatctaccccctctagcgtgcagttcttcttgcaagaggatgactcagcggatcgaaaagccgaacgtacctcccccagctcccccgcaccacttcctcaccaggaggctacgccacgggcttcaaagggggcacaagccggaacccaagtggaggaagctgaggccgaagccgttgcagttgcctcgggcactgcaggtggcgacgacggaggggctagcgggagaccactgcctaaagcacaacccggtcacaggtcctataatctgcaggaacggcgacgcataggcagcatgactggcgctgagcaggcccttctgccccgagtgccaacagatgagatagaagcgcaaacccttgcaacagccgacctggacctaatgaaatcccatagattcgaggacgtgcctggagtgagacggcatctcgtccgaaaaaacgccaaggggagcacccagtcagggagggaaggccgagaaccaggccctacccctcgggctcgccctagggcccctcacaagccacacgaggtctttgtggagttaaatgagctgctgctcgataagaatcaggagcctcagtggagggagaccgctcgctggatcaagtttgaggaggacgtggaagaggaaaccgaacgttgggggaagcctcatgtggcatcactatcatttcgcagcttgttggagctgcggaggaccctggcacacggtgcagtgctgttggacctcgaccagcagacgcttcctggagttgctcatcaggtcgtagaacaaatggtcatttcagaccaaatcaaggcagaggatcgcgctaacgtgctccgagccctactgcttaaacattctcacccatctgacgagaaggacttctctttccccaggaatatcagcgcaggctcgctcggcagcttgctggggcatcaccacgggcagggagctgagtccgacccccatgtgacggagcctttgatgggcggagtacccgaaaccagactggaggtcgaaagggagcgcgagctgccgccacctgcccctcccgcaggtattactcggtcgaaatcaaaacacgagctgaaactgctggagaagatccctgagaatgcagaagccacggtggtcctcgtcgggtgcgttgaatttttgagccgacccaccatggcctttgttcgcttgcgagaagccgtcgagctcgatgcggtgttggaagttcccgttccagtccggttcctgttcctcctgctggggcctagttcagctaatatggactatcacgaaataggacgaagcatctctaccctcatgagcgataagcagtttcatgaagccgcttacttggccgatgagcgggaagatctcttgaccgccatcaatgcattcctggactgctccgtcgttttacccccatccgaggtgcaaggcgaggagctgcttagatcagtggcgcatttccaaagacagatgttaaaaaagagagaagagcagggtcgtttgctccccacaggcgctggtcttgaacctaagtctgcccaggacaaagctctgctgcagatggtggaggctgctggagcagctgaggacgatccacttagacggactggacgaccattcggcggactgattcgcgacgtgcgaaggcgctatccgcattacctgtctgattttcgggacgctttggacccccagtgtcttgccgcagtcatcttcatttactttgcagccttatcaccggcaattacattcggcggactgttaggggaaaagacacaggacctgattggtgtcagtgaattgattatgagtacggccctccagggcgtggtcttctgcctgctgggcgcacaacctctgcttgttatcggcttctctgggccacttctggtattcgaggaggcttttttctccttttgcagttctaaccacctcgagtacctggtcgggcgtgtttggatcggtttctggctcgtgttcctagctctgttgatggtcgccttggaaggcagttttctggttcggttcgtcagtagatttacacaagagatttttgctttccttatctcactgatttttatttacgagaccttttacaaattggtgaagatattccaggaacatccccttcacggctgcagtgcgagcaatagtagcgaagtggatggaggagaaaatatgacatgggcaggagccagacccaccctcgggcctggcaaccgaagtctggccggacaaagcggccagggtaaaccaaggggacagcctaatacagcccttttatcgttggtcctaatggccggaaccttttttatcgctttttttctacgcaagttcaaaaacagtaggtttttcccgggacgaattagaagggtcatcggggacttcggagtcccaatcgccatcttaatcatggtgctggtggactacagtattgaagatacctatacacagaagcttagtgtgcccagcgggttctcagtgactgctccagaaaaaagaggctgggtcatcaacccgttgggtgagaagagcccttttcctgtatggatgatggttgcaagcctgctccccgcaattctggtgtttattctgatcttcatggaaacacagataaccactttaattatttccaaaaaagagcggatgcttcagaagggcagtggattccacctggacctgcttctgatagtggccatggggggtatttgcgcgctgtttgggctgccctggctggcagcagccaccgtgagaagtgtcacccatgctaacgcccttactgtgatgagtaaagcagtcgccccaggggataaacccaaaatccaggaagtaaaagagcagcgcgtaactggattgctggttgcccttctcgtgggcttgtctattgtgattggtgatctcctgcgtcagatccctcttgccgtgctattcgggatctttttgtacatgggagtaacctctttaaacggaatacaattttacgaaaggttgcatctgctcctgatgcctccaaaacatcaccccgatgtcacatacgtgaaaaaggtcagaaccctccgcatgcatctgttcacggccttacagttgctgtgcctggccctgctgtgggctgttatgtccacggctgctagcctagcgtttccattcattttgatcctgaccgtcccactgaggatggtagtactgaccaggatatttacagaccgcgagatgaagtgcctggacgccaacgaggctgagcctgttttcgacgagcgagagggcgtcgacgagtataacgagatgccaatgccagtttag

SEQ ID NO: 307464 - DNA, 3969 bp, Artificial Sequence
  derived and/or modified sequence
gccttcctctctctcagtgagtgagtggagttgagctcctgccctccacccagccagcctgcttccctcctgccggtccccaaggacctgggggagggaagcctcctgccggcctgtactggggagggggcaccccctccctgcaggggcatcttgggctctctccagagttcttccattcgtctgcttcctgtctcggcagcccggccccggctccacggggtgtctcaccctccccaccacaccctctctggtctcaggcccacctctggttatgcctccgcctcgttgccctgaaagccgcagcgacagcgaaaagggctaagattcggccatgagcagcgcccctcggcgccccgccaagggcgcagattctttctgtacgccagggccaggacggaagcctcgaaggcgcccgggagcctccccgactggagaaaccccgaccattgaggagggggaggaagatgaggatgaggccagcgaggctgagggggcccgggctctcactcagccgtcccctgtctccacaccctcctcggtgcagttctttctccaagaggatgacagtgctgaccggaaggcagagaggaccagtccatcttcccctgcaccactgccccaccaggaggcgactcctcgggcctccaaaggggcccaggctggaacccaggtggaggaggcggaggcggaggcggtggcggtggccagtggcactgcagggggtgacgacgggggtgcctcggggcgccccctgcccaaagcccagcctgggcaccgcagctacaaccttcaggagaggaggcgcatcgggagcatgactggggctgagcaggcactgctgccccgggtccccacggatgagattgaggcccagacgctggccacggccgacctagacctcatgaagagtcaccggtttgaggacgttcctggggtgcggcggcacttggtgcggaagaatgccaaaggttccacacagagtggccgagaagggcgggagcctggccccacacctcgggcccgaccccgggccccccacaagccccatgaggtgtttgtggagctgaatgagttgctcctggacaaaaaccaggagccccagtggcgggagacagctcgctggatcaaatttgaagaggacgtggaggaggagactgagcgctgggggaagccccacgtggcctccctctccttccgcagtctcctggagctccgcaggaccctggcccatggggctgtgctcttggatctggaccagcagaccctgcccggagtggcccaccaggtggtggagcagatggtcatctctgaccagatcaaggccgaggacagggccaacgtgctgcgggctctgctgttgaaacacagccacccaagtgatgagaaggacttctccttcccccgcaacatctcagctggctccctgggctccctgctggggcatcaccatggtcagggggctgagagtgacccccacgtcaccgagcctctcatgggaggtgttcctgagacccggctggaggtggagcgagagcgtgagctgccgcctccagcaccaccagctggcatcacccgctccaagtccaagcacgagctgaaactgctggagaagattcctgagaatgccgaggccacggtggtccttgtgggctgcgtggagttcctctcccgccccaccatggcctttgtgcggctccgggaggctgtggagttggacgcagtgttggaggtgccggtgcctgtgcgtttcctcttcctgctgctgggcccgagtagtgccaacatggactaccacgagatcggccgctccatctccaccctcatgtcagacaagcaattccacgaggcagcctacctggctgacgagcgggaggacctgctgacggccatcaacgccttcctggactgcagcgtggtgctgccgccttcagaagtgcagggcgaggagctgctgcgctctgtggcccacttccagcgccagatgctcaagaagcgagaggagcagggccggctgctacctacaggggctgggctggagcccaaatctgcccaagataaggcgctcctgcagatggtagaggcggcaggggcagctgaagatgatccccttcggcggacggggcggccctttggggggctgatccgagatgtgcggcgccgctatccccactacctgagtgacttccgagatgcacttgaccctcagtgcctggccgcagtcatcttcatctactttgccgccctgtctcctgccatcacctttggggggctgctgggagagaagacgcaggacctgataggggtgtcggagctgattatgtccacagcgctccagggcgtggtcttctgcctgctgggtgcccagcccctgttggtgatcggcttctcagggcccctgctggtctttgaggaggccttcttctcgttctgtagcagcaaccacctggagtacctggtgggccgtgtgtggatcggcttctggctggtgttcctggccctgctcatggtggccctggaggggagcttcctggtccgcttcgtctcccgcttcacccaggagatcttcgccttcttgatctcactcatcttcatctatgagaccttctacaagctggtgaagatcttccaggagcaccccctgcatggctgctcagcctccaacagctcagaggtggacggcggtgagaacatgacatgggccggggcaagacccacgctggggccgggcaacaggagcttggctgggcagtctgggcaggggaagccccggggccagcccaacacggccctgctgtcgctggtgctcatggccggcaccttcttcatcgccttcttcctgcgcaaattcaagaacagccggttctttcctggccggatccggcgggtgattggggactttggggtgcccatcgccatcctcatcatggtgcttgtggattacagtattgaggacacctatacccagaagctgagcgttcccagtggattctcggtgactgccccagaaaagaggggctgggtcatcaaccccctgggagagaagagccccttccctgtgtggatgatggttgccagcctgctgcccgccatcctggtcttcattctcatcttcatggagacacagatcaccacgctcatcatctccaagaaggagcgcatgctgcagaagggctccggcttccacctggacctgctgctcatcgtggccatgggcggcatctgtgccctctttggcctgccctggttggctgctgccactgtccgctctgtcactcacgccaacgcgctcactgtcatgagcaaggctgtggcacctggggacaagcccaagattcaggaagtcaaggagcagcgggtgacggggctgctggttgccctgcttgtgggcctctccatagttatcggggatctgctccggcagatccccctggccgtgctctttggaattttcctgtacatgggagtcacctcccttaacgggatccagttctatgagcggctgcatctgctgctcatgccgcccaaacaccacccagatgtcacttacgtcaagaaggtccggaccctccgtatgcacctgttcacggccctgcagctgctctgcctggccctgctctgggccgtcatgtccacagctgcctccctggccttccccttcatcctcatcctcacagtgccgctccgcatggtggtgctcacccgtatcttcaccgaccgagagatgaaatgtctggatgctaacgaggcagagccggtgtttgatgagcgggagggtgtggacgagtacaatgagatgcccatgcctgtgtagccgccaccgagggacagccgagggaccgatggacgaggggacaggctggtgggatggggttccccctcccatgcccctccctcctttttatttaagtgaataatttaaagtcttctcctcccccactgcccctgcagtaaagtgctttggccccc

SEQ ID NO: 307465 - DNA, 4142 bp, Artificial Sequence
  derived and/or modified sequence
acggtgcgccggggggcgcgcacgcagggggctggcctgcccgcggcgcgggggaaagttgagttgggagaagttgggagcggcgggggcgcgccccggggtgggcacggggcagtcgtcgggagcgcgcgagtgcgccggaggacggggagagaccccgagacccccggggcacgaagtccagagcgagcgggttatgcctccgcctcgttgccctgaaagccgcagcgacagcgaaaagggctaagattcggccatgagcagcgcccctcggcgccccgccaagggcgcagattctttctgtacgccagagccagagagcttgggccctgggacgcctgggttccccgagcaggaggaagacgaacttcaccgcaccctgggcgtggagcggtttgaggagatcctacaggaggccgggtctcgtggaggggaggagccaggccgcagctatggggaggaagactttgagtaccaccgccagtcctcccaccacatccatcacccactgtccacccacctgcctccggatgcacgccgccgcaagacaccccagggcccaggacggaagcctcgaaggcgcccgggagcctccccgactggagaaaccccgaccattgaggagggggaggaagatgaggatgaggccagcgaggctgagggggcccgggctctcactcagccgtcccctgtctccacaccctcctcggtgcagttctttctccaagaggatgacagtgctgaccggaaggcagagaggaccagtccatcttcccctgcaccactgccccaccaggaggcgactcctcgggcctccaaaggggcccaggctggaacccaggtggaggaggcggaggcggaggcggtggcggtggccagtggcactgcagggggtgacgacgggggtgcctcggggcgccccctgcccaaagcccagcctgggcaccgcagctacaaccttcaggagaggaggcgcatcgggagcatgactggggctgagcaggcactgctgccccgggtccccacggatgagattgaggcccagacgctggccacggccgacctagacctcatgaagagtcaccggtttgaggacgttcctggggtgcggcggcacttggtgcggaagaatgccaaaggttccacacagagtggccgagaagggcgggagcctggccccacacctcgggcccgaccccgggccccccacaagccccatgaggtgtttgtggagctgaatgagttgctcctggacaaaaaccaggagccccagtggcgggagacagctcgctggatcaaatttgaagaggacgtggaggaggagactgagcgctgggggaagccccacgtggcctccctctccttccgcagtctcctggagctccgcaggaccctggcccatggggctgtgctcttggatctggaccagcagaccctgcccggagtggcccaccaggtggtggagcagatggtcatctctgaccagatcaaggccgaggacagggccaacgtgctgcgggctctgctgttgaaacacagccacccaagtgatgagaaggacttctccttcccccgcaacatctcagctggctccctgggctccctgctggggcatcaccatggtcagggggctgagagtgacccccacgtcaccgagcctctcatgggaggtgttcctgagacccggctggaggtggagcgagagcgtgagctgccgcctccagcaccaccagctggcatcacccgctccaagtccaagcacgagctgaaactgctggagaagattcctgagaatgccgaggccacggtggtccttgtgggctgcgtggagttcctctcccgccccaccatggcctttgtgcggctccgggaggctgtggagttggacgcagtgttggaggtgccggtgcctgtgcgtttcctcttcctgctgctgggcccgagtagtgccaacatggactaccacgagatcggccgctccatctccaccctcatgtcagacaagcaattccacgaggcagcctacctggctgacgagcgggaggacctgctgacggccatcaacgccttcctggactgcagcgtggtgctgccgccttcagaagtgcagggcgaggagctgctgcgctctgtggcccacttccagcgccagatgctcaagaagcgagaggagcagggccggctgctacctacaggggctgggctggagcccaaatctgcccaagataaggcgctcctgcagatggtagaggcggcaggggcagctgaagatgatccccttcggcggacggggcggccctttggggggctgatccgagatgtgcggcgccgctatccccactacctgagtgacttccgagatgcacttgaccctcagtgcctggccgcagtcatcttcatctactttgccgccctgtctcctgccatcacctttggggggctgctgggagagaagacgcaggacctgataggggtgtcggagctgattatgtccacagcgctccagggcgtggtcttctgcctgctgggtgcccagcccctgttggtgatcggcttctcagggcccctgctggtctttgaggaggccttcttctcgttctgtagcagcaaccacctggagtacctggtgggccgtgtgtggatcggcttctggctggtgttcctggccctgctcatggtggccctggaggggagcttcctggtccgcttcgtctcccgcttcacccaggagatcttcgccttcttgatctcactcatcttcatctatgagaccttctacaagctggtgaagatcttccaggagcaccccctgcatggctgctcagcctccaacagctcagaggtggacggcggtgagaacatgacatgggccggggcaagacccacgctggggccgggcaacaggagcttggctgggcagtctgggcaggggaagccccggggccagcccaacacggccctgctgtcgctggtgctcatggccggcaccttcttcatcgccttcttcctgcgcaaattcaagaacagccggttctttcctggccggatccggcgggtgattggggactttggggtgcccatcgccatcctcatcatggtgcttgtggattacagtattgaggacacctatacccagaagctgagcgttcccagtggattctcggtgactgccccagaaaagaggggctgggtcatcaaccccctgggagagaagagccccttccctgtgtggatgatggttgccagcctgctgcccgccatcctggtcttcattctcatcttcatggagacacagatcaccacgctcatcatctccaagaaggagcgcatgctgcagaagggctccggcttccacctggacctgctgctcatcgtggccatgggcggcatctgtgccctctttggcctgccctggttggctgctgccactgtccgctctgtcactcacgccaacgcgctcactgtcatgagcaaggctgtggcacctggggacaagcccaagattcaggaagtcaaggagcagcgggtgacggggctgctggttgccctgcttgtgggcctctccatagttatcggggatctgctccggcagatccccctggccgtgctctttggaattttcctgtacatgggagtcacctcccttaacgggatccagttctatgagcggctgcatctgctgctcatgccgcccaaacaccacccagatgtcacttacgtcaagaaggtccggaccctccgtatgcacctgttcacggccctgcagctgctctgcctggccctgctctgggccgtcatgtccacagctgcctccctggccttccccttcatcctcatcctcacagtgccgctccgcatggtggtgctcacccgtatcttcaccgaccgagagatgaaatgtctggatgctaacgaggcagagccggtgtttgatgagcgggagggtgtggacgagtacaatgagatgcccatgcctgtgtagccgccaccgagggacagccgagggaccgatggacgaggggacaggctggtgggatggggttccccctcccatgcccctccctcctttttatttaagtgaataatttaaagtcttctcctcccccactgcccctgcagtaaagtgctttggcccccaccta

SEQ ID NO: 307466 - DNA, 4925 bp, Artificial Sequence
  derived and/or modified sequence
cccagccctcttgaaaagggccgctccgggactacgcgttccagaatgcagcggaaatgggggcggagcgctctcggttaggggtttggggtttggcggcctagatcccgggcactggcggcccagcgctgacctggttggtggcattgtgttcccaacggcctcttgacgacctcagcacgggtttccacctctccccaagccacctagtgaccccagaattgactggggaatgcctgtgagcgatgatgacctcacagggaacagctgaccgcagggctgggagaacagctgtgccccttcgaggctggattttagtggagggacacacgccaaagaccccctctctgctgagccccgtttgttgtctcggagcccacccgactctagccgctgaactctgacatgctgaggaaaactgggtggagccctgggggtccccctcagaccccagtctccggaacagggcccactggagtcagccagggtgtggcaggcaggttggttaaccccctccacagacaagaccacagaccgatgctcaacttgcagcagcctctgcctcaccccttaaaggagctgattatagattcccttacgctgcctctctaattgtctcatgattgcattcttgagggctatggaccgagggaaaaggatcccaaacagcactcctcagcaccggaaccagagttgctgctaaacacgtgttaattaactcgtttctatctgaatgcttttgcatacacaagggaaaagaagcaaaaagtgtattccttatctggaagactttgtgatttcgttgggcaaaaaagaactacacacaaaggtcttgaatgataagtgatggctctgcctagggttcggttcagtgtggaggttccattcaagaggaaggaggccagcacagcgaatctctgtccctctctggaagtggagagcctctaacaagttaccctctcccagatcagctcagggttatgcctccgcctcgttgccctgaaagccgcagcgacagcgaaaagggctaagattcggccatgagcagcgcccctcggcgccccgccaagggcgcagattctttctgtacgccagagccagagagcttgggccctgggacgcctgggttccccgagcaggaggaagacgaacttcaccgcaccctgggcgtggagcggtttgaggagatcctacaggaggccgggtctcgtggaggggaggagccaggccgcagctatggggaggaagactttgagtaccaccgccagtcctcccaccacatccatcacccactgtccacccacctgcctccggatgcacgccgccgcaagacaccccagggcccaggacggaagcctcgaaggcgcccgggagcctccccgactggagaaaccccgaccattgaggagggggaggaagatgaggatgaggccagcgaggctgagggggcccgggctctcactcagccgtcccctgtctccacaccctcctcggtgcagttctttctccaagaggatgacagtgctgaccggaaggcagagaggaccagtccatcttcccctgcaccactgccccaccaggaggcgactcctcgggcctccaaaggggcccaggctggaacccaggtggaggaggcggaggcggaggcggtggcggtggccagtggcactgcagggggtgacgacgggggtgcctcggggcgccccctgcccaaagcccagcctgggcaccgcagctacaaccttcaggagaggaggcgcatcgggagcatgactggggctgagcaggcactgctgccccgggtccccacggatgagattgaggcccagacgctggccacggccgacctagacctcatgaagagtcaccggtttgaggacgttcctggggtgcggcggcacttggtgcggaagaatgccaaaggttccacacagagtggccgagaagggcgggagcctggccccacacctcgggcccgaccccgggccccccacaagccccatgaggtgtttgtggagctgaatgagttgctcctggacaaaaaccaggagccccagtggcgggagacagctcgctggatcaaatttgaagaggacgtggaggaggagactgagcgctgggggaagccccacgtggcctccctctccttccgcagtctcctggagctccgcaggaccctggcccatggggctgtgctcttggatctggaccagcagaccctgcccggagtggcccaccaggtggtggagcagatggtcatctctgaccagatcaaggccgaggacagggccaacgtgctgcgggctctgctgttgaaacacagccacccaagtgatgagaaggacttctccttcccccgcaacatctcagctggctccctgggctccctgctggggcatcaccatggtcagggggctgagagtgacccccacgtcaccgagcctctcatgggaggtgttcctgagacccggctggaggtggagcgagagcgtgagctgccgcctccagcaccaccagctggcatcacccgctccaagtccaagcacgagctgaaactgctggagaagattcctgagaatgccgaggccacggtggtccttgtgggctgcgtggagttcctctcccgccccaccatggcctttgtgcggctccgggaggctgtggagttggacgcagtgttggaggtgccggtgcctgtgcgtttcctcttcctgctgctgggcccgagtagtgccaacatggactaccacgagatcggccgctccatctccaccctcatgtcagacaagcaattccacgaggcagcctacctggctgacgagcgggaggacctgctgacggccatcaacgccttcctggactgcagcgtggtgctgccgccttcagaagtgcagggcgaggagctgctgcgctctgtggcccacttccagcgccagatgctcaagaagcgagaggagcagggccggctgctacctacaggggctgggctggagcccaaatctgcccaagataaggcgctcctgcagatggtagaggcggcaggggcagctgaagatgatccccttcggcggacggggcggccctttggggggctgatccgagatgtgcggcgccgctatccccactacctgagtgacttccgagatgcacttgaccctcagtgcctggccgcagtcatcttcatctactttgccgccctgtctcctgccatcacctttggggggctgctgggagagaagacgcaggacctgataggggtgtcggagctgattatgtccacagcgctccagggcgtggtcttctgcctgctgggtgcccagcccctgttggtgatcggcttctcagggcccctgctggtctttgaggaggccttcttctcgttctgtagcagcaaccacctggagtacctggtgggccgtgtgtggatcggcttctggctggtgttcctggccctgctcatggtggccctggaggggagcttcctggtccgcttcgtctcccgcttcacccaggagatcttcgccttcttgatctcactcatcttcatctatgagaccttctacaagctggtgaagatcttccaggagcaccccctgcatggctgctcagcctccaacagctcagaggtggacggcggtgagaacatgacatgggccggggcaagacccacgctggggccgggcaacaggagcttggctgggcagtctgggcaggggaagccccggggccagcccaacacggccctgctgtcgctggtgctcatggccggcaccttcttcatcgccttcttcctgcgcaaattcaagaacagccggttctttcctggccggatccggcgggtgattggggactttggggtgcccatcgccatcctcatcatggtgcttgtggattacagtattgaggacacctatacccagaagctgagcgttcccagtggattctcggtgactgccccagaaaagaggggctgggtcatcaaccccctgggagagaagagccccttccctgtgtggatgatggttgccagcctgctgcccgccatcctggtcttcattctcatcttcatggagacacagatcaccacgctcatcatctccaagaaggagcgcatgctgcagaagggctccggcttccacctggacctgctgctcatcgtggccatgggcggcatctgtgccctctttggcctgccctggttggctgctgccactgtccgctctgtcactcacgccaacgcgctcactgtcatgagcaaggctgtggcacctggggacaagcccaagattcaggaagtcaaggagcagcgggtgacggggctgctggttgccctgcttgtgggcctctccatagttatcggggatctgctccggcagatccccctggccgtgctctttggaattttcctgtacatgggagtcacctcccttaacgggatccagttctatgagcggctgcatctgctgctcatgccgcccaaacaccacccagatgtcacttacgtcaagaaggtccggaccctccgtatgcacctgttcacggccctgcagctgctctgcctggccctgctctgggccgtcatgtccacagctgcctccctggccttccccttcatcctcatcctcacagtgccgctccgcatggtggtgctcacccgtatcttcaccgaccgagagatgaaatgtctggatgctaacgaggcagagccggtgtttgatgagcgggagggtgtggacgagtacaatgagatgcccatgcctgtgtagccgccaccgagggacagccgagggaccgatggacgaggggacaggctggtgggatggggttccccctcccatgcccctccctcctttttatttaagtgaataatttaaagtcttctcctcccccactgcccctgcagtaaagtgctttggcccccacct

SEQ ID NO: 307467 - DNA, 3480 bp, Artificial Sequence
  derived and/or modified sequence
atgagcagcgcccccagaagacccgccaagggcgccgacagcttctgcacccccggccccggcagaaagcccagaagaagacccggcgccagccccaccggcgagacccccaccatcgaggagggcgaggaggacgaggacgaggccagcgaggccgagggcgccagagccctgacccagcccagccccgtgagcacccccagcagcgtgcagttcttcctgcaggaggacgacagcgccgacagaaaggccgagagaaccagccccagcagccccgcccccctgccccaccaggaggccacccccagagccagcaagggcgcccaggccggcacccaggtggaggaggccgaggccgaggccgtggccgtggccagcggcaccgccggcggcgacgacggcggcgccagcggcagacccctgcccaaggcccagcccggccacagaagctacaacctgcaggagagaagaagaatcggcagcatgaccggcgccgagcaggccctgctgcccagagtgcccaccgacgagatcgaggcccagaccctggccaccgccgacctggacctgatgaagagccacagattcgaggacgtgcccggcgtgagaagacacctggtgagaaagaacgccaagggcagcacccagagcggcagagagggcagagagcccggccccacccccagagccagacccagagccccccacaagccccacgaggtgttcgtggagctgaacgagctgctgctggacaagaaccaggagccccagtggagagagaccgccagatggatcaagttcgaggaggacgtggaggaggagaccgagagatggggcaagccccacgtggccagcctgagcttcagaagcctgctggagctgagaagaaccctggcccacggcgccgtgctgctggacctggaccagcagaccctgcccggcgtggcccaccaggtggtggagcagatggtgatcagcgaccagatcaaggccgaggacagagccaacgtgctgagagccctgctgctgaagcacagccaccccagcgacgagaaggacttcagcttccccagaaacatcagcgccggcagcctgggcagcctgctgggccaccaccacggccagggcgccgagagcgacccccacgtgaccgagcccctgatgggcggcgtgcccgagaccagactggaggtggagagagagagagagctgcccccccccgccccccccgccggcatcaccagaagcaagagcaagcacgagctgaagctgctggagaagatccccgagaacgccgaggccaccgtggtgctggtgggctgcgtggagttcctgagcagacccaccatggccttcgtgagactgagagaggccgtggagctggacgccgtgctggaggtgcccgtgcccgtgagattcctgttcctgctgctgggccccagcagcgccaacatggactaccacgagatcggcagaagcatcagcaccctgatgagcgacaagcagttccacgaggccgcctacctggccgacgagagagaggacctgctgaccgccatcaacgccttcctggactgcagcgtggtgctgccccccagcgaggtgcagggcgaggagctgctgagaagcgtggcccacttccagagacagatgctgaagaagagagaggagcagggcagactgctgcccaccggcgccggcctggagcccaagagcgcccaggacaaggccctgctgcagatggtggaggccgccggcgccgccgaggacgaccccctgagaagaaccggcagacccttcggcggcctgatcagagacgtgagaagaagatacccccactacctgagcgacttcagagacgccctggacccccagtgcctggccgccgtgatcttcatctacttcgccgccctgagccccgccatcaccttcggcggcctgctgggcgagaagacccaggacctgatcggcgtgagcgagctgatcatgagcaccgccctgcagggcgtggtgttctgcctgctgggcgcccagcccctgctggtgatcggcttcagcggccccctgctggtgttcgaggaggccttcttcagcttctgcagcagcaaccacctggagtacctggtgggcagagtgtggatcggcttctggctggtgttcctggccctgctgatggtggccctggagggcagcttcctggtgagattcgtgagcagattcacccaggagatcttcgccttcctgatcagcctgatcttcatctacgagaccttctacaagctggtgaagatcttccaggagcaccccctgcacggctgcagcgccagcaacagcagcgaggtggacggcggcgagaacatgacctgggccggcgccagacccaccctgggccccggcaacagaagcctggccggccagagcggccagggcaagcccagaggccagcccaacaccgccctgctgagcctggtgctgatggccggcaccttcttcatcgccttcttcctgagaaagttcaagaacagcagattcttccccggcagaatcagaagagtgatcggcgacttcggcgtgcccatcgccatcctgatcatggtgctggtggactacagcatcgaggacacctacacccagaagctgagcgtgcccagcggcttcagcgtgaccgcccccgagaagagaggctgggtgatcaaccccctgggcgagaagagccccttccccgtgtggatgatggtggccagcctgctgcccgccatcctggtgttcatcctgatcttcatggagacccagatcaccaccctgatcatcagcaagaaggagagaatgctgcagaagggcagcggcttccacctggacctgctgctgatcgtggccatgggcggcatctgcgccctgttcggcctgccctggctggccgccgccaccgtgagaagcgtgacccacgccaacgccctgaccgtgatgagcaaggccgtggcccccggcgacaagcccaagatccaggaggtgaaggagcagagagtgaccggcctgctggtggccctgctggtgggcctgagcatcgtgatcggcgacctgctgagacagatccccctggccgtgctgttcggcatcttcctgtacatgggcgtgaccagcctgaacggcatccagttctacgagagactgcacctgctgctgatgccccccaagcaccaccccgacgtgacctacgtgaagaaggtgagaaccctgagaatgcacctgttcaccgccctgcagctgctgtgcctggccctgctgtgggccgtgatgagcaccgccgccagcctggccttccccttcatcctgatcctgaccgtgcccctgagaatggtggtgctgaccagaatcttcaccgacagagagatgaagtgcctggacgccaacgaggccgagcccgtgttcgacgagagagagggcgtggacgagtacaacgagatgcccatgcccgtgtag

SEQ ID NO: 307468 - DNA, 3726 bp, Artificial Sequence
  derived and/or modified sequence
atgagcagcgcccccagaagacccgccaagggcgccgacagcttctgcacccccgagcccgagagcctgggccccggcacccccggcttccccgagcaggaggaggacgagctgcacagaaccctgggcgtggagagattcgaggagatcctgcaggaggccggcagcagaggcggcgaggagcccggcagaagctacggcgaggaggacttcgagtaccacagacagagcagccaccacatccaccaccccctgagcacccacctgccccccgacgccagaagaagaaagaccccccagggccccggcagaaagcccagaagaagacccggcgccagccccaccggcgagacccccaccatcgaggagggcgaggaggacgaggacgaggccagcgaggccgagggcgccagagccctgacccagcccagccccgtgagcacccccagcagcgtgcagttcttcctgcaggaggacgacagcgccgacagaaaggccgagagaaccagccccagcagccccgcccccctgccccaccaggaggccacccccagagccagcaagggcgcccaggccggcacccaggtggaggaggccgaggccgaggccgtggccgtggccagcggcaccgccggcggcgacgacggcggcgccagcggcagacccctgcccaaggcccagcccggccacagaagctacaacctgcaggagagaagaagaatcggcagcatgaccggcgccgagcaggccctgctgcccagagtgcccaccgacgagatcgaggcccagaccctggccaccgccgacctggacctgatgaagagccacagattcgaggacgtgcccggcgtgagaagacacctggtgagaaagaacgccaagggcagcacccagagcggcagagagggcagagagcccggccccacccccagagccagacccagagccccccacaagccccacgaggtgttcgtggagctgaacgagctgctgctggacaagaaccaggagccccagtggagagagaccgccagatggatcaagttcgaggaggacgtggaggaggagaccgagagatggggcaagccccacgtggccagcctgagcttcagaagcctgctggagctgagaagaaccctggcccacggcgccgtgctgctggacctggaccagcagaccctgcccggcgtggcccaccaggtggtggagcagatggtgatcagcgaccagatcaaggccgaggacagagccaacgtgctgagagccctgctgctgaagcacagccaccccagcgacgagaaggacttcagcttccccagaaacatcagcgccggcagcctgggcagcctgctgggccaccaccacggccagggcgccgagagcgacccccacgtgaccgagcccctgatgggcggcgtgcccgagaccagactggaggtggagagagagagagagctgcccccccccgccccccccgccggcatcaccagaagcaagagcaagcacgagctgaagctgctggagaagatccccgagaacgccgaggccaccgtggtgctggtgggctgcgtggagttcctgagcagacccaccatggccttcgtgagactgagagaggccgtggagctggacgccgtgctggaggtgcccgtgcccgtgagattcctgttcctgctgctgggccccagcagcgccaacatggactaccacgagatcggcagaagcatcagcaccctgatgagcgacaagcagttccacgaggccgcctacctggccgacgagagagaggacctgctgaccgccatcaacgccttcctggactgcagcgtggtgctgccccccagcgaggtgcagggcgaggagctgctgagaagcgtggcccacttccagagacagatgctgaagaagagagaggagcagggcagactgctgcccaccggcgccggcctggagcccaagagcgcccaggacaaggccctgctgcagatggtggaggccgccggcgccgccgaggacgaccccctgagaagaaccggcagacccttcggcggcctgatcagagacgtgagaagaagatacccccactacctgagcgacttcagagacgccctggacccccagtgcctggccgccgtgatcttcatctacttcgccgccctgagccccgccatcaccttcggcggcctgctgggcgagaagacccaggacctgatcggcgtgagcgagctgatcatgagcaccgccctgcagggcgtggtgttctgcctgctgggcgcccagcccctgctggtgatcggcttcagcggccccctgctggtgttcgaggaggccttcttcagcttctgcagcagcaaccacctggagtacctggtgggcagagtgtggatcggcttctggctggtgttcctggccctgctgatggtggccctggagggcagcttcctggtgagattcgtgagcagattcacccaggagatcttcgccttcctgatcagcctgatcttcatctacgagaccttctacaagctggtgaagatcttccaggagcaccccctgcacggctgcagcgccagcaacagcagcgaggtggacggcggcgagaacatgacctgggccggcgccagacccaccctgggccccggcaacagaagcctggccggccagagcggccagggcaagcccagaggccagcccaacaccgccctgctgagcctggtgctgatggccggcaccttcttcatcgccttcttcctgagaaagttcaagaacagcagattcttccccggcagaatcagaagagtgatcggcgacttcggcgtgcccatcgccatcctgatcatggtgctggtggactacagcatcgaggacacctacacccagaagctgagcgtgcccagcggcttcagcgtgaccgcccccgagaagagaggctgggtgatcaaccccctgggcgagaagagccccttccccgtgtggatgatggtggccagcctgctgcccgccatcctggtgttcatcctgatcttcatggagacccagatcaccaccctgatcatcagcaagaaggagagaatgctgcagaagggcagcggcttccacctggacctgctgctgatcgtggccatgggcggcatctgcgccctgttcggcctgccctggctggccgccgccaccgtgagaagcgtgacccacgccaacgccctgaccgtgatgagcaaggccgtggcccccggcgacaagcccaagatccaggaggtgaaggagcagagagtgaccggcctgctggtggccctgctggtgggcctgagcatcgtgatcggcgacctgctgagacagatccccctggccgtgctgttcggcatcttcctgtacatgggcgtgaccagcctgaacggcatccagttctacgagagactgcacctgctgctgatgccccccaagcaccaccccgacgtgacctacgtgaagaaggtgagaaccctgagaatgcacctgttcaccgccctgcagctgctgtgcctggccctgctgtgggccgtgatgagcaccgccgccagcctggccttccccttcatcctgatcctgaccgtgcccctgagaatggtggtgctgaccagaatcttcaccgacagagagatgaagtgcctggacgccaacgaggccgagcccgtgttcgacgagagagagggcgtggacgagtacaacgagatgcccatgcccgtgtag

SEQ ID NO: 307469 - protein, 252 aa, Artificial Sequence
  derived and/or modified sequence
MGDTFIRHIALLGFEKRFVPSQHYVHVPGEMAGPVGEGGLPALHRDLRVPSPKWFDGQRAAENRQGTLTEYCGTLMSLPTKISRCPHLLDFFKVRPDDLKLPTDNQTKKPETYLMPKDGKSTATDITGPIILQTYRAIANYEKTSGSEMALSTGDVVEVVEKSESGQTSHLTGLLPLVLRNPQPQAPCQGSGSLAPGRTPALLGALNVLPTLWVAFCLSVHPVVAVGICAWQAGAGHVCVFCLDGYGTVCSL

SEQ ID NO: 307470 - DNA, 759 bp, Artificial Sequence
  derived and/or modified sequence
atgggcgatacctttatcagacatattgcactcctcgggttcgagaaaaggttcgttccttctcagcattacgtgcacgtgcccggggagatggccggtccggtgggggagggcgggctgcctgcgctgcatcgggatctaagggtgccttctcctaaatggttcgatgggcagagagccgccgaaaaccgacaaggaacactcaccgaatactgtggcacgctgatgtcactcccgacgaagatatctaggtgtccccatctactggatttttttaaagtgcgtcctgatgacctaaaactccctactgacaaccaaaccaagaagcccgagacttatctgatgcctaaagatggcaagagcaccgccacggatattaccggcccaatcatcttacaaacatatagggcaattgccaactacgagaagacttccggttcggaaatggcactttccaccggagacgttgtggaagtggtggagaagagcgaaagcggacagacctcccatctgacaggactgcttcctctcgtgcttcgcaacccccagccacaggccccctgccagggttccgggagtttagccccgggccgaactccagccctcctcggggcccttaacgtcctgccaactctctgggtggccttctgcctgtctgtgcaccccgttgtggccgtggggatatgtgcttggcaggccggagcaggacacgtgtgtgtattctgtctcgatggatacggtaccgtgtgctctctttag

SEQ ID NO: 307471 - DNA, 759 bp, Artificial Sequence
  derived and/or modified sequence
atgggagacaccttcatccgccacatcgccctgctgggctttgagaagagatttgtgcccagccagcactacgtgcacgtgcctggagagatggccggccctgtgggggagggcggcctgcctgccctgcaccgggacctgcgggtgcccagccccaagtggtttgatggccagagagctgctgagaaccggcagggcaccctgacagagtactgcggcaccctgatgagcctgcccaccaagatcagccgctgcccccacctgctggacttcttcaaggtgcggccagatgacctgaagctgcccacagacaaccagaccaagaagccagagacctacctgatgcccaaggatggcaagagcacagccacagacatcaccggccccatcatcctgcagacctaccgggccatcgccaactatgagaagaccagcggcagcgagatggccctgagcactggagatgtggtggaggtggtggagaagtctgagagcggccagaccagccacctgaccggcctgctgcccctggtgctgaggaacccccagccccaggccccctgccagggcagcggcagcctggcccctggccgcaccccagccctgctgggcgccctgaatgtgctgcccaccctgtgggtggccttctgcctgtctgtgcaccctgtggtggccgtgggcatctgtgcctggcaggccggggccggccacgtgtgtgtgttctgcctggatggctacggcaccgtgtgcagcctgtag

SEQ ID NO: 307472 - DNA, 759 bp, Artificial Sequence
  derived and/or modified sequence
atgggcgacaccttcatccggcacatcgccctgctgggcttcgagaagagatttgtgccatcacaacattacgtgcacgttccgggagagatggcagggcccgtgggagagggcggcttgccagctctacaccgggacctgcgcgtgccttctccaaagtggtttgacggccagcgtgccgccgaaaaccgccagggcacgcttaccgaatattgcggcacattgatgagcttgcccactaaaatctctagatgccctcatctactagatttctttaaggtgcgccccgacgatctgaagttgccaacagataatcagactaaaaagcccgagacctaccttatgcccaaggatggcaaatccactgctaccgacatcaccggcccgatcatcttacagacatatagggcaattgcgaactatgagaaaacaagtgggtctgagatggcgctttctactggcgatgtcgtcgaagtggtcgagaagtctgagtcggggcagactagtcacctcaccggtcttctgcccctggtgcttcgcaacccccagccacaagcaccgtgccagggctcggggtcacttgcccctgggaggaccccagccctgctcggcgccctgaatgtgctcccgaccctgtgggtggcgttttgtttgtcggttcatccagtggtggctgtcggtatttgcgcgtggcaagccggcgccgggcacgtgtgcgtattttgcctcgatggttacgggacagtttgtagcctgtag

SEQ ID NO: 307473 - DNA, 959 bp, Artificial Sequence
  derived and/or modified sequence
gagcactggaggccacccagtcatgggggacaccttcatccgtcacatcgccctgctgggctttgagaagcgcttcgtacccagccagcactatgtacatgttcctggtgaaatggcaggacctgtcggagaaggtggtctaccggcgcttcaccgagatctacgagttccatgacaaaaaagccagagacatacttgatgcccaaagatggcaagagtaccgcgacagacatcaccggccccatcatcctgcagacgtaccgcgccattgccaactacgagaagacctcgggctccgagatggctctgtccacgggggacgtggtggaggtcgtagagaagagcgagagcggtcagacctcccaccttacggggctccttcccctggtgctcaggaacccacagccacaagccccctgccaaggctcaggcagccttgcccctgggaggactccggctctgttaggggccctaaatgtcctccccacactgtgggtcgccttctgtcttagtgtgcaccctgtggtggctgtgggcatctgtgcttggcaggccggggcggggcatgtctgcgtgttctgtctggatgggtatgggaccgtctgttcattatgaagtgggctcagagctgtgattctgtgagcatgtgtgcatgcatgcatgtgacctcattgtccggtgtggtgaaggtgacatttccaaatctgagcattggacatcagtgtgtctgtgtccctgtgtcctcaccatccctgatggctgcagggagccgctgggccctgcccctcagtcacattcccgcacctctggcacaggttggtggttctgtcagatgaaagcaaagcgaggctggatcccagcgtccttcctcgagcccctggacagtcctgacgagacggaagaccctgagcccaactatgcaggtgagccatacgtcgccatcaaggcctacactgctg

SEQ ID NO: 307474 - DNA, 1039 bp, Artificial Sequence
  derived and/or modified sequence
agcactggaggccacccagtcatgggggacaccttcatccgtcacatcgccctgctgggctttgagaagcgcttcgtacccagccagcactatgtacatgttcctggtgaaatggcaggacctgtcggagaaggtggtctaccggcgcttcaccgagatctacgagttccatctcccaagtggtttgacgggcagcgggccgccgagaaccgccagggcacacttaccgagtactgcggcacgctcatgagcctgcccaccaagatctcccgctgtccccacctcctcgacttcttcaaggtgcgccctgatgacctcaagctccccacggacaaccagacaaaaaagccagagacatacttgatgcccaaagatggcaagagtaccgcgacagacatcaccggccccatcatcctgcagacgtaccgcgccattgccaactacgagaagacctcgggctccgagatggctctgtccacgggggacgtggtggaggtcgtagagaagagcgagagcggtcagacctcccaccttacggggctccttcccctggtgctcaggaacccacagccacaagccccctgccaaggctcaggcagccttgcccctgggaggactccggctctgttaggggccctaaatgtcctccccacactgtgggtcgccttctgtcttagtgtgcaccctgtggtggctgtgggcatctgtgcttggcaggccggggcggggcatgtctgcgtgttctgtctggatgggtatgggaccgtctgttcattatgaagtgggctcagagctgtgattctgtgagcatgtgtgcatgcatgcatgtgacctcattgtccggtgtggtgaaggtgacatttccaaatctgagcattggacatcagtgtgtctgtgtccctgtgtcctcaccatccctgatggctgcagggagccgctgggccctgcccctcagtcacattcccgcacctctggcacaggttggtggttctgtcagatgaaagcaaagcgaggctggatcccagcgtccttcctcgag

SEQ ID NO: 307475 - DNA, 759 bp, Artificial Sequence
  derived and/or modified sequence
atgggggatacttttataagacacattgcgcttctaggctttgagaagcggttcgtgcccagccagcactacgttcatgtccccggagaaatggccggtcctgtgggcgaaggcggactgccggcactccaccgggatcttagagtcccgtcaccaaagtggttcgacgggcagcgcgctgccgagaatcgccaggggacgctgaccgaatactgtggcaccctgatgtccctccccactaagattagcaggtgccctcacctgctcgactttttcaaagtgaggccagacgacctgaaactgcctactgataaccagacaaagaagcctgaaacctacctgatgccaaaggatggtaaaagcacagccacagatattacagggcctattatcctgcagacctatcgcgctatcgcaaattacgagaagacttccggttcagagatggccttgtccaccggcgacgtggttgaagtggttgagaaaagcgagagcggacagacctcccatttgaccggactgttgcctcttgtgctccgtaatccccagccccaggcaccctgccaggggtctgggtctctcgccccaggacggactcccgctcttctgggcgctctgaatgtgttgcccaccctgtgggtcgccttttgcctgtctgttcatccggtcgtcgcggtcgggatatgcgcatggcaggctggagccggtcacgtatgtgtgttctgcctagatgggtacggtaccgtgtgtagcctgtag

SEQ ID NO: 307476 - DNA, 759 bp, Artificial Sequence
  derived and/or modified sequence
atgggcgacaccttcatcagacacatcgccctgctgggcttcgagaagagattcgtgcccagccagcactacgtgcacgtgcccggcgagatggccggccccgtgggcgagggcggcctgcccgccctgcacagagacctgagagtgcccagccccaagtggttcgacggccagagagccgccgagaacagacagggcaccctgaccgagtactgcggcaccctgatgagcctgcccaccaagatcagcagatgcccccacctgctggacttcttcaaggtgagacccgacgacctgaagctgcccaccgacaaccagaccaagaagcccgagacctacctgatgcccaaggacggcaagagcaccgccaccgacatcaccggccccatcatcctgcagacctacagagccatcgccaactacgagaagaccagcggcagcgagatggccctgagcaccggcgacgtggtggaggtggtggagaagagcgagagcggccagaccagccacctgaccggcctgctgcccctggtgctgagaaacccccagccccaggccccctgccagggcagcggcagcctggcccccggcagaacccccgccctgctgggcgccctgaacgtgctgcccaccctgtgggtggccttctgcctgagcgtgcaccccgtggtggccgtgggcatctgcgcctggcaggccggcgccggccacgtgtgcgtgttctgcctggacggctacggcaccgtgtgcagcctgtag

SEQ ID NO: 307477 - protein, 147 aa, Artificial Sequence [sequence omitted]

SEQ ID NO: 307478 - DNA, 444 bp, Artificial Sequence
  derived and/or modified sequence
atgacgaaaaaaccagaaacctatctgatgccaaaggatggtaagagcaccgcaacggacattacgggtcccattatattgcagacatatagagctatcgcaaactatgagaaaacttccggctctgaaatggcgctgagtaccggggatgtcgtagaggttgtggagaaatccgaaagtggacagacctctcaccttaccggcctcctgccactggtgctgagaaatccgcaacctcaggccccttgccagggctctgggagcttggcaccagggagaacccccgctctgctcggcgcgcttaacgttcttcccaccctgtgggtggcattctgcctgagtgtccatccagtggtcgcggtggggatttgtgcctggcaagcgggggccggccatgtgtgcgttttctgcctggatggctatggcacagtgtgctccctgtag

SEQ ID NO: 307479 - DNA, 444 bp, Artificial Sequence
  derived and/or modified sequence
atgaccaagaagccagagacctacctgatgcccaaggatggcaagagcacagccacagacatcaccggccccatcatcctgcagacctaccgggccatcgccaactatgagaagaccagcggcagcgagatggccctgagcactggagatgtggtggaggtggtggagaagtctgagagcggccagaccagccacctgaccggcctgctgcccctggtgctgaggaacccccagccccaggccccctgccagggcagcggcagcctggcccctggccgcaccccagccctgctgggcgccctgaatgtgctgcccaccctgtgggtggccttctgcctgtctgtgcaccctgtggtggccgtgggcatctgtgcctggcaggccggggccggccacgtgtgtgtgttctgcctggatggctatggaacagtgtgcagcctgtag

SEQ ID NO: 307480 - DNA, 444 bp, Artificial Sequence
  derived and/or modified sequence
atgaccaagaagcccgagacctacctgatgcccaaggacggcaagtctaccgcaactgatatcacaggaccaatcatactccagacatatagggcgatcgccaactacgaaaagacaagcggatcggagatggcactctccaccggcgatgtcgtcgaggtggtcgaaaaatccgagtccgggcagacctctcacctgacagggttgcttcccctcgttttgcgcaacccgcagccccaagccccctgccaaggctcaggttccttggctcctggaagaacccccgccctgttgggggctcttaacgtgttaccgactctatgggtggcattttgcctaagcgttcacccagtcgtggctgttggcatctgcgcctggcaagctggcgccggccacgtttgcgtattctgcctggacggttacggaacagtctgttcactgtag

SEQ ID NO: 307481 - DNA, 444 bp, Artificial Sequence
  derived and/or modified sequence
atgaccaagaaacccgaaacctacttgatgccaaaagatggcaaaagtaccgccactgatatcaccggaccgatcattctgcagacgtatcgagcgatagcaaattatgagaaaacttccggcagcgagatggcactgtctaccggtgatgtggtagaggtggtggagaaatctgaaagcggacagacgtcacatttaacagggcttttgccccttgttcttcggaatccccagccccaagcgccatgtcaaggttctggctccttggcacctggccgaacccccgcactgcttggcgctctaaatgtcttgccaaccctttgggtggcattctgcctcagcgtgcaccctgtggtcgccgtgggtatatgcgcttggcaggctggcgctggtcatgtctgtgtgttttgtctcgacggctacggcactgtctgttctctctag

SEQ ID NO: 307482 - DNA, 444 bp, Artificial Sequence
  derived and/or modified sequence
atgaccaagaagcccgagacctacctgatgcccaaggacggcaagagcaccgccaccgacatcaccggccccatcatcctgcagacctacagagccatcgccaactacgagaagaccagcggcagcgagatggccctgagcaccggcgacgtggtggaggtggtggagaagagcgagagcggccagaccagccacctgaccggcctgctgcccctggtgctgagaaacccccagccccaggccccctgccagggcagcggcagcctggcccccggcagaacccccgccctgctgggcgccctgaacgtgctgcccaccctgtgggtggccttctgcctgagcgtgcaccccgtggtggccgtgggcatctgcgcctggcaggccggcgccggccacgtgtgcgtgttctgcctggacggctacggcaccgtgtgcagcctgtag

SEQ ID NO: 307483 - DNA, 2222 bp, Artificial Sequence
  derived and/or modified sequence
ccagcctcataatatcaccttttgctttgcatttgttcttaccaggaagcagaatgtgcctacacactctttgtggtcgccacattttggctcacagaagcattgcctctgtcggtaacagctttgctacctagtttaatgttacccatgtttgggatcatgccttctaagaaggtggcatctgcttatttcaaggattttcacttactgctaattggagttatctgtttagcaacatccatagaaaaatggaatttgcacaagagaattgctctgaaaatggtgatgatggttggtgtaaatcctgcatggctgacgctggggttcatgagcagcactgcctttttgtctatgtggctcagcaacacctcgacggctgccatggtgatgcccattgcggaggctgtagtgcagcagatcatcaatgcagaagcagaggtcgaggccactcagatgacttacttcaacggatcaaccaaccacggactagaaattgatgaaagtgttaatggacatgaaataaatgagaggaaagagaaaacaaaaccagttccaggatacaataatgatacagggaaaatttcaagcaaggtggagttggaaaagtacttgcaagtgaggtgaccaaaaaacagctttagactcttaaacttagtgtttaaaatgagaaggctgagagacagtctgcttatggagaaagttggagtatttccccagtgccccaaccccctgccacttgtaccatcacagtcgaaagaagggaagagtctcctacttaacaaggaagaggaagaatcaaaccaacaaagggtgtttacagggtcatgggtgagaaaaagaatgaagttgcttttggcttacaccctagaaagtcatctcttaaataaaacacttacatttggactagtgattccccaagtgaaaccatttcaggatgtgccattgtccaagaactcaggcatgagaaccaaatatcgaacaaagaagggccacgtgacacgtaaacttacgtgtttgtgcattgcctactcttctaccattggtggactgacaacaatcactggtacctccaccaacttgatctttgcagagtatttcaatacacgctatcctgactgtcgttgcctcaactttggatcatggtttacgttttccttcccagctgcccttatcattctactcttatcctggatctggcttcagtggcttttcctaggattcaattttaaggagatgttcaaatgtggcaaaaccaaaacagtccaacaaaaagcttgtgctgaggtgattaagcaagaataccaaaagcttgggccaataaggtatcaagaaattgtgaccttggtcctcttcattataatggctctgctatggtttagtcgagaccccggatttgttcctggttggtctgcacttttttcagagtaccctggttttgctacagattcaactgttgctttacttatagggctgctattctttcttatcccagctaagacactgactaaaactacacctacaggagaaattgttgcttttgattactctccactgattacttggaaagaattccagtcattcatgccctgggatatagccattcttgttggtggagggtttgccctggcagatggttgtgaggagtctggattatctaagtggataggaaataaattatctcctctgggttcattaccagcatggctaataattctgatatcttctttgatggtgacatctttaactgaggtagccagcaatccagctaccattacactctttctcccaatattatctccattggccgaagccattcatgtgaaccctctttatattctgataccttctactctgtgtacttcatttgcattcctcctaccagtagcaaatccacccaatgctattgtcttttcatatggtcatctgaaagtcattgacatggttaaagctggacttggtgtcaacattgttggtgttgctgtggttatgcttggcatatgtacttggattgtacccatgtttgacctctacacttacccttcgtgggctcctgctatgagtaatgagaccatgccataataagcacaaaatttctgactatcttgcggtaatttctggaagacattaatgattgactgtaaaatgtggctctaaataactaatgacacacatttaaatcagttatggtgtagctgctgcaattcctgtgaatacccgaaacc

SEQ ID NO: 307484 - protein, 161 aa, Artificial Sequence
  derived and/or modified sequence
MLPMFGIMPSKKVASAYFKDFHLLLIGVICLATSIEKWNLHKRIALKMVMMVGVNPAWLTLGFMSSTAFLSMWLSNTSTAAMVMPIAEAVVQQIINAEAEVEATQMTYFNGSTNHGLEIDESVNGHEINERKEKTKPVPGYNNDTGKISSKVELEKYLQVR

SEQ ID NO: 307485 - DNA, 486 bp, Artificial Sequence
  derived and/or modified sequence
atgctgcctatgttcgggataatgccatccaaaaaagtggccagcgcttacttcaaggacttccatctgctgctcattggcgtgatatgtctggctacgtccatcgaaaaatggaacttacacaagcggattgctttgaagatggtcatgatggtgggagttaatcctgcctggttgactcttggattcatgtcatcaactgcctttctctctatgtggctttcaaacactagcactgcagcaatggttatgccgattgcagaggctgttgtgcagcagattatcaacgctgaggctgaagttgaagcaacacagatgacgtacttcaacggctccaccaaccacggtcttgagattgacgaatcagtgaacgggcatgagattaacgagaggaaggaaaaaactaagcccgttcctggctataacaacgacaccggaaaaattagctcaaaagttgaactggagaagtacctccaggtaagatag

SEQ ID NO: 307486 - DNA, 486 bp, Artificial Sequence
  derived and/or modified sequence
atgctgcccatgtttggcatcatgcccagcaagaaggtggccagcgcctacttcaaggacttccacctgctgctgattggagtcatctgcctggccaccagcattgagaagtggaacctgcacaagagaattgccctgaagatggtgatgatggtgggcgtgaacccagcctggctgaccctgggcttcatgagcagcacagccttcctgtccatgtggctgagcaacaccagcacagctgccatggtgatgcccatcgccgaggccgtggtgcagcagatcatcaatgctgaggccgaggtggaggccacccagatgacctacttcaacggcagcaccaaccacggcctggagattgatgagagcgtgaatggccacgagatcaatgaaaggaaggagaagaccaagcctgtgcccggctacaacaatgacaccgggaagatcagcagcaaggtggagctggagaagtacctgcaggtgaggtag

SEQ ID NO: 307487 - DNA, 486 bp, Artificial Sequence
  derived and/or modified sequence
atgctgcccatgttcggcatcatgcccagcaagaaggtggccagcgcttactttaaggatttccacctgctgctgatcggtgtcatctgcctggctacgtctatcgaaaaatggaatttgcacaagcgcatagccttgaaaatggtgatgatggtcggagtgaacccagcctggctgacgctgggctttatgagctccaccgcattcctaagcatgtggctgagtaataccagtactgcggccatggttatgcccattgcggaagccgttgtgcagcagattatcaacgcagaggctgaagtggaggccacacagatgacatactttaatggctctaccaaccacggcctagaaatcgatgagtcagtgaacgggcatgagatcaatgaaaggaaagaaaaaactaaacccgtgcccggctacaacaatgatacaggaaagatcagttccaaggtggaattggaaaaatacctccaagtgaggtag

SEQ ID NO: 307488 - DNA, 486 bp, Artificial Sequence
  derived and/or modified sequence
atgctgcccatgtttggcatcatgccgtccaagaaggttgcgtctgcgtatttcaaggacttccatttgctgttgatcggagtgatctgcctggccaccagtatcgagaagtggaatctgcacaagaggattgccctgaaaatggtgatgatggtcggcgttaatcctgcttggctcaccctagggttcatgagttctacggcgtttttaagtatgtggctatccaacactagtaccgccgctatggttatgcccatcgccgaggccgtagtccagcagatcataaacgcagaggctgaggtcgaagcaacccagatgacttatttcaatgggagtacaaaccacggtctcgagattgatgagagcgtgaatggacatgagattaacgaacggaaggaaaagacgaaacccgtccctggatataataacgatactggaaagatcagcagtaaagtcgagctggaaaaatatcttcaggtgcgctag

SEQ ID NO: 307489 - DNA, 486 bp, Artificial Sequence
  derived and/or modified sequence
atgctgcccatgttcggcatcatgcccagcaagaaggtggccagcgcctacttcaaggacttccacctgctgctgatcggcgtgatctgcctggccaccagcatcgagaagtggaacctgcacaagagaatcgccctgaagatggtgatgatggtgggcgtgaaccccgcctggctgaccctgggcttcatgagcagcaccgccttcctgagcatgtggctgagcaacaccagcaccgccgccatggtgatgcccatcgccgaggccgtggtgcagcagatcatcaacgccgaggccgaggtggaggccacccagatgacctacttcaacggcagcaccaaccacggcctggagatcgacgagagcgtgaacggccacgagatcaacgagagaaaggagaagaccaagcccgtgcccggctacaacaacgacaccggcaagatcagcagcaaggtggagctggagaagtacctgcaggtgagatag

SEQ ID NO: 307490 - protein, 259 aa, Artificial Sequence
  derived and/or modified sequence
MDPPAEKPGEAGGLQITPQLLKSRTGEFSLESILLLKLRGLGLADLGCLGECLGLEWLDLSGNALTHLGPLASLRQLAVLNVSNNRLTGLEPLATCENLQSLNAAGNLLATPGQLQCLAGLPCLEYLRLRDPLARLSNPLCANPSYWAAVRELLPGLKVIDGERVIGRGSEFYQLCRDLDSSLRPSSSPGPRATEAQPWVEPGYWESWPSRSSSILEEACRQFQDTLQECWDLDRQASDSLAQAEQVLSSAGPTSSFVF

SEQ ID NO: 307491 - DNA, 780 bp, Artificial Sequence
  derived and/or modified sequence
atggacccccccgccgagaagcccggcgaggccggcggcctgcagatcaccccccagctgctgaagagcagaaccggcgagttcagcctggagagcatcctgctgctgaagctgagaggcctgggcctggccgacctgggctgcctgggcgagtgcctgggcctggagtggctggacctgagcggcaacgccctgacccacctgggccccctggccagcctgagacagctggccgtgctgaacgtgagcaacaacagactgaccggcctggagcccctggccacctgcgagaacctgcagagcctgaacgccgccggcaacctgctggccacccccggccagctgcagtgcctggccggcctgccctgcctggagtacctgagactgagagaccccctggccagactgagcaaccccctgtgcgccaaccccagctactgggccgccgtgagagagctgctgcccggcctgaaggtgatcgacggcgagagagtgatcggcagaggcagcgagttctaccagctgtgcagagacctggacagcagcctgagacccagcagcagccccggccccagagccaccgaggcccagccctgggtggagcccggctactgggagagctggcccagcagaagcagcagcatcctggaggaggcctgcagacagttccaggacaccctgcaggagtgctgggacctggacagacaggccagcgacagcctggcccaggccgagcaggtgctgagcagcgccggccccaccagcagcttcgtgttctag

SEQ ID NO: 307492 - DNA, 780 bp, Artificial Sequence
  derived and/or modified sequence
atggatccaccagctgagaaacccggggaggccggaggcctgcagataacaccccaactccttaaaagcaggactggagagtttagtttggagtccattttactcctcaagttacgtggtctgggactggctgaccttggatgcctgggagagtgtcttggactggaatggctggacctgagcgggaatgctctgactcatctgggccccctcgcctccctcagacagctggccgttctgaatgtgtctaataacagactcacaggcctagagcccttggctacctgtgagaacctccagtcgctgaatgccgcaggaaaccttctggccactcccggccagctacagtgtctggctggcctgccgtgtctcgaatatttacggctgagagatcctctggccagactatcaaatccgctgtgcgccaaccccagctattgggcggccgtcagagaacttctgccgggtctgaaagtgatagacggcgagagagttattgggcgtggctcagaattttaccagctttgccgcgatcttgacagttcactccgcccaagcagcagtccaggacctagagcaacggaggcacagccctgggtcgaacccgggtactgggaaagttggccatcccgctcttcctccattttagaagaagcatgtagacagtttcaggacaccctccaggaatgttgggacctggataggcaagcctccgacagtctagctcaggcagaacaggtgctgagttcggcagggcccacctcatctttcgtattctag

SEQ ID NO: 307493 - DNA, 780 bp, Artificial Sequence
  derived and/or modified sequence
atggaccctcctgccgagaagcccggggaggccggcgggttacagatcacaccccaactcctgaaatccagaacaggggagttttctctggaatccatcttgctcctaaagctgcggggcctgggtctcgccgacctcggctgcctcggggaatgcctcggcctcgagtggctggatctgtccggcaacgccctgacccacttgggccccttggctagcctgaggcagctagccgtattgaatgttagtaacaaccggcttacagggctggaacctctggctacgtgcgaaaatcttcagagcctgaatgcggcagggaacctcctagctacccccggtcaactgcaatgtctcgcaggcctcccttgcctagagtacttgagactgcgggatcccctcgctcgactaagcaaccccctgtgcgccaacccttcttactgggctgccgtgcgggagctactccctggtctcaaagtaatcgacggtgagagagttattggacgcgggagtgaattttatcagctgtgccgggacctggactcaagtcttcgacccagcagcagccctggcccccgagccacggaggcccagccttgggtggaacctgggtactgggagtcatggccctcccggtcatccagtatactggaggaggcttgccgtcagtttcaggacacgttgcaagagtgttgggatttggatagacaggccagcgactcattagcacaggctgaacaagtcctgtctagcgccggtcctacttcatcgttcgtgttctag

SEQ ID NO: 307494 - DNA, 780 bp, Artificial Sequence
  derived and/or modified sequence
atggatcctcccgccgagaaacctggagaggcaggaggcttgcagattacaccccagctgctgaaaagtcgcacaggagagtttagtctcgaaagcatcctcctactcaagctacgcggccttggtctcgcagacctgggctgtctcggcgaatgcttggggttagagtggctggatctgtctggaaatgcgctgacacatctgggccccctggctagtctgcgccaactagcagtgctaaatgtttccaataatcgtttaacaggcttagaacctctcgcaacctgtgagaacttgcagtcactgaatgccgccgggaacctgctggccacacccgggcagttgcagtgcttggcggggctgccctgcctcgaatacttgagactccgtgatccgctggccagactgagtaaccctctgtgtgcaaacccttcatactgggccgctgtcagagaactgctcccaggtctaaaggtcatcgatggggagcgcgtaattggtcgtggatctgagttttatcagctttgcagagacctggactccagcctgcggccgtccagctcgcctggaccacgcgctacagaggctcagccgtgggtagagccgggctactgggaatcttggccttcacgctccagctcaatcctggaagaggcctgcagacagttccaagataccctgcaggaatgctgggacttggatcggcaagcgagcgacagtctggcccaggcggagcaagtgctcagctccgccggtccaaccagctcatttgtgttttag

SEQ ID NO: 307495 - DNA, 780 bp, Artificial Sequence
  derived and/or modified sequence
atggaccccccagctgagaagccaggagaggccggcggcctgcagatcaccccccagctgctgaagagcaggactggagagttcagcctggagagcatcctgctgctgaagctgcggggcctgggcctggccgacctgggctgcctgggagaatgtctgggcctggagtggctggacctgtctggaaatgccctgacccacctgggccccctggccagcctgcggcagctggccgtgctgaatgtgagcaacaaccggctgaccggcctggagcccctggccacctgtgagaacctgcagagcctgaatgctgctggcaacctgctggccaccccaggccagctgcagtgcctggccggcctgccctgcctggagtacctgcggctgcgggaccccctggcccggctgagcaaccccctgtgtgccaaccccagctactgggccgctgtgcgggagctgctgcccggcctgaaggtgattgatggagagagggtcatcggccggggcagcgagttctaccagctgtgccgggacctggacagcagcctgcggcccagcagcagccctggcccccgggccacagaggcccagccctgggtggagcccggctactgggagagctggcccagccgcagcagcagcatcctggaggaggcctgccggcagttccaggacaccctgcaggagtgctgggacctggaccggcaggccagtgacagcctggcccaggccgagcaggtgctgagcagcgctggccccaccagcagctttgtgttctag

SEQ ID NO: 307496 - DNA, 1684 bp, Artificial Sequence
  derived and/or modified sequence
gcaggctgcgcttccggaagtaacccctggcgcatcccggaatccagagcgcccactacggcctttggccaggccccctgggcgcgttccgggagctcaggcctgcggcgctgggagaagcacgctggccaacaagttgggtggtgggcacgcggcccaggggtcaggggccgccaggcggcgggcggcggggctgcggctcttacctgccgaggaggcgccggctctgcggtgcggagttgcgccggacttcccagcttggccagtggctccgcaggctgccggctccacccctcagggactggctggcttcgagcagggcatcggaaccaggcctcctggcactggcctgggtagagccagggcgagcaccagctgacccccagtggaaccctgtgacagtcctgccagggcccaggccatcccaaccgacttccatctcatggaccctccagcggagaagccgggagaggctggcggactgcagatcacaccccagctgctgaagtcacgcacaggcgagttctccctggagtccatcctgctactgaagctgcgtggcttgggactggctgacctgggctgcctgggagagtgcctgggcctggagtggctggacctatcaggcaacgcgctcacccacctgggcccgctggcctccttgcgccagctagctgtgctcaatgtctccaacaatcggctgacgggcctggagccactggccacctgtgagaacttgcagagtctcaatgccgcaggcaacctactggccaccccgggccagctgcagtgtctggctgggctaccgtgcctggagtacctgcggctccgagaccctttggcccggctcagcaacccgctctgtgccaacccctcctactgggctgcagtccgggagctgctgcctggcctgaaagtcatcgacggtgagcgtgtgattgggcgtggtagtgagttctaccagctgtgccgagacctggacagctccttgcgtcccagctccagtccaggccccagagccaccgaggcccagccctgggtggagccaggctactgggagtcctggcccagccggagcagctccatcctggaggaggcctgccggcagttccaggacacactgcaggagtgctgggacctggaccgccaggccagcgacagcctggcccaggcggagcaggtactcagctctgcgggccccacctcttccttcgtcttctgaacgtggcctatggcccaggacagcctggcaggtggcctcgctgcccccagttcccctctctgcccccacactcgtcttagttgcttcacactggtcactggccctgcacactgggctattgctttatccctatcctgagagcagcccctccccaccatccctccacatgctgcaaggacagactgaagggctgtgagcaggtgtaagggctcccacatccgtgagcctgtgtccgcagctgctgccactctgggctgctccagcctgcaacttagtggaaggaattacttcctcctgaggctacaggcgagaaaggtagggatgggccagcctcccgtctcagctgttgggagacagtaggcaggctgagtggcccagagcactcctggaagtgggactcccctgccttgcaaatgtgcctctccagactgctcctgcacttaccccctccccgcagcacct

SEQ ID NO: 307497 - DNA, 1877 bp, Artificial Sequence
  derived and/or modified sequence
ccctggcgcatcccggaatccagagcgcccactacggcctttggccaggccccctgggcgcgttccgggagctcaggcctgcggcgctgggagaagcacgctggccaacaagttgggtggtgggcacgcggcccaggggtcaggggccgccaggcggcgggcggcggggctgcggctcttacctgccgaggaggcgccggctctgcggtgcggagttgcgccggacttcccagcttggccagtggctccgcaggctgccggctccacccctcagattcatttggattcaaggttggctctcaacagtgccagctgcactgtcatcctaaagtacttctgtggaagagaacatggtggtgtcactgttgtaccagtgatgacacaaaatcccagatctacctgacgggcctgcgagggttgaagattgtgaagcaatagcctaagggactggctggcttcgagcagggcatcggaaccaggcctcctggcactggcctgggtagagccagggcgagcaccagctgacccccagtggaaccctgtgacagtcctgccagggcccaggccatcccaaccgacttccatctcatggaccctccagcggagaagccgggagaggctggcggactgcagatcacaccccagctgctgaagtcacgcacaggcgagttctccctggagtccatcctgctactgaagctgcgtggcttgggactggctgacctgggctgcctgggagagtgcctgggcctggagtggctggacctatcaggcaacgcgctcacccacctgggcccgctggcctccttgcgccagctagctgtgctcaatgtctccaacaatcggctgacgggcctggagccactggccacctgtgagaacttgcagagtctcaatgccgcaggcaacctactggccaccccgggccagctgcagtgtctggctgggctaccgtgcctggagtacctgcggctccgagaccctttggcccggctcagcaacccgctctgtgccaacccctcctactgggctgcagtccgggagctgctgcctggcctgaaagtcatcgacggtgagcgtgtgattgggcgtggtagtgagttctaccagctgtgccgagacctggacagctccttgcgtcccagctccagtccaggccccagagccaccgaggcccagccctgggtggagccaggctactgggagtcctggcccagccggagcagctccatcctggaggaggcctgccggcagttccaggacacactgcaggagtgctgggacctggaccgccaggccagcgacagcctggcccaggcggagcaggtactcagctctgcgggccccacctcttccttcgtcttctgaacgtggcctatggcccaggacagcctggcaggtggcctcgctgcccccagttcccctctctgcccccacactcgtcttagttgcttcacactggtcactggccctgcacactgggctattgctttatccctatcctgagagcagcccctccccaccatccctccacatgctgcaaggacagactgaagggctgtgagcaggtgtaagggctcccacatccgtgagcctgtgtccgcagctgctgccactctgggctgctccagcctgcaacttagtggaaggaattacttcctcctgaggctacaggcgagaaaggtagggatgggccagcctcccgtctcagctgttgggagacagtaggcaggctgagtggcccagagcactcctggaagtgggactcccctgccttgcaaatgtgcctctccagactgctcctgcacttaccccctccccgcagcaccttctctgcccgttcttgtccacacatctattaaatgcttctgttttca

SEQ ID NO: 307498 - DNA, 1456 bp, Artificial Sequence
  derived and/or modified sequence
ggcgcatcccggaatccagagcgcccactacggcctttggccaggccccctgggcgcgttccgggagctcaggcctgcggcgctgggagaagcacgctggccaacaagttgggtggtgggcacgcggcccaggggtcaggggccgccaggcggcgggcggcggggctgcggctcttacctgccgaggaggcgccggctctgcggtgcggagttgcgccggacttcccagcttggccagtggctccgcaggctgccggctccacccctcaggcacaagagaagtagaagagtggccgctttccttctgggcacgcacttgggaaaaggcttgattcatttggattcaaggttggctctcaacagtgccagctgcactgtcatcctaaagtacttctgtggaagagaacatggtggtgtcactgttgtaccagtgatgacacaaaatcccagatctacctgacgggcctgcgagggttgaagattgtgaagcaatagcctaagggactggctggcttcgagcagggcatcggaaccaggcctcctggcactggcctgggtagagccagggcgagcaccagctgacccccagtggaaccctgtgacagtcctgccagggcccaggccatcccaaccgacttccatctcatggaccctccagcggagaagccgggagaggctggcggactgcagatcacaccccagctgctgaagtcacgcacaggcgagttctccctggagtccatcctgctactgaagctgcgtggcttgggactggctgacctgggctgcctgggagagtgcctgggcctggagtggctggacctatcaggcaacgcgctcacccacctgggcccgctggcctccttgcgccagctagctgtgctcaatgtctccaacaatcggctgacgggcctggagccactggccacctgtgagaacttgcagagtctcaatgccgcaggcaacctactggccaccccgggccagctgcagtgtctggctgggctaccgtgcctggagtacctgcggctccgagaccctttggcccggctcagcaacccgctctgtgccaacccctcctactgggctgcagtccgggagctgctgcctggcctgaaagtcatcgacggtgagcgtgtgattgggcgtggtagtgagttctaccagctgtgccgagacctggacagctccttgcgtcccagctccagtccaggccccagagccaccgaggcccagccctgggtggagccaggctactgggagtcctggcccagccggagcagctccatcctggaggaggcctgccggcagttccaggacacactgcaggagtgctgggacctggaccgccaggccagcgacagcctggcccaggcggagcaggtactcagctctgcgggccccacctcttccttcgtcttctgaacgtggcctatggcccaggacagcctggcag

SEQ ID NO: 307499 - DNA, 780 bp, Artificial Sequence
  derived and/or modified sequence
atggacccccccgccgagaagcccggcgaggccggcggcctgcagattacgccccaactgttgaaaagccggacaggtgagttctctctggagtctatactgctgcttaaattgagggggcttggcttggccgatctgggctgccttggtgagtgcctagggcttgaatggctggatctatccggtaacgccctcacccacttgggaccccttgcatctcttcgtcagctggctgtgctgaacgttagtaataatcgcctgacaggcctcgagccgttggccacttgcgagaacctgcagagtctgaacgcagccgggaatctgctggccactcctggacagttgcagtgtttggccgggctcccatgtttggagtacctccgtctgagagaccccctggcgcgcctgtcaaaccccttgtgtgctaacccctcttattgggcggccgtgagagagctgctaccaggcctgaaagtgatcgacggcgagcgcgtgattggcaggggttccgaattctatcagctgtgccgcgatctcgattccagtctccgcccatctagctcccctgggccaagggctactgaggctcagccatgggtagagcctgggtactgggaaagctggccaagtcggagtagctccatattggaagaggcctgccggcagttccaagacacgctccaggagtgctgggatctcgatcggcaggcaagcgactcactggctcaggctgaacaagtccttagtagcgcaggtccgacctccagcttcgtgttctag

SEQ ID NO: 307500 - DNA, 780 bp, Artificial Sequence
  derived and/or modified sequence
atggacccccccgccgagaagcccggcgaggccggcggcctgcagattactcctcagctgctgaagtcaagaaccggggagttcagtctggaaagcatcttactgttaaagctccgaggcctggggctagccgacctgggttgcctgggagagtgtctgggccttgagtggctcgacctttctggcaatgcattgacccatttagggcccctggcctccctcaggcagttagctgttctgaacgtcagcaacaatagactaaccggcctagaacctctcgcaacctgcgaaaacctccaaagtttgaacgcagctggcaatctgctggcgacaccaggccagctgcagtgcctggccgggctgccctgtttggagtacctacggctgagagaccccctcgcgcgactgtcaaaccccctatgcgctaacccgagctactgggctgcagttcgggagctcctcccgggactgaaagttattgacggagaacgcgttattggcaggggcagcgaattctaccagctctgccgggacctggactccagcctgcggccctcaagctctccaggcccgcgtgctaccgaggcacagccttgggtagaaccgggatattgggagagctggccctcccgatcaagttccatcttagaagaggcctgtcggcaattccaggatactctccaggagtgctgggatcttgaccgtcaggcctctgatagcctcgcacaggcagagcaagtcctgagtagcgccggcccaacttcttcgttcgtgttctag

SEQ ID NO: 307501 - DNA, 780 bp, Artificial Sequence
  derived and/or modified sequence
atggacccccccgccgagaagcccggcgaggccggcggcctgcagatcacacctcagctcctgaagtctaggacaggcgagttcagcctggagtcgatcctcctgctaaagctgcgggggcttggcttagctgacttgggatgcttgggggagtgcctgggcctcgagtggttggacctcagtggcaacgccctcactcacttgggccctttggcatcgctgcggcaattggctgtactcaacgtgagcaataaccggctgaccggactcgaacccctcgctacttgcgagaatctccaaagtttgaacgctgccggaaacctgttagccacacctggccagctgcaatgcctggccggtctgccttgcttagagtacttacggcttcgggatcctttagccagactgagcaatcctctatgcgccaacccatcgtactgggcagccgttagagaactgctccccggattgaaggtgatcgatggagagcgtgtgatagggcgcggaagcgagttctaccagttgtgccgcgacttggattctagtctacgaccatctagttctcccgggccacgcgccacagaggcccagccatgggtggaacctggctactgggaaagttggccaagcagatcttcatcaatattggaggaggcgtgtaggcagttccaggacactctgcaggaatgctgggatctggacaggcaggcttctgattccctggcccaagcggaacaggtgctgagctccgccgggccaaccagctccttcgttttttag

SEQ ID NO: 307502 - DNA, 780 bp, Artificial Sequence
  derived and/or modified sequence
atggaccccccagcggagaagcccggagaggccggagggctccaaatcaccccacagttactcaaaagtcgaacaggggaattctcactggaatctattctccttctcaagctgcgaggcctcggcttagctgaccttgggtgcttaggcgaatgtctcggtctcgagtggctcgatctgtccggcaacgccctgacccacctgggcccacttgcaagcctgagacagctagcagtgctgaacgtgtccaataacagactcactggcctcgaacccctagcaacatgtgagaatctccagtccctaaacgctgcagggaatctgctcgcaacccccggacaattgcaatgcctcgccggactcccatgtctggagtatctgcgactgcgtgaccccctggcaagactgtcaaaccccctctgtgcaaatcctagttattgggccgcagtgcgcgagttgctgcccggattgaaggtcatcgatggggagcgggtcatcggtcggggtagtgaattttatcagctctgcagggatctggatagttctctgaggcctagctcgtccccagggcctcgagccaccgaggcccaaccttgggttgaacccggatactgggagagttggcccagcaggtctagttcgatactggaggaggcgtgcagacagttccaggataccctgcaggaatgctgggatctggatcgccaggccagcgacagcctcgctcaggccgagcaggttctaagctcagcaggtcccacttctagctttgtcttttag

SEQ ID NO: 307503 - DNA, 780 bp, Artificial Sequence
  derived and/or modified sequence
atggaccccccagcagaaaaaccgggtgaagcgggtggcttacaaatcacaccacagctgctcaagagtcgaacaggagaattctccctcgagagcattctgctcctcaaattacgcggtctgggcctggcagatctcgggtgcctgggcgagtgtttgggattggagtggcttgatttgagtggtaatgctctgactcacctgggaccactcgccagtctgcgacagctggctgttcttaatgttagtaacaatcgattgactggattggaaccgctcgccacctgcgagaatttgcagtcactgaatgccgctggaaatcttctcgcaacacctgggcaattgcaatgcctcgctgggttgccttgcctggaatatctacgccttagagaccctctggccagattgtcaaacccgctttgtgcaaatccatcatactgggcggcagtacgcgaactgttaccaggtctgaaggtgattgatggagagagagtcatcggccgaggatccgaattctatcagctctgtcgggatctggattcctctctgagaccttcaagtagcccaggaccaagggccacagaggcccagccctgggtggagccagggtactgggagagctggccatcccgttcttcctccattctggaggaagcttgcagacagttccaggacaccctgcaggaatgctgggacctggacaggcaggcatcagattccttggcccaggcagagcaagtgttgtcttctgcgggtcccacctcttcatttgtgttttag

SEQ ID NO: 307504 - DNA, 780 bp, Artificial Sequence
  derived and/or modified sequence
atggatcctccggcagaaaaacctggcgaggcgggtggcctccagataactccacagctgctgaagagccggaccggtgaattttcgcttgagtctatcctgctgctaaagctgcggggtcttggattggccgacttaggctgccttggagagtgcctaggtctcgagtggctcgatctgtctggaaacgctctgacccaccttggacctctcgcctctttaaggcagttagcagtacttaatgtctccaataacagactcacgggattggagcctcttgccacatgtgagaatttgcaaagcctgaacgcggctggcaacctgcttgcgacccctggccagctccagtgtcttgctggactgccgtgcctggaatatttgagactgcgcgaccccttagcaaggctgagcaacccgctgtgcgccaatccaagctattgggccgcagtaagggaacttttgccagggctcaaggtgatagatggcgaacgggtcatcggcaggggcagcgagttctaccagctgtgcagggacctagatagttctctgcgcccaagcagcagccctggaccgagggctactgaggcacagccttgggtggagccaggctattgggagagctggccctccaggagctcttccatcctggaggaggcctgccgtcagttccaggacacgcttcaggaatgctgggacctggataggcaagcaagtgacagcctggcacaggcggaacaggtgttgtcatcagccggtccaacctcttcctttgtgttctag

SEQ ID NO: 307505 - DNA, 1308 bp, Artificial Sequence
  derived and/or modified sequence
atgacccccggcctgcagcacccccccaccgtggtgcagagacccggcatgcccagcggcgccagaatgccccaccagggcgcccccatgggcccccccggcagcccctacatgggcagccccgccgcccccgccagaagcagaagcgccaagagaagaaagatggccgacaagatcctgccccagagaatcagagagctggtgcccgagagccaggcctacatggacctgctggccttcgagagaaagctggaccagaccatcatgagaaagagagtggacatccaggaggccctgaagagacccatgaagcagaagagaaagctgagactgtacatcagcaacaccttcaaccccgccaagcccgacgccgaggacagcgacggcagcatcgccagctgggagctgagagtggagggcaagctgctggacgaccccagcaagcagaagagaaagttcagcagcttcttcaagagcctggtgatcgagctggacaaggacctgtacggccccgacaaccacctggtggagtggcacagaacccccaccacccaggagaccgacggcttccaggtgaagagacccggcgacctgagcgtgagatgcaccctgctgctgatgctggactaccagcccccccagttcaagctggaccccagactggccagactgctgggcctgcacacccagagcagaagcgccatcgtgcaggccctgtggcagtacgtgaagaccaacagactgcaggacagccacgacaaggagtacatcaacggcgacaagtacttccagcagatcttcgactgccccagactgaagttcagcgagatcccccagagactgaccgccctgctgctgccccccgaccccatcgtgatcaaccacgtgatcagcgtggaccccagcgaccagaagaagaccgcctgctacgacatcgacgtggaggtggaggagcccctgaagggccagatgagcagcttcctgctgagcaccgccaaccagcaggagatcagcgccctggacagcaagatccacgagaccatcgagagcatcaaccagctgaagatccagagagacttcatgctgagcttcagcagagaccccaagggctacgtgcaggacctgctgagaagccagagcagagacctgaaggtgatgaccgacgtggccggcaaccccgaggaggagagaagagccgagttctaccaccagccctggagccaggaggccgtgagcagatacttctactgcaagatccagcagagaagacaggagctggagcagagcctggtggtgagaaacacctag

SEQ ID NO: 307506 - DNA, 1308 bp, Artificial Sequence
  derived and/or modified sequence
atgactcccggcctccaacacccaccaacagtcgtccagcggccggggatgcctagtggagccaggatgcctcatcagggcgcccctatgggaccccccgggtcgccgtatatggggtcccccgcagccccagctcggagccggagtgccaaaagaaggaagatggccgataaaatcctgcctcaaaggattagagaactggtgcctgaatcccaggcttacatggacctgttggcctttgaacggaaactggaccagacgattatgcgaaagcgggtggacatccaggaagcactgaagcgccctatgaagcaaaaacgaaaactccggctctatataagcaatacatttaatcctgccaagccagacgccgaagatagtgatgggtccattgcctcctgggaactcagagtggagggaaaactgctggacgatccctcaaaacaaaaaaggaaattcagttcatttttcaagagtcttgtgattgaattggataaggatttgtatggaccagataatcacctagtggaatggcacaggactcccactacacaggaaaccgacggtttccaagtgaaaagacccggagacttgagtgtgcggtgtaccctgctgttaatgctggactaccagccccctcagtttaaactggatcccaggcttgccaggctgttgggacttcatacacagtctcgaagcgcaattgttcaggcactatggcagtatgtgaaaacaaatcggctacaggattctcatgacaaagagtacataaacggtgataaatactttcagcagatatttgactgtcctcggcttaaattcagcgagatcccccagcggctcaccgcattgctcctgcccccagatcccattgttattaaccatgttataagcgttgacccttccgaccagaaaaagactgcgtgctacgacatcgatgttgaagtggaagaacctctaaagggccagatgtcttctttcctgctttctacagcgaaccaacaggaaatcagcgcccttgatagtaaaatccacgaaactattgagagtattaatcagctgaaaatacagagggacttcatgctgagtttttctcgcgaccctaagggttacgtgcaagacttactccgatctcagtcacgggatcttaaagttatgactgatgtcgccggcaatcctgaggaagaacgccgggctgagttttaccaccagccatggtcccaagaagctgtgtcaaggtacttttactgtaaaatccaacaaagacgccaggagctcgaacagagcctcgttgtgagaaacacttag

SEQ ID NO: 307507 - DNA, 1308 bp, Artificial Sequence
  derived and/or modified sequence
atgaccccaggcctgcagcacccccccaccgtggtgcagaggcctggcatgcccagcggggccaggatgccccaccagggcgcccccatgggccccccaggcagcccctacatgggcagccctgctgccccagcccggagccgcagcgccaagaggaggaagatggctgacaagatcctgccccagaggatccgggagctggtgcctgagagccaggcctacatggacctgctggcctttgagaggaagctggaccagaccatcatgaggaagagggtggacatccaggaggccctgaagaggcccatgaagcagaagaggaagctgcggctgtacatcagcaacaccttcaacccagccaagccagatgctgaagattctgatggcagcatcgcctcctgggagctgcgggtggagggcaagctgctggatgaccccagcaagcagaagaggaagttcagcagcttcttcaagagcctggtgattgagctggacaaggacctgtatggccctgacaaccacctggtggagtggcacaggacccccaccacccaggagacagatggcttccaggtgaagaggcctggggacctgtctgtgcgctgcaccctgctgctgatgctggactaccagcccccccagttcaagctggacccccggctggcccggctgctgggcctgcacacccagagccgcagcgccatcgtgcaggccctgtggcagtatgtgaagaccaaccggctgcaggacagccatgacaaggagtacatcaacggggacaagtacttccagcagatctttgactgcccccggctgaagttcagcgagatcccccagaggctgacagccctgctgctgcccccagaccccatcgtcatcaaccacgtgatctctgtggaccccagcgaccagaagaagacagcctgctatgacattgatgtggaggtggaggagcccctgaagggccagatgagcagcttcctgctgagcacagccaaccagcaggagatcagcgccctggacagcaagatccacgagaccatcgagagcatcaaccagctgaagatccagagggacttcatgctgtccttcagccgggaccccaagggctacgtgcaggacctgctgcggagccagagccgggacctgaaggtgatgacagatgtggccggcaaccctgaggaggagaggagagctgagttctaccaccagccctggagccaggaggccgtgagccgctacttctactgcaagatccagcagaggcggcaggagctggagcagagcctggtggtgaggaacacctag

SEQ ID NO: 307508 - DNA, 1308 bp, Artificial Sequence
  derived and/or modified sequence
atgacccccggcctgcagcacccccccaccgtggtgcagcggcccggtatgccctcaggggccagaatgccccatcagggtgctcctatgggacctcctgggtctccctatatggggtcacccgccgctccagcgcgctcccgatccgcaaagcggaggaagatggctgataagattctccctcagaggattcgagaattagtgccagagagccaagcatacatggatctcctcgcttttgaacggaaactggaccagactattatgcggaagcgggtagacatccaggaggcccttaaaagacccatgaagcagaagagaaagttgcgtctgtatatttctaacacttttaaccctgccaaacccgacgccgaagactctgacggcagtatcgcttcatgggagcttcgggttgagggcaagctgctggatgacccctctaagcagaagcgcaaattttcttcattttttaaatctttggtaatagaactggacaaagatctgtacggaccggataaccacctagtggagtggcacaggacgcctactacacaggagacggatggtttccaggtgaagaggccaggcgaccttagcgttagatgcactctgctcctgatgttggactaccaaccaccccagtttaaactggatcctcggttggctagactcctgggcctgcatacccagtctcgcagcgcgattgttcaagccctttggcagtatgttaagaccaataggctacaagactcccacgacaaggagtatatcaacggagacaaatacttccaacagatcttcgattgccctaggctgaagttcagtgaaataccccagaggctgacagccctgctgctcccccctgatcctattgtaattaaccacgtcatcagcgttgatcccagcgatcaaaaaaagacggcatgttacgacatcgatgtggaagtggaagaaccactcaaaggccagatgtcctcatttcttctaagcacggcaaaccagcaagagatttccgctttggattcaaagatccacgaaactatcgagtcaattaatcagctgaaaattcaacgcgacttcatgctttcctttagtagggatcctaaggggtacgttcaagacctcctcagatcacagtctcgagatcttaaagtcatgacagatgttgctggcaatcctgaagaggaacgccgtgccgagttttaccatcagccatggtctcaagaggctgtgtccagatacttctactgcaaaatacaacagagacggcaggagctggagcagagtctggtcgtgcggaatacctag

SEQ ID NO: 307509 - DNA, 1308 bp, Artificial Sequence
  derived and/or modified sequence
atgacacctggtctgcagcatcccccaacagtggttcagaggcctggcatgccaagcggcgctagaatgccacaccagggagccccaatgggacctcccggatccccttacatgggctcccctgctgccccagctaggtcccgttctgccaagagacgcaagatggcggataagattctgccccagaggattagagagctggttcccgagagccaagcatatatggacctgctcgccttcgaacgcaagctggaccagaccatcatgcgaaagcgggtggacattcaggaagctctgaagcggccaatgaaacagaagagaaaactgcgcctctacatctccaacacatttaaccctgccaaacctgacgctgaggattccgatggatccattgcctcctgggagctgagagtggagggcaagctgttggacgatccttctaagcagaagaggaagttcagttctttcttcaagagtctggtcatagagttagataaggacttgtacggacccgacaatcatcttgtggagtggcacagaactcccacaacacaagaaaccgacgggttccaggtcaagcggccaggcgacttgtcagtgaggtgtacacttctgctgatgctcgattaccaacccccacagtttaaactagatccacggctcgcccgattgctgggtttacacacacagtcaagatccgcgatagttcaggcactgtggcagtatgtgaaaacaaaccggttacaagactctcatgataaggagtacatcaacggcgataagtactttcagcaaatatttgattgtccacgtttaaagttctccgagatcccacagaggctgactgcgctgctcctcccaccagatccaattgtgattaatcatgtcattagtgtcgatccatccgaccaaaagaaaaccgcttgctatgacattgatgtcgaggtcgaggagcctctaaagggacagatgagttctttcctgctgtccacagcaaaccagcaggaaatttccgcattggactctaagatccacgagaccatcgaatctatcaatcagctcaaaatccaaagagattttatgctctccttttcccgtgaccccaagggttatgtgcaggacctcctgagatcccagagcagagacctgaaggtgatgacagatgtcgctggcaacccagaggaagagaggagagctgagttctaccatcagccgtggagccaggaagcagtgtcacggtacttctactgcaagatacaacagcgtagacaggagcttgagcagagcctagtggttcgtaacacttag

SEQ ID NO: 307510 - DNA, 2216 bp, Artificial Sequence
  derived and/or modified sequence
actcccaagccccacctctgtcacccacaccccgctcctacagcactgctctcttcttagctcccatgccccaccgtctgctcagggacttcatttcataagttgggtcctgacccaacgagctggaggccttcctgctcttccagcaaggaaggaagcagggcaggacaggacagagcaggcactagcagggaccaggagggaggcgcctaggccagctggtagtcatggagcaggctgactacctgcctgccacctctggagtccctccatgcccctgggctccagggccatcccagttaccatcctgacctgccctctggcctttgcctccaatgcccagctctctccctccaaccattgccacacccccaaaactggcctctccagtcagggcttgggctctgcctggggtccctgctctgtctttcaagttctttgtcccgcaggaccctggggccggtctctgtctgcttcccacacatactgctcccacctgcgccctgccttgtgccaccccagccccagctggcccatgctggttgcctccatcctaggcccttttttctgcacagtgtcctggcttcctcagacctccactccggggagtttggcttcttcgcagcttcccgaggcctccttgaatctacgctggggctcagggtctgacctctcctttcagatcctcagaatggcccttggtgctgcaggcgcggtgggctccgggcccaggcaccgagggggcactggatgactctccaggtgcaggaccctgccatctatgactccaggtcttcagcacccacccaccgtggtacagcgccccgggatgccgtctggagcccggatgccccaccagggggcgcccatgggccccccgggctccccgtacatgggcagccccgccgcccccgcgcggagccgcagtgccaagaggaggaagatggctgacaaaatcctccctcaaaggattcgggagctggtccccgagtcccaggcttacatggacctcttggcatttgagaggaaactggatcaaaccatcatgcggaagcgggtggacatccaggaggctctgaagaggcccatgaagcaaaagcggaagctgcgactctatatctccaacacttttaaccctgcgaagcctgatgctgaggattccgacggcagcattgcctcctgggagctacgggtggaggggaagctcctggatgatcccagcaaacagaagcggaagttctcttctttcttcaagagtttggtcatcgagctggacaaagatctttatggccctgacaaccacctcgttgagtggcatcggacacccacgacccaggagacggacggcttccaggtgaaacggcctggggacctgagtgtgcgctgcacgctgctcctcatgctggactaccagcctccccagttcaaactggatccccgcctagcccggctgctggggctgcacacacagagccgctcagccattgtccaggccctgtggcagtatgtgaagaccaacaggctgcaggactcccatgacaaggaatacatcaatggggacaagtatttccagcagatttttgattgtccccggctgaagttttctgagattccccagcgcctcacagccctgctattgccccctgacccaattgtcatcaaccatgtcatcagcgtggacccttcagaccagaagaagacggcgtgctatgacattgacgtggaggtggaggagccattaaaggggcagatgagcagcttcctcctatccacggccaaccagcaggagatcagtgctctggacagtaagatccatgagacgattgagtccataaaccagctcaagatccagagggacttcatgctaagcttctccagagaccccaaaggctatgtccaagacctgctccgctcccagagccgggacctcaaggtgatgacagatgtagccggcaaccctgaagaggagcgccgggctgagttctaccaccagccctggtcccaggaggccgtcagtcgctacttctactgcaagatccagcagcgcaggcaggagctggagcagtcgctggttgtgcgcaacacctaggagcccaaaaataagcagcacgacggaactttcagccgtgtcccgggccccagcattttgccccgggctccagcatcactcctctgccaccttggggtgtggggctggattaaaagtcattcatctg

SEQ ID NO: 307511 - protein, 511 aa, Artificial Sequence
  derived and/or modified sequence
MGVLKFKHIFFRSFVKSSGVSQIVFTFLLIPCCLTLNFRAPPVIPNVPFLWAWNAPSEFCLGKFDEPLDMSLFSFIGSPRINATGQGVTIFYVDRLGYYPYIDSITGVTVNGGIPQKISLQDHLDKAKKDITFYMPVDNLGMAVIDWEEWRPTWARNWKPKDVYKNRSIELVQQQNVQLSLTEATEKAKQEFEKAGKDFLVETIKLGKLLRPNHLWGYYLFPDCYNHHYKKPGYNGSCFNVEIKRNDDLSWLWNESTALYPSIYLNTQQSPVAATLYVRNRVREAIRVSKIPDAKSPLPVFAYTRIVFTDQVLKFLSQDELVYTFGETVALGASGIVIWGTLSIMRSMKSCLLLDNYMETILNPYIINVTLAAKMCSQVLCQEQGVCIRKNWNSSDYLHLNPDNFAIQLEKGGKFTVRGKPTLEDLEQFSEKFYCSCYSTLSCKEKADVKDTDAVDVCIADGVCIDAFLKPPMETEEPQIFYNASPSTLSATMFIWRLEVWDQGISRIGFF

SEQ ID NO: 307512 - DNA, 1536 bp, Artificial Sequence
  derived and/or modified sequence
atgggcgtgctgaagttcaagcacatcttcttcagaagcttcgtgaagagcagcggcgtgagccagatcgtgttcaccttcctgctgatcccctgctgcctgaccctgaacttcagagccccccccgtgatccccaacgtgcccttcctgtgggcctggaacgcccccagcgagttctgcctgggcaagttcgacgagcccctggacatgagcctgttcagcttcatcggcagccccagaatcaacgccaccggccagggcgtgaccatcttctacgtggacagactgggctactacccctacatcgacagcatcaccggcgtgaccgtgaacggcggcatcccccagaagatcagcctgcaggaccacctggacaaggccaagaaggacatcaccttctacatgcccgtggacaacctgggcatggccgtgatcgactgggaggagtggagacccacctgggccagaaactggaagcccaaggacgtgtacaagaacagaagcatcgagctggtgcagcagcagaacgtgcagctgagcctgaccgaggccaccgagaaggccaagcaggagttcgagaaggccggcaaggacttcctggtggagaccatcaagctgggcaagctgctgagacccaaccacctgtggggctactacctgttccccgactgctacaaccaccactacaagaagcccggctacaacggcagctgcttcaacgtggagatcaagagaaacgacgacctgagctggctgtggaacgagagcaccgccctgtaccccagcatctacctgaacacccagcagagccccgtggccgccaccctgtacgtgagaaacagagtgagagaggccatcagagtgagcaagatccccgacgccaagagccccctgcccgtgttcgcctacaccagaatcgtgttcaccgaccaggtgctgaagttcctgagccaggacgagctggtgtacaccttcggcgagaccgtggccctgggcgccagcggcatcgtgatctggggcaccctgagcatcatgagaagcatgaagagctgcctgctgctggacaactacatggagaccatcctgaacccctacatcatcaacgtgaccctggccgccaagatgtgcagccaggtgctgtgccaggagcagggcgtgtgcatcagaaagaactggaacagcagcgactacctgcacctgaaccccgacaacttcgccatccagctggagaagggcggcaagttcaccgtgagaggcaagcccaccctggaggacctggagcagttcagcgagaagttctactgcagctgctacagcaccctgagctgcaaggagaaggccgacgtgaaggacaccgacgccgtggacgtgtgcatcgccgacggcgtgtgcatcgacgccttcctgaagccccccatggagaccgaggagccccagatcttctacaacgccagccccagcaccctgagcgccaccatgttcatctggagactggaggtgtgggaccagggcatcagcagaatcggcttcttctag

SEQ ID NO: 307513 - DNA, 1536 bp, Artificial Sequence
  derived and/or modified sequence
atgggcgtgttaaagtttaaacacatcttcttccgatccttcgtaaaaagctcaggagtcagccagattgtcttcacctttttgctaatcccttgttgcctgacgcttaacttcagggccccccctgtgatccctaatgtgccattcctttgggcgtggaacgcccccagcgagttttgcctgggcaagttcgatgagccgctggatatgtccctgttctcttttatcggttctccaagaatcaacgccactggccagggcgtcacaattttctacgtggatagactggggtactacccttacatcgactcaattactggagtcactgttaatggagggatccctcaaaagatcagtttgcaggatcatcttgacaaggctaagaaagacatcaccttttatatgcccgtggataacctaggtatggctgtgatcgattgggaggaatggcggcccacctgggcgcgaaattggaaacccaaagatgtttataagaaccgcagcatcgagctggttcagcagcagaatgtgcagctatcattgactgaggccactgagaaagccaaacaggaattcgaaaaggccggtaaggactttctcgtggaaactattaaactcgggaagctactgagaccaaatcatttgtggggatattacctgtttcccgactgctataaccatcattataaaaaacccgggtataacggcagctgtttcaatgtagagatcaaaaggaacgacgatcttagttggctatggaatgagtcaactgccctgtatccatccatatatctcaatactcagcagagtcccgtagcagctaccctgtacgtacgaaaccgcgtgagagaagccattcgggtaagcaagatccctgacgctaagagcccactccctgtgtttgcatacactcgtatcgtgtttactgaccaagtgcttaagtttctgagtcaggacgaactggtgtataccttcggagaaactgtagcgttgggcgctagcggtatagtcatttggggaacgctgagtattatgcgctcaatgaagtcctgcttgttactggacaattatatggagaccattttgaatccctatattataaatgtgacgctcgcagcgaaaatgtgctcccaggtgttatgtcaggagcaaggggtttgcatcaggaagaactggaattcctcagattatttgcaccttaacccagataacttcgccatccagttagagaagggagggaagttcacagtccgcggaaagcctactcttgaagacctggagcagttttcagagaaattctattgcagctgctatagcacactgtcgtgtaaggaaaaggctgatgtgaaagataccgatgctgtggatgtgtgtattgctgatggcgtttgtatcgatgcattccttaagccccccatggaaaccgaagagcctcaaatcttctacaacgcctccccctctaccctgtctgcaactatgtttatttggcgacttgaggtatgggatcaagggatctctcgcattggcttcttttag

SEQ ID NO: 307514 - DNA, 1536 bp, Artificial Sequence
  derived and/or modified sequence
atgggcgtgctgaagttcaagcacatcttcttccgcagctttgtgaagagcagcggcgtgtcccagatcgtgttcaccttcctgctgatcccctgctgcctgaccctgaacttccgggcccctcctgtgatccccaacgtgcccttcctgtgggcctggaatgcccccagcgagttctgcctgggcaagtttgatgagcccctggacatgagcctcttctccttcatcggcagcccccgcatcaatgccaccggccagggcgtgaccatcttctacgtggaccggctgggctactacccctacatcgacagcatcaccggggtgacagtgaatggaggcatcccccagaagatcagcctgcaggaccacctggacaaggccaagaaggacatcaccttctacatgcctgtggacaacctgggcatggctgtgattgactgggaggagtggaggcccacctgggccaggaactggaagcccaaggatgtgtacaagaacagaagcattgagctggtgcagcagcagaatgtgcagctgagcctgacagaggccacagagaaggccaagcaggagtttgagaaggccggcaaggacttcctggtggagaccatcaagctgggcaagctgctgcggcccaaccacctgtggggctactacctgttcccagactgctacaaccaccactacaagaagccaggctacaacggcagctgcttcaacgtggagatcaagagaaatgatgacctgtcctggctgtggaatgaaagcacagccctgtaccccagcatctacctgaacacccagcagagccctgtggccgccaccctgtatgtgaggaacagagtgcgggaggccatccgggtgtccaagatcccagatgccaagagccccctgcctgtgtttgcctacacccgcatcgtgttcacagaccaggtgctgaagttcctgagccaggatgagctggtgtacacctttggagagaccgtggccctgggcgccagcggcatcgtcatctggggcaccctgagcatcatgaggtccatgaagagctgcctgctgctggacaactacatggagaccatcctgaacccctacatcatcaacgtgaccctggccgccaagatgtgcagccaggtgctgtgccaggagcagggcgtgtgcatcaggaagaactggaacagcagtgactacctgcacctgaacccagacaactttgccatccagctggagaagggcggcaagttcaccgtgcggggcaagcccaccctggaggacctggagcagttcagcgagaagttctactgcagctgctacagcaccctgagctgcaaggagaaggcagatgtgaaggacacagatgctgtggatgtgtgcatcgcagatggagtgtgcattgatgccttcctgaagccacccatggagacagaggagccccagatcttctacaatgccagccccagcaccctgagcgccaccatgttcatctggaggctggaggtgtgggaccagggcatcagccgcatcggcttcttctag

SEQ ID NO: 307515 - DNA, 1536 bp, Artificial Sequence
  derived and/or modified sequence
atgggcgtgctgaagttcaagcacatcttcttccggagcttcgtgaagtcatcaggggtgtcccagattgtgtttacgtttctgctcatcccctgttgcctcactctcaatttcagggccccaccagtgatccctaacgtaccctttctctgggcctggaacgcacccagtgaattttgtctggggaagtttgacgaaccactcgatatgtcgctgttcagttttatagggtccccaaggattaatgcaaccggccaaggtgtcacaatcttctatgttgatcgactcggctactacccctatatcgacagtatcacgggcgtcacggtgaacggcggcattccccagaagatttctttgcaggaccacctggacaaagctaagaaagatatcacattctacatgccggtggataatttgggtatggccgtgattgactgggaggaatggaggccaacatgggcacgtaattggaaacccaaggatgtctataaaaaccgctcaatcgaactggtccaacagcagaatgtgcagctcagccttacggaggccacagaaaaagccaagcaagagttcgaaaaggctgggaaagacttccttgtcgaaactatcaagctcgggaaactactgcgccccaaccacctttggggctactacctgtttccagactgttataatcaccattacaaaaagcccggttacaatggcagctgcttcaatgtcgaaatcaaaagaaacgatgatctgtcctggttatggaatgaatcaaccgccctgtatcctagtatttacttaaacacacagcagtctcccgtggccgccactttgtacgtccggaatagggtgcgtgaggcaattcgggtgagcaaaattccagacgcaaaaagcccactacccgtgttcgcctacacgcgcatagtcttcaccgatcaggttctgaaattccttagtcaggacgaacttgtatataccttcggagaaactgtagctctcggagcaagcggaatcgtgatatggggcacattgtcaatcatgagatcgatgaaaagttgcctgctcctcgacaattacatggaaacaatcctgaatccctatattataaacgttacgctcgccgccaagatgtgttctcaagttctgtgccaggagcaaggggtgtgtatccgcaagaattggaactccagtgactatttacatcttaacccagacaacttcgctatccagctcgaaaaaggggggaaattcactgtcagggggaagccgactctggaggatttagaacagttttccgagaaattctactgtagttgttattctaccctgagttgcaaagagaaggcagatgttaaagataccgatgctgtcgacgtgtgcatcgccgacggggtctgtattgatgcttttctgaagcctcctatggagacggaagagcctcaaatcttctacaacgcctccccctcgaccctgagcgcaacaatgttcatctggagactggaagtatgggatcaggggattagccggattggcttcttttag

SEQ ID NO: 307516 - DNA, 1536 bp, Artificial Sequence
  derived and/or modified sequence
atgggagtcctgaagttcaagcatattttcttccggtcttttgtgaagagcagcggcgtgtcacagattgtttttacattcctgctcatcccatgttgcctgactctcaattttcgggctccgcctgtaatcccaaatgtgccattcctctgggcctggaatgcacctagtgaattctgtctgggaaagttcgacgagcctctggatatgagtctgttctcctttattgggagcccgagaatcaatgctaccgggcaaggagtgactattttctatgtggaccggttgggttactatccatatatcgacagtatcactggagtgactgtcaacggcggaatcccgcagaagattagcttacaggaccatctggacaaggccaaaaaagacatcacgttttatatgcctgtggacaacctcggtatggccgtcattgattgggaggagtggcgccctacttgggcaagaaactggaagcccaaagacgtgtataagaatcggtctatagagctggtacagcagcagaacgtgcagctgagtctgaccgaggccaccgagaaggccaaacaggaattcgagaaggccggaaaggacttcctggtggaaacaatcaagctggggaaactgctccgccctaatcatctatggggttattacttgtttccagactgctacaaccaccactacaagaaaccgggatataacgggagctgcttcaacgtggaaatcaaaagaaacgatgacctctcttggctctggaatgaaagtactgccctctatccttcaatttatctgaacactcagcagtctcctgtagcagctactctgtatgtccgtaacagagtaagggaggcaatacgcgttagtaagatccccgacgccaagtccccgctccccgtgtttgcctacacccgaatcgtgttcactgatcaggtgctgaagttcctctcgcaggacgaattggtctatacctttggcgagaccgtagccctcggggcaagcgggattgtcatatggggtaccctctcgattatgcgcagcatgaagtcttgtctgcttctggacaattatatggaaactatactaaacccatatattatcaacgtaacgctcgccgctaaaatgtgcagccaggtgttatgtcaggaacaaggcgtctgcatccggaaaaactggaacagctctgattacctccacctgaatccagacaacttcgcgatccagctcgaaaaaggcggaaagttcaccgtgcgtggtaaaccaaccctggaggacctggagcagttctcggagaaattctactgtagttgttacagcacactgagttgcaaggaaaaggcagacgttaaggataccgacgccgttgacgtgtgcatcgccgacggagtgtgtattgatgctttcctgaagcctcccatggagaccgaagaacctcagatattctacaacgcctccccatccactctttctgctaccatgtttatttggaggttggaggtctgggaccaagggattagtcgtatcggctttttttag

SEQ ID NO: 307517 - DNA, 1536 bp, Artificial Sequence
  derived and/or modified sequence
atgggagtgttgaagtttaagcacattttcttcaggtcctttgtgaaaagcagcggagtatcccaaattgtgtttacctttctcctcatcccctgttgtcttacactgaacttcagagccccgccagtcatcccgaacgtgccatttttgtgggcttggaatgcccctagcgaattttgcctggggaaatttgatgagccattagacatgagcctgttttccttcatcgggtctcctcgtattaatgcgaccggacagggggtaacaattttctacgtcgacaggttgggatattacccttacattgattccatcactggcgtcacagtcaacggcgggattcctcaaaagatctccctacaagaccatctcgataaagccaagaaggatataaccttttatatgccggtggataatctcgggatggcagttatagactgggaagagtggcggcctacctgggcacgcaattggaagccgaaggatgtgtataaaaaccgctctattgaattggttcagcagcaaaatgtccagctgagcctgacagaggccactgagaaagccaagcaggaatttgaaaaggccggtaaggactttttagtggagacgattaaactaggtaaactgctccgacccaaccacctatggggttattatctgttccccgattgctataaccatcactacaagaagcccggctacaatggctcatgctttaatgtagagataaaacgtaacgatgatttatcatggctgtggaatgaatcaacggccctgtacccttctatctatttgaacacccagcaaagtccagtcgctgctaccctctacgttcgcaaccgtgtgcgagaagctatacgcgttagtaagatcccagacgctaagtcaccactgccagtttttgcttacacccgaattgtgttcactgatcaagtgctgaagtttttgtcccaagacgagctggtatataccttcggagaaactgtggcgttgggagcttcaggtatcgtaatatggggtaccttgtctataatgaggagtatgaaaagttgcctgttactcgacaattacatggagaccatcctcaacccgtacataattaacgtgactttggctgctaagatgtgctcacaagtgctttgccaggagcagggcgtctgtattaggaagaattggaactctagtgactatctgcaccttaacccagacaatttcgctatccagctggagaagggtggaaaattcacagtcagggggaaaccaacactagaggacctagagcagtttagcgagaaattctattgttcatgctacagcaccctctcatgtaaagagaaggcagacgttaaagacacagacgccgttgatgtctgtatcgcagacggggtgtgtatcgacgcattcctgaagcctccgatggaaaccgaggaaccacagatcttttacaacgcctctcccagcactctgtctgctacgatgtttatctggagactggaggtgtgggatcaaggaatcagccggatagggtttttttag

SEQ ID NO: 307518 - DNA, 1536 bp, Artificial Sequence
  derived and/or modified sequence
atgggagtgctgaagtttaaacacatatttttcagaagtttcgtcaagtcttctggtgtgtctcaaatcgtgttcacttttcttctgatcccttgttgtctgactctcaattttcgtgcccctcctgtcatacctaatgttccctttctctgggcctggaatgccccatcggagttttgtctgggtaaattcgatgagcccctggatatgagtctgttcagcttcattggttcacccaggattaatgccacaggtcagggagttaccattttttacgttgatcgactcggatactacccatatatagactctataacaggcgtgacagtaaatggcggcattcctcaaaagatctcacttcaagaccatctcgataaggcaaaaaaagacataactttctacatgcctgttgacaacttgggcatggccgtaatcgactgggaagagtggagaccaacgtgggccagaaattggaaacctaaggatgtgtacaaaaaccgcagcattgaactcgtacagcagcagaatgtccagttgtccctgacagaggctacagagaaagccaagcaggagtttgagaaggccggtaaggacttcctcgtggaaactatcaaactcggtaaactgttacgcccaaaccatctctggggctactacctttttcctgattgttacaatcaccactataaaaaaccgggatacaacggctcttgttttaatgtcgaaatcaaaagaaatgatgacctgtcgtggctctggaatgaatctaccgctttgtaccccagcatctacctgaacacgcagcagtctccggtagccgccactttgtatgtgcgtaatagagtgcgtgaagcaattcgtgtgtctaaaatccccgatgccaaaagcccattgcccgtgtttgcttacacccgaattgtgttcactgatcaagtgctgaagtttttgtcccaagacgagctggtatataccttcggagaaactgtggcgttgggagcttcaggtatcgtaatatggggtaccttgtctataatgaggagtatgaaaagttgcctgttactcgacaattacatggagaccatcctcaacccgtacataattaacgtgactttggctgctaagatgtgctcacaagtgctttgccaggagcagggcgtctgtattaggaagaattggaactctagtgactatctgcaccttaatccggacaattttgccattcagctggaaaagggtggcaaatttactgttaggggaaagccaacccttgaagatttggaacagttctcagagaaattttactgcagctgctactctaccctgtcatgtaaagagaaggccgatgttaaagacaccgacgctgtggacgtatgcattgccgacggagtctgtatcgacgctttcctaaagcctcccatggagacagaagaacctcagattttctacaacgcaagcccatccactctgtccgctactatgtttatctggcgcctggaggtctgggatcaaggcatatctagaatcggcttcttttag

SEQ ID NO: 307519 - DNA, 2349 bp, Artificial Sequence
  derived and/or modified sequence
aggtggttagcagcacctcataaggtccttcctagcaagggatgctaatgactagccaatgctctaggaagacattgagaccagccaacttcttgccttgataactactgaagagacattgggtggctggattttgaaagcagacttctggttataggtgatgcaacttgaaaaacaatcctgaaacatgaaacaagaataataatatttaaatgtaacttaatcattatacctctttatccatcaaagtgaattcattccattccctttcatctgtgctcatactttgcatcagatattgggtaaaccaaagtgtgtaggaagaaataaatgttttcatagtcattactctttacaatgggagtgctaaaattcaagcacatctttttcagaagctttgttaaatcaagtggagtatcccagatagttttcaccttccttctgattccatgttgcttgactctgaatttcagagcacctcctgttattccaaatgtgcctttcctctgggcctggaatgccccaagtgaattttgtcttggaaaatttgatgagccactagatatgagcctcttctctttcataggaagcccccgaataaacgccaccgggcaaggtgttacaatattttatgttgatagacttggctactatccttacatagattcaatcacaggagtaactgtgaatggaggaatcccccagaagatttccttacaagaccatctggacaaagctaagaaagacattacattttatatgccagtagacaatttgggaatggctgttattgactgggaagaatggagacccacttgggcaagaaactggaaacctaaagatgtttacaagaataggtctattgaattggttcagcaacaaaatgtacaacttagtctcacagaggccactgagaaagcaaaacaagaatttgaaaaggcagggaaggatttcctggtagagactataaaattgggaaaattacttcggccaaatcacttgtggggttattatctttttccggattgttacaaccatcactataagaaacccggttacaatggaagttgcttcaatgtagaaataaaaagaaatgatgatctcagctggttgtggaatgaaagcactgctctttacccatccatttatttgaacactcagcagtctcctgtagctgctacactctatgtgcgcaatcgagttcgggaagccatcagagtttccaaaatacctgatgcaaaaagtccacttccggtttttgcatatacccgcatagtttttactgatcaagttttgaaattcctttctcaagatgaacttgtgtatacatttggcgaaactgttgctctgggtgcttctggaattgtaatatggggaaccctcagtataatgcgaagtatgaaatcttgcttgctcctagacaattacatggagactatactgaatccttacataatcaacgtcacactagcagccaaaatgtgtagccaagtgctttgccaggagcaaggagtgtgtataaggaaaaactggaattcaagtgactatcttcacctcaacccagataattttgctattcaacttgagaaaggtggaaagttcacagtacgtggaaaaccgacacttgaagacctggagcaattttctgaaaaattttattgcagctgttatagcaccttgagttgtaaggagaaagctgatgtaaaagacactgatgctgttgatgtgtgtattgctgatggtgtctgtatagatgcttttctaaaacctcccatggagacagaagaacctcaaattttctacaatgcttcaccctccacactatctgccacaatgttcatttggaggctggaagtctgggatcaaggtattagcagaattggtttcttctgagagtcatgagggaaaaatgtgtttcaggcctcttcccttggcttacaggaaatgaaaaaaccatgactatcatcaccaacatccttgggtattaagtgcagtcactctcctagatgctgtggggagaaggcaagttacaaagatagaccttccctcaagataatcagattttcatggtattatccttaacctttttgacatcatggaggctttgggaatctgatgaagcctatcaattttcttccagaagatatttatataagattataagaaaaattatgtacacagcttattttattgcattggatcaaaatgccatttataaagaattatgccttttccatcaattttagcatggaaaaataatttcaggcaatatgcttaaaaattgggggaagacaaaagaaatccatatcgtgtaaataaaaataaattttggttttgctcaaaaataaa

SEQ ID NO: 307520 - RNA, 1536 nt, Artificial Sequence
  derived and/or modified sequence
augggaguguugaaguuuaagcacauuuucuucagguccuuugugaaaagcagcggaguaucccaaauuguguuuaccuuucuccucauccccuguugucuuacacugaacuucagagccccgccagucaucccgaacgugccauuuuugugggcuuggaaugccccuagcgaauuuugccuggggaaauuugaugagccauuagacaugagccuguuuuccuucaucgggucuccucguauuaaugcgaccggacaggggguaacaauuuucuacgucgacagguugggauauuacccuuacauugauuccaucacuggcgucacagucaacggcgggauuccucaaaagaucucccuacaagaccaucucgauaaagccaagaaggauauaaccuuuuauaugccgguggauaaucucgggauggcaguuauagacugggaagaguggcggccuaccugggcacgcaauuggaagccgaaggauguguauaaaaaccgcucuauugaauugguucagcagcaaaauguccagcugagccugacagaggccacugagaaagccaagcaggaauuugaaaaggccgguaaggacuuuuuaguggagacgauuaaacuagguaaacugcuccgacccaaccaccuaugggguuauuaucuguuccccgauugcuauaaccaucacuacaagaagcccggcuacaauggcucaugcuuuaauguagagauaaaacguaacgaugauuuaucauggcuguggaaugaaucaacggcccuguacccuucuaucuauuugaacacccagcaaaguccagucgcugcuacccucuacguucgcaaccgugugcgagaagcuauacgcguuaguaagaucccagacgcuaagucaccacugccaguuuuugcuuacacccgaauuguguucacugaucaagugcugaaguuuuugucccaagacgagcugguauauaccuucggagaaacuguggcguugggagcuucagguaucguaauaugggguaccuugucuauaaugaggaguaugaaaaguugccuguuacucgacaauuacauggagaccauccucaacccguacauaauuaacgugacuuuggcugcuaagaugugcucacaagugcuuugccaggagcagggcgucuguauuaggaagaauuggaacucuagugacuaucugcaccuuaacccagacaauuucgcuauccagcuggagaaggguggaaaauucacagucagggggaaaccaacacuagaggaccuagagcaguuuagcgagaaauucuauuguucaugcuacagcacccucucauguaaagagaaggcagacguuaaagacacagacgccguugaugucuguaucgcagacgggguguguaucgacgcauuccugaagccuccgauggaaaccgaggaaccacagaucuuuuacaacgccucucccagcacucugucugcuacgauguuuaucuggagacuggaggugugggaucaaggaaucagccggauaggguuuuuuuag

SEQ ID NO: 307521 - RNA, 1536 nt, Artificial Sequence
  derived and/or modified sequence
augggagugcugaaguuuaaacacauauuuuucagaaguuucgucaagucuucuggugugucucaaaucguguucacuuuucuucugaucccuuguugucugacucucaauuuucgugccccuccugucauaccuaauguucccuuucucugggccuggaaugccccaucggaguuuugucuggguaaauucgaugagccccuggauaugagucuguucagcuucauugguucacccaggauuaaugccacaggucagggaguuaccauuuuuuacguugaucgacucggauacuacccauauauagacucuauaacaggcgugacaguaaauggcggcauuccucaaaagaucucacuucaagaccaucucgauaaggcaaaaaaagacauaacuuucuacaugccuguugacaacuugggcauggccguaaucgacugggaagaguggagaccaacgugggccagaaauuggaaaccuaaggauguguacaaaaaccgcagcauugaacucguacagcagcagaauguccaguugucccugacagaggcuacagagaaagccaagcaggaguuugagaaggccgguaaggacuuccucguggaaacuaucaaacucgguaaacuguuacgcccaaaccaucucuggggcuacuaccuuuuuccugauuguuacaaucaccacuauaaaaaaccgggauacaacggcucuuguuuuaaugucgaaaucaaaagaaaugaugaccugucguggcucuggaaugaaucuaccgcuuuguaccccagcaucuaccugaacacgcagcagucuccgguagccgccacuuuguaugugcguaauagagugcgugaagcaauucgugugucuaaaauccccgaugccaaaagcccauugcccguguuugcuuacacccgaauuguguucacugaucaagugcugaaguuuuugucccaagacgagcugguauauaccuucggagaaacuguggcguugggagcuucagguaucguaauaugggguaccuugucuauaaugaggaguaugaaaaguugccuguuacucgacaauuacauggagaccauccucaacccguacauaauuaacgugacuuuggcugcuaagaugugcucacaagugcuuugccaggagcagggcgucuguauuaggaagaauuggaacucuagugacuaucugcaccuuaauccggacaauuuugccauucagcuggaaaaggguggcaaauuuacuguuaggggaaagccaacccuugaagauuuggaacaguucucagagaaauuuuacugcagcugcuacucuacccugucauguaaagagaaggccgauguuaaagacaccgacgcuguggacguaugcauugccgacggagucuguaucgacgcuuuccuaaagccucccauggagacagaagaaccucagauuuucuacaacgcaagcccauccacucuguccgcuacuauguuuaucuggcgccuggaggucugggaucaaggcauaucuagaaucggcuucuuuuag

SEQ ID NO: 307522 - protein, 509 aa, Artificial Sequence
  derived and/or modified sequence
MGVLKFKHIFFRSFVKSSGVSQIVFTFLLIPCCLTLNFRAPPVIPNVPFLWAWNAPSEFCLGKFDEPLDMSLFSFIGSPRINATGQGVTIFYVDRLGYYPYIDSITGVTVNGGIPQKISLQDHLDKAKKDITFYMPVDNLGMAVIDWEEWRPTWARNWKPKDVYKNRSIELVQQQNVQLSLTEATEKAKQEFEKAGKDFLVETIKLGKLLRPNHLWGYYLFPDCYNHHYKKPGYNGSCFNVEIKRNDDLSWLWNESTALYPSIYLNTQQSPVAATLYVRNRVREAIRVSKIPDAKSPLPVFAYTRIVFTDQVLKFLSQDELVYTFGETVALGASGIVIWGTLSIMRSMKSCLLLDNYMETILNPYIINVTLAAKMCSQVLCQEQGVCIRKNWNSSDYLHLNPDNFAIQLEKGGKFTVRGKPTLEDLEQFSEKFYCSCYSTLSCKEKADVKDTDAVDVCIADGVCIDAFLKPPMETEEPQIFYNASPSTLSATMFIVSILFLIISSVASL

SEQ ID NO: 307523 - protein, 80 aa, Artificial Sequence
  derived and/or modified sequence
MGVLKFKHIFFRSFVKSSGVSQIVFTFLLIPCCLTLNFRAPPVIPNVPFLWAWNAPSEFCLGKFDEPLDMSLFSFIGSPR

SEQ ID NO: 307524 - DNA, 1530 bp, Artificial Sequence
  derived and/or modified sequence
atgggcgtgctgaagttcaagcacatcttcttcagaagcttcgtgaagagcagcggcgtgagccagatcgtgttcaccttcctgctgatcccctgctgcctgaccctgaacttcagagccccccccgtgatccccaacgtgcccttcctgtgggcctggaacgcccccagcgagttctgcctgggcaagttcgacgagcccctggacatgagcctgttcagcttcatcggcagccccagaatcaacgccaccggccagggcgtgaccatcttctacgtggacagactgggctactacccctacatcgacagcatcaccggcgtgaccgtgaacggcggcatcccccagaagatcagcctgcaggaccacctggacaaggccaagaaggacatcaccttctacatgcccgtggacaacctgggcatggccgtgatcgactgggaggagtggagacccacctgggccagaaactggaagcccaaggacgtgtacaagaacagaagcatcgagctggtgcagcagcagaacgtgcagctgagcctgaccgaggccaccgagaaggccaagcaggagttcgagaaggccggcaaggacttcctggtggagaccatcaagctgggcaagctgctgagacccaaccacctgtggggctactacctgttccccgactgctacaaccaccactacaagaagcccggctacaacggcagctgcttcaacgtggagatcaagagaaacgacgacctgagctggctgtggaacgagagcaccgccctgtaccccagcatctacctgaacacccagcagagccccgtggccgccaccctgtacgtgagaaacagagtgagagaggccatcagagtgagcaagatccccgacgccaagagccccctgcccgtgttcgcctacaccagaatcgtgttcaccgaccaggtgctgaagttcctgagccaggacgagctggtgtacaccttcggcgagaccgtggccctgggcgccagcggcatcgtgatctggggcaccctgagcatcatgagaagcatgaagagctgcctgctgctggacaactacatggagaccatcctgaacccctacatcatcaacgtgaccctggccgccaagatgtgcagccaggtgctgtgccaggagcagggcgtgtgcatcagaaagaactggaacagcagcgactacctgcacctgaaccccgacaacttcgccatccagctggagaagggcggcaagttcaccgtgagaggcaagcccaccctggaggacctggagcagttcagcgagaagttctactgcagctgctacagcaccctgagctgcaaggagaaggccgacgtgaaggacaccgacgccgtggacgtgtgcatcgccgacggcgtgtgcatcgacgccttcctgaagccccccatggagaccgaggagccccagatcttctacaacgccagccccagcaccctgagcgccaccatgttcatcgtgagcatcctgttcctgatcatcagcagcgtggccagcctgtag

SEQ ID NO: 307525 - DNA, 1530 bp, Artificial Sequence
  derived and/or modified sequence
atgggtgtgctgaaattcaagcacatcttcttccggtcgtttgtcaagagtagtggggtatcccagattgtgttcacattcctgcttatcccatgttgtcttacgttgaactttcgcgccccgcccgttatacccaacgtgccttttttgtgggcttggaacgccccgtcggagttctgcctgggaaagttcgacgagccactcgacatgagcctgttttcttttatcggctcacccagaatcaacgccacgggccagggggtcacaattttctacgtggatcggcttgggtattacccgtacatcgacagtattacaggagttactgtgaacggggggatcccccagaagatttctcttcaagaccacttagacaaggctaagaaagacattaccttttacatgccagtcgataacctgggtatggccgtgatcgactgggaagagtggagacccacctgggcaagaaactggaagcctaaggacgtttacaaaaaccgttctattgaacttgtgcaacagcaaaacgtccagctatccctgacagaagctacagaaaaagctaaacaggaatttgaaaaagctggcaaagacttccttgtggaaacaattaaattgggcaagctgctgaggccgaatcacttatggggctattacctatttcctgactgctataatcatcattacaagaaaccggggtataatggatcatgttttaacgtggaaattaaaagaaatgacgatttgagctggctttggaatgagtctacagcgctctaccccagcatctatcttaacacccaacagagtcctgtcgccgccaccctctatgttaggaatcgggtgagggaggccataagagtctccaagattcccgatgccaagagccccctcccagtattcgcttacacacggattgtgtttactgatcaagtgctgaaatttctcagccaggatgaacttgtctacacattcggagaaacggttgcactgggggccagtgggattgttatctggggaaccctctccattatgagaagcatgaagtcttgcctccttctggataattatatggaaacgatcctgaacccctacattatcaacgtgacgctggctgctaagatgtgctcgcaggtgttgtgtcaggagcagggcgtgtgcatcaggaaaaactggaactccagcgactacctccacctgaatccagacaacttcgctattcagctagagaaaggagggaaatttactgtccgtggaaagccaacgctggaagacctcgagcagttcagtgagaaattctactgcagttgttactcaacgctttcttgtaaggaaaaagccgacgtcaaggataccgacgccgtcgacgtgtgtatcgctgatggagtctgcattgacgcctttctcaagccacccatggagactgaagagccgcaaatattttacaatgcttcacccagtacactgtcagctaccatgttcatagttagcatcctgttcctgattatttctagcgtggcctcgctgtag

SEQ ID NO: 307526 - DNA, 1530 bp, Artificial Sequence
  derived and/or modified sequence
atgggcgtgctcaagttcaaacacattttttttcgctcatttgttaagtcatcaggagtaagtcagatagtcttcacgttcctcctaattccttgttgcctcactctaaacttcagggccccacctgtgatccctaatgtgccgttcttgtgggcctggaacgcacccagtgaattctgtttaggaaagtttgacgagcccctggatatgagtttgttcagtttcatcggctctcccagaattaatgcgacaggtcagggggttacaattttttatgtggatcgattaggatattatccgtatattgattccattactggcgttacggtcaatggaggcattccccagaaaatatctttacaggatcacttggacaaggccaaaaaggatatcactttctacatgccagtggacaacctcggcatggctgtgatcgactgggaggagtggcgcccgacctgggcaagaaactggaagcctaaagatgtgtacaagaaccggtccatagaactggtgcagcaacagaacgttcagctgtctttgactgaagcaacagagaaggccaaacaggagttcgagaaagccgggaaagatttcctggtggagaccatcaaattgggaaagctgctgaggcccaatcacctgtggggctactacctgttccccgactgttacaaccatcactacaaaaagcccggctataacgggtcatgttttaacgtggaaattaagcgaaacgatgacctttcctggctttggaatgaatccacagctttgtacccctctatttatctgaacacccagcagtcaccagtagctgcaaccctgtatgtgagaaaccgggtgagggaagccatccgcgtgagtaagatcccagacgccaagtccccattacctgtatttgcttatacaagaatcgtcttcactgaccaggtgctgaaattcctaagccaggacgagctggtatacaccttcggagagacagtcgctctgggggcttccggaattgtgatctggggaaccctaagcatcatgaggagcatgaagagctgtcttctgttggataactacatggagaccatactgaacccgtatattattaacgtgaccctggcggctaaaatgtgctcacaggtgctgtgccaagaacaaggcgtgtgtatcagaaaaaactggaactcaagtgattatctgcacctcaaccccgacaacttcgccatccagttggaaaagggcggaaagtttaccgtgcgggggaagccaaccctagaggacctagagcagttttccgaaaaattttattgtagttgctattccacgctttcctgtaaagagaaggctgacgtgaaagatacagacgcggtggatgtgtgtatcgctgatggcgtttgcatcgacgcctttctgaaaccacctatggagactgaagagcctcagatcttctacaatgccagtccttcaacattatccgcaaccatgttcatcgtgagtattctgtttctcatcatctcctcagtggcatccttatag

SEQ ID NO: 307527 - DNA, 1530 bp, Artificial Sequence
  derived and/or modified sequence
atgggcgtgctgaagttcaagcacatattttttcggtcatttgtaaaaagctctggggtgtctcaaattgtgttcacatttctgctgatcccgtgttgtctgaccctgaatttccgagccccaccagtgataccaaacgtgccattcttgtgggcctggaacgcaccatccgagttctgtctgggcaagttcgacgaacctctggatatgtctctcttttctttcatcggatcccccagaattaacgcaaccggacaaggcgtgaccatcttctatgttgatcgcctaggttactacccttacattgatagtatcaccggagttaccgtgaacggtggaatcccccagaagatttctctgcaagaccatctggacaaagctaagaaggatattacattctacatgccagttgataatctcggcatggctgtgatcgattgggaagagtggcggccaacgtgggctaggaactggaaaccaaaagatgtgtataaaaaccggagcatagaactggttcaacagcagaatgtgcaactgagtctgactgaggccacagaaaaagccaagcaagagttcgagaaagccggtaaagattttctcgtggagactattaaactggggaaactccttcggcccaaccatctgtggggctattacctgtttcccgattgctataaccaccactacaaaaagccggggtacaacgggtcctgttttaatgtggaaataaaaaggaacgacgacttgagctggctgtggaatgaatctaccgccctgtacccatctatttatcttaacacccagcagtctcctgtcgccgcaaccctctatgtccgcaatagagtgcgagaggccatccgcgtgtccaagatcccagatgcaaagagccctctgccggttttcgcctacacacggatagtgttcaccgaccaagttttaaagttccttagccaggatgagcttgtctatacctttggggagaccgttgcactgggagcatccggaattgtgatctggggaactctcagtattatgcgaagcatgaaatcatgcttgctgctggataactacatggagacaattctcaatccctatatcatcaacgtgacccttgccgcgaaaatgtgctcacaggtgttatgtcaggagcagggcgtgtgtattcggaaaaactggaattcttctgattacctgcacctgaatcccgataattttgctattcagcttgaaaaaggtgggaaatttacggtacgcgggaagccaacactggaagacctggagcagtttagcgaaaagttttactgctcctgctattcgacacttagctgtaaagagaaggcggatgtcaaggacactgacgccgtggacgtctgcatcgccgatggggtgtgtatcgatgcctttcttaaaccccccatggagactgaagagcctcaaattttttataatgcttcacctagcactctgtctgcgacgatgttcatcgtttcgattctgtttctgattatctcctcggtcgcctctttatag

SEQ ID NO: 307528 - DNA, 1530 bp, Artificial Sequence
  derived and/or modified sequence
atgggcgtgctgaagttcaagcacatcttcttccgcagctttgtgaagagcagcggcgtgtcccagatcgtgttcaccttcctgctgatcccctgctgcctgaccctgaacttccgggcccctcctgtgatccccaacgtgcccttcctgtgggcctggaatgcccccagcgagttctgcctgggcaagtttgatgagcccctggacatgagcctcttctccttcatcggcagcccccgcatcaatgccaccggccagggcgtgaccatcttctacgtggaccggctgggctactacccctacatcgacagcatcaccggggtgacagtgaatggaggcatcccccagaagatcagcctgcaggaccacctggacaaggccaagaaggacatcaccttctacatgcctgtggacaacctgggcatggctgtgattgactgggaggagtggaggcccacctgggccaggaactggaagcccaaggatgtgtacaagaacagaagcattgagctggtgcagcagcagaatgtgcagctgagcctgacagaggccacagagaaggccaagcaggagtttgagaaggccggcaaggacttcctggtggagaccatcaagctgggcaagctgctgcggcccaaccacctgtggggctactacctgttcccagactgctacaaccaccactacaagaagccaggctacaacggcagctgcttcaacgtggagatcaagagaaatgatgacctgtcctggctgtggaatgaaagcacagccctgtaccccagcatctacctgaacacccagcagagccctgtggccgccaccctgtatgtgaggaacagagtgcgggaggccatccgggtgtccaagatcccagatgccaagagccccctgcctgtgtttgcctacacccgcatcgtgttcacagaccaggtgctgaagttcctgagccaggatgagctggtgtacacctttggagagaccgtggccctgggcgccagcggcatcgtcatctggggcaccctgagcatcatgaggtccatgaagagctgcctgctgctggacaactacatggagaccatcctgaacccctacatcatcaacgtgaccctggccgccaagatgtgcagccaggtgctgtgccaggagcagggcgtgtgcatcaggaagaactggaacagcagtgactacctgcacctgaacccagacaactttgccatccagctggagaagggcggcaagttcaccgtgcggggcaagcccaccctggaggacctggagcagttcagcgagaagttctactgcagctgctacagcaccctgagctgcaaggagaaggcagatgtgaaggacacagatgctgtggatgtgtgcatcgcagatggagtgtgcattgatgccttcctgaagccacccatggagacagaggagccccagatcttctacaatgccagccccagcaccctgagcgccaccatgtttattgtgtccatcctcttcctgatcatcagctctgtggccagcctgtag

SEQ ID NO: 307529 - DNA, 1530 bp, Artificial Sequence
  derived and/or modified sequence
atgggcgtgctgaagttcaagcacatcttcttccggagcttcgtgaaatccagcggggtctcacaaattgtattcacattcctgctcattccctgctgcctcacccttaatttccgcgctccccctgtaatccctaacgtacccttcttgtgggcctggaacgctccttcagagttttgcctcgggaagttcgacgaaccgttagacatgtcacttttctcattcattgggtccccccggatcaacgcaactggtcagggtgtgaccatcttctacgtggatagactcggatattatccatatattgattcgatcaccggcgtaaccgtgaacgggggcataccccagaagatatccctgcaggaccatctcgacaaggctaagaaagacattaccttttacatgccagttgataatctgggaatggcagtcatcgactgggaggagtggcgccccacgtgggctaggaactggaaacctaaagatgtgtacaagaacaggagcatcgaactggtgcaacagcagaatgtccaactgtcactgaccgaagcaacagagaaagctaaacaggaatttgagaaggcagggaaagactttctggtggagacaataaagttaggcaagttgctcagaccgaatcatctttgggggtattacctgtttcccgattgctataaccaccactataaaaaacctggctataacgggagctgtttcaacgtggagataaaacgaaacgacgacctgtcctggttgtggaatgagtccactgccctctatccttcgatttacctcaatacacagcagtcccccgtcgcagcaacattatacgttcggaatagagtccgagaggccatccgcgtcagcaaaattcccgatgccaagagcccattgcccgtcttcgcctacactcgaattgtctttaccgatcaggtgctgaaatttctcagccaggatgaactcgtgtacacctttggggagactgttgcccttggcgccagtgggatagtgatttggggcaccctctctatcatgaggagtatgaagagttgtcttcttttagacaactatatggagacgatcttgaatccttacatcataaatgtgaccttagccgctaaaatgtgcagccaggttttgtgtcaggagcagggagtatgcattcgcaaaaattggaactccagtgactaccttcatctcaaccctgataactttgcaattcagctcgagaagggggggaagttcaccgtaagaggtaagcccacgctggaggatctggagcagttttctgagaagttttattgctcttgttattccacactgagctgcaaggaaaaagcggatgtgaaggacaccgatgctgtcgacgtgtgcatcgctgacggtgtatgtattgacgccttcctcaaacccccaatggaaacggaggagccacaaatcttctataatgcatcaccaagtaccttaagtgctacaatgtttatagtaagcatactgttcctgattatctcttccgtggcttctctgtag

SEQ ID NO: 307530 - DNA, 1530 bp, Artificial Sequence
  derived and/or modified sequence
atgggcgtgctgaagttcaagcacatcttcttccggagcttcgtgaagtcttctggcgtgtcacagatcgtgttcacattcctcctgatcccttgctgcctgactctgaactttcgcgctcccccagtgatccctaacgtgcctttcctctgggcctggaatgccccttcggaattctgtctgggaaagtttgatgagccgttagatatgtctcttttctctttcattggatcacctaggataaacgcaactggccagggggtcactatcttttacgtggaccggctcggatactacccttatatagactctataacaggcgtaaccgtgaatgggggaatcccccagaagatcagtctgcaggaccacctggataaggcaaaaaaggacataaccttctatatgccggtggataatctgggaatggccgtaatcgactgggaggagtggagacccacatgggccagaaactggaaacctaaggatgtctacaagaatcggtcaatcgagctggtgcagcagcaaaatgtgcagctgtcactcactgaagcgaccgagaaagccaaacaggagtttgaaaaagccggaaaagacttcctggttgagaccattaaattaggcaagctgctgaggcccaatcatctttggggatattacctattccccgattgctacaaccatcactataagaaacccggctataatgggagctgttttaatgtagagatcaagcgaaacgatgacctgagctggctgtggaatgagtccacagctctgtacccaagcatatacctcaatacacaacagagccccgttgcagccaccttgtatgtgaggaatagggtgcgggaggcaattagggtctcaaaaatccccgacgccaaatctcccctcccagtgtttgcatatacgcggatagtgtttaccgaccaggttctcaagttcttgagccaggacgagctagtctacacattcggggagaccgtagctctcggcgcatcaggcattgttatttggggtacacttagcattatgagatcaatgaaaagctgtctgctgcttgataactatatggaaaccatccttaacccatatatcatcaacgtgacactggcggctaagatgtgcagtcaggtactgtgtcaagaacagggtgtctgcatccgcaagaattggaactcctctgattatctccatttaaatccggacaactttgctatacagctagaaaaaggtggcaagtttaccgttcgtggcaaacctaccctggaggatttagaacagttctcggaaaagttctactgctcatgttacagcactctctcttgtaaggaaaaagcagatgtgaaggacactgatgcagtggatgtctgcatcgcggatggcgtgtgcattgatgcatttctcaaaccccccatggagacagaggagccccagatcttctataatgcctcaccatctactctatccgctaccatgttcattgtatctatactgtttctcatcataagtagtgttgccagcctttag

SEQ ID NO: 307531 - DNA, 1530 bp, Artificial Sequence
  derived and/or modified sequence
atgggcgtgctgaagttcaagcacatcttcttccggagcttcgtgaaatcttctggagtgagccaaatcgtgttcacttttttgctgataccctgttgcctgaccctgaatttcagggcccctcctgtgattccaaacgttccttttttatgggcatggaatgccccgtccgagttttgcctgggcaagttcgatgaaccactggacatgtcgctcttcagtttcataggcagcccccggattaacgccacgggccaaggcgtgacaatattctacgtggacaggcttgggtactacccctacattgactccattaccggcgtgaccgtgaatggcggtatcccacagaagatcagtctgcaggaccatttagacaaggccaaaaaagatattaccttctatatgccagtggataatcttggcatggcagtgatcgattgggaggagtggcgccccacctgggcaagaaactggaagcccaaggacgtttacaagaatcgctcaattgagcttgtgcagcagcaaaatgttcaattatccttgactgaagctactgagaaggctaagcaggaatttgagaaggcagggaaggattttctggtggagactatcaagctggggaagctcttgcgcccaaatcacctgtgggggtattacctttttcctgattgctataaccaccattataagaagcccgggtataatgggtcatgcttcaacgtggagataaaaaggaatgacgacctcagctggctgtggaacgagtctacggcactgtacccctccatctatctcaacactcaacagtcgcccgtcgcagctaccctatatgtgcgaaacagagtgcgggaagcaattcgggtgagcaaaatcccagatgccaaatcacctctgccggtgttcgcatatactcgtatcgtgtttaccgatcaggtcctcaaatttctgagtcaagacgaacttgtgtacaccttcggagagacagtggcactgggcgcatctggaattgtgatctggggcaccctgtcaattatgcgttccatgaagtcctgcctgctcctggacaattacatggaaacaatactcaatccttacataatcaacgtcaccctcgctgcaaaaatgtgtagtcaggtactgtgtcaagaacaaggagtctgcatccggaagaattggaacagctccgactaccttcatcttaaccccgacaattttgctattcagctagaaaaagggggcaagtttaccgtacgcggaaaacccaccctggaagacttggagcagttctctgaaaagttttactgtagttgctactcaacactctcctgtaaagaaaaggccgacgtgaaggataccgacgccgtggatgtgtgcattgctgacggagtgtgtatcgatgccttcctcaagccacccatggaaacggaggagcctcaaatcttttataacgcaagtccttcgacactgagtgccacaatgtttatcgtgtctattctttttttgatcatcagcagcgtggcttcattatag

SEQ ID NO: 307532 - DNA, 1530 bp, Artificial Sequence
  derived and/or modified sequence
atgggagtgctcaagttcaagcatatcttcttccggtcattcgtcaaatccagtggggtgtcccagattgttttcaccttccttctgattccttgctgtctcactctgaatttccgagccccaccggtgatcccgaatgtgcccttcctttgggcctggaacgccccatctgagttttgcttaggcaaatttgacgagcctctggacatgtcccttttcagctttatagggagccccagaattaatgctactggtcagggcgtaaccattttctacgtcgataggttaggatactatccctacattgactctatcaccggggtgacagtaaatggcggaattccccaaaagatttccttgcaggaccacttggacaaggccaagaaggatatcactttctacatgcccgtggacaatctggggatggccgtgatcgattgggaagaatggcggccaacatgggctcgaaattggaaaccgaaagacgtgtataagaacagatccatcgaacttgtccagcagcaaaatgtgcagctgtcattgaccgaggctacggaaaaggccaaacaggaattcgagaaggccggtaaagactttctcgtagagactattaaattgggaaagcttctgaggcccaatcatctgtggggttactaccttttcccagattgctacaatcaccactacaaaaagcctggttacaatggctcctgcttcaacgtggagatcaagaggaacgacgacctcagctggttgtggaatgagtctacagccctgtacccaagcatctatctgaacacccagcagagtccagtggccgctactctgtacgttcgtaacagggttcgagaggctataagggtttcaaagattcctgatgcaaagtctccattgccagtgtttgcttacaccagaatcgtgttcaccgatcaagttttgaagtttctctcccaggacgaactggtatatacttttggcgagactgtcgccctgggagccagtgggatcgtcatttgggggacgctgtcgatcatgcgttctatgaaaagctgtttactgctcgacaattacatggagactattctgaatccctatatcattaatgtgaccttagccgcaaaaatgtgctcccaggtgctttgccaagaacagggcgtgtgcatccgaaaaaactggaacagtagcgactatctccatctcaatcccgacaacttcgccattcagttggaaaaagggggtaagtttacggtgcgcggtaagccgacactagaggacctggaacagtttagtgaaaaattttactgcagctgctacagtaccctgtcctgtaaagaaaaggctgatgtaaaggacacagatgccgtggacgtctgcatagccgatggcgtttgtatcgatgcctttctgaagccacccatggagactgaagagcctcagatcttctataacgcctcgccttctactctgtccgctaccatgttcatcgtgtcaatcctattccttattatctcctccgtcgcctcactttag

SEQ ID NO: 307533 - DNA, 1530 bp, Artificial Sequence
  derived and/or modified sequence
atgggagttctaaaatttaagcacatcttcttccgcagcttcgttaagagttctggggtgtcccagatcgtcttcaccttccttttgatcccatgttgtctgaccctgaatttccgcgcacccccagttatcccaaacgtcccttttctgtgggcctggaatgcaccatctgagttttgtctgggcaagttcgacgaacccttagatatgagcctgttcagcttcatcggttctccccgaataaatgcgacaggtcagggagtgaccattttttatgttgacaggttaggctattatccatacatcgatagcatcaccggggtgacagtgaatggaggaatcccacagaagatttccctgcaagatcaccttgacaaggcaaagaaggacattacattctacatgcctgttgacaatctgggcatggctgtcattgattgggaagaatggagacccacatgggctcggaattggaagcctaaggacgtgtacaagaataggtcaattgaactggtccagcagcagaacgtgcaactgtctctgaccgaagcgactgaaaaggctaagcaggagtttgagaaagcaggcaaggattttcttgtggagaccatcaaattgggtaagctattgcgccctaatcatctgtgggggtattatctgttcccagattgttacaaccatcattataagaagcctgggtataacggctcttgtttcaacgttgaaatcaagagaaatgacgatctctcttggctgtggaacgagtcgactgccctgtatccttccatttaccttaacacacaacagtcacctgtcgctgctacactctatgtgcggaaccgcgtgcgggaggccatcagggtgagcaagatcccggacgccaagagcccccttcctgtgtttgcatatacgagaatcgtattcaccgaccaagtgctgaaattcctgagccaagacgagctggtctatacttttggagagaccgttgctctgggggcttctggaatcgtaatctggggaacgttgtccataatgagaagcatgaaaagttgcctactcctcgacaactacatggagacaatactgaatccatacataattaacgttaccttagcagcgaaaatgtgctcccaggtactgtgccaggaacagggcgtgtgtattcgaaaaaactggaactcgagtgattacctccacttgaacccagacaactttgctattcagctagaaaaggggggaaaatttacagttagaggtaaacctaccctggaggatctcgagcaattcagcgagaagttttattgctcctgctattcaactttatcatgtaaggaaaaggccgacgttaaggatacagacgccgtggacgtttgtatcgctgacggagtatgcatcgacgcctttttaaagccacctatggagaccgaagagcctcagatattttataatgcctccccaagcacgctctctgcgacaatgtttatcgttagcatcctgttcctaatcatctccagcgttgcttcattgtag

SEQ ID NO: 307534 - DNA, 1530 bp, Artificial Sequence
  derived and/or modified sequence
atgggggtattgaaattcaaacatatcttcttcaggagtttcgtcaagagttccggagtgtcacagattgtgttcacttttctcctcataccctgctgtcttacactgaattttagagcccctcctgtcattcctaatgttccgtttctttgggcttggaacgccccttccgaattttgcctcggaaaatttgatgaaccactggacatgtccctgttctcctttatcggcagccccagaatcaacgccaccggacagggagtgaccatattttacgtggacaggctgggctattacccttatattgacagcattaccggggtgacggtcaacggtggcatcccccaaaagatcagtctccaggaccatctggataaggccaagaaagacatcactttttatatgcctgtggataacctggggatggcagtgatcgattgggaagaatggcggcctacttgggcccgtaattggaaacctaaggacgtctataaaaaccgctccatcgagctggttcagcagcaaaatgtccagctgagtcttacggaagctactgaaaaagctaaacaggaattcgagaaagcgggtaaggatttcctggtcgaaacaatcaaattggggaagctcctgcgacccaaccacctgtggggttactatctcttccctgattgctacaaccaccattataagaagcctgggtataacgggtcctgcttcaatgttgagataaaacggaacgacgacctctcctggctgtggaatgaaagtactgccctttacccatctatctatcttaacactcagcaaagcccagttgctgcgaccctttatgtgagaaaccgggtgcgcgaagcaatacgcgtgagcaagattcctgacgccaaaagccccctcccagtgtttgcatatacccggatcgtgtttacagaccaggttctaaaattcctttctcaggatgagttagtttacacctttggcgagaccgtcgccctgggcgctagcggcatcgttatctggggaacgctatccatcatgcgctctatgaagtcctgcttgctcctggacaattacatggagaccatcctgaacccctacatcattaatgttactctggccgcaaaaatgtgctcgcaggtcctttgtcaggagcagggtgtctgtattagaaagaactggaactctagtgattatctgcatctaaatcccgacaatttcgccattcagctcgagaaggggggtaaattcaccgtccggggaaaacccacgctcgaggatcttgaacagtttagtgaaaaattctactgcagttgctacagcacactgagctgtaaagaaaaggctgacgttaaggacacggacgccgtcgacgtgtgcattgccgatggggtatgtattgacgcatttttaaaaccccctatggaaacggaggaaccccaaattttttataacgcctctccatcaaccctgtccgccacaatgttcattgtctcaatcttgttcctgattatttccagcgttgcttctctttag

SEQ ID NO: 307535 - DNA, 1530 bp, Artificial Sequence
  derived and/or modified sequence
atgggggtgctaaaatttaagcacatcttcttcagatcctttgtgaagtcctctggagtgtcacagattgtgttcactttcttactcattccttgttgccttacgctcaactttcgcgccccaccagtcatccccaacgtgccatttctctgggcatggaacgccccatctgagttttgcctgggtaaatttgacgaaccccttgacatgtcgttgttttcattcatcggctcaccgaggattaacgctaccggccagggcgtcaccattttttacgtggacaggcttggatactacccttacattgatagcattactggcgttaccgttaacggaggtattccccagaaaatttcgcttcaagaccatctcgataaagccaaaaaagatattaccttctacatgccagttgacaatctgggcatggccgtgatcgattgggaggaatggcggccaacttgggcccggaactggaagccaaaggacgtctataagaataggagcatcgaacttgtgcaacaacagaatgttcagctaagcctgaccgaagcgaccgagaaggccaagcaggaatttgagaaggccgggaaggacttccttgtggagacgattaagctgggtaagctactcaggcctaaccatctttggggttactacctctttcccgattgttataaccaccactataagaagcccggctacaacggttcctgttttaacgttgaaataaaaagaaatgatgacctgagttggctgtggaatgaaagtaccgccctgtatccgagcatatatctgaatacccagcagtctcccgttgcggcaactctatatgtacgaaatagggttcgcgaagccatcagggttagtaaaattcctgacgccaaatccccactcccggtgttcgcgtacaccaggatcgtgttcacagaccaggtactgaaatttctttcgcaagatgaactcgtttacaccttcggcgagacagttgcgctgggagctagtggcatcgtcatctgggggactctttcaatcatgcgctccatgaagtcatgtttgctcctggataactatatggagactattctaaatccttacatcattaatgtcactctcgcagctaagatgtgtagccaggtactttgtcaagagcaaggcgtctgtataaggaagaattggaattcaagcgattaccttcacctaaaccccgataactttgcaattcaactggagaagggtggtaaatttacggtaagagggaagcccaccctggaagatcttgaacagttcagtgagaagttctactgctcctgctactctaccctctcatgtaaagaaaaagccgacgtgaaggataccgacgcagtcgacgtttgcatagccgacggagtctgcattgatgcattcctgaagcccccgatggagaccgaagaacctcagatcttctataatgcatcaccatccaccctgtctgccactatgtttatcgtgagcatcctgtttcttattatcagctcggtcgcctcgctctag

SEQ ID NO: 307536 - DNA, 1530 bp, Artificial Sequence
  derived and/or modified sequence
atgggcgtactgaagttcaaacacatcttttttcgctcattcgtcaagagttccggcgtgtcccaaattgtcttcacctttctcttgatcccctgttgtcttacacttaacttccgggccccgccggttattcccaacgtgccgttcctttgggcttggaatgcaccctctgaattctgcctaggaaaatttgacgagcccctggatatgagtctgtttagttttattgggtctcctaggattaatgctaccggacagggcgttacaatcttctacgttgatagattgggttactatccatatattgactccataaccggtgtcaccgtgaatggagggattccccaaaagatctctctgcaggaccatttagataaagcaaagaaggacattactttttatatgcccgtggacaatcttggcatggctgtaattgattgggaagagtggaggcccacttgggcacgcaattggaaaccaaaggatgtctataagaatcgcagtattgaactagtccaacagcagaacgtccagttatccctgaccgaagctactgaaaaagccaaacaagagtttgaaaaggccggaaaagatttcctcgtggagacgatcaagctaggcaagttgctgaggccaaaccatctctggggttattacctttttcccgattgctacaaccatcattacaaaaaaccaggatataacggctcatgcttcaacgtggaaattaagcgcaacgacgatctcagctggctttggaacgagtccacagcactgtatcccagcatctacttgaatactcagcagtcaccagtggctgctacgctctatgtgcggaaccgggtgagagaagctattcgcgtgagtaagatacccgatgcaaaaagcccactgcccgtatttgcgtacacaaggatcgtatttacagatcaggttctgaagttccttagccaggatgagttggtgtacaccttcggagaaacagtcgcattaggcgcttctggcatcgttatatggggaacactgagcatcatgaggtctatgaaaagctgcctcttgctggataactacatggaaaccattctgaacccatatattatcaatgtgacactcgctgccaaaatgtgcagtcaggttttatgtcaggagcagggggtgtgcattagaaagaattggaactcctctgactatcttcatcttaacccagataacttcgctatccagttagagaagggtggtaagtttaccgtgcgcggcaagcccactctcgaggacttggagcagtttagcgagaaattctactgttcatgttattcaacactgtcatgtaaggagaaagccgacgtgaaggataccgacgctgtagatgtgtgtattgccgacggggtctgtatcgatgctttcctcaaaccaccgatggaaactgaggagccgcagatcttttacaacgcatctccctctacactgtccgccaccatgtttattgtctctatcctgtttctcattatctcctccgtagcatccctttag

SEQ ID NO: 307537 - DNA, 1530 bp, Artificial Sequence
  derived and/or modified sequence
atgggggtgctgaagttcaaacatatctttttcaggtccttcgtcaagtcctctggcgtgtcacagatcgtcttcacgttcctgctcattccatgctgcttaactctgaactttcgcgcaccacctgtaattcctaacgtgccgttcctttgggcctggaacgcaccatcggagttctgcctggggaaattcgatgaaccactcgacatgtcacttttcagctttatcggtagtcccagaatcaacgcaacaggacagggggtcaccatattctacgtcgatagactgggctattatccctacatcgatagcatcacgggcgttaccgttaatggcggaatccctcagaagatctctcttcaggatcatctcgataaagccaagaaagacattacattttatatgccagtcgataaccttggtatggcagtgatagactgggaagaatggcgccctacctgggctcggaactggaagccgaaggacgtgtataagaatcgatcaattgaactggtccagcagcaaaatgtccagttaagcctgacggaagccaccgagaaggcaaaacaggagtttgaaaaggccggtaaagattttctggttgagaccatcaagttggggaagcttctgaggccaaatcacctgtggggttactaccttttccctgattgctataaccatcactacaagaaaccaggctacaatggcagctgctttaatgtcgaaattaaacgaaacgatgacttgtcgtggctgtggaacgagagcaccgctttgtatccttctatctacctgaatacccagcagtcccccgtcgccgcaaccttatatgtacggaaccgcgtccgagaggcaattcgggtgagcaagattcccgacgccaagagcccgctgcctgttttcgcctacacccgcatcgtgttcacggatcaggtactcaaattcctatcccaggacgagctcgtgtacacattcggggaaactgtggcactgggggcgtctggaattgtgatttggggaactctgagcataatgcgttcgatgaaatcttgcctccttttagacaattacatggagacaatcctaaatccgtacattatcaatgtcaccctggcagccaaaatgtgttcacaggtattatgtcaagaacaaggtgtctgtatccgcaagaactggaattcctccgattatttgcatctgaatcccgataattttgccatacagctcgaaaaagggggcaaatttacagttcgaggcaaacctaccctggaggatttggaacaattctccgaaaaattttattgttcatgctactcgaccctctcatgcaaagaaaaagcagacgttaaggatacagatgcagtggatgtgtgtatcgctgatggagtctgtattgacgctttcttaaagcccccgatggagacggaagaacctcagatattctataatgctagccccagcaccctctcagccacaatgtttatagtgtccattctgtttcttatcattagcagcgtggcttccctgtag

SEQ ID NO: 307538 - DNA, 1530 bp, Artificial Sequence
  derived and/or modified sequence
atgggagtattaaagttcaagcacatcttctttcgttctttcgttaagtccagtggggtttctcagattgtgttcacctttctgctgattccatgttgcctgactcttaacttcagggccccaccagtaattccaaatgtgccatttctctgggcgtggaatgccccttctgagttttgcctgggcaaattcgacgagccactggacatgagcctgttctcattcattggtagcccccgtataaacgccaccggacaaggcgtgactatcttttacgttgatcgcctcggatattatccgtatattgattcgatcacaggggttacagtaaatggggggatccctcaaaaaatcagtcttcaagatcacctcgataaagcaaagaaagacataaccttctatatgcccgtggacaaccttggaatggcagtaatagactgggaggaatggaggccaacctgggcccggaactggaagcctaaagatgtctataaaaatcgttccattgagttggtgcaacagcagaacgtccaactgtctctaactgaggctacagagaaagccaagcaggaatttgaaaaggctgggaaagacttcctcgtagagacgatcaagctgggaaaattattaagaccgaaccatctttggggatactacctgtttcccgactgttataaccatcactacaaaaaaccagggtataacggatcctgcttcaatgtggagataaaaagaaacgatgacctttcttggctatggaacgagtctaccgcactctacccatctatctatctgaacacacaacagtcccccgtcgcagccactctctatgtgcgtaaccgagtgagggaagctatcagggtgtctaagattcctgacgctaagtcccccctccctgtctttgcttacactaggatcgtattcaccgatcaagtgctgaagtttttgtctcaggatgaacttgtctatacattcggagagactgttgctctcggtgcctcaggtatagtgatctgggggactctttcaattatgcgctcaatgaaatcctgtctgctcctggacaactatatggagactatccttaatccatacatcatcaacgtaacgctcgcagccaaaatgtgcagtcaagtgctgtgtcaggaacagggcgtctgcattagaaaaaactggaactcctctgactatttgcaccttaaccctgataacttcgccatacagctcgagaaaggaggtaagtttaccgtacggggcaagccaactctagaggatctagaacagtttagtgagaaattctactgctcctgttactccacactgagctgtaaagaaaaggctgacgtgaaagataccgacgctgtggatgtctgcatcgcagatggcgtgtgtattgatgcctttcttaaaccgccaatggaaaccgaggaaccccaaattttctacaatgcttcccccagtaccctttcggcaaccatgttcattgtaagtattctttttcttattatctcatcagtcgccagcctctag

SEQ ID NO: 307539 - DNA, 1530 bp, Artificial Sequence
  derived and/or modified sequence
atgggcgtgttgaaatttaagcatatcttttttaggtctttcgtgaaaagctccggcgtgtcccagatcgtgtttactttcctcctgattccgtgttgcctgaccctcaatttccgagcacccccagtgattccaaacgtccccttcctttgggcttggaatgccccttctgagttctgtcttggaaagttcgacgaaccattagacatgtcattattctcattcattggtagtccacgtatcaatgcaactggccagggcgtgactattttttacgtagaccgtttgggttactatccatacatcgatagcataaccggagtgactgtgaatggcggaattccacaaaagatttccctgcaggatcatctggataaggccaaaaaagacataacgttctatatgcctgttgacaacctgggaatggctgttattgactgggaagagtggagacctacgtgggcccgcaactggaaacccaaggatgtttataaaaacagatcaatcgaactggttcagcaacagaacgtacagctctcgctgaccgaggctactgagaaagcaaaacaagagttcgaaaaggcaggaaaggattttctggtggagacgattaaactcggcaaactgttgcgccccaaccacctttggggctattacctcttccccgactgttataatcaccactacaagaaacccggctacaacggctcatgcttcaacgttgaaatcaaacggaatgacgacctctcatggctatggaatgagagcaccgccctctacccttcaatatatctcaacactcagcaatcaccagtggcagctaccctctatgtgcgtaaccgcgtgcgggaagccattcgagtctctaaaattccagacgcaaaatcaccgctcccagtgtttgcttatacccgtattgtcttcacggatcaagtgctaaaattcttatctcaggatgagcttgtgtacacctttggcgaaactgtggctctgggggcatctgggatcgtgatatggggaacgctttccatcatgcggtcaatgaaaagctgtctcctactcgataactatatggaaactatcctgaacccatacatcatcaatgttactttggccgctaagatgtgcagtcaggtcctctgtcaggagcaaggcgtttgcatcaggaaaaactggaacagtagtgattacctgcatctaaacccagataattttgcgatccagttagagaaggggggaaaatttactgtgcgcggcaagccaaccctcgaggacctggaacaattttctgagaagttctattgctcttgttactccactttgagttgcaaggagaaagcagatgttaaggacactgatgctgtcgatgtgtgtatcgctgacggagtttgtatcgatgcgttcctgaagccacccatggaaacggaagagccgcagatattctataacgcctcgccttccacgttgagtgctaccatgtttattgtgtctattttgtttcttattatctcttctgtggcatctctttag

SEQ ID NO: 307540 - DNA, 1530 bp, Artificial Sequence
  derived and/or modified sequence
atgggcgtcctcaagtttaagcatatctttttcaggtccttcgttaagtcttctggtgtctcgcagatagtctttacttttttactaattccctgctgcctgactctgaattttcgcgccccccccgttattccaaatgtgcctttcttgtgggcctggaatgccccctcggagttctgcctaggaaagtttgatgaaccgctcgacatgtctctcttcagcttcattggatccccaagaatcaacgcaaccggtcaaggcgtgaccattttttacgtcgataggctcggctactatccttacatcgactccattaccggcgtcaccgtgaatggcgggattcctcagaagatatctctgcaagatcatctggataaggccaaaaaagacatcacattttatatgcctgtggacaatttgggtatggctgtgattgactgggaagagtggcggcccacctgggctaggaactggaaacctaaggacgtgtataaaaatcggtccatcgaactggtacagcaacaaaatgtccaactgtccctgaccgaggcgactgaaaaagcgaaacaagaatttgagaaagccggcaaagacttcctggtagaaaccattaagttgggaaagctgctccggcccaaccatctttgggggtactacctgttccccgactgctataatcaccactacaaaaagcctggatacaatggctcctgcttcaacgttgaaatcaagcggaacgacgatctttcatggctttggaacgaatccacagcattgtacccttccatatatctgaatacccaacagtctcccgttgctgccactctctatgttcgcaacagagtcagggaagcaatccgagtttcaaagatcccagacgcaaaatcccctctaccggtgtttgcctatacccgcatcgtgtttacggatcaggttttaaaatttctgagccaggatgaactggtttacactttcggagagactgtcgccctgggggcaagcggtattgtgatttggggaactctcagcattatgcgtagtatgaagtcttgtcttctgctggataattatatggaaaccatcttaaacccctacattattaacgtaacccttgctgctaagatgtgtagccaagttttgtgtcaggagcaaggagtctgtatcagaaaaaattggaatagctcggactatctgcacttaaatcccgataattttgccatacagctcgaaaaagggggcaaatttacagttcgaggcaaacctaccctggaggatttggaacaattctccgaaaaattttattgttcatgctactcgaccctctcatgcaaagaaaaagcagacgttaaggatacagatgcagtggatgtgtgtatcgctgatggagtctgtattgacgctttcttaaagcccccgatggagacggaagaacctcagatattctataatgctagccccagcaccctctcagccacaatgtttatagtgtccattctgtttcttattatctcttccgttgccagtctctag

SEQ ID NO: 307541 - DNA, 2007 bp, Artificial Sequence
  derived and/or modified sequence
acaggttaaatactgcagagctaatagattggagtgacttctgacctagtcacatcttaaaggaaaacttttcagtttttactttaaaaggatgctaatgactagccaatgctctaggaagacattgagaccagccaacttcttgccttgataactactgaagagacattgggtggctggattttgaaagcagacttctggttataggtgatgcaacttgaaaaacaatcctgaaacatgaaacaagaataataatatttaaatgtaacttaatcattatacctctttatccatcaaagtgaattcattccattccctttcatctgtgctcatactttgcatcagatattgggtaaaccaaagtgtgtaggaagaaataaatgttttcatagtcattactctttacaatgggagtgctaaaattcaagcacatctttttcagaagctttgttaaatcaagtggagtatcccagatagttttcaccttccttctgattccatgttgcttgactctgaatttcagagcacctcctgttattccaaatgtgcctttcctctgggcctggaatgccccaagtgaattttgtcttggaaaatttgatgagccactagatatgagcctcttctctttcataggaagcccccgaataaacgccaccgggcaaggtgttacaatattttatgttgatagacttggctactatccttacatagattcaatcacaggagtaactgtgaatggaggaatcccccagaagatttccttacaagaccatctggacaaagctaagaaagacattacattttatatgccagtagacaatttgggaatggctgttattgactgggaagaatggagacccacttgggcaagaaactggaaacctaaagatgtttacaagaataggtctattgaattggttcagcaacaaaatgtacaacttagtctcacagaggccactgagaaagcaaaacaagaatttgaaaaggcagggaaggatttcctggtagagactataaaattgggaaaattacttcggccaaatcacttgtggggttattatctttttccggattgttacaaccatcactataagaaacccggttacaatggaagttgcttcaatgtagaaataaaaagaaatgatgatctcagctggttgtggaatgaaagcactgctctttacccatccatttatttgaacactcagcagtctcctgtagctgctacactctatgtgcgcaatcgagttcgggaagccatcagagtttccaaaatacctgatgcaaaaagtccacttccggtttttgcatatacccgcatagtttttactgatcaagttttgaaattcctttctcaagatgaacttgtgtatacatttggcgaaactgttgctctgggtgcttctggaattgtaatatggggaaccctcagtataatgcgaagtatgaaatcttgcttgctcctagacaattacatggagactatactgaatccttacataatcaacgtcacactagcagccaaaatgtgtagccaagtgctttgccaggagcaaggagtgtgtataaggaaaaactggaattcaagtgactatcttcacctcaacccagataattttgctattcaacttgagaaaggtggaaagttcacagtacgtggaaaaccgacacttgaagacctggagcaattttctgaaaaattttattgcagctgttatagcaccttgagttgtaaggagaaagctgatgtaaaagacactgatgctgttgatgtgtgtattgctgatggtgtctgtatagatgcttttctaaaacctcccatggagacagaagaacctcaaattttctacaatgcttcaccctccacactatctgccacaatgttcattgttagtattttgtttcttatcatttcttctgtagcgagtttgtaattgcgcaggttagctgaaatgaacaatatgtccatcttaaagtgtgctttttcgactaattaaatctttg

SEQ ID NO: 307542 - DNA, 1969 bp, Artificial Sequence
  derived and/or modified sequence
tggtcttccagttgtcctgagagtgatgactggctccaccttgatgtggctcacataaattcagaaagtatgatagcagtgtaggtggttagcagcacctcataaggtccttcctagcaagggatgctaatgactagccaatgctctaggaagacattgagaccagccaacttcttgccttgataactactgaagagacattgggtggctggattttgaaagcagacttctggttataggtgatgcaacttgaaaaacaatcctgaaacatgaaacaagaataataatatttaaatgtaacttaatcattatacctctttatccatcaaagtgaattcattccattccctttcatctgtgctcatactttgcatcagatattgggtaaaccaaagtgtgtaggaagaaataaatgttttcatagtcattactctttacaatgggagtgctaaaattcaagcacatctttttcagaagctttgttaaatcaagtggagtatcccagatagttttcaccttccttctgattccatgttgcttgactctgaatttcagagcacctcctgttattccaaatgtgcctttcctctgggcctggaatgccccaagtgaattttgtcttggaaaatttgatgagccactagatatgagcctcttctctttcataggaagcccccgaataaacgccaccgggcaaggtgttacaatattttatgttgatagacttggctactatccttacatagattcaatcacaggagtaactgtgaatggaggaatcccccagaagatttccttacaagaccatctggacaaagctaagaaagacattacattttatatgccagtagacaatttgggaatggctgttattgactgggaagaatggagacccacttgggcaagaaactggaaacctaaagatgtttacaagaataggtctattgaattggttcagcaacaaaatgtacaacttagtctcacagaggccactgagaaagcaaaacaagaatttgaaaaggcagggaaggatttcctggtagagactataaaattgggaaaattacttcggccaaatcacttgtggggttattatctttttccggattgttacaaccatcactataagaaacccggttacaatggaagttgcttcaatgtagaaataaaaagaaatgatgatctcagctggttgtggaatgaaagcactgctctttacccatccatttatttgaacactcagcagtctcctgtagctgctacactctatgtgcgcaatcgagttcgggaagccatcagagtttccaaaatacctgatgcaaaaagtccacttccggtttttgcatatacccgcatagtttttactgatcaagttttgaaattcctttctcaagatgaacttgtgtatacatttggcgaaactgttgctctgggtgcttctggaattgtaatatggggaaccctcagtataatgcgaagtatgaaatcttgcttgctcctagacaattacatggagactatactgaatccttacataatcaacgtcacactagcagccaaaatgtgtagccaagtgctttgccaggagcaaggagtgtgtataaggaaaaactggaattcaagtgactatcttcacctcaacccagataattttgctattcaacttgagaaaggtggaaagttcacagtacgtggaaaaccgacacttgaagacctggagcaattttctgaaaaattttattgcagctgttatagcaccttgagttgtaaggagaaagctgatgtaaaagacactgatgctgttgatgtgtgtattgctgatggtgtctgtatagatgcttttctaaaacctcccatggagacagaagaacctcaaattttctacaatgcttcaccctccacactatctgccacaatgttcattgttagtattttgtttcttatcatttcttctgtagcgagtttgtaa

SEQ ID NO: 307543 - DNA, 2220 bp, Artificial Sequence
  derived and/or modified sequence
atgggagaatggggaacgtggaggtaaaggagggaacctaatgtaagaatactgaatttgccaattaaggcaccagctgtgactacttcatacaggaatggggacatgcctgatgccatagggtctaattgacttgagaatgtgaaaggaaaataaaaactcagaaccccaattcatcatgccaaaaggaaaaaaaaattaagctgaaatgttaaatactgcagagctaatagattggagtgacttctgacctagtcacatcttaaaggaaaacttttcagtttttactttaaaaggatgctaatgactagccaatgctctaggaagacattgagaccagccaacttcttgccttgataactactgaagagacattgggtggctggattttgaaagcagacttctggttataggtgatgcaacttgaaaaacaatcctgaaacatgaaacaagaataataatatttaaatgtaacttaatcattatacctctttatccatcaaagtgaattcattccattccctttcatctgtgctcatactttgcatcagatattgggtaaaccaaagtgtgtaggaagaaataaatgttttcatagtcattactctttacaatgggagtgctaaaattcaagcacatctttttcagaagctttgttaaatcaagtggagtatcccagatagttttcaccttccttctgattccatgttgcttgactctgaatttcagagcacctcctgttattccaaatgtgcctttcctctgggcctggaatgccccaagtgaattttgtcttggaaaatttgatgagccactagatatgagcctcttctctttcataggaagcccccgaataaacgccaccgggcaaggtgttacaatattttatgttgatagacttggctactatccttacatagattcaatcacaggagtaactgtgaatggaggaatcccccagaagatttccttacaagaccatctggacaaagctaagaaagacattacattttatatgccagtagacaatttgggaatggctgttattgactgggaagaatggagacccacttgggcaagaaactggaaacctaaagatgtttacaagaataggtctattgaattggttcagcaacaaaatgtacaacttagtctcacagaggccactgagaaagcaaaacaagaatttgaaaaggcagggaaggatttcctggtagagactataaaattgggaaaattacttcggccaaatcacttgtggggttattatctttttccggattgttacaaccatcactataagaaacccggttacaatggaagttgcttcaatgtagaaataaaaagaaatgatgatctcagctggttgtggaatgaaagcactgctctttacccatccatttatttgaacactcagcagtctcctgtagctgctacactctatgtgcgcaatcgagttcgggaagccatcagagtttccaaaatacctgatgcaaaaagtccacttccggtttttgcatatacccgcatagtttttactgatcaagttttgaaattcctttctcaagatgaacttgtgtatacatttggcgaaactgttgctctgggtgcttctggaattgtaatatggggaaccctcagtataatgcgaagtatgaaatcttgcttgctcctagacaattacatggagactatactgaatccttacataatcaacgtcacactagcagccaaaatgtgtagccaagtgctttgccaggagcaaggagtgtgtataaggaaaaactggaattcaagtgactatcttcacctcaacccagataattttgctattcaacttgagaaaggtggaaagttcacagtacgtggaaaaccgacacttgaagacctggagcaattttctgaaaaattttattgcagctgttatagcaccttgagttgtaaggagaaagctgatgtaaaagacactgatgctgttgatgtgtgtattgctgatggtgtctgtatagatgcttttctaaaacctcccatggagacagaagaacctcaaattttctacaatgcttcaccctccacactatctgccacaatgttcattgttagtattttgtttcttatcatttcttctgtagcgagtttgtaattgcgcaggttagctgaaatgaacaatatgtccatcttaaagtgtgctttttcgactaattaaatctttgaaaagaa

SEQ ID NO: 307544 - DNA, 2154 bp, Artificial Sequence
  derived and/or modified sequence
gatagcagtgtaggtggttagcagcacctcataaggtccttcctagcaaggtaacagtacaagctttttctaaaaatcttgatgtatacctgatctcctggttgaaagagttggcttgatggattttttcctataagttctttttatgtctagatttttatgttccacttgacctgatgattgaggatggtatgaagtaagaagttttaatgagtaatccagagattttggatgctaatgactagccaatgctctaggaagacattgagaccagccaacttcttgccttgataactactgaagagacattgggtggctggattttgaaagcagacttctggttataggtgatgcaacttgaaaaacaatcctgaaacatgaaacaagaataataatatttaaatgtaacttaatcattatacctctttatccatcaaagtgaattcattccattccctttcatctgtgctcatactttgcatcagatattgggtaaaccaaagtgtgtaggaagaaataaatgttttcatagtcattactctttacaatgggagtgctaaaattcaagcacatctttttcagaagctttgttaaatcaagtggagtatcccagatagttttcaccttccttctgattccatgttgcttgactctgaatttcagagcacctcctgttattccaaatgtgcctttcctctgggcctggaatgccccaagtgaattttgtcttggaaaatttgatgagccactagatatgagcctcttctctttcataggaagcccccgaataaacgccaccgggcaaggtgttacaatattttatgttgatagacttggctactatccttacatagattcaatcacaggagtaactgtgaatggaggaatcccccagaagatttccttacaagaccatctggacaaagctaagaaagacattacattttatatgccagtagacaatttgggaatggctgttattgactgggaagaatggagacccacttgggcaagaaactggaaacctaaagatgtttacaagaataggtctattgaattggttcagcaacaaaatgtacaacttagtctcacagaggccactgagaaagcaaaacaagaatttgaaaaggcagggaaggatttcctggtagagactataaaattgggaaaattacttcggccaaatcacttgtggggttattatctttttccggattgttacaaccatcactataagaaacccggttacaatggaagttgcttcaatgtagaaataaaaagaaatgatgatctcagctggttgtggaatgaaagcactgctctttacccatccatttatttgaacactcagcagtctcctgtagctgctacactctatgtgcgcaatcgagttcgggaagccatcagagtttccaaaatacctgatgcaaaaagtccacttccggtttttgcatatacccgcatagtttttactgatcaagttttgaaattcctttctcaagatgaacttgtgtatacatttggcgaaactgttgctctgggtgcttctggaattgtaatatggggaaccctcagtataatgcgaagtatgaaatcttgcttgctcctagacaattacatggagactatactgaatccttacataatcaacgtcacactagcagccaaaatgtgtagccaagtgctttgccaggagcaaggagtgtgtataaggaaaaactggaattcaagtgactatcttcacctcaacccagataattttgctattcaacttgagaaaggtggaaagttcacagtacgtggaaaaccgacacttgaagacctggagcaattttctgaaaaattttattgcagctgttatagcaccttgagttgtaaggagaaagctgatgtaaaagacactgatgctgttgatgtgtgtattgctgatggtgtctgtatagatgcttttctaaaacctcccatggagacagaagaacctcaaattttctacaatgcttcaccctccacactatctgccacaatgttcattgttagtattttgtttcttatcatttcttctgtagcgagtttgtaattgcgcaggttagctgaaatgaacaatatgtccatcttaaagtgtgctttttcgactaattaaatctttgaaaagaa

SEQ ID NO: 307545 - DNA, 1530 bp, Artificial Sequence
  derived and/or modified sequence
atgggagttctcaagtttaaacatatctttttccgaagcttcgtgaaaagcagcggggtctcgcagattgtattcacatttctactcataccctgctgtctgactctgaattttcgcgcccccccagtgatccccaatgttccttttctgtgggcctggaacgctccctccgagttttgcttgggtaagtttgatgagccactcgacatgagccttttttcttttattgggtcccctaggattaatgccactgggcagggggtgacaatcttttacgtagaccgtctggggtattacccttatatcgacagcatcacaggcgtgactgttaacggggggatcccgcagaagattagcttacaggaccacctggacaaagccaaaaaggacatcacattctacatgcccgtggacaatctgggcatggcagtcatagattgggaagagtggagacctacttgggcccggaactggaaaccgaaagacgtatacaaaaaccgctccatcgagcttgtacaacaacagaacgtccagctcagtcttacagaggctacagaaaaagctaaacaagagtttgaaaaggcagggaaggacttcctagttgagactatcaagttgggcaagctgctgcgccccaatcatctctggggctactacctgttccccgactgttacaaccatcactataagaaaccaggttacaatggcagctgcttcaatgtcgaaatcaagaggaatgatgacctgagttggctatggaacgagtcgaccgccctttacccctccatttacctgaacacacagcagtctcccgtggccgccacgctttacgtgagaaaccgagtgagggaagcaataagggtcagtaaaataccggatgccaagtcccctctgcccgttttcgcatacacacgcattgtattcaccgaccaggtgttgaaattcttgagccaggacgagttggtgtacacctttggcgaaacggtggcgcttggcgcctccggaatcgtgatctgggggacactgtctataatgcgaagtatgaaaagctgcctcctgcttgataactatatggagactatccttaatccctacataatcaatgtcactctggccgccaagatgtgcagtcaggtcctatgtcaggagcagggagtatgcatcagaaaaaattggaactcgtccgactacctgcacttgaaccctgacaattttgccatccaactggagaagggaggcaagtttactgtccgagggaaacctaccctcgaggatcttgagcaatttagcgagaaattctactgctcatgttactccactctcagttgcaaggaaaaagccgatgtgaaggacacagatgctgtcgacgtgtgcattgccgacggtgtctgtatcgacgcattcctcaagccgccaatggaaacagaggagccccagatcttttataacgcctcgccctctacattatctgccacaatgttcatcgtgtctattctgtttctgatcatcagtagcgtggccagtttgtag

SEQ ID NO: 307546 - DNA, 1530 bp, Artificial Sequence
  derived and/or modified sequence
atgggcgtgctgaagttcaagcacatcttcttccggagcttcgtgaagagctccggggtttcacagattgttttcacattcctgcttattccatgctgtttgactctcaattttagggcacccccggtcattcccaacgtgcctttcctgtgggcctggaacgcaccaagcgaattctgtctcggtaagttcgatgaacctctggatatgtccctgtttagctttatagggtcgccacggattaatgctaccggccagggtgtcactatcttctacgttgaccgattgggatattatccctatattgactcaatcaccggggtcaccgttaatggagggatcccacagaagatatccctgcaggatcacctcgacaaagctaaaaaggacatcaccttttatatgccagtggacaatttaggaatggcagtgattgactgggaagagtggcgcccaacctgggcccgtaactggaagcccaaagacgtatacaagaacaggagcattgagctggtgcaacaacagaacgtccagcttagccttactgaagcaaccgagaaggcaaaacaggaattcgaaaaggccggaaaagatttcctcgtggaaactatcaagcttggcaaacttttacggcccaaccatctttggggttactatctcttcccggactgttataatcatcactacaaaaagcccggctacaacggaagctgctttaatgtggagattaagaggaatgatgatctgtcatggctgtggaatgagtcaacggccctgtacccctctatctacctcaatacccagcagtctcctgtcgccgccaccctgtacgttcgcaatcgggtacgggaagctatcagggtgtcaaagatacccgatgcgaaatctccactgcccgtctttgcctacacaagaatagttttcacagatcaggtgctgaagttcctgtcccaggacgagctcgtttatactttcggcgaaaccgtagctttgggcgcgagcggcattgtgatttggggtactctgtccatcatgcgttcaatgaagtcttgccttctcctcgataattacatggagactatattaaatccgtacatcatcaatgtcacactggcagctaagatgtgtagccaggttctgtgtcaggaacagggggtttgtatacgcaagaactggaactcttccgattacctccatctgaatccagataattttgccattcagttggaaaaaggtggcaagttcacagtgcgggggaaacccaccctggaagaccttgagcaattctccgagaaattttactgttcttgctattctacgctaagctgcaaagaaaaggcagatgtgaaggatacagatgctgtcgatgtgtgcattgctgacggcgtgtgtatagacgccttcctgaagccccccatggaaacagaagagcctcagatcttctacaacgcgagccctagcacactgtctgcgacaatgtttatcgtatccatcttatttttgataatcagttccgttgcaagcctctag

SEQ ID NO: 307547 - DNA, 1530 bp, Artificial Sequence
  derived and/or modified sequence
atgggcgtcctgaaatttaagcacatcttcttcagatcctttgtcaaatcctcaggcgtctcccagattgttttcaccttcctcctgattccctgctgtctaactctgaacttccgggctccaccagtaattcctaacgtgccctttctctgggcctggaatgctccctcagaattttgcctgggaaagtttgacgaacccctggacatgtccctttttagttttatcggttctccccgaataaatgcaaccgggcagggggtcacaattttttatgtggaccgcctaggttattatccgtatatagacagtataactggagtgacagtgaatggcggaatacctcaaaaaattagcttacaggatcacctggataaggccaagaaggatatcacgttctacatgccagtcgataatcttgggatggcggtgattgactgggaagaatggcgcccaacctgggcacgaaattggaagccaaaagatgtgtataaaaatcgaagcatagagctggtgcagcagcaaaatgtacagctctcgctcacagaggccactgagaaggctaaacaggagttcgaaaaggccggaaaagattttctggttgagactattaagctgggtaaactgttaagaccaaaccacttgtggggctattacttattccctgactgctacaatcaccattacaagaagcctggctataatggatcttgtttcaacgtggagattaaacggaacgacgatctttcatggctgtggaatgagagcacagcactctacccctctatatatctcaacacccagcagtctcccgtagccgcaactctttatgtccggaatcgcgttagagaggctatcagagtatctaagattcctgacgcaaagtccccgctaccggtgttcgcctatacaaggatcgtttttacagatcaggttctaaaattcttgtcccaggacgaactggtgtatactttcggcgagaccgtggcgctcggagcctccggtattgttatctggggaaccctgagtatcatgcgttctatgaagtcttgcctacttcttgataactatatggaaactatcttaaatccatacattatcaacgtgacgctcgccgctaagatgtgttcacaagttttgtgtcaggagcagggcgtgtgtatccgcaagaattggaattcatcagactatctgcacttaaatccagataactttgccatccagttagagaaaggaggaaagtttacagtgagaggcaagcctactctcgaggatctggagcagttttctgaaaaattctactgctcctgttattctactctgtcatgtaaggaaaaggccgatgtgaaggatactgacgccgtagacgtatgcatagccgatggcgtctgcatagacgctttccttaaacctcccatggaaactgaagaaccgcaaatattttacaacgcaagcccctccaccctaagtgccaccatgttcatcgttagcatcctgtttctgatcatttcctcggtagcctctctctag

SEQ ID NO: 307548 - DNA, 1530 bp, Artificial Sequence
  derived and/or modified sequence
atgggggttctaaagttcaagcacatcttctttcgcagttttgttaagagctctggggtctcccagatcgtcttcaccttcctactcatcccttgctgcctgactttgaacttcagagcaccaccagtcatcccaaatgtgccattcctgtgggcttggaacgccccatctgaattctgtctgggaaagttcgacgaaccgctggatatgagcctgttctccttcatcggatccccccgaatcaatgctacgggtcagggcgttaccatcttttacgtagaccggcttgggtactacccatatattgactctattacaggcgtaactgtcaacggtggaattcctcagaaaatctccctgcaggaccatctggacaaggcgaaaaaggacatcacattctacatgccagtggacaacctgggtatggcagtaattgattgggaggagtggcgacccacttgggcgcggaattggaagccaaaggatgtatataagaaccgaagtattgagctagtacagcagcagaatgtgcagttgagtctgacagaagccacggagaaagcaaaacaggagttcgaaaaggctggcaaggattttcttgtagagacgatcaaactgggcaagctcctcaggcctaaccacttatggggttattacctcttccctgactgctacaaccatcactataagaagcccgggtacaacggatcttgctttaacgtggaaattaagcgaaacgacgatttaagctggctatggaacgagagcaccgccttataccctagtatatatctaaatacacaacagtcccccgttgccgccacactgtacgttaggaatagggttagggaagctattcgggtttcaaaaataccagacgctaaatcacctctgccggttttcgcttacacccggatcgtctttactgatcaggtgttgaagttcctcagccaggacgaactggtgtatacattcggagagacagtggccctcggggcatcaggcatcgtgatctggggcaccctgtccattatgcgatcaatgaagtcctgcctgcttctcgataattacatggagaccattcttaatccatacatcataaatgtgaccctggctgctaaaatgtgcagtcaagtgctatgtcaagagcagggcgtttgcatccgtaaaaactggaactcgtccgattacctgcatctcaatcctgataactttgccattcagctggaaaaaggcggaaaatttactgtcaggggtaagcccactctggaggatttagagcagttttctgagaagttctactgtagctgttacagcactcttagttgcaaggaaaaggctgatgttaaagacacagatgccgtcgacgtctgcatcgcagacggagtgtgcattgacgccttcctgaagccacctatggaaactgaagaaccacagatcttttataatgccagccctagcactctgtcagctacaatgtttatcgtgagtattctctttttgattatctcttcagtagcatccctctag

SEQ ID NO: 307549 - DNA, 1530 bp, Artificial Sequence
  derived and/or modified sequence
atgggcgtcttaaaattcaagcacatattctttagatcctttgtcaaatcctccggcgtttcccaaattgttttcacttttctactgatcccctgttgccttacacttaactttcgggcaccccctgttattcctaatgtgccctttctgtgggcatggaatgcgccctcagaattctgcttaggtaagtttgacgaacccttggatatgtcactattttcatttattggcagtcctcgaatcaacgctaccggccagggtgtaaccatattttatgtagatcggttagggtactacccatacatcgattctattacaggggtcacagtgaatggtggcattcctcagaagattagcttacaagaccatctggataaagcaaaaaaagatatcacattctatatgcctgtggataacctgggaatggccgttattgactgggaagagtggagaccgacatgggcccgtaattggaaacctaaggatgtgtacaagaatcggtccattgagctggttcaacagcaaaacgtacaactgtcccttacagaggccacagaaaaagccaagcaggaattcgaaaaagcagggaaagattttctggtggaaacaatcaagctcggcaagttactgcgtcccaatcacttgtggggttactatctttttcccgactgctataatcatcattacaagaagcctggatacaatggtagctgttttaacgtcgaaattaaacgcaatgacgacctttcatggctttggaacgagtccaccgctttgtacccctctatctatttgaacactcagcaaagtcccgttgccgcaaccctatatgttcgcaacagagtgagggaggcgatccgcgtcagtaaaatcccagatgccaaaagccctctccctgtcttcgcttataccagaattgtgttcactgatcaggtcttaaaatttctgtctcaggacgaattagtctatacattcggcgaaactgtcgctctcggagcttcagggattgtgatttggggaactctctcaatcatgcgctctatgaaaagctgcttgctcttagataactacatggaaaccatcctcaatccttacattatcaacgtcacccttgccgccaagatgtgctctcaggtgctgtgtcaggaacaaggggtttgcatcaggaagaactggaattcctccgattacctacatctaaatccagacaacttcgccatacaactcgagaaaggcgggaaatttaccgttcggggcaagccaaccctcgaggacctggaacaatttagcgaaaaattttactgctcctgttattcgaccctctcctgcaaggagaaggccgacgtgaaagataccgatgccgtcgacgtgtgcatcgcagatggggtctgcatcgacgccttccttaagcctcccatggaaaccgaggagccacagatcttctataatgcatctccttctacgctctcagccaccatgttcatcgtctccatcctctttctcattatctccagcgttgcatccctttag

SEQ ID NO: 307550 - RNA, 1530 nt, Artificial Sequence
  derived and/or modified sequence
augggggugcuaaaauuuaagcacaucuucuucagauccuuugugaaguccucuggagugucacagauuguguucacuuucuuacucauuccuuguugccuuacgcucaacuuucgcgccccaccagucauccccaacgugccauuucucugggcauggaacgccccaucugaguuuugccuggguaaauuugacgaaccccuugacaugucguuguuuucauucaucggcucaccgaggauuaacgcuaccggccagggcgucaccauuuuuuacguggacaggcuuggauacuacccuuacauugauagcauuacuggcguuaccguuaacggagguauuccccagaaaauuucgcuucaagaccaucucgauaaagccaaaaaagauauuaccuucuacaugccaguugacaaucugggcauggccgugaucgauugggaggaauggcggccaacuugggcccggaacuggaagccaaaggacgucuauaagaauaggagcaucgaacuugugcaacaacagaauguucagcuaagccugaccgaagcgaccgagaaggccaagcaggaauuugagaaggccgggaaggacuuccuuguggagacgauuaagcuggguaagcuacucaggccuaaccaucuuugggguuacuaccucuuucccgauuguuauaaccaccacuauaagaagcccggcuacaacgguuccuguuuuaacguugaaauaaaaagaaaugaugaccugaguuggcuguggaaugaaaguaccgcccuguauccgagcauauaucugaauacccagcagucucccguugcggcaacucuauauguacgaaauaggguucgcgaagccaucaggguuaguaaaauuccugacgccaaauccccacucccgguguucgcguacaccaggaucguguucacagaccagguacugaaauuucuuucgcaagaugaacucguuuacaccuucggcgagacaguugcgcugggagcuaguggcaucgucaucugggggacucuuucaaucaugcgcuccaugaagucauguuugcuccuggauaacuauauggagacuauucuaaauccuuacaucauuaaugucacucucgcagcuaagauguguagccagguacuuugucaagagcaaggcgucuguauaaggaagaauuggaauucaagcgauuaccuucaccuaaaccccgauaacuuugcaauucaacuggagaagggugguaaauuuacgguaagagggaagcccacccuggaagaucuugaacaguucagugagaaguucuacugcuccugcuacucuacccucucauguaaagaaaaagccgacgugaaggauaccgacgcagucgacguuugcauagccgacggagucugcauugaugcauuccugaagcccccgauggagaccgaagaaccucagaucuucuauaaugcaucaccauccacccugucugccacuauguuuaucgugagcauccuguuucuuauuaucagcucggucgccucgcucuag

SEQ ID NO: 307551 - RNA, 1530 nt, Artificial Sequence
  derived and/or modified sequence
augggcguacugaaguucaaacacaucuuuuuucgcucauucgucaagaguuccggcgugucccaaauugucuucaccuuucucuugauccccuguugucuuacacuuaacuuccgggccccgccgguuauucccaacgugccguuccuuugggcuuggaaugcacccucugaauucugccuaggaaaauuugacgagccccuggauaugagucuguuuaguuuuauugggucuccuaggauuaaugcuaccggacagggcguuacaaucuucuacguugauagauuggguuacuauccauauauugacuccauaaccggugucaccgugaauggagggauuccccaaaagaucucucugcaggaccauuuagauaaagcaaagaaggacauuacuuuuuauaugcccguggacaaucuuggcauggcuguaauugauugggaagaguggaggcccacuugggcacgcaauuggaaaccaaaggaugucuauaagaaucgcaguauugaacuaguccaacagcagaacguccaguuaucccugaccgaagcuacugaaaaagccaaacaagaguuugaaaaggccggaaaagauuuccucguggagacgaucaagcuaggcaaguugcugaggccaaaccaucucugggguuauuaccuuuuucccgauugcuacaaccaucauuacaaaaaaccaggauauaacggcucaugcuucaacguggaaauuaagcgcaacgacgaucucagcuggcuuuggaacgaguccacagcacuguaucccagcaucuacuugaauacucagcagucaccaguggcugcuacgcucuaugugcggaaccgggugagagaagcuauucgcgugaguaagauacccgaugcaaaaagcccacugcccguauuugcguacacaaggaucguauuuacagaucagguucugaaguuccuuagccaggaugaguugguguacaccuucggagaaacagucgcauuaggcgcuucuggcaucguuauauggggaacacugagcaucaugaggucuaugaaaagcugccucuugcuggauaacuacauggaaaccauucugaacccauauauuaucaaugugacacucgcugccaaaaugugcagucagguuuuaugucaggagcagggggugugcauuagaaagaauuggaacuccucugacuaucuucaucuuaacccagauaacuucgcuauccaguuagagaagggugguaaguuuaccgugcgcggcaagcccacucucgaggacuuggagcaguuuagcgagaaauucuacuguucauguuauucaacacugucauguaaggagaaagccgacgugaaggauaccgacgcuguagauguguguauugccgacggggucuguaucgaugcuuuccucaaaccaccgauggaaacugaggagccgcagaucuuuuacaacgcaucucccucuacacuguccgccaccauguuuauugucucuauccuguuucucauuaucuccuccguagcaucccuuuag

SEQ ID NO: 307552 - RNA, 1530 nt, Artificial Sequence
  derived and/or modified sequence
augggggugcugaaguucaaacauaucuuuuucagguccuucgucaaguccucuggcgugucacagaucgucuucacguuccugcucauuccaugcugcuuaacucugaacuuucgcgcaccaccuguaauuccuaacgugccguuccuuugggccuggaacgcaccaucggaguucugccuggggaaauucgaugaaccacucgacaugucacuuuucagcuuuaucgguagucccagaaucaacgcaacaggacagggggucaccauauucuacgucgauagacugggcuauuaucccuacaucgauagcaucacgggcguuaccguuaauggcggaaucccucagaagaucucucuucaggaucaucucgauaaagccaagaaagacauuacauuuuauaugccagucgauaaccuugguauggcagugauagacugggaagaauggcgcccuaccugggcucggaacuggaagccgaaggacguguauaagaaucgaucaauugaacugguccagcagcaaaauguccaguuaagccugacggaagccaccgagaaggcaaaacaggaguuugaaaaggccgguaaagauuuucugguugagaccaucaaguuggggaagcuucugaggccaaaucaccugugggguuacuaccuuuucccugauugcuauaaccaucacuacaagaaaccaggcuacaauggcagcugcuuuaaugucgaaauuaaacgaaacgaugacuugucguggcuguggaacgagagcaccgcuuuguauccuucuaucuaccugaauacccagcagucccccgucgccgcaaccuuauauguacggaaccgcguccgagaggcaauucgggugagcaagauucccgacgccaagagcccgcugccuguuuucgccuacacccgcaucguguucacggaucagguacucaaauuccuaucccaggacgagcucguguacacauucggggaaacuguggcacugggggcgucuggaauugugauuuggggaacucugagcauaaugcguucgaugaaaucuugccuccuuuuagacaauuacauggagacaauccuaaauccguacauuaucaaugucacccuggcagccaaaauguguucacagguauuaugucaagaacaaggugucuguauccgcaagaacuggaauuccuccgauuauuugcaucugaaucccgauaauuuugccauacagcucgaaaaagggggcaaauuuacaguucgaggcaaaccuacccuggaggauuuggaacaauucuccgaaaaauuuuauuguucaugcuacucgacccucucaugcaaagaaaaagcagacguuaaggauacagaugcaguggauguguguaucgcugauggagucuguauugacgcuuucuuaaagcccccgauggagacggaagaaccucagauauucuauaaugcuagccccagcacccucucagccacaauguuuauaguguccauucuguuucuuaucauuagcagcguggcuucccuguag

SEQ ID NO: 307553 - RNA, 1530 nt, Artificial Sequence
  derived and/or modified sequence
augggaguauuaaaguucaagcacaucuucuuucguucuuucguuaaguccagugggguuucucagauuguguucaccuuucugcugauuccauguugccugacucuuaacuucagggccccaccaguaauuccaaaugugccauuucucugggcguggaaugccccuucugaguuuugccugggcaaauucgacgagccacuggacaugagccuguucucauucauugguagcccccguauaaacgccaccggacaaggcgugacuaucuuuuacguugaucgccucggauauuauccguauauugauucgaucacagggguuacaguaaauggggggaucccucaaaaaaucagucuucaagaucaccucgauaaagcaaagaaagacauaaccuucuauaugcccguggacaaccuuggaauggcaguaauagacugggaggaauggaggccaaccugggcccggaacuggaagccuaaagaugucuauaaaaaucguuccauugaguuggugcaacagcagaacguccaacugucucuaacugaggcuacagagaaagccaagcaggaauuugaaaaggcugggaaagacuuccucguagagacgaucaagcugggaaaauuauuaagaccgaaccaucuuuggggauacuaccuguuucccgacuguuauaaccaucacuacaaaaaaccaggguauaacggauccugcuucaauguggagauaaaaagaaacgaugaccuuucuuggcuauggaacgagucuaccgcacucuacccaucuaucuaucugaacacacaacagucccccgucgcagccacucucuaugugcguaaccgagugagggaagcuaucagggugucuaagauuccugacgcuaaguccccccucccugucuuugcuuacacuaggaucguauucaccgaucaagugcugaaguuuuugucucaggaugaacuugucuauacauucggagagacuguugcucucggugccucagguauagugaucugggggacucuuucaauuaugcgcucaaugaaauccugucugcuccuggacaacuauauggagacuauccuuaauccauacaucaucaacguaacgcucgcagccaaaaugugcagucaagugcugugucaggaacagggcgucugcauuagaaaaaacuggaacuccucugacuauuugcaccuuaacccugauaacuucgccauacagcucgagaaaggagguaaguuuaccguacggggcaagccaacucuagaggaucuagaacaguuuagugagaaauucuacugcuccuguuacuccacacugagcuguaaagaaaaggcugacgugaaagauaccgacgcuguggaugucugcaucgcagauggcguguguauugaugccuuucuuaaaccgccaauggaaaccgaggaaccccaaauuuucuacaaugcuucccccaguacccuuucggcaaccauguucauuguaaguauucuuuuucuuauuaucucaucagucgccagccucuag

SEQ ID NO: 307554 - RNA, 1530 nt, Artificial Sequence
  derived and/or modified sequence
augggcguguugaaauuuaagcauaucuuuuuuaggucuuucgugaaaagcuccggcgugucccagaucguguuuacuuuccuccugauuccguguugccugacccucaauuuccgagcacccccagugauuccaaacguccccuuccuuugggcuuggaaugccccuucugaguucugucuuggaaaguucgacgaaccauuagacaugucauuauucucauucauugguaguccacguaucaaugcaacuggccagggcgugacuauuuuuuacguagaccguuuggguuacuauccauacaucgauagcauaaccggagugacugugaauggcggaauuccacaaaagauuucccugcaggaucaucuggauaaggccaaaaaagacauaacguucuauaugccuguugacaaccugggaauggcuguuauugacugggaagaguggagaccuacgugggcccgcaacuggaaacccaaggauguuuauaaaaacagaucaaucgaacugguucagcaacagaacguacagcucucgcugaccgaggcuacugagaaagcaaaacaagaguucgaaaaggcaggaaaggauuuucugguggagacgauuaaacucggcaaacuguugcgccccaaccaccuuuggggcuauuaccucuuccccgacuguuauaaucaccacuacaagaaacccggcuacaacggcucaugcuucaacguugaaaucaaacggaaugacgaccucucauggcuauggaaugagagcaccgcccucuacccuucaauauaucucaacacucagcaaucaccaguggcagcuacccucuaugugcguaaccgcgugcgggaagccauucgagucucuaaaauuccagacgcaaaaucaccgcucccaguguuugcuuauacccguauugucuucacggaucaagugcuaaaauucuuaucucaggaugagcuuguguacaccuuuggcgaaacuguggcucugggggcaucugggaucgugauauggggaacgcuuuccaucaugcggucaaugaaaagcugucuccuacucgauaacuauauggaaacuauccugaacccauacaucaucaauguuacuuuggccgcuaagaugugcagucagguccucugucaggagcaaggcguuugcaucaggaaaaacuggaacaguagugauuaccugcaucuaaacccagauaauuuugcgauccaguuagagaaggggggaaaauuuacugugcgcggcaagccaacccucgaggaccuggaacaauuuucugagaaguucuauugcucuuguuacuccacuuugaguugcaaggagaaagcagauguuaaggacacugaugcugucgauguguguaucgcugacggaguuuguaucgaugcguuccugaagccacccauggaaacggaagagccgcagauauucuauaacgccucgccuuccacguugagugcuaccauguuuauugugucuauuuuguuucuuauuaucucuucuguggcaucucuuuag

SEQ ID NO: 307555 - RNA, 1530 nt, Artificial Sequence
  derived and/or modified sequence
augggcguccucaaguuuaagcauaucuuuuucagguccuucguuaagucuucuggugucucgcagauagucuuuacuuuuuuacuaauucccugcugccugacucugaauuuucgcgccccccccguuauuccaaaugugccuuucuugugggccuggaaugcccccucggaguucugccuaggaaaguuugaugaaccgcucgacaugucucucuucagcuucauuggauccccaagaaucaacgcaaccggucaaggcgugaccauuuuuuacgucgauaggcucggcuacuauccuuacaucgacuccauuaccggcgucaccgugaauggcgggauuccucagaagauaucucugcaagaucaucuggauaaggccaaaaaagacaucacauuuuauaugccuguggacaauuuggguauggcugugauugacugggaagaguggcggcccaccugggcuaggaacuggaaaccuaaggacguguauaaaaaucgguccaucgaacugguacagcaacaaaauguccaacugucccugaccgaggcgacugaaaaagcgaaacaagaauuugagaaagccggcaaagacuuccugguagaaaccauuaaguugggaaagcugcuccggcccaaccaucuuuggggguacuaccuguuccccgacugcuauaaucaccacuacaaaaagccuggauacaauggcuccugcuucaacguugaaaucaagcggaacgacgaucuuucauggcuuuggaacgaauccacagcauuguacccuuccauauaucugaauacccaacagucucccguugcugccacucucuauguucgcaacagagucagggaagcaauccgaguuucaaagaucccagacgcaaaauccccucuaccgguguuugccuauacccgcaucguguuuacggaucagguuuuaaaauuucugagccaggaugaacugguuuacacuuucggagagacugucgcccugggggcaagcgguauugugauuuggggaacucucagcauuaugcguaguaugaagucuugucuucugcuggauaauuauauggaaaccaucuuaaaccccuacauuauuaacguaacccuugcugcuaagauguguagccaaguuuugugucaggagcaaggagucuguaucagaaaaaauuggaauagcucggacuaucugcacuuaaaucccgauaauuuugccauacagcucgaaaaagggggcaaauuuacaguucgaggcaaaccuacccuggaggauuuggaacaauucuccgaaaaauuuuauuguucaugcuacucgacccucucaugcaaagaaaaagcagacguuaaggauacagaugcaguggauguguguaucgcugauggagucuguauugacgcuuucuuaaagcccccgauggagacggaagaaccucagauauucuauaaugcuagccccagcacccucucagccacaauguuuauaguguccauucuguuucuuauuaucucuuccguugccagucucuag

SEQ ID NO: 307556 - RNA, 1530 nt, Artificial Sequence
  derived and/or modified sequence
auggggguucuaaaguucaagcacaucuucuuucgcaguuuuguuaagagcucuggggucucccagaucgucuucaccuuccuacucaucccuugcugccugacuuugaacuucagagcaccaccagucaucccaaaugugccauuccugugggcuuggaacgccccaucugaauucugucugggaaaguucgacgaaccgcuggauaugagccuguucuccuucaucggauccccccgaaucaaugcuacgggucagggcguuaccaucuuuuacguagaccggcuuggguacuacccauauauugacucuauuacaggcguaacugucaacgguggaauuccucagaaaaucucccugcaggaccaucuggacaaggcgaaaaaggacaucacauucuacaugccaguggacaaccuggguauggcaguaauugauugggaggaguggcgacccacuugggcgcggaauuggaagccaaaggauguauauaagaaccgaaguauugagcuaguacagcagcagaaugugcaguugagucugacagaagccacggagaaagcaaaacaggaguucgaaaaggcuggcaaggauuuucuuguagagacgaucaaacugggcaagcuccucaggccuaaccacuuaugggguuauuaccucuucccugacugcuacaaccaucacuauaagaagcccggguacaacggaucuugcuuuaacguggaaauuaagcgaaacgacgauuuaagcuggcuauggaacgagagcaccgccuuauacccuaguauauaucuaaauacacaacagucccccguugccgccacacuguacguuaggaauaggguuagggaagcuauucggguuucaaaaauaccagacgcuaaaucaccucugccgguuuucgcuuacacccggaucgucuuuacugaucagguguugaaguuccucagccaggacgaacugguguauacauucggagagacaguggcccucggggcaucaggcaucgugaucuggggcacccuguccauuaugcgaucaaugaaguccugccugcuucucgauaauuacauggagaccauucuuaauccauacaucauaaaugugacccuggcugcuaaaaugugcagucaagugcuaugucaagagcagggcguuugcauccguaaaaacuggaacucguccgauuaccugcaucucaauccugauaacuuugccauucagcuggaaaaaggcggaaaauuuacugucagggguaagcccacucuggaggauuuagagcaguuuucugagaaguucuacuguagcuguuacagcacucuuaguugcaaggaaaaggcugauguuaaagacacagaugccgucgacgucugcaucgcagacggagugugcauugacgccuuccugaagccaccuauggaaacugaagaaccacagaucuuuuauaaugccagcccuagcacucugucagcuacaauguuuaucgugaguauucucuuuuugauuaucucuucaguagcaucccucuag

SEQ ID NO: 307557 - RNA, 1530 nt, Artificial Sequence
  derived and/or modified sequence
augggcgucuuaaaauucaagcacauauucuuuagauccuuugucaaauccuccggcguuucccaaauuguuuucacuuuucuacugauccccuguugccuuacacuuaacuuucgggcacccccuguuauuccuaaugugcccuuucugugggcauggaaugcgcccucagaauucugcuuagguaaguuugacgaacccuuggauaugucacuauuuucauuuauuggcaguccucgaaucaacgcuaccggccaggguguaaccauauuuuauguagaucgguuaggguacuacccauacaucgauucuauuacaggggucacagugaaugguggcauuccucagaagauuagcuuacaagaccaucuggauaaagcaaaaaaagauaucacauucuauaugccuguggauaaccugggaauggccguuauugacugggaagaguggagaccgacaugggcccguaauuggaaaccuaaggauguguacaagaaucgguccauugagcugguucaacagcaaaacguacaacugucccuuacagaggccacagaaaaagccaagcaggaauucgaaaaagcagggaaagauuuucugguggaaacaaucaagcucggcaaguuacugcgucccaaucacuugugggguuacuaucuuuuucccgacugcuauaaucaucauuacaagaagccuggauacaaugguagcuguuuuaacgucgaaauuaaacgcaaugacgaccuuucauggcuuuggaacgaguccaccgcuuuguaccccucuaucuauuugaacacucagcaaagucccguugccgcaacccuauauguucgcaacagagugagggaggcgauccgcgucaguaaaaucccagaugccaaaagcccucucccugucuucgcuuauaccagaauuguguucacugaucaggucuuaaaauuucugucucaggacgaauuagucuauacauucggcgaaacugucgcucucggagcuucagggauugugauuuggggaacucucucaaucaugcgcucuaugaaaagcugcuugcucuuagauaacuacauggaaaccauccucaauccuuacauuaucaacgucacccuugccgccaagaugugcucucaggugcugugucaggaacaagggguuugcaucaggaagaacuggaauuccuccgauuaccuacaucuaaauccagacaacuucgccauacaacucgagaaaggcgggaaauuuaccguucggggcaagccaacccucgaggaccuggaacaauuuagcgaaaaauuuuacugcuccuguuauucgacccucuccugcaaggagaaggccgacgugaaagauaccgaugccgucgacgugugcaucgcagauggggucugcaucgacgccuuccuuaagccucccauggaaaccgaggagccacagaucuucuauaaugcaucuccuucuacgcucucagccaccauguucaucgucuccauccucuuucucauuaucuccagcguugcaucccuuuag

SEQ ID NO: 307558 - DNA, 243 bp, Artificial Sequence
  derived and/or modified sequence
atgggcgtgctgaagttcaagcacatcttcttcagaagcttcgtgaagagcagcggcgtgagccagatcgtgttcaccttcctgctgatcccctgctgcctgaccctgaacttcagagccccccccgtgatccccaacgtgcccttcctgtgggcctggaacgcccccagcgagttctgcctgggcaagttcgacgagcccctggacatgagcctgttcagcttcatcggcagccccagatag

SEQ ID NO: 307559 - DNA, 243 bp, Artificial Sequence
  derived and/or modified sequence
atgggagtactaaaatttaagcacatctttttccggagcttcgtcaagtcctcaggggtctcacagatcgtcttcactttcttgctgattccctgctgtttgacacttaacttccgcgcccccccggttatccctaatgttccattcttgtgggcatggaatgctccgtcagaattctgtctcggcaaatttgatgaaccgctggacatgagcctcttttcattcatcggcagcccccgatag

SEQ ID NO: 307560 - DNA, 243 bp, Artificial Sequence
  derived and/or modified sequence
atgggcgtgctgaagttcaagcacatcttcttccgcagctttgtgaagagcagcggcgtgtcccagatcgtgttcaccttcctgctgatcccctgctgcctgaccctgaacttccgggcccctcctgtgatccccaacgtgcccttcctgtgggcctggaatgcccccagcgagttctgcctgggcaagtttgatgagcccctggacatgagcctcttctccttcatcggcagccccaggtag

SEQ ID NO: 307561 - DNA, 243 bp, Artificial Sequence
  derived and/or modified sequence
atgggcgtgctgaagttcaagcacatcttcttccggagcttcgtgaagtcaagcggcgtgtcccagatcgtttttacattccttctcatcccttgttgtctgactttgaactttcgggccccacctgtaatcccaaatgtccctttcctgtgggcctggaacgcaccttcggagttttgtctcgggaagtttgacgagcccctggacatgagcctgttcagcttcatcggtagccctcggtag

SEQ ID NO: 307562 - DNA, 243 bp, Artificial Sequence
  derived and/or modified sequence
atgggtgttctgaagtttaagcatatcttcttcagatctttcgtgaaaagttcaggagtctcgcagattgtgttcacttttttgttgatcccctgttgcctgaccctgaactttagagcccctcctgtcatcccaaacgtcccatttttgtgggcgtggaatgctccttccgagttctgcctgggtaagtttgatgagcctctggatatgagccttttcagctttatcggctcccccaggtag

SEQ ID NO: 307563 - DNA, 243 bp, Artificial Sequence
  derived and/or modified sequence
atgggcgtactcaaattcaaacatattttcttccgatcctttgtgaagtcctccggtgtttctcagatcgtttttacatttctcctgataccttgttgtttgacactgaattttagagccccgccagtaatccctaatgttccttttttatgggcatggaacgccccctccgaattttgtcttggcaagttcgacgaaccacttgacatgtcactgttcagcttcattgggtccccacgctag

SEQ ID NO: 307564 - DNA, 760 bp, Artificial Sequence
  derived and/or modified sequence
ttccagttgtcctgagagtgatgactggctccaccttgatgtggctcacataaattcagaaagtatgatagcagtgtaggtggttagcagcacctcataaggtccttcctagcaaggttaaatactgcagagctaatagattggagtgacttctgacctagtcacatcttaaaggaaaacttttcagtttttactttaaaaggatgctaatgactagccaatgctctaggaagacattgagaccagccaacttcttgccttgataactactgaagagacattgggtggctggattttgaaagcagacttctggttataggtgatgcaacttgaaaaacaatcctgaaacatgaaacaagaataataatatttaaatgtaacttaatcattatacctctttatccatcaaagtgaattcattccattccctttcatctgtgctcatactttgcatcagatattgggtaaaccaaagtgtgtaggaagaaataaatgttttcatagtcattactctttacaatgggagtgctaaaattcaagcacatctttttcagaagctttgttaaatcaagtggagtatcccagatagttttcaccttccttctgattccatgttgcttgactctgaatttcagagcacctcctgttattccaaatgtgcctttcctctgggcctggaatgccccaagtgaattttgtcttggaaaatttgatgagccactagatatgagcctcttctctttcataggaagcccccgaa

SEQ ID NO: 307565 - RNA, 243 nt, Artificial Sequence
  derived and/or modified sequence
augggcguacucaaauucaaacauauuuucuuccgauccuuugugaaguccuccgguguuucucagaucguuuuuacauuucuccugauaccuuguuguuugacacugaauuuuagagccccgccaguaaucccuaauguuccuuuuuuaugggcauggaacgcccccuccgaauuuugucuuggcaaguucgacgaaccacuugacaugucacuguucagcuucauuggguccccacgcuag

SEQ ID NO: 307566 - DNA, 2067 bp, Artificial Sequence
  derived and/or modified sequence
atgagcgtgaacagcgagaagagcagcagcagcgagagacccgagccccagcagaaggcccccctggtgcccccccccccccccccccccccccccccccccccccccctgcccgaccccaccccccccgagcccgaggaggagatcctgggcagcgacgacgaggagcaggaggaccccgccgactactgcaagggcggctaccaccccgtgaagatcggcgacctgttcaacggcagataccacgtgatcagaaagctgggctggggccacttcagcaccgtgtggctgtgctgggacatgcagggcaagagattcgtggccatgaaggtggtgaagagcgcccagcactacaccgagaccgccctggacgagatcaagctgctgaagtgcgtgagagagagcgaccccagcgaccccaacaaggacatggtggtgcagctgatcgacgacttcaagatcagcggcatgaacggcatccacgtgtgcatggtgttcgaggtgctgggccaccacctgctgaagtggatcatcaagagcaactaccagggcctgcccgtgagatgcgtgaagagcatcatcagacaggtgctgcagggcctggactacctgcacagcaagtgcaagatcatccacaccgacatcaagcccgagaacatcctgatgtgcgtggacgacgcctacgtgagaagaatggccgccgaggccaccgagtggcagaaggccggcgcccccccccccagcggcagcgccgtgagcaccgccccccagcagaagcccatcggcaagatcagcaagaacaagaagaagaagctgaagaagaagcagaagagacaggccgagctgctggagaagagactgcaggagatcgaggagctggagagagaggccgagagaaagatcatcgaggagaacatcaccagcgccgcccccagcaacgaccaggacggcgagtactgccccgaggtgaagctgaagaccaccggcctggaggaggccgccgaggccgagaccgccaaggacaacggcgaggccgaggaccaggaggagaaggaggacgccgagaaggagaacatcgagaaggacgaggacgacgtggaccaggagctggccaacatcgaccccacctggatcgagagccccaagaccaacggccacatcgagaacggccccttcagcctggagcagcagctggacgacgaggacgacgacgaggaggactgccccaaccccgaggagtacaacctggacgagcccaacgccgagagcgactacacctacagcagcagctacgagcagttcaacggcgagctgcccaacggcagacacaagatccccgagagccagttccccgagttcagcaccagcctgttcagcggcagcctggagcccgtggcctgcggcagcgtgctgagcgagggcagccccctgaccgagcaggaggagagcagccccagccacgacagaagcagaaccgtgagcgccagcagcaccggcgacctgcccaaggccaagaccagagccgccgacctgctggtgaaccccctggaccccagaaacgccgacaagatcagagtgaagatcgccgacctgggcaacgcctgctgggtgcacaagcacttcaccgaggacatccagaccagacagtacagaagcatcgaggtgctgatcggcgccggctacagcacccccgccgacatctggagcaccgcctgcatggccttcgagctggccaccggcgactacctgttcgagccccacagcggcgaggactacagcagagacgaggaccacatcgcccacatcatcgagctgctgggcagcatccccagacacttcgccctgagcggcaagtacagcagagagttcttcaacagaagaggcgagctgagacacatcaccaagctgaagccctggagcctgttcgacgtgctggtggagaagtacggctggccccacgaggacgccgcccagttcaccgacttcctgatccccatgctggagatggtgcccgagaagagagccagcgccggcgagtgcctgagacacccctggctgaacagctag

SEQ ID NO: 307567 - DNA, 2100 bp, Artificial Sequence
  derived and/or modified sequence
atgagcagcagaaaggtgctggccatccaggccagaaagagaagacccaagagagagaagcaccccaagaagcccgagccccagcagaaggcccccctggtgcccccccccccccccccccccccccccccccccccccccctgcccgaccccaccccccccgagcccgaggaggagatcctgggcagcgacgacgaggagcaggaggaccccgccgactactgcaagggcggctaccaccccgtgaagatcggcgacctgttcaacggcagataccacgtgatcagaaagctgggctggggccacttcagcaccgtgtggctgtgctgggacatgcagggcaagagattcgtggccatgaaggtggtgaagagcgcccagcactacaccgagaccgccctggacgagatcaagctgctgaagtgcgtgagagagagcgaccccagcgaccccaacaaggacatggtggtgcagctgatcgacgacttcaagatcagcggcatgaacggcatccacgtgtgcatggtgttcgaggtgctgggccaccacctgctgaagtggatcatcaagagcaactaccagggcctgcccgtgagatgcgtgaagagcatcatcagacaggtgctgcagggcctggactacctgcacagcaagtgcaagatcatccacaccgacatcaagcccgagaacatcctgatgtgcgtggacgacgcctacgtgagaagaatggccgccgaggccaccgagtggcagaaggccggcgcccccccccccagcggcagcgccgtgagcaccgccccccagcagaagcccatcggcaagatcagcaagaacaagaagaagaagctgaagaagaagcagaagagacaggccgagctgctggagaagagactgcaggagatcgaggagctggagagagaggccgagagaaagatcatcgaggagaacatcaccagcgccgcccccagcaacgaccaggacggcgagtactgccccgaggtgaagctgaagaccaccggcctggaggaggccgccgaggccgagaccgccaaggacaacggcgaggccgaggaccaggaggagaaggaggacgccgagaaggagaacatcgagaaggacgaggacgacgtggaccaggagctggccaacatcgaccccacctggatcgagagccccaagaccaacggccacatcgagaacggccccttcagcctggagcagcagctggacgacgaggacgacgacgaggaggactgccccaaccccgaggagtacaacctggacgagcccaacgccgagagcgactacacctacagcagcagctacgagcagttcaacggcgagctgcccaacggcagacacaagatccccgagagccagttccccgagttcagcaccagcctgttcagcggcagcctggagcccgtggcctgcggcagcgtgctgagcgagggcagccccctgaccgagcaggaggagagcagccccagccacgacagaagcagaaccgtgagcgccagcagcaccggcgacctgcccaaggccaagaccagagccgccgacctgctggtgaaccccctggaccccagaaacgccgacaagatcagagtgaagatcgccgacctgggcaacgcctgctgggtgcacaagcacttcaccgaggacatccagaccagacagtacagaagcatcgaggtgctgatcggcgccggctacagcacccccgccgacatctggagcaccgcctgcatggccttcgagctggccaccggcgactacctgttcgagccccacagcggcgaggactacagcagagacgaggaccacatcgcccacatcatcgagctgctgggcagcatccccagacacttcgccctgagcggcaagtacagcagagagttcttcaacagaagaggcgagctgagacacatcaccaagctgaagccctggagcctgttcgacgtgctggtggagaagtacggctggccccacgaggacgccgcccagttcaccgacttcctgatccccatgctggagatggtgcccgagaagagagccagcgccggcgagtgcctgagacacccctggctgaacagctag

SEQ ID NO: 307568 - DNA, 3700 bp, Artificial Sequence
  derived and/or modified sequence
ccattgaatcccagtcctaacagaagtactgcgaatcttgtggcctcattctgaacaaaagggattagagaagaaaaatctcttgatataaggcttgaaagcaagggcaggcaatcttggttgtgaatattttctgatttttccagaaatcaagcagaagattgagctgctgatgtcagttaactctgagaagtcgtcctcttcagaaaggccggagcctcaacagaaagctcctttagttcctcctcctccaccgccaccaccaccaccaccgccacctttgccagaccccacacccccggagccagaggaggagatcctgggatcagatgatgaggagcaagaggaccctgcggactactgcaaaggtggatatcatccagtgaaaattggagacctcttcaatggccggtatcatgttattagaaagcttggatgggggcacttctctactgtctggctgtgctgggatatgcaggggaaaagatttgttgcaatgaaagttgtaaaaagtgcccagcattatacggagacagccttggatgaaataaaattgctcaaatgtgttcgagaaagtgatcccagtgacccaaacaaagacatggtggtccagctcattgacgacttcaagatttcaggcatgaatgggatacatgtctgcatggtcttcgaagtacttggccaccatctcctcaagtggatcatcaaatccaactatcaaggcctcccagtacgttgtgtgaagagtatcattcgacaggtccttcaagggttagattacttacacagtaagtgcaagatcattcatactgacataaagccggaaaatatcttgatgtgtgtggatgatgcatatgtgagaagaatggcagctgaggccactgagtggcagaaagcaggtgctcctcctccttcagggtctgcagtgagtacggctccacagcagaaacctataggaaaaatatctaaaaacaaaaagaaaaaactgaaaaagaaacagaagaggcaggctgagttattggagaagcgcctgcaggagatagaagaattggagcgagaagctgaaaggaaaataatagaagaaaacatcacctcagctgcaccttccaatgaccaggatggcgaatactgcccagaggtgaaactaaaaacaacaggattagaggaggcggctgaggcagagactgcaaaggacaatggtgaagctgaggaccaggaagagaaagaagatgctgagaaagaaaacattgaaaaagatgaagatgatgtagatcaggaacttgcgaacatagaccctacgtggatagaatcacctaaaaccaatggccatattgagaatggcccattctcactggagcagcaactggacgatgaagatgatgatgaagaagactgcccaaatcctgaggaatataatcttgatgagccaaatgcagaaagtgattacacatatagcagctcctatgaacaattcaatggtgaattgccaaatggacgacataaaattcccgagtcacagttcccagagttttccacctcgttgttctctggatccttagaacctgtggcctgcggctctgtgctttctgagggatcaccacttactgagcaagaggagagcagtccatcccatgacagaagcagaacggtttcagcctccagtactggggatttgccaaaagcaaaaacccgggcagctgacttgttggtgaatcccctggatccgcggaatgcagataaaattagagtaaaaattgctgacctgggaaatgcttgttgggtgcataaacacttcacggaagacatccagacgcgtcagtaccgctccatagaggttttaataggagcggggtacagcacccctgcggacatctggagcacggcgtgtatggcatttgagctggcaacgggagattatttgtttgaaccacattctggggaagactattccagagacgaagaccacatagcccacatcatagagctgctaggcagtattccaaggcactttgctctatctggaaaatattctcgggaattcttcaatcgcagaggagaactgcgacacatcaccaagctgaagccctggagcctctttgatgtacttgtggaaaagtatggctggccccatgaagatgctgcacagtttacagatttcctgatcccgatgttagaaatggttccagaaaaacgagcctcagctggcgaatgccttcggcatccttggttgaattcttagcaaattctaccaatattgcattctgagctagcaaatgttcccagtacattggacctaaacggtgactctcattctttaacaggattacaagtgagctggcttcatcctcagacctttattttgctttgaggtactgttgtttgacattttgctttttgtgcactgtgatcctggggaagggtagtcttttgtcttcagctaagtagtttactgaccattttcttctggaaacaataacatgtctctaagcattgtttcttgtgttgtgtgacattcaaatgtcatttttttgaatgaaaaatactttcccctttgtgttttggcaggttttgtaactatttatgaagaaatattttagctgagtactatataatttacaatcttaagaaattatcaagttggaaccaagaaatagcaaggaaatgtacaattttatcttctggcaaagggacatcattcctgtattatagtgtatgtaaatgcaccctgtaaatgttactttccattaaatatgggagggggactcaaatttcagaaaagctaccaagtcttgagtgctttgtagcctatgttgcatgtagcggactttaactgctccaaggagttgtgcaaacttttcattccataacagtcttttcacattggattttaaacaaagtggctctgggttataagatgtcattctctatatggcactttaaaggaagaaaagatatgtttctcattctaaaatatgcattataatttagcagtcccatttgtgattttgcatatttttaaaagtacttttaaagaagagcaatttccctttaaaaatgtgatggctcagtaccatgtcatgttgcctcctctgggcgctgtaagttaagctctacatagattaaattggagaaacgtgttaattgtgtggaatgaaaaaatacatatatttttggaaaagcatgatcatgcttgtctagaacacaaggtatggtatatacaatttgcagtgcagtgggcagaatacttctcacagctcaaagataacagtgatcacattcattccataggtagctttacgtgtggctacaacaaattttactagctttttcattgtctttccatgaaacgaagttgagaaaatgattttccctttgcaggttgcacacagttttgtttatgcatttccttaaaattaattgtagactccaggatacaaaccatagtaggcaatacaattttagaatgtaatatatagaggtatatttagcctcttttagaagtcagtggattgaatgtctttttattttaaattttacattcattaaggtgcctcgtttttgactttgtccattaacatttatccatatgcctttgcaataactagattgtgaaaagctaacaagtgttgtaacaataatccattgtttgaggtgcttgcagttgtcttaaaaattaaagtgttttggtttttttttttcc

SEQ ID NO: 307569 - DNA, 2067 bp, Artificial Sequence
  derived and/or modified sequence
atgagcgtgaacagtgaaaaatccagctcctccgaacgccccgagccacagcagaaggctcctctggttcccccgcccccacccccacctccacctcctcctccccctttgcccgaccctaccccacctgaaccagaggaggagatcctggggagcgacgacgaggaacaggaagaccctgctgactactgcaaggggggctatcatccggtgaagattggcgacctctttaatggtcgataccatgtgattaggaaactggggtgggggcacttcagcactgtttggctgtgttgggatatgcagggtaaacgtttcgtggcaatgaaagtcgtcaagtcagctcagcactatacggaaacggcgcttgacgagataaagctgctgaaatgcgtgcgcgaaagcgacccatctgatcccaacaaggacatggtcgtgcagctgattgatgattttaaaatcagcggcatgaatggcatacacgtctgtatggttttcgaggttttggggcatcacctgctaaaatggattatcaagtctaattatcaagggctgcccgttcgttgcgtgaagtccattatccgccaggttcttcagggtctggactaccttcattccaaatgcaagataatacataccgacatcaagcctgagaacatcttgatgtgtgtagacgacgcgtacgtgcggcggatggccgccgaggcaactgagtggcagaaggcgggcgccccccctcccagtggcagtgcggtgagcaccgcaccacagcaaaaacctatcggcaaaatctccaaaaacaaaaagaagaagctgaaaaagaaacagaaacgccaagccgaactactcgagaagcgcctgcaggaaatcgaggaactggagagagaggcagaacggaagataattgaggaaaatatcacttcggccgctccctcgaacgatcaggacggtgagtactgcccagaggttaagctgaagacaaccggccttgaagaggctgccgaagcagagactgccaaagataacggcgaggccgaggaccaggaggagaaagaggacgcagagaaagagaacattgaaaaggacgaggacgatgtggaccaggagttagcgaatatcgacccgacgtggattgagagtccgaaaaccaacggacatatagagaacggtccattctcgctggaacagcagctcgacgatgaggacgacgatgaggaagattgtcctaacccagaggaatacaatcttgacgagccaaacgcagagtcagattatacttactcatccagctacgagcaattcaatggcgagctaccaaacggcaggcacaagatccccgagtcccagtttcccgagttctctacctcactcttcagcgggtctttggaaccggttgcttgcggatcggtgctgtctgaagggtctcctttaaccgagcaggaagagagctctccatcgcacgaccggagtaggaccgtctctgcctctagcacaggcgatctgcctaaggctaagactcgggccgcagacctattagttaacccactcgatccaaggaacgctgacaagattcgcgttaaaattgccgacctgggtaacgcctgttgggtacacaagcatttcaccgaggatatacaaactcggcagtatagatctattgaggtcctgattggggctggatatagcacacccgcagatatttggtcaactgcatgcatggccttcgagcttgctacgggtgattacctgtttgaacctcatagcggcgaggactattcgcgggacgaggatcacatcgcccacatcattgagctgctggggtctatccctcgccattttgctttatcaggtaagtacagccgcgaattcttcaacagacgcggagaattgagacacataactaagttgaagccttggagcttgttcgatgtcttggtggagaagtatggttggccccatgaggacgccgcccagtttactgatttcctgatccccatgctggaaatggtacctgagaaacgtgctagtgcgggggagtgcctgaggcacccatggctgaattcttag

SEQ ID NO: 307570 - DNA, 2100 bp, Artificial Sequence
  derived and/or modified sequence
atgtcctcccgcaaagtgctcgcaattcaagcaaggaagagacgtcctaagcgggaaaagcatcccaagaaaccggaaccgcagcaaaaggcacctttggttccaccacctcccccgcctccaccccccccgcctccaccgctacccgatcccacacctccggagcctgaggaggagatcttggggagcgatgacgaagaacaggaagaccccgcagattactgtaaaggcggataccatcctgtcaagatcggagatctgtttaacgggagatatcatgttatcaggaaactggggtggggacattttagtacagtgtggctctgttgggatatgcagggaaagagatttgtcgcgatgaaggtagttaagtcagctcagcactataccgagacagctcttgacgagattaagctgctcaaatgtgtccgcgagagtgaccccagcgatcctaataaggacatggtagtgcagctcattgacgactttaagatatctggaatgaatggtatccatgtttgcatggtctttgaagtgcttgggcaccacttgctaaagtggatcatcaaatccaattaccaaggcttgccagtaaggtgtgtgaagagcattatcagacaggttctccaggggctggattatctgcacagcaagtgcaaaatcattcatactgatataaaacccgagaacatcctcatgtgtgtggatgatgcctatgtgcggagaatggctgctgaggctacggagtggcaaaaagcaggcgctccaccccccagcgggtcagctgtaagcaccgcaccacagcagaaaccaatcggaaagattagcaagaacaaaaagaagaaattgaaaaagaagcaaaaacgccaggcagaattactagaaaaacgcttgcaggaaattgaggaactcgagcgtgaagcagaaagaaagataatcgaggagaacataaccagtgccgccccaagcaatgaccaggatggagagtattgcccagaagtaaaactaaagacaacagggctcgaggaggcagctgaggcggagacagcgaaagacaacggagaagccgaggaccaggaggaaaaggaagatgccgaaaaggaaaacattgaaaaggacgaggacgatgtggatcaggaactggcgaatatcgatcccacttggattgagtcaccaaaaactaacgggcacattgagaacggtccatttagcctggagcagcaattggacgacgaggacgatgacgaggaggattgccctaatcccgaagagtacaatctggacgaacccaacgccgagtcagattacacttacagctcgagctacgaacaattcaacggggaactgcctaatggacggcacaagatacctgagagtcaattccctgaattttctacgagcctgtttagcggttccctggagccggtggcttgtggaagcgtgctgagcgagggctcgccactgaccgagcaggaagagagctcccccagtcacgataggagtaggaccgttagtgctagcagtactggggatctaccaaaagctaagactagggctgccgatttactggtgaatccactggatcctcgtaatgccgacaagattcgggtgaaaattgcggacctcggtaatgcttgctgggtccataagcacttcacagaagacatccagaccagacagtacaggagcatagaggtgctgatcggcgccggctacagcacccctgcagacatctggtccaccgcctgcatggcgtttgaacttgctaccggtgactacctttttgaaccacacagcggcgaggactacagccgcgacgaggaccacattgcgcacattatcgaactgctgggctccatccccaggcattttgctcttagcggaaagtattccagggagtttttcaacagaagaggcgagctgcggcacatcaccaaactgaaaccgtggtccctgttcgacgtccttgtggagaagtatggctggccccacgaagacgccgcccagtttacagattttctgatcccaatgctggagatggttcccgaaaagcgagccagtgcaggggagtgcttaaggcatccctggctaaactcctag

SEQ ID NO: 307571 - DNA, 2067 bp, Artificial Sequence
  derived and/or modified sequence
atgagcgtcaatagtgagaagagttcctcttcggagaggcctgaacctcagcagaaagccccacttgtgccccctccgccaccaccacctccaccacctccaccgccgctccctgaccccacaccaccggagcctgaggaggagatactcggcagcgatgatgaggaacaggaggaccctgcagactactgtaagggtgggtatcacccagtcaaaattggagacctgttcaatgggcgctaccacgtgatccgaaagctcgggtggggtcatttcagtactgtctggctgtgttgggacatgcaaggcaagaggtttgttgcaatgaaggtggtcaagagcgctcaacactatacagagacagccctcgacgaaatcaaattactgaaatgtgtcagagaatccgatcccagtgaccccaataaggatatggtcgtgcagttaattgacgacttcaagataagtggcatgaatggcatccacgtttgcatggtgtttgaggtgctgggacaccacctgctgaaatggataatcaaatcaaattatcaggggttgccagtcaggtgtgtcaaaagcataatcagacaggtgttacagggccttgattacctgcacagtaagtgcaagataatccatacggatataaaacccgaaaatatcctgatgtgcgttgacgatgcgtatgtacgacgcatggcggccgaggccactgagtggcagaaggcgggagcgcctccccctagtggcagcgcagtaagtactgccccccagcagaagcctatcggcaaaatatctaaaaacaaaaaaaagaaactgaaaaaaaagcagaaacgccaggccgaactactcgaaaaacgattgcaggagatcgaggagctggagagagaggctgaacggaagatcatcgaagagaacataacaagcgccgctccgagcaacgaccaggacggagaatattgtcccgaagtcaagctgaagaccaccggcttagaagaggccgcagaagctgagaccgccaaagataacggagaggctgaagatcaagaggagaaggaggatgcagaaaaggagaacatagaaaaggatgaagacgatgtagaccaggagcttgccaacattgatccaacgtggatcgaaagcccgaaaacgaatgggcacatcgagaacgggcccttcagccttgaacaacagttggatgacgaagatgacgacgaagaggattgcccgaaccccgaggagtacaacctagacgagcccaacgcggagtcggattacacttatagctccagctacgagcaatttaatggtgaattacccaacgggcggcacaagatcccagaatcacaatttcccgaattttctacatctctcttcagcggttcgctagagccagtagcttgcggatcggtgctgtctgaagggtctccgttgactgagcaggaggagtcaagcccttcccatgaccgatctagaactgtgtccgcctccagcacaggagacttaccaaaagcgaagacacgcgctgccgatctgctggtgaatccactggatcctcgcaacgccgataaaatccgcgttaagatcgccgatcttggaaatgcatgttgggttcacaaacattttacagaagatattcagacccggcaatacagaagcatcgaggtgctcattggcgcaggctatagcacgcccgctgatatatggtcaactgcttgtatggctttcgaactggccaccggtgactacctcttcgagcctcacagcggggaggactacagtagagatgaggaccatattgcacacattatcgagctactgggaagcatcccccggcattttgccctttctggcaagtacagtagagaattcttcaaccgccggggcgagttgaggcatatcaccaagctgaaaccatggagccttttcgatgtgctggttgagaaatacggctggccacatgaggatgctgctcagtttactgacttccttattccgatgctcgagatggtgccagaaaagagggcttccgcaggcgagtgtttacgacacccttggctaaactcctag

SEQ ID NO: 307572 - DNA, 2067 bp, Artificial Sequence
  derived and/or modified sequence
atgtctgtgaacagcgagaagagcagcagcagcgagaggcctgagccccagcagaaggcccccctggtgcccccacctcctcctcctcctcctcctcctcctccacccctgcctgaccccaccccacctgagcctgaggaggagatcctgggcagtgatgatgaggagcaggaggaccctgctgactactgcaagggcggctaccaccctgtgaagattggagacctcttcaacggccgctaccacgtgatcaggaagctgggctggggccacttcagcacagtgtggctgtgctgggacatgcagggcaagagatttgtggccatgaaggtggtgaagagcgcccagcactacacagaaacagccctggatgagatcaagctgctgaagtgtgtgcgggagagtgaccccagcgaccccaacaaggacatggtggtgcagctgattgatgacttcaagatcagcggcatgaatggcatccacgtgtgcatggtgtttgaggtgctgggccaccacctgctgaagtggatcatcaagagcaactaccagggcctgcctgtgcgctgtgtgaagagcatcatccggcaggtgctgcagggcctggactacctgcacagcaagtgcaagatcatccacacagacatcaagccagagaacatcctgatgtgtgtggatgatgcctacgtgcggaggatggctgctgaggccacagagtggcagaaggccggggcccccccacccagcggcagcgctgtgtccacagccccccagcagaagcccatcggcaagatcagcaagaacaagaagaagaagctgaagaagaagcagaagaggcaggccgagctgctggagaagaggctgcaggagattgaggagctggagcgggaggccgagaggaagatcatcgaggagaacatcaccagcgctgcccccagcaatgaccaggatggagagtactgcccagaggtgaagctgaagaccaccggcctggaggaggccgctgaggccgagacagccaaggacaacggggaggccgaggaccaggaggagaaggaggatgctgagaaggaaaatattgagaaggatgaagatgatgtggaccaggagctggccaacatcgaccccacctggattgagagccccaagaccaacggccacattgaaaatggccccttcagcctggagcagcagctggatgatgaagatgatgatgaggaggactgccccaaccctgaggagtacaacctggatgagcccaatgctgagagtgactacacctacagcagcagctatgagcagttcaatggagagctgcccaacggccgccacaagatccctgagagccagtttcctgagttcagcaccagcctcttcagcggcagcctggagcctgtggcctgtggctctgtgctgtctgagggcagccccctgacagagcaggaggagagcagccccagccatgacaggagcaggacagtgtctgccagcagcactggagacctgcccaaggccaagaccagggctgctgacctgctggtgaaccccctggaccccagaaatgctgacaagatccgggtgaagattgctgacctgggcaatgcctgctgggtgcacaagcacttcacagaggacatccagacccggcagtaccgcagcattgaggtgctgattggagctggctacagcaccccagctgacatctggagcacagcctgcatggcctttgagctggccactggagactacctgtttgagccccacagcggggaggactacagcagagatgaggaccacatcgcccacatcatcgagctgctgggcagcatccccaggcactttgccctgagcggcaagtacagccgggagttcttcaacagaagaggagagctgcggcacatcaccaagctgaagccctggagcctgtttgatgtgctggtggagaagtatggctggccccatgaagatgctgcccagttcacagacttcctgatccccatgctggagatggtgcctgagaagagggccagcgctggagaatgtctgcggcacccctggctgaacagctag

SEQ ID NO: 307573 - DNA, 2100 bp, Artificial Sequence
  derived and/or modified sequence
atgagcagcaggaaggtgctggccatccaggccaggaagaggcggcccaagcgggagaagcaccccaagaagccagagccccagcagaaggcccccctggtgcccccacctcctcctcctcctcctcctcctcctccacccctgcctgaccccaccccacctgagcctgaggaggagatcctgggcagtgatgatgaggagcaggaggaccctgctgactactgcaagggcggctaccaccctgtgaagatcggggacctcttcaacggccgctaccacgtgatcaggaagctgggctggggccacttcagcacagtgtggctgtgctgggacatgcagggcaagagatttgtggccatgaaggtggtgaagagcgcccagcactacacagaaacagccctggatgagatcaagctgctgaagtgtgtgcgggagagtgaccccagcgaccccaacaaggacatggtggtgcagctgattgatgacttcaagatcagcggcatgaatggcatccacgtgtgcatggtgtttgaggtgctgggccaccacctgctgaagtggatcatcaagagcaactaccagggcctgcctgtgcgctgtgtgaagagcatcatccggcaggtgctgcagggcctggactacctgcacagcaagtgcaagatcatccacacagacatcaagccagagaacatcctgatgtgtgtggatgatgcctacgtgcggaggatggctgctgaggccacagagtggcagaaggccggggcccctcctccttctggcagcgctgtgtccacagccccccagcagaagcccatcggcaagatcagcaagaacaagaagaagaagctgaagaagaagcagaagaggcaggccgagctgctggagaagaggctgcaggagattgaggagctggagcgggaggccgagaggaagatcatcgaggagaacatcaccagcgctgcccccagcaatgaccaggatggagagtactgcccagaggtgaagctgaagaccaccggcctggaggaggccgctgaggccgagacagccaaggacaatggagaggccgaggaccaggaggagaaggaggatgctgagaaggagaacatcgagaaggatgaagatgatgtggaccaggagctggccaacatcgaccccacctggattgagagccccaagaccaacggccacattgaaaatggccccttcagcctggagcagcagctggatgatgaagatgatgatgaggaggactgccccaaccctgaggagtacaacctggatgagcccaatgctgagagtgactacacctacagcagcagctatgagcagttcaacggggagctgcccaacggccgccacaagatccctgagagccagtttcctgagttcagcaccagcctcttcagcggcagcctggagcctgtggcctgtggctctgtgctgtctgagggcagccccctgacagagcaggaggagagcagccccagccatgacaggagcaggacagtgtctgccagcagcactggagacctgcccaaggccaagaccagggctgctgacctgctggtgaaccccctggaccccagaaatgctgacaagatccgggtgaagattgctgacctgggcaatgcctgctgggtgcacaagcacttcacagaggacatccagacccggcagtaccgcagcattgaggtgctgattggagctggctacagcaccccagctgacatctggagcacagcctgcatggcctttgagctggccaccggggactacctgtttgagccccacagcggggaggactacagcagagatgaggaccacatcgcccacatcatcgagctgctgggcagcatccccaggcactttgccctgagcggcaagtacagccgggagttcttcaacagaagaggagagctgcggcacatcaccaagctgaagccctggagcctgtttgatgtgctggtggagaagtatggctggccccatgaagatgctgcccagttcacagacttcctgatccccatgctggagatggtgcctgagaagagggccagcgctggggagtgcctgcggcacccctggctgaacagctag

SEQ ID NO: 307574 - DNA, 3650 bp, Artificial Sequence
  derived and/or modified sequence
ggcggagcgagtggaggctgcagcccagctcgtctcggcgcccgcgtcgccgtcgcgaagccccccgccccgcttccgccgcgtcggaatgagctcccggaaagtgctggccattcaggcccgaaagcggaggccgaaaagagagaaacatccgaaaaagccggagcctcaacagaaagctcctttagttcctcctcctccaccgccaccaccaccaccaccgccacctttgccagaccccacacccccggagccagaggaggagatcctgggatcagatgatgaggagcaagaggaccctgcggactactgcaaaggtggatatcatccagtgaaaattggagacctcttcaatggccggtatcatgttattagaaagcttggatgggggcacttctctactgtctggctgtgctgggatatgcaggggaaaagatttgttgcaatgaaagttgtaaaaagtgcccagcattatacggagacagccttggatgaaataaaattgctcaaatgtgttcgagaaagtgatcccagtgacccaaacaaagacatggtggtccagctcattgacgacttcaagatttcaggcatgaatgggatacatgtctgcatggtcttcgaagtacttggccaccatctcctcaagtggatcatcaaatccaactatcaaggcctcccagtacgttgtgtgaagagtatcattcgacaggtccttcaagggttagattacttacacagtaagtgcaagatcattcatactgacataaagccggaaaatatcttgatgtgtgtggatgatgcatatgtgagaagaatggcagctgaggccactgagtggcagaaagcaggtgctcctcctccttcagggtctgcagtgagtacggctccacagcagaaacctataggaaaaatatctaaaaacaaaaagaaaaaactgaaaaagaaacagaagaggcaggctgagttattggagaagcgcctgcaggagatagaagaattggagcgagaagctgaaaggaaaataatagaagaaaacatcacctcagctgcaccttccaatgaccaggatggcgaatactgcccagaggtgaaactaaaaacaacaggattagaggaggcggctgaggcagagactgcaaaggacaatggtgaagctgaggaccaggaagagaaagaagatgctgagaaagaaaacattgaaaaagatgaagatgatgtagatcaggaacttgcgaacatagaccctacgtggatagaatcacctaaaaccaatggccatattgagaatggcccattctcactggagcagcaactggacgatgaagatgatgatgaagaagactgcccaaatcctgaggaatataatcttgatgagccaaatgcagaaagtgattacacatatagcagctcctatgaacaattcaatggtgaattgccaaatggacgacataaaattcccgagtcacagttcccagagttttccacctcgttgttctctggatccttagaacctgtggcctgcggctctgtgctttctgagggatcaccacttactgagcaagaggagagcagtccatcccatgacagaagcagaacggtttcagcctccagtactggggatttgccaaaagcaaaaacccgggcagctgacttgttggtgaatcccctggatccgcggaatgcagataaaattagagtaaaaattgctgacctgggaaatgcttgttgggtgcataaacacttcacggaagacatccagacgcgtcagtaccgctccatagaggttttaataggagcggggtacagcacccctgcggacatctggagcacggcgtgtatggcatttgagctggcaacgggagattatttgtttgaaccacattctggggaagactattccagagacgaagaccacatagcccacatcatagagctgctaggcagtattccaaggcactttgctctatctggaaaatattctcgggaattcttcaatcgcagaggagaactgcgacacatcaccaagctgaagccctggagcctctttgatgtacttgtggaaaagtatggctggccccatgaagatgctgcacagtttacagatttcctgatcccgatgttagaaatggttccagaaaaacgagcctcagctggcgaatgccttcggcatccttggttgaattcttagcaaattctaccaatattgcattctgagctagcaaatgttcccagtacattggacctaaacggtgactctcattctttaacaggattacaagtgagctggcttcatcctcagacctttattttgctttgaggtactgttgtttgacattttgctttttgtgcactgtgatcctggggaagggtagtcttttgtcttcagctaagtagtttactgaccattttcttctggaaacaataacatgtctctaagcattgtttcttgtgttgtgtgacattcaaatgtcatttttttgaatgaaaaatactttcccctttgtgttttggcaggttttgtaactatttatgaagaaatattttagctgagtactatataatttacaatcttaagaaattatcaagttggaaccaagaaatagcaaggaaatgtacaattttatcttctggcaaagggacatcattcctgtattatagtgtatgtaaatgcaccctgtaaatgttactttccattaaatatgggagggggactcaaatttcagaaaagctaccaagtcttgagtgctttgtagcctatgttgcatgtagcggactttaactgctccaaggagttgtgcaaacttttcattccataacagtcttttcacattggattttaaacaaagtggctctgggttataagatgtcattctctatatggcactttaaaggaagaaaagatatgtttctcattctaaaatatgcattataatttagcagtcccatttgtgattttgcatatttttaaaagtacttttaaagaagagcaatttccctttaaaaatgtgatggctcagtaccatgtcatgttgcctcctctgggcgctgtaagttaagctctacatagattaaattggagaaacgtgttaattgtgtggaatgaaaaaatacatatatttttggaaaagcatgatcatgcttgtctagaacacaaggtatggtatatacaatttgcagtgcagtgggcagaatacttctcacagctcaaagataacagtgatcacattcattccataggtagctttacgtgtggctacaacaaattttactagctttttcattgtctttccatgaaacgaagttgagaaaatgattttccctttgcaggttgcacacagttttgtttatgcatttccttaaaattaattgtagactccaggatacaaaccatagtaggcaatacaattttagaatgtaatatatagaggtatatttagcctcttttagaagtcagtggattgaatgtctttttattttaaattttacattcattaaggtgcctcgtttttgactttgtccattaacatttatccatatgcctttgcaataactagattgtgaaaagctaacaagtgttgtaacaataatccattgtttgaggtgcttgcagttgtcttaaaaattaaagtgttttggtttttttttttcca

SEQ ID NO: 307575 - DNA, 2067 bp, Artificial Sequence
  derived and/or modified sequence
atgagcgtgaacagcgagaagagcagcagcagcgagcggcccgagccccagcagaaagccccgctggtccctcctcctccgccgccccctcctcccccgcccccccctcttccagacccaacacccccagagcccgaggaagagattctggggagcgatgatgaggaacaggaggaccctgcggactactgcaaaggaggttatcaccccgtcaagatcggggaccttttcaatggccgctatcatgtgataagaaagctgggttggggccattttagcacagtttggttatgctgggatatgcaggggaagcgcttcgtggccatgaaagtcgtcaagtccgctcagcactacaccgaaacagcattggatgagatcaagctgctgaaatgtgtgagagagagtgatccaagtgatcctaataaggatatggtggtgcagctgattgatgattttaagattagtggaatgaatggaattcacgtctgtatggttttcgaagtcctcgggcaccacctgctgaaatggatcatcaaatccaactatcaaggcctgcccgtccgatgcgtaaagagtatcatacggcaggtactccagggtctcgattacctccatagtaaatgtaaaattattcacactgatattaagcccgagaacatcttaatgtgcgtcgatgacgcctacgtccgacgtatggccgctgaggcgacagagtggcaaaaagcaggggcacctcctccctcgggcagcgctgtgagcacagcaccacaacagaagcctatcgggaaaatttcaaaaaacaaaaagaagaagctgaagaagaaacagaagcgccaggcggagttattagagaaacggttacaggaaattgaggagctggagcgagaggccgaacgcaaaatcatcgaggaaaacatcaccagcgccgccccatctaatgaccaggacggggaatactgcccggaagtgaagcttaagacaacgggcctcgaggaagccgcagaggcagagactgcaaaagacaacggggaagcggaggatcaagaggagaaagaagatgctgagaaagaaaacattgagaaggacgaggacgacgtcgaccaggaactcgctaacatagacccaacttggatagaaagcccaaaaacaaatgggcatatcgagaatggcccgttttccctggagcagcagctcgatgacgaggatgatgatgaggaggactgtccaaatcccgaggagtataatctagatgaaccaaacgccgagtctgactacacttacagttcatcttatgaacaatttaacggtgaactccccaatggccgacacaagatccccgagtcccagttcccagagttttcaaccagcctgttctcgggctcactggagcccgtcgcttgtggctcagtgctctctgaaggatcccctctgacagagcaagaggaatcttcgccctctcatgatcgcagccgcaccgtgagtgccagctccaccggcgaccttcctaaagccaagaccagagctgcagatctgctcgtaaaccctctcgatccacggaacgcggataagatccgtgtgaaaatagccgatctgggtaacgcttgttgggtgcacaagcacttcactgaagatatacagacgcgccagtacaggtctatcgaggtcttgattggcgccggctacagcacacccgccgatatttggtctacggcctgtatggccttcgaactggcaactggggactatctttttgaaccccattctggcgaagactattcgcgagatgaggaccacatagcacatatcatcgagcttctggggtcaatacccaggcactttgcactgagtggcaaatattcaagagagttctttaatcgccgcggagagctccgtcatattaccaaactgaagccatggtctctctttgatgttctcgtggagaagtatggatggccacacgaagacgccgcccagtttacagacttcctgattccgatgctcgagatggtgcccgagaagcgggcgagcgccggagaatgtcttaggcatccttggctcaacagttag

SEQ ID NO: 307576 - DNA, 2100 bp, Artificial Sequence
  derived and/or modified sequence
atgagcagccggaaggtgctggccatccaggcccggaagcggcggcctaagcgagagaagcaccctaagaaaccggagccccagcagaaagcgccactcgtgcctcctcccccacctcctcctccacctcctcctccgcccttgcccgatccgacgccccctgagccagaggaggagatactaggaagcgacgacgaagagcaggaggatcctgcggactattgtaaaggtggctatcaccccgtgaagataggcgacttgtttaacggtagataccatgtgatcaggaagttgggctggggccatttcagcactgtttggctgtgctgggatatgcagggtaaacgatttgtcgccatgaaggtggtgaagtccgcacagcactatactgagactgctctagacgaaatcaagctgctcaagtgcgttagagaaagcgatccaagcgatccgaacaaagacatggtcgttcagcttatcgacgacttcaagatcagcggaatgaatggaatccatgtctgcatggtgtttgaagtgctcgggcatcacctgctgaaatggataataaagtcaaattaccaaggcttgcctgtgcggtgcgtcaagagcatcattaggcaagtgctgcagggcctggattatctgcactcaaaatgtaaaatcatccacaccgacatcaaacccgaaaacatcctcatgtgcgtggacgatgcctacgttcggagaatggccgcagaggctactgaatggcagaaagctggagcacctcctccaagtgggagtgctgtgtccactgccccccagcagaagcctatcggcaaaatatctaaaaataagaaaaagaagttgaaaaagaaacaaaagagacaggcggagctccttgagaaacgattacaagagatcgaagagctcgagagggaggcagaacgcaagattattgaggagaacattaccagcgctgcaccctctaatgaccaggatggggaatattgcccagaggtgaagctgaaaactaccggcctagaagaagccgcagaggctgagacagccaaagataacggggaggccgaggatcaggaggagaaagaggacgctgaaaaagaaaatatcgagaaagatgaggatgacgtggaccaggagctcgccaatatcgaccccacctggatcgagtctcctaagacaaacgggcatattgagaatggacccttttccctggaacagcagcttgacgacgaagatgacgatgaggaggactgccctaatcctgaggaatataacctggacgaaccaaatgctgaatcagactatacctattccagctcctatgagcagtttaacggcgagttgcccaatggtcggcacaagatcccagagagccagtttccagagttttcaacatccctgttctccggcagtctggaacctgttgcttgtggatcggtgctctccgaggggtcacctttgactgaacaggaagaaagctctccttcccatgaccgatccaggaccgttagcgccagtagtactggtgacctcccaaaagccaagactcgggcggctgacctgctggttaatccgctggatcccaggaatgcagataaaatccgggttaagattgccgatctcggcaacgcatgttgggtgcacaaacacttcaccgaggatatccagacccggcagtaccgctccatcgaagtgctgatcggtgccggatactctacaccagcagacatttggtccacagcttgtatggcattcgaactggccaccggggactatctcttcgaaccacattcaggtgaggactattctagagacgaggaccatatagcccacattatcgaattgttagggtctattccacgacattttgcattgagcggaaagtactctagagaatttttcaacaggaggggagagttgcggcacatcactaaactgaagccctggtcactcttcgacgtcctcgtggagaagtacggttggccgcacgaagatgctgcacagttcactgactttttgatccccatgctcgagatggtacctgagaagagagcttccgccggagagtgcctgcgccatccttggttgaacagctag

SEQ ID NO: 307577 - DNA, 2067 bp, Artificial Sequence
  derived and/or modified sequence
atgagcgtgaacagcgagaagagcagcagcagcgagcggcccgagccgcagcaaaaggctcccctggtaccccccccacctcccccccctccacctccacctccgccacttccagatcccacgccacctgaaccggaggaggagatcttaggaagtgacgatgaagaacaggaggatcccgcagactattgtaaggggggttatcaccctgtcaagattggggacctgtttaacggtagatatcacgtgatccggaagttagggtggggtcatttctcgacagtgtggctttgttgggatatgcagggcaaaaggtttgttgccatgaaagtggttaagtcggcacagcattataccgaaacagcactcgatgagatcaagcttttgaaatgtgttcgagagagcgacccatctgatcctaacaaagatatggtcgttcagttaatagatgattttaaaatctcaggcatgaacggtattcatgtgtgcatggtcttcgaggtgctcggtcatcacttgctgaaatggataataaagtccaactatcaggggctgcctgttaggtgcgtaaaaagtatcattagacaggtcttgcagggtctcgactacctacatagcaagtgcaagatcatccacacagacattaagcctgagaacatcctgatgtgcgttgacgatgcgtacgtcaggcgtatggctgctgaggcaaccgagtggcagaaggcgggcgctccccccccctcgggctctgcagtgtctactgccccgcagcagaagcccatcgggaagatcagtaaaaataaaaaaaagaaactgaagaagaagcagaagaggcaggccgagctgctggagaagaggcttcaggagatagaagagctggagagagaggccgaaagaaaaatcattgaagaaaacataacaagcgcagcaccctcgaatgatcaggacggggaatattgtccggaagttaagctgaagactacaggcctggaggaagcagcggaagcggagaccgccaaagataatggtgaagcagaggaccaagaagaaaaggaggatgccgaaaaagagaacatcgaaaaagacgaggatgacgtagatcaagaactggcgaatattgaccccacctggattgaatctcctaaaacaaacggtcacatcgagaacgggccgttttctctcgaacagcagttggatgacgaggatgacgatgaggaggactgccccaacccagaagagtacaatctggatgaacccaatgctgagagcgattacacatattctagctcgtacgagcagttcaacggggaattgcctaatggccgccacaagatccccgagagtcagttccctgagtttagcacaagccttttctccggatccctggagccagtagcgtgtggctcagttctttctgagggatcccccctcaccgaacaggaagagtctagtcccagccatgatcggtcacgcaccgtgtctgcgtccagcactggcgatctgcctaaggccaaaaccagggcggctgacttgcttgttaatcccttggatcccagaaacgccgataaaatccgcgtaaagatcgcagatctgggcaacgcgtgctgggtccataagcacttcaccgaggacatccagactcgacagtatagatctatcgaggtacttatcggggcaggatattcaacacctgcggacatctggtctactgcttgtatggctttcgaacttgcaacaggtgattacctttttgaaccacactccggcgaggactactccagggatgaggatcatatcgctcacatcatcgagctgctggggagcatccctcggcattttgctctatccgggaagtactctcgtgagttcttcaatagacgcggagaattgcggcacatcactaaactgaagccgtggtcccttttcgatgtcctggtcgaaaaatacggttggccccacgaggacgcagcccaattcacagactttctcatccctatgctggagatggtgcccgaaaaaagagcatcagccggcgaatgtctgaggcatccttggctgaactcatag

SEQ ID NO: 307578 - DNA, 2067 bp, Artificial Sequence
  derived and/or modified sequence
atgtctgtcaacagcgagaagtccagcagcagtgagcggcctgagcctcagcagaaggctccattagtcccaccccctccgccaccccctccgcctcctcccccacctttgccggatccgacacctcccgaacccgaggaggagatcttggggtctgacgacgaagagcaggaggaccccgctgattattgtaaaggaggctaccaccccgtaaagataggtgacctcttcaacggtcgttaccatgtcatcagaaaactgggctggggccatttcagcacggtgtggctgtgctgggatatgcagggcaaacgatttgtggctatgaaagtggttaagagtgctcagcactatacagaaacagctctggacgaaataaaactgctgaagtgtgttcgggagagcgatccatccgacccaaacaaggatatggtggtgcagctgatcgacgactttaaaatatctgggatgaacgggattcatgtctgcatggtatttgaggtgctggggcaccatcttctcaaatggattataaaatctaactatcagggcctccccgttcgatgcgtcaagtcaattattcgccaagtacttcagggcctggactatcttcacagtaagtgcaaaatcatccacacagacattaaacctgaaaatattttgatgtgtgtggatgacgcctacgtgagacgaatggctgccgaggccacggaatggcagaaagcaggagcacccccacctagcggctccgccgtttcaacagcaccccagcaaaaacccattgggaaaatctccaaaaacaagaagaaaaagctgaaaaaaaaacaaaaacggcaggccgaactactcgaaaaacgcctgcaggagattgaagagctggagcgagaagctgaaaggaagattattgaagaaaacatcacatctgcagccccatctaatgaccaggatggagagtattgccccgaggtgaagttaaaaaccacaggactggaagaagcagcggaagcagagacggccaaggataatggcgaggctgaggaccaagaggaaaaagaagacgcagaaaaagagaacattgagaaagacgaggacgacgtcgatcaagagcttgctaacatcgatcccacctggatcgaaagccctaaaacaaatggccacattgaaaacgggcctttcagcctggagcaacaactcgacgacgaggatgatgatgaggaggattgtcctaatcctgaggaatacaacctggatgagcctaacgctgaatccgactatacctatagtagctcctacgagcagttcaacggtgagcttcctaatggcagacataagatccccgaatcacagttcccggaattctccacctcattgttcagtggttcactggagccagtagcatgcggctccgtgttgtctgaggggtcgccccttactgagcaagaggagagcagcccaagccatgacaggagtcgtaccgtaagcgcgtcaagcactggcgatctgcccaaggcaaaaactcgagccgcagatctgctggtgaaccccctggacccccgaaacgccgacaagatcagggtcaagattgctgacctcgggaatgcatgctgggtccataagcacttcaccgaagacattcagaccagacagtatcgtagcatcgaggtgctgattggagcagggtatagcaccccagcagatatttggagcaccgcatgcatggcattcgagcttgcaactggagattacttgttcgagcctcactctggcgaggactacagtcgcgatgaagaccacattgctcatattatcgagctgctgggatcaatcccgaggcatttcgccctgtccggtaaatacagtcgagagttttttaatcgcagaggggagcttagacacataaccaagctgaaaccgtggtctctgttcgacgtattggttgagaaatatggctggccccacgaggacgcagcacagttcaccgacttcctcatccctatgctcgaaatggttccagagaagagagcatcagctggtgaatgcctgcggcatccatggctgaactcctag

SEQ ID NO: 307579 - DNA, 2100 bp, Artificial Sequence
  derived and/or modified sequence
atgagtagcagaaaggtgctcgccattcaagcacgcaaacgacggcctaagagggaaaaacatcctaagaagccagaacctcagcaaaaggcccctttagttccccctccccctccacccccacctccacctccgccacctttaccagacccgacgccacctgagccggaagaggagatcctgggaagcgacgatgaagaacaggaggaccctgccgattactgcaagggagggtaccatccagtgaagatcggagacttgttcaacggcaggtaccacgttataagaaaactcgggtggggtcatttcagcaccgtgtggttgtgttgggatatgcaggggaaacgctttgtggccatgaaggtggttaagtccgcgcagcactataccgagacagccctggacgagatcaagctgctgaaatgcgtgcgagagtcagacccgtcagatcctaacaaggacatggtggtgcagttaattgacgacttcaaaatcagtggtatgaatggcatacatgtatgtatggtgtttgaggtcctcgggcatcaccttcttaagtggattattaagtccaactaccagggcttgccagtgagatgtgtcaagagtatcatacgccaggtcttgcagggcttggattatctgcattccaagtgtaagattatacacacggatatcaaacctgagaacattttgatgtgtgtggatgacgcatacgtgagacgaatggcagccgaagccactgaatggcagaaggctggagcaccacccccatcagggtcggccgtcagtaccgcccctcagcaaaagcctatcggaaagattagcaaaaacaagaagaagaagttaaagaagaaacagaagcgacaagccgagttactcgagaagagacttcaggaaatagaagaactggaaagagaagccgaaagaaaaattattgaggagaatatcaccagtgcagctccgagcaacgatcaggacggagaatactgccccgaggtcaaacttaaaacgacaggacttgaggaggctgcggaagctgagactgctaaagacaatggcgaggctgaggaccaggaggaaaaggaagatgccgaaaaggaaaatattgaaaaggacgaagacgacgtagatcaggaactggcaaacatagaccctacgtggatagagagtccaaagacaaacggtcatatagagaacggccctttctctttggaacaacagcttgatgacgaggatgatgatgaagaggattgtccgaatcccgaggagtacaacctcgacgaaccaaatgccgagtcagattacacctactcctccagctatgaacagttcaatggcgaattgcccaacggcaggcacaaaatcccagagtctcagtttccagagttttctactagtttgtttagtggctctctggagcctgtcgcctgcggctcagtgctcagtgagggaagccctctgacagagcaagaagaatcctcccccagccacgatagatcgagaaccgttagcgcttctagtaccggggatctacccaaggcaaagactcgggctgccgatctgcttgtgaatcccctggatcccagaaacgctgataagattagagtgaagatagccgacttggggaatgcctgttgggttcataagcactttacagaggatatacagacaaggcaataccggtcaattgaagtgcttataggagcaggatacagtactcctgcggacatctggagtaccgcatgtatggccttcgagctggctaccggggactacctttttgaaccccattctggcgaggattactcaagagacgaggaccacatcgctcacataatcgaactactaggtagcattccaagacactttgcactcagcggaaaatatagtcgcgaattctttaacaggaggggagaactcagacatataactaagctgaagccttggagcttgttcgacgtgctcgtcgaaaaatacgggtggccacacgaggatgctgctcaattcaccgattttttaatcccgatgctagagatggtacccgaaaagcgagctagcgctggcgaatgtctgaggcacccatggcttaattcatag

SEQ ID NO: 307580 - DNA, 2067 bp, Artificial Sequence
  derived and/or modified sequence
atgtcagtcaacagtgagaaaagtagttcttcagaaagacctgagcctcaacaaaaggcgccacttgtcccaccgccaccacccccaccccctcccccacctccaccgctccccgatcctactcccccagagcccgaggaagaaatcctgggctctgatgacgaggagcaggaagatcccgctgattactgcaagggaggctatcatcctgtcaaaattggtgatctgtttaacggcaggtatcacgttataagaaagctcggctggggccatttctcgacagtatggttgtgctgggacatgcaggggaaaagattcgtggccatgaaagtggtcaagagtgcccagcactatacagagaccgcactcgacgaaataaagctccttaagtgcgtccgggagagcgatccctccgaccccaataaagatatggtcgtgcaactgattgatgacttcaaaatttccggaatgaacggcatccacgtgtgtatggtcttcgaagtgcttgggcaccacctgctgaagtggatcataaagtctaattatcaaggcctccctgtgagatgcgtgaaatctattattcggcaggtcctccagggacttgactatttgcactctaagtgcaaaattatacataccgacattaaacctgagaatattctgatgtgcgtggatgacgcttatgttcgcagaatggctgcggaggcaacagagtggcagaaggccggagcaccccctccttctgggtcagccgtgtcaaccgctcctcagcagaagccaatcggaaaaatctcaaagaacaagaaaaaaaaattgaagaaaaagcagaagcgacaggctgaattgttagaaaaacgactgcaggagatagaggagctggaaagggaggcagaacgtaagatcatcgaggagaacataacttctgcagctccatccaacgaccaagatggagaatactgtcctgaagtcaaactcaaaacaacaggcctggaggaagccgctgaggccgaaactgctaaagacaacggggaagcagaagaccaagaggaaaaggaggacgcagaaaaggagaacattgaaaaggacgaagatgacgttgatcaagaactagccaatattgatcccacttggatcgagagcccgaaaacaaatgggcacattgaaaatggaccatttagcctcgagcagcagttagacgacgaagatgacgatgaggaggactgccccaatcctgaagagtacaatctcgatgagccgaacgcagaaagcgactatacatactcctcttcctatgagcaattcaacggtgagcttccaaacgggcgacataaaatccctgagtctcaattccctgaattctctacatccctgttctccggttctctcgaaccagttgcatgcggcagcgtgttatccgaagggtctccgctgacggaacaggaagaaagttccccttcgcacgacagaagcaggactgtatccgcatcaagcaccggcgatcttcctaaagccaagacaagggcggctgatttattggttaatcctttggaccctcgaaatgccgataagatccgggtgaagatcgccgatctcggtaacgcatgttgggtgcataagcactttacagaggatatccaaacccggcagtaccggtcaatcgaagtgctgataggcgcagggtacagtacacccgctgacatctggagcaccgcctgtatggcctttgaactggcgacaggcgattatctcttcgagccacatagtggggaggattacagtcgcgatgaagatcatatcgctcatattatcgagctgctgggcagcattccacgacattttgccttgagcggcaagtactccagggaattttttaaccgccgtggagagctccgacacataactaaacttaagccatggtccttgtttgatgtactggtggagaaatatgggtggccccatgaggacgccgctcagtttactgacttcttgattcctatgttggaaatggtgcctgaaaagagagcatcagccggagaatgcctccggcacccctggctgaactcctag

SEQ ID NO: 307581 - DNA, 2560 bp, Artificial Sequence
  derived and/or modified sequence
gttggagtgggccctgtgcctctgctgtctcctactgctaacgagtgaacaaccaaggcgatgggctgtaggatgttgatacatctgaggggccagatggccaccatatcagggaaagccaatgtgttttgaaaaatatgcaaatgttcaataagaaatcaagcagaagattgagctgctgatgtcagttaactctgagaagtcgtcctcttcagaaaggccggagcctcaacagaaagctcctttagttcctcctcctccaccgccaccaccaccaccaccgccacctttgccagaccccacacccccggagccagaggaggagatcctgggatcagatgatgaggagcaagaggaccctgcggactactgcaaaggtggatatcatccagtgaaaattggagacctcttcaatggccggtatcatgttattagaaagcttggatgggggcacttctctactgtctggctgtgctgggatatgcaggggaaaagatttgttgcaatgaaagttgtaaaaagtgcccagcattatacggagacagccttggatgaaataaaattgctcaaatgtgttcgagaaagtgatcccagtgacccaaacaaagacatggtggtccagctcattgacgacttcaagatttcaggcatgaatgggatacatgtctgcatggtcttcgaagtacttggccaccatctcctcaagtggatcatcaaatccaactatcaaggcctcccagtacgttgtgtgaagagtatcattcgacaggtccttcaagggttagattacttacacagtaagtgcaagatcattcatactgacataaagccggaaaatatcttgatgtgtgtggatgatgcatatgtgagaagaatggcagctgaggccactgagtggcagaaagcaggtgctcctcctccttcagggtctgcagtgagtacggctccacagcagaaacctataggaaaaatatctaaaaacaaaaagaaaaaactgaaaaagaaacagaagaggcaggctgagttattggagaagcgcctgcaggagatagaagaattggagcgagaagctgaaaggaaaataatagaagaaaacatcacctcagctgcaccttccaatgaccaggatggcgaatactgcccagaggtgaaactaaaaacaacaggattagaggaggcggctgaggcagagactgcaaaggacaatggtgaagctgaggaccaggaagagaaagaagatgctgagaaagaaaacattgaaaaagatgaagatgatgtagatcaggaacttgcgaacatagaccctacgtggatagaatcacctaaaaccaatggccatattgagaatggcccattctcactggagcagcaactggacgatgaagatgatgatgaagaagactgcccaaatcctgaggaatataatcttgatgagccaaatgcagaaagtgattacacatatagcagctcctatgaacaattcaatggtgaattgccaaatggacgacataaaattcccgagtcacagttcccagagttttccacctcgttgttctctggatccttagaacctgtggcctgcggctctgtgctttctgagggatcaccacttactgagcaagaggagagcagtccatcccatgacagaagcagaacggtttcagcctccagtactggggatttgccaaaagcaaaaacccgggcagctgacttgttggtgaatcccctggatccgcggaatgcagataaaattagagtaaaaattgctgacctgggaaatgcttgttgggtgcataaacacttcacggaagacatccagacgcgtcagtaccgctccatagaggttttaataggagcggggtacagcacccctgcggacatctggagcacggcgtgtatggcatttgagctggcaacgggagattatttgtttgaaccacattctggggaagactattccagagacgaagaccacatagcccacatcatagagctgctaggcagtattccaaggcactttgctctatctggaaaatattctcgggaattcttcaatcgcagaggagaactgcgacacatcaccaagctgaagccctggagcctctttgatgtacttgtggaaaagtatggctggccccatgaagatgctgcacagtttacagatttcctgatcccgatgttagaaatggttccagaaaaacgagcctcagctggcgaatgccttcggcatccttggttgaattcttagcaaattctaccaatattgcattctgagctagcaaatgttcccagtacattggacctaaacggtgactctcattctttaacaggattacaagtgagctggcttcatcctcagacctttattttgctttgaggtactgttgtttgacattttgctttttgtgcactgtgatcctggggaagggtagtcttttgtcttcagctaagtagtttactgaccattttcttctggaaacaataacatgtctctaagcattgtttcttgtgttgtgtgacattcaaatgtcatttttttgaatgaaaaatactttcccct

SEQ ID NO: 307582 - protein, 160 aa, Artificial Sequence [sequence omitted]

SEQ ID NO: 307583 - DNA, 666 bp, Artificial Sequence
  derived and/or modified sequence
ggcggagcgagtggaggctgcagcccagctcgtctcggcgcccgcgtcgccgtcgcgaagccccccgccccgcttccgccgcgtcggaatgagctcccggaaagtgctggccattcaggcccgaaagcggaggccgaaaagagagaaacatccgaaaaaaaatcaagcagaagattgagctgctgatgtcagttaactctgagaagtcgtcctcttcagaaaggccggagcctcaacagaaagctcctttagttcctcctcctccaccgccaccaccaccaccaccgccacctttgccagaccccacacccccggagccagaggaggagatcctgggatcagatgatgaggagcaagaggaccctgcggactactgcaaaggtggatatcatccagtgaaaattggagacctcttcaatggccggtatcatgttattagaaagcttggatgggggcacttctctactgtctggctgtgctgggatatgcaggggaaaagatttgttgcaatgaaagttgtaaaaagtgcccagcattatacggagacagccttggatgaaataaaattgctcaaatgtgttcgagaaagtgatcccagtgacccaaacaaagacatggtggtccagctcattgacgacttcaagatttcaggcatgaatgggatac

SEQ ID NO: 307584 - DNA, 516 bp, Artificial Sequence
  derived and/or modified sequence
atgaaggacagaacccaggagctgagaaccgccaaggacagcgacgacgacgacgacgtggccgtgaccgtggacagagacagattcatggacgagttcttcgagcaggtggaggtgatgagcgagtacaacgccacccagagcgactacagagagagatgcaagggcagaatccagagacagctggagatcaccggcagaaccaccaccagcgaggagctggaggacatgctggagagcggcaaccccgccatcttcgccagcggcatcatcatggacagcagcatcagcaagcaggccctgagcgagatcgagaccagacacagcgagatcatcaagctggagatcgagtacaacgtggagcacgccgtggactacgtggagagagccgtgagcgacaccaagaaggccgtgaagtaccagagcaaggccagaagaaagaagatcatgatcatcatctgctgcgtgatcctgggcatcgtgatcgccagcaccgtgggcggcatcttcgcctag

SEQ ID NO: 307585 - DNA, 516 bp, Artificial Sequence
  derived and/or modified sequence
atgaaggacagaacacaagagctgaggactgccaaggactctgacgatgatgatgacgtcgcagtcacagtggatagagacaggttcatggacgagttctttgaacaagtcgaggtaatgagtgagtacaacgccacccagagtgactaccgagagcgctgcaagggacgaatccagcggcagctggaaatcacaggtaggaccacaaccagcgaggagcttgaggatatgcttgaatctggtaaccccgccattttcgctagcggcatcattatggacagttccatcagcaagcaagctctgtctgaaatagaaacaaggcactcggagattattaagttggagatagaatacaatgtagagcatgccgttgactatgtagagagagccgtgtccgacaccaagaaagccgtgaaatatcaaagtaaagccagaaggaagaaaatcatgattataatctgctgtgtaatattaggtattgtcattgcttccacagttggaggcatctttgcatag

SEQ ID NO: 307586 - DNA, 516 bp, Artificial Sequence
  derived and/or modified sequence
atgaaggacaggacccaggagctgaggacagccaaggacagtgatgatgatgatgatgtggccgtgacagtggaccgggaccgcttcatggatgagttctttgagcaggtggaggtgatgtctgagtacaatgccacccagagcgactaccgggagcgctgcaagggccgcatccagaggcagctggagatcactggaagaaccaccaccagcgaggagctggaggacatgctggagagcggcaacccagccatctttgccagcggcatcatcatggacagcagcatcagcaagcaggccctgtctgaaattgagaccaggcacagcgagatcatcaagctggagattgagtacaacgtggagcacgctgtggactatgtggagagagctgtgtctgacaccaagaaggctgtgaagtaccagagcaaggcccggaggaagaagatcatgatcatcatctgctgcgtcatcctgggcatcgtcatcgccagcacagtgggcggcatctttgcctag

SEQ ID NO: 307587 - DNA, 516 bp, Artificial Sequence
  derived and/or modified sequence
atgaaggaccggacccaggagctgcggaccgccaaggacagcgacgatgacgatgatgtcgctgtgactgtcgatcgggaccgtttcatggatgaatttttcgagcaggtcgaggtgatgtccgagtataacgcgacacagagtgactaccgcgaacgctgtaaaggacggattcagcggcagttggagataacggggcgtaccaccacatccgaagagctcgaggatatgctcgaatccggcaatccagccatatttgcatctggaatcattatggacagctctatcagcaagcaggccctgtcagagattgaaacgagacactccgagataattaaactggaaattgaatataacgtggagcatgctgtagactacgttgaacgagccgtctccgatactaagaaggctgtgaaatatcagagcaaagcccgccgaaaaaagataatgattatcatttgctgtgttatactggggatcgtcatcgccagtaccgtaggaggtatctttgcatag

SEQ ID NO: 307588 - DNA, 516 bp, Artificial Sequence
  derived and/or modified sequence
atgaaagatagaacacaagagttacgcaccgcgaaggattccgacgacgacgatgacgtggctgtcaccgtcgaccgggaccgctttatggacgagtttttcgagcaggtggaagtgatgagtgagtacaacgcgacgcagagcgactatcgggagagatgcaagggacgtattcagaggcagttggagatcacaggccgtaccaccacatcagaggagcttgaggacatgctcgagtctggcaatcccgctatctttgcctcaggaataattatggatagctctatctctaaacaagctttgtccgagattgagactcggcactctgaaattataaaactggagattgaatataatgtcgagcacgctgttgactatgtggagcgagctgtgtctgacacaaaaaaagccgtgaagtatcaatctaaggctagacggaagaaaatcatgatcattatttgctgcgtgatcctgggcattgtcattgcgagtacagttggaggtatcttcgcctag

SEQ ID NO: 307589 - DNA, 1774 bp, Artificial Sequence
  derived and/or modified sequence
gtcgcgcatgcggggctcacacggctgcagccggcgccgctgccactcccgggagcatgaaggaccgaacccaggagctccgcacggccaaggacagcgatgatgatgatgatgtcgctgtcaccgtggaccgagaccgcttcatggatgagttctttgagcaggtggaggtcatgtcggagtacaacgccacgcagtccgactaccgcgagcgctgcaaaggccgcatccagaggcagctggagatcaccggcaggaccacgaccagtgaggagctggaggacatgctggagagtgggaaccccgccatctttgcctctgggatcatcatggactccagcatctcgaagcaggctctgagcgagattgagacgcggcacagtgagatcatcaagctggagatcgagtacaatgtggaacacgcggtagactatgtggagagggccgtgtctgacaccaagaaggccgtcaagtaccagagcaaggcgcgccggaagaaaatcatgatcatcatctgctgtgtgatcctgggcatcgtcatcgcctccactgttgggggcatcttcgcctagaagccacccaaactgccactccactccaggtgggccactccaaggaggccctggctgctgccacctggctgggctgccctcccaacccccgcctctggctcagagcaccctccctcccggcccccatgctcccttctctgccatgggccctccgtccccgccccgtgtcgtgtgcatgatctctgtgagtgtgcgtctgtacgggaagaggcagagggaggcagccagcggggcgtgatgcagtgtgcacagcgaggagcagacccaggcagggccgccagggtgacacaggccacccttccttgccttcagtaactcggtgggcccaggttctgctcttccctggggaccctaacctcgcctccagctgacctgccctgtcctctccagctgtccccacaagcagagccctgaggggtggggaccagctggccacatggtgctgcttttcaggttaggggagaggtggccctgagggacagcccagctctgagtctcagtcgctgatcactgccagggaggctcaggctgccatggctccaggctccctcccctgcctaggggcaaagtccatcgggtcctgggcctcagcttcccttcccacattcctccggccccaggagcaaccccttgggctaggtctgaccccaggtgtccctctggaaggggctggctggtgccctatttccagccaccccagcagctagggaggcaaagcaggctgcagtcagtccctcaagccagcgttgcatgtttgggatggtggctcctgttgtcttgcgctctgggaagtcagatgtcatttcaggcctgcagtctcatcctgcccttgccatcctcccatcgatgtgccacgtgggtgtcacgtgtcccagatgcagtattcggcagccagccggggagggctacctcctcctcctcaccaccttggggcttctcatgggaaatgtgcccccgccccaggaccctctcccttgtggacaggcagggagatgcatgcgagtgcatgcagcaggggatggggccgtgtccgtgtgccccaccctccctcggctttactcctgcccagtgactgtgaccactgtccgtgttgccttcttgaacagcgattccccccaaccccttcaccaaaggtcttggtacaaccagctgcccattttgtgaaatttttatgtagaataaacatttgtatctgtaccagg

SEQ ID NO: 307590 - protein, 476 aa, Artificial Sequence
  derived and/or modified sequence
MSGPTWLPPKQPEPARAPQGRAIPRGTPGPPPAHGAALQPHPRVNFCPLPSEQCYQAPGGPEDRGPAWVGSHGVLQHTQGLPADRGGLRPGSLDAEIDLLSSTLAELNGGRGHASRRPDRQAYEPPPPPAYRTGSLKPNPASPLPASPYGGPTPASYTTASTPAGPAFPVQVKVAQPVRGCGPPRRGASQASGPLPGPHFPLPGRGEVWGPGYRSQREPGPGAKEEAAGVSGPAGRGRGGEHGPQVPLSQPPEDELDRLTKKLVHDMNHPPSGEYFGQCGGCGEDVVGDGAGVVALDRVFHVGCFVCSTCRAQLRGQHFYAVERRAYCEGCYVATLEKCATCSQPILDRILRAMGKAYHPGCFTCVVCHRGLDGIPFTVDATSQIHCIEDFHRKFAPRCSVCGGAIMPEPGQEETVRIVALDRSFHIGCYKCEECGLLLSSEGECQGCYPLDGHILCKACSAWRIQELSATVTTDC

SEQ ID NO: 307591 - DNA, 660 bp, Artificial Sequence
  derived and/or modified sequence
atgccgggcccacttcgcggccagcatttctacgccgtggagaggagggcatattgcgagggctgctacgtggccaccctggagaaatgtgccacgtgctcccagcccatcctggaccggatcctgcgggctatggggaaggcctaccaccctggctgcttcacctgcgtggtgtgtcaccgcggcctcgacggcatccccttcacagtggatgctacgagccagatccactgcattgaggactttcacaggaagtttgccccaagatgctcagtgtgcggtggggccataatgcctgagccaggtcaggaggagactgtgagaattgttgctctggatcgaagttttcacattggctgttacaagtgcgaggagtgtgggctgctgctctcctctgagggcgagtgtcagggctgctacccgctggatgggcacatcttgtgcaaggcctgcaggcctggcgcatccaggagctctcagccaccgtcaggactgactgctgagtcttccatgaagtacctgctgggttctcagttccagttcccatcctttgattgatcactctccctgacatccacctgtatgactttgtcaccaaatgctgtcttctctttctccaatcaagaaataataatccctcgagtttacaaaacaaaaaaa

SEQ ID NO: 307592 - DNA, 636 bp, Artificial Sequence
  derived and/or modified sequence
atgttgcgacagtcctgttcgtttcccgtcacaagtctgcctgccctcgggggtgtttgtggccgcgagggagccggcgccgaggttccccctgcagcgtgcggctgcgaggggagagatcctgatacagaaagaagttgtggtaggagctccactggggggtgttctccgtgtagcggcccaggtccatcgagccctaggacatccagaggtgccctatctccgtctttaggccgcttgttcccacacctgcaggttgttataaaactgcgtatccagttagcccccgccgtccatctggccctgcctacatgctcactgctgacgtcctcccctccgctggagggctgttgccaccgtctaaacgaggaggccgaggtccaacgtgggttccgacctatcgccgtggagctcgaattcgagaaccagcccctcggcgcagagaccaggttgaggaatgggaggagggccggcgtgaagcgttctgaagggagggggcaggtgcgtcctgggcaagtgcgctccaccggcccggagggggggctcaccagaatggagaggaaggccgcaagactgcagtgggatagcggcagcattaagatgtctgagaatgagcagctgtgggaagaaccttag

SEQ ID NO: 307593 - DNA, 1431 bp, Artificial Sequence
  derived and/or modified sequence
atgagcggccccacctggctgccccccaagcagcccgagcccgccagagccccccagggcagagccatccccagaggcacccccggccccccccccgcccacggcgccgccctgcagccccaccccagagtgaacttctgccccctgcccagcgagcagtgctaccaggcccccggcggccccgaggacagaggccccgcctgggtgggcagccacggcgtgctgcagcacacccagggcctgcccgccgacagaggcggcctgagacccggcagcctggacgccgagatcgacctgctgagcagcaccctggccgagctgaacggcggcagaggccacgccagcagaagacccgacagacaggcctacgagcccccccccccccccgcctacagaaccggcagcctgaagcccaaccccgccagccccctgcccgccagcccctacggcggccccacccccgccagctacaccaccgccagcacccccgccggccccgccttccccgtgcaggtgaaggtggcccagcccgtgagaggctgcggcccccccagaagaggcgccagccaggccagcggccccctgcccggcccccacttccccctgcccggcagaggcgaggtgtggggccccggctacagaagccagagagagcccggccccggcgccaaggaggaggccgccggcgtgagcggccccgccggcagaggcagaggcggcgagcacggcccccaggtgcccctgagccagccccccgaggacgagctggacagactgaccaagaagctggtgcacgacatgaaccacccccccagcggcgagtacttcggccagtgcggcggctgcggcgaggacgtggtgggcgacggcgccggcgtggtggccctggacagagtgttccacgtgggctgcttcgtgtgcagcacctgcagagcccagctgagaggccagcacttctacgccgtggagagaagagcctactgcgagggctgctacgtggccaccctggagaagtgcgccacctgcagccagcccatcctggacagaatcctgagagccatgggcaaggcctaccaccccggctgcttcacctgcgtggtgtgccacagaggcctggacggcatccccttcaccgtggacgccaccagccagatccactgcatcgaggacttccacagaaagttcgcccccagatgcagcgtgtgcggcggcgccatcatgcccgagcccggccaggaggagaccgtgagaatcgtggccctggacagaagcttccacatcggctgctacaagtgcgaggagtgcggcctgctgctgagcagcgagggcgagtgccagggctgctaccccctggacggccacatcctgtgcaaggcctgcagcgcctggagaatccaggagctgagcgccaccgtgaccaccgactgctag

SEQ ID NO: 307594 - DNA, 1431 bp, Artificial Sequence
  derived and/or modified sequence
atgagtgggccaacctggcttccaccaaagcagcccgagccagcccgggcccctcagggaagggctataccccggggcacaccaggtccgcctcccgcgcacggcgctgctctgcaaccccatccaagagttaacttctgccctctccctagcgaacaatgttaccaggctcctggcggcccagaggatcggggtccagcatgggtcggatcccacggggtcctccagcatacacaaggcctcccagcagaccgagggggacttcgccctggtagcctggacgcagagattgacctgctaagctcaactctggccgaactcaacggaggacggggccacgccagtcgtagacccgatcgccaggcttatgaaccaccacctcctcccgcttataggaccggatctctgaaacccaatcctgccagccccctacctgcttctccctacggcggtcccactcctgcaagctacaccactgcctctactccagccggaccagccttcccagtgcaggtgaaggtggctcagccagtgcgcggatgtggcccaccgagacgcggcgccagccaggcaagtggacccctccctggtcctcacttcccgttgccaggacgcggtgaagtttggggacccggttatcgaagtcaacgcgagcctggacctggcgccaaggaagaggccgccggcgtcagcggccccgcaggacgaggccgtggaggcgaacatggaccccaagtccccctgtcacagccgcccgaggatgagctggataggctgacaaaaaagcttgtgcacgacatgaaccacccccccagcggagagtattttggccaatgtggtggctgcggcgaggacgtggtgggcgacggggctggcgttgtggcgctggatcgggtcttccatgtgggttgcttcgtgtgcagcacttgcagggcacagctccggggacagcatttctacgcagtcgagcgcagggcctactgtgaaggctgctacgttgcaacccttgagaagtgtgccacctgtagccagcccatcctcgaccgcatactgcgcgctatgggtaaggcctatcatcctgggtgtttcacatgcgtggtgtgccacagaggactggatggcataccgttcaccgttgatgccacttctcaaatccactgcattgaggatttccacagaaaattcgctccaagatgttcagtctgtggaggagctatcatgcctgagcctggccaagaagagactgtgagaatcgttgccctcgacaggtcatttcacataggctgctacaaatgcgaggaatgtgggctgctgctttctagcgaaggcgaatgtcaggggtgttacccattggatggacacatcttgtgcaaggcctgttctgcatggcgtatacaagaactaagcgcaacagtgactaccgattgttag

SEQ ID NO: 307595 - DNA, 1431 bp, Artificial Sequence
  derived and/or modified sequence
atgagcggccccacctggctgccccccaagcagcctgagcccgcccgggccccccagggccgggccatcccccggggcaccccaggccccccaccagcccacggggccgccctgcagccccacccccgggtgaacttctgccccctgcccagcgagcagtgctaccaggcccctgggggccctgaggaccggggccctgcctgggtgggcagccacggcgtgctgcagcacacccagggcctgcctgctgaccggggcggcctgcggcccggcagcctggatgctgagattgacctgctgagcagcaccctggccgagctgaatggaggccggggccacgccagccggcggccagaccggcaggcctatgagcccccacctcctccagcctacagaacaggcagcctgaagcccaacccagccagccccctgcctgccagcccctatggaggccccaccccagccagctacaccacagccagcaccccagctggccctgccttccctgtgcaggtgaaggtggcccagcctgtgcggggctgcggccccccaagaagaggagccagccaggccagcggccccctgcccggcccccacttccccctgcccggccgcggggaggtgtggggccctggctaccgcagccagcgggagcccggccctggggccaaggaggaggccgccggcgtgtctggccctgctggccggggccggggcggggagcacggcccccaggtgcccctgagccagcccccagaagatgagctggaccggctgaccaagaagctggtgcatgacatgaaccacccccccagcggggagtacttcggccagtgtggcggctgtggggaggatgtggtgggagatggagctggggtggtggccctggacagagtcttccacgtgggctgctttgtgtgcagcacctgccgggcccagctgcggggccagcacttctatgctgtggagcggcgggcctactgtgagggctgctacgtggccaccctggagaagtgtgccacctgcagccagcccatcctggaccgcatcctgcgggccatgggcaaggcctaccaccctggctgcttcacctgtgtggtgtgccaccggggcctggatggcatccccttcaccgtggatgccaccagccagatccactgcatcgaggacttccacaggaagtttgccccccgctgcagcgtgtgtggcggggccatcatgcctgagcccggccaggaggagaccgtgcgcatcgtggccctggacaggagcttccacatcggctgctacaagtgtgaggagtgtggcctgctgctgagcagcgagggggagtgccagggctgctaccccctggatggccacatcctgtgcaaggcctgcagcgcctggaggatccaggagctgagcgccaccgtgaccacagactgctag

SEQ ID NO: 307596 - DNA, 1431 bp, Artificial Sequence
  derived and/or modified sequence
atgagcggccccacctggctgccccccaagcagcccgagcccgcccgcgccccccaaggccgagctattccaaggggcacccccgggccgccacccgctcacggcgcagcccttcagccccaccctagagtaaatttttgtccgttgccatctgaacagtgttaccaggccccagggggcccagaggatcggggacccgcttgggtggggtcccacggtgtgcttcaacacacgcaaggtcttccggccgacagaggcgggttgcggcccggttcactcgacgccgagatcgacctgttatcgtctaccctcgcagagcttaacgggggtagaggccacgcttcgcgcagacctgatcgacaggcatatgaaccaccccctcctcctgcctacagaacaggttcactgaagcccaatcccgctagcccactgcccgcttctccatacggagggcccacccctgcttcgtacacaaccgcctccactccagctggaccggctttcccagtgcaggtcaaggtggctcagcccgtgcgcgggtgcggccctccgcgacgaggcgctagccaggcaagtgggccactaccggggcctcacttcccactccccggtagaggagaggtgtggggaccaggttatcggagccagcgtgagcccgggccaggcgcaaaggaggaggctgcgggagtgagcggtcccgccggccgagggcgaggcggtgaacacggcccacaggtgcctttatcccagcccccagaagatgagttggaccgcctgactaagaagctcgtccatgatatgaatcacccccccagcggagagtacttcggccagtgcggcgggtgtggagaagatgtggtcggcgacggtgcgggtgtggtcgcgctggaccgcgtgtttcacgtcggttgctttgtctgttccacatgccgggcgcagctgcgaggacagcatttctacgctgtcgagagaagggcttattgcgaaggatgctacgtggccactctcgagaagtgcgctacctgctcccagcctattttggataggatcctccgggcaatgggaaaagcctaccaccctggatgcttcacctgtgtagtttgtcatcggggactggatggcattccgtttaccgtcgacgcgacgagtcagatccattgtatcgaggacttccatcggaagtttgcaccaaggtgtagcgtctgcggcggggcaatcatgccagagcccgggcaggaggagaccgttcggatcgtggctctggataggtccttccatattggctgctacaaatgtgaggaatgtgggctactgctcagttcagaaggcgagtgccagggttgttacccactagacgggcacatcctctgcaaagcttgcagcgcatggcggatccaagagctctccgccacagtaactactgactgctag

SEQ ID NO: 307597 - DNA, 1431 bp, Artificial Sequence
  derived and/or modified sequence
atgtccggaccaacctggcttcctcccaaacagcctgaacccgcacgcgcaccccaagggagagcaattcccaggggaacaccgggaccgcctcctgcccacggagctgctctgcaacctcatcctagggttaatttttgtcctctgccctccgagcaatgctaccaggccccagggggaccagaggaccggggtcccgcttgggtggggagccatggggtgttacaacatacccaaggtttacccgcagaccgcggagggttgcgtcctggatctctggatgcagaaatcgatctcctatcttcaaccctggcagaattgaatggaggtaggggacacgccagccgccgaccagatcgccaggcatacgaaccaccaccaccgcctgcttatcgcaccggctccctgaagcccaatcccgcaagcccattaccagcttctccctatgggggaccaactcccgcttcctacacaactgccagtacccccgcaggcccagccttccccgtgcaggtgaaggtcgcacagcccgtgcgtgggtgtggcccacccaggaggggcgcttcccaggccagtggacctctgccgggaccacactttccgctccctggcagaggggaggtatgggggcctggctatcgctcccagagagagccgggtcccggtgctaaagaagaggctgcaggcgtgagcggcccagctggcaggggcagaggtggtgagcacggcccacaggtacctctgtctcagcccccagaggatgagttggacagactaaccaaaaagctcgttcacgacatgaatcaccccccaagcggggaatattttgggcagtgtggtgggtgcggggaggacgttgttggtgatggtgccggagtagttgctttggatcgagtgttccacgtgggatgcttcgtttgctctacctgtcgcgcacaactaaggggccagcacttctacgcggttgagcgacgagcctactgcgaggggtgctatgtggcaacactggaaaaatgtgcaacctgctcgcaaccaattctcgatagaatcctccgagcaatggggaaggcataccatccaggctgttttacctgcgtcgtgtgccatcgtggactggacgggatccccttcaccgtggacgctacaagtcaaatccattgtattgaggatttccatagaaagtttgccccacggtgctcagtgtgtggcggagcaataatgcctgagcctggccaggaggagacagtcagaatcgtggctctggacagatccttccatatcggctgctacaaatgcgaagaatgtgggctgttacttagctccgaaggagagtgccaaggctgctaccccctcgacggtcatatactctgtaaagcgtgctccgcctggaggatccaggagctgagcgcgacagttacaacagactgctag

SEQ ID NO: 307598 - DNA, 1942 bp, Artificial Sequence
  derived and/or modified sequence
cggggcccggacgcatccgtggacttggaggctggctcgggcccgcacctcccatccccagctgcccgcaacccccagtgactcgggatcccccggagagccctcccctctcggcaggagggggctgactcagggagaaatggcagtttagggcctagggggccacgtgaccctcccccaggaatgtggtgacgtcatcggaggcgtggtcgtccccaaaattagggaggaagaggaaaaaaaaaagccagaaaaagttttcttttctggagtcccaaacgaggtgcgggacggaagagggggtgaaggccagaggctcggggcttcaagaccgctgtctggagtccccctttccaggccatgtcggggcccacctggctgcccccgaagcagccggagcccgccagagcccctcaggggagggcgatcccccgcggcaccccggggccaccaccggcccacggagcagcactccagccccaccccagggtcaatttttgcccccttccatctgagcagtgttaccaggccccagggggaccggaggatcgggggccggcgtgggtggggtcccatggagtactccagcacacgcaggggctccctgcagacagggggggccttcgccctggaagcctggacgccgagatagacttgctgagcagcacgctggccgagctgaatgggggtcggggtcatgcgtcacggcgaccagaccgacaggcatatgagcccccgccacctcctgcctaccgcacgggctccctgaagccaaatccagcctcgccgctcccagcgtctccctatgggggccccactccagcctcttacactaccgccagcaccccggctggcccagccttccccgtgcaagtgaaggtggcacagccagtgaggggctgcggcccacccaggcggggagcctctcaggcctctgggcccctcccgggcccccactttcctctcccaggccgaggtgaagtctgggggcctggctataggagccagagagagccagggccaggggccaaagaggaagctgctggggtctctggccctgcaggaagaggaagaggaggcgagcacgggccccaggtgcccctgagccagcctccagaggatgagctggataggctgacgaagaagctggttcacgacatgaaccacccgcccagcggggagtactttggccagtgtggtggctgcggagaagatgtggttggggatggggctggggttgtggcccttgatcgcgtctttcacgtgggctgctttgtatgttctacatgccgggcccagcttcgcggccagcatttctacgccgtggagaggagggcatattgcgagggctgctacgtggccaccctggagaaatgtgccacgtgctcccagcccatcctggaccggatcctgcgggctatggggaaggcctaccaccctggctgcttcacctgcgtggtgtgtcaccgcggcctcgacggcatccccttcacagtggatgctacgagccagatccactgcattgaggactttcacaggaagtttgccccaagatgctcagtgtgcggtggggccataatgcctgagccaggtcaggaggagactgtgagaattgttgctctggatcgaagttttcacattggctgttacaagtgcgaggagtgtgggctgctgctctcctctgagggcgagtgtcagggctgctacccgctggatgggcacatcttgtgcaaggcctgcagcgcctggcgcatccaggagctctcagccaccgtcaccactgactgctgagtcttcctagaagtacctgctgggttctcagttccagttcccatcctttgattgatcactctccctgacatccacctgtatgactttgtcaccaaatgctgtcttctctttctccaatcaagaaataataatccctcgagtttacaaaaca

SEQ ID NO: 307599 - protein, 615 aa, Artificial Sequence
  derived and/or modified sequence
MKALRLSASALFCLLLINGLGAAPPGRPEAQPPPLSSEHKEPVAGDAVPGPKDGSAPEVRGARNSEPQDEGELFQGVDPRALAAVLLQALDRPASPPAPSGSQQGPEEEAAEALLTETVRSQTHSLPAPESPEPAAPPRPQTPENGPEASDPSEELEALASLLQELRDFSPSSAKRQQETAAAETETRTHTLTRVNLESPGPERVWRASWGEFQARVPERAPLPPPAPSQFQARMPDSGPLPETHKFGEGVSSPKTHLGEALAPLSKAYQGVAAPFPKARRPESALLGGSEAGERLLQQGLAQVEAGRRQAEATRQAAAQEERLADLASDLLLQYLLQGGARQRGLGGRGLQEAAEERESAREEEEAEQERRGGEERVGEEDEEAAEAEAEAEEAERARQNALLFAEEEDGEAGAEDKRSQEETPGHRRKEAEGTEEGGEEEDDEEMDPQTIDSLIELSTKLHLPADDVVSIIEEVEEKRKRKKNAPPEPVPPPRAAPAPTHVRSPQPPPPAPAPARDELPDWNEVLPPWDREEDEVYPPGPYHPFPNYIRPRTLQPPSALRRRHYHHALPPSRHYPGREAQARRAQEEAEAEERRLQEQEELENYIEHVLLRRP

SEQ ID NO: 307600 - protein, 377 aa, Artificial Sequence
  derived and/or modified sequence
MKALRLSASALFCLLLINGLGAAPPGRPEAQPPPLSSEHKEPVAGDAVPGPKDGSAPEVRGARNSEPQDEGELFQGVDPRALAAVLLQALDRPASPPAPSGSQQGPEEEAAEALLTETVRSQTHSLPAPESPEPAAPPRPQTPENGPEASDPSEELEALASLLQELRDFSPSSAKRQQETAAAETETRTHTLTRVNLESPGPERVWRASWGEFQARVPERAPLPPPAPSQFQARMPDSGPLPETHKFGEGVSSPKTHLGEALAPLSKAYQGVAAPFPKARRPESALLGGSEAGERLLQQGLAQVEAGRRQAEATRQAAAQEERLADLASDLLLQFAAGRGPAARPCPLALPLSPGCVGTCQTPLPGPEPELPELTRG

SEQ ID NO: 307601 - DNA, 1848 bp, Artificial Sequence
  derived and/or modified sequence
atgaaggccctgagactgagcgccagcgccctgttctgcctgctgctgatcaacggcctgggcgccgccccccccggcagacccgaggcccagcccccccccctgagcagcgagcacaaggagcccgtggccggcgacgccgtgcccggccccaaggacggcagcgcccccgaggtgagaggcgccagaaacagcgagccccaggacgagggcgagctgttccagggcgtggaccccagagccctggccgccgtgctgctgcaggccctggacagacccgccagcccccccgcccccagcggcagccagcagggccccgaggaggaggccgccgaggccctgctgaccgagaccgtgagaagccagacccacagcctgcccgcccccgagagccccgagcccgccgccccccccagaccccagacccccgagaacggccccgaggccagcgaccccagcgaggagctggaggccctggccagcctgctgcaggagctgagagacttcagccccagcagcgccaagagacagcaggagaccgccgccgccgagaccgagaccagaacccacaccctgaccagagtgaacctggagagccccggccccgagagagtgtggagagccagctggggcgagttccaggccagagtgcccgagagagcccccctgcccccccccgcccccagccagttccaggccagaatgcccgacagcggccccctgcccgagacccacaagttcggcgagggcgtgagcagccccaagacccacctgggcgaggccctggcccccctgagcaaggcctaccagggcgtggccgcccccttccccaaggccagaagacccgagagcgccctgctgggcggcagcgaggccggcgagagactgctgcagcagggcctggcccaggtggaggccggcagaagacaggccgaggccaccagacaggccgccgcccaggaggagagactggccgacctggccagcgacctgctgctgcagtacctgctgcagggcggcgccagacagagaggcctgggcggcagaggcctgcaggaggccgccgaggagagagagagcgccagagaggaggaggaggccgagcaggagagaagaggcggcgaggagagagtgggcgaggaggacgaggaggccgccgaggccgaggccgaggccgaggaggccgagagagccagacagaacgccctgctgttcgccgaggaggaggacggcgaggccggcgccgaggacaagagaagccaggaggagacccccggccacagaagaaaggaggccgagggcaccgaggagggcggcgaggaggaggacgacgaggagatggacccccagaccatcgacagcctgatcgagctgagcaccaagctgcacctgcccgccgacgacgtggtgagcatcatcgaggaggtggaggagaagagaaagagaaagaagaacgccccccccgagcccgtgcccccccccagagccgcccccgcccccacccacgtgagaagcccccagccccccccccccgcccccgcccccgccagagacgagctgcccgactggaacgaggtgctgcccccctgggacagagaggaggacgaggtgtacccccccggcccctaccaccccttccccaactacatcagacccagaaccctgcagccccccagcgccctgagaagaagacactaccaccacgccctgccccccagcagacactaccccggcagagaggcccaggccagaagagcccaggaggaggccgaggccgaggagagaagactgcaggagcaggaggagctggagaactacatcgagcacgtgctgctgagaagaccctag

SEQ ID NO: 307602 - DNA, 1134 bp, Artificial Sequence
  derived and/or modified sequence
atgaaggccctgagactgagcgccagcgccctgttctgcctgctgctgatcaacggcctgggcgccgccccccccggcagacccgaggcccagcccccccccctgagcagcgagcacaaggagcccgtggccggcgacgccgtgcccggccccaaggacggcagcgcccccgaggtgagaggcgccagaaacagcgagccccaggacgagggcgagctgttccagggcgtggaccccagagccctggccgccgtgctgctgcaggccctggacagacccgccagcccccccgcccccagcggcagccagcagggccccgaggaggaggccgccgaggccctgctgaccgagaccgtgagaagccagacccacagcctgcccgcccccgagagccccgagcccgccgccccccccagaccccagacccccgagaacggccccgaggccagcgaccccagcgaggagctggaggccctggccagcctgctgcaggagctgagagacttcagccccagcagcgccaagagacagcaggagaccgccgccgccgagaccgagaccagaacccacaccctgaccagagtgaacctggagagccccggccccgagagagtgtggagagccagctggggcgagttccaggccagagtgcccgagagagcccccctgcccccccccgcccccagccagttccaggccagaatgcccgacagcggccccctgcccgagacccacaagttcggcgagggcgtgagcagccccaagacccacctgggcgaggccctggcccccctgagcaaggcctaccagggcgtggccgcccccttccccaaggccagaagacccgagagcgccctgctgggcggcagcgaggccggcgagagactgctgcagcagggcctggcccaggtggaggccggcagaagacaggccgaggccaccagacaggccgccgcccaggaggagagactggccgacctggccagcgacctgctgctgcagttcgccgccggcagaggccccgccgccagaccctgccccctggccctgcccctgagccccggctgcgtgggcacctgccagacccccctgcccggccccgagcccgagctgcccgagctgaccagaggctag

SEQ ID NO: 307603 - DNA, 1848 bp, Artificial Sequence
  derived and/or modified sequence
atgaaggctctccgcctcagtgcctcagcgctgttctgtcttttgctaattaacggactgggcgcagcaccaccggggcgaccagaagcccagccacctccactatcttccgaacacaaggaaccagttgctggcgatgcggttcctgggccaaaggatggcagcgccccagaagtacgaggagcacggaattccgaaccacaggacgagggcgagttgttccagggtgtggatcccagagctctcgcagctgtgcttctgcaggctcttgacaggccagcaagtcctcctgcaccaagcggaagccagcaaggtcccgaggaggaggctgccgaagcgctattaacagagaccgtgcggtcacagacccacagtttgccagcgccagagagtcctgaacctgctgccccccctaggccacagactcctgaaaatggaccagaagcatccgacccatctgaagaattagaggcccttgcttccttgctgcaggagctcagagatttttctcccagctccgcaaaaaggcaacaggaaacagctgccgcagagacagaaactagaactcacacattgacacgggtgaatttggaaagcccaggtccagagagagtgtggcgagcgagttggggtgaatttcaggcccgcgtacccgagagagctcccttacccccccccgcccccagccagttccaggcacgcatgcccgactctggcccactgccagagacccacaagttcggggaaggcgtcagctcgcctaaaacacatttgggggaggccttagcccctctgtctaaagcttaccagggcgtggccgccccttttccaaaggcacgcaggccagagtccgccctactgggcggatccgaagcaggagagcggttgctccaacaaggattggcccaggtggaggctggccggcgccaagcagaggcaacccgacaggccgcggcccaggaagagcgactcgcagacttagcatccgacctcctgctccagtatttactccaggggggcgcccgccagcggggcctgggcgggcgggggctgcaggaggctgctgaagagcgcgaaagcgcccgtgaagaagaggaggccgagcaggagaggagagggggagaggagcgggtgggagaggaagacgaggaagccgccgaagccgaggctgaagccgaagaagcagagcgcgctcggcagaacgcgttgctgtttgccgaggaggaagatggcgaggcaggtgctgaagacaagcgctcgcaggaggagacaccgggtcatcgccggaaggaagctgaggggacagaggaaggcggagaagaagaggacgatgaagagatggacccccagacgatagacagtttgatagaactaagtactaaactccatttgccggccgacgacgtagtgtccatcattgaagaggtggaggagaagcgcaaaaggaagaaaaatgctcccccagaacccgtgccgccgcctcgggcggcacccgccccaacacatgtgaggagcccgcagcctccacccccagcgcctgccccagcacgtgacgaactccccgattggaatgaggtcctgcctccatgggatcgcgaggaagacgaggtctatccccccggtccataccaccccttcccaaactatatacgacctcggaccctgcagccccccagcgcgcttagacggcgtcactaccatcacgcgctgccgccgagcagacactacccaggacgcgaagcgcaggccaggagggctcaggaagaggccgaagccgaagagaggaggctgcaggaacaggaggaactcgagaattatattgagcacgtgctgcttagaaggccatag

SEQ ID NO: 307604 - DNA, 1848 bp, Artificial Sequence
  derived and/or modified sequence
atgaaggccctgcgattgagcgctagcgcattgttttgcttgctgctgattaacggcctcggagccgctccacctggccggccagaagcccagcccccccccctgtcgagtgaacacaaagagccagtagcaggagatgctgtgcccggcccaaaagacggcagtgcacccgaagtgcggggggcaagaaatagcgaaccacaggatgaaggcgagctgtttcaaggtgttgatccgagggcactcgctgctgtcctgctgcaggcactcgaccgtccggcaagccctcccgcaccttccgggtcccagcagggcccagaagaagaggcggccgaggcactgctgacagaaacagtgcggagccagacccacagcctcccagctcctgaaagccccgagccagccgcaccccctcggccgcaaacccccgaaaacggccctgaggcgtccgacccgtctgaagagctagaagctctggccagcctactccaggagctaagagatttctcgccatctagcgctaaaagacagcaggagacagccgccgcggaaactgagacgcgcacccatacactcacccgggttaatctggaatcccccggccccgagcgcgtctggcgagccagctggggtgaatttcaggcccgggtgcctgagagggcccctctgccccctcccgccccctctcagttccaggcaagaatgcccgacagcggccccctgccggagacccacaaattcggcgagggagtgtccagtccaaagactcacctcggggaagccttggccccgttaagtaaagcataccagggcgtcgccgcccccttcccaaaagccagacgaccagagagcgccttacttgggggaagcgaagctggtgagcgactgttgcagcaaggcttggcccaggtcgaggccggaagacggcaagctgaggccactcgccaagccgccgcccaggaggaacggctcgcggatttagctagcgacctgctcctccagtacctgctgcagggtggcgcacgccagcgcggcctcggagggcgaggcctgcaagaagcagccgaagaacgtgaatctgcaagggaggaggaggaggcagagcaggagagaagggggggagaagaaagggtcggagaggaagatgaagaggctgccgaggctgaggctgaagctgaggaagccgagagggctagacagaacgcgctacttttcgccgaagaggaggacggtgaggccggtgccgaagacaagaggagtcaagaagagacgccagggcacagaaggaaggaggctgaagggaccgaggagggtggggaagaagaggatgacgaggaaatggaccctcagaccatcgattccttgattgagctgagcacaaaattgcatctgcctgccgatgacgtggtgtcaataattgaggaagttgaagagaaacggaagaggaagaagaacgcaccacccgaaccggtccctccccctagggccgcaccagccccaacacacgtgagatccccacaacccccccctccagcaccagctccggcgcgagacgagctccccgactggaatgaagtgttgcctccatgggaccgggaagaggacgaggtgtatccacccggaccttatcaccccttccccaattatattcgtccacgtaccctgcagccccctagtgcccttcggcggaggcactaccaccatgctctacctccatcacgacattatcctggccgcgaggcacaggccagacgcgcacaggaggaagcagaggctgaagagcgacggttgcaggagcaggaggagctggaaaactacatagaacatgtcctactgaggaggccctag

SEQ ID NO: 307605 - DNA, 1134 bp, Artificial Sequence
  derived and/or modified sequence
atgaaagcccttagattgtccgcgtcggccctgttctgcctgctactaatcaatggcctgggggctgcaccccccggtcggcctgaggctcaacccccccctttatcatccgaacacaaggagcctgttgccggggacgctgtgcctgggcccaaagatgggtctgcacctgaagtgagaggcgctaggaattcagagccacaagacgagggggaattatttcagggcgttgaccctcgtgcgcttgccgcggtcctgctgcaggcactggataggccagcatcgccacccgctccttctggctcccagcagggaccagaagaagaggctgccgaagctctgctgactgagactgtgaggtcgcagacccattccctcccagcgccagagtcccctgaaccagcagctcccccccggccacagacccccgagaacggccctgaagccagcgatcctagtgaggagttggaggcactggctagtctcctgcaggagctgcgcgacttctccccttcgtctgcaaaaagacagcaggaaacagcagccgccgaaacggaaacaagaacccacactctaacaagggtcaacctagaatcaccaggaccggagagagtctggcgggcctcttggggagaattccaagcccgcgtccccgaaagagctcccctcccccctcccgccccctcccagtttcaggcacggatgcccgactccggccctttgccagaaactcataaattcggagagggggtgtcctccccaaaaacccatctgggagaagctctcgcacccctgtccaaggcataccagggagttgctgctccattccccaaagccagaagacccgagtctgcccttctcggaggatcagaagctggggagaggttactgcaacagggcctcgcccaggttgaggccggccgcaggcaggccgaagctaccagacaggctgccgcacaagaggagagacttgcggatctcgcctccgacttgttgctgcagtttgctgccgggcgcggcccagctgcgcggccgtgtcctctggccctccccctttccccaggttgtgtcggaacctgtcaaaccccactgcccggccctgagcccgagcttcctgagctgactaggggatag

SEQ ID NO: 307606 - DNA, 1848 bp, Artificial Sequence
  derived and/or modified sequence
atgaaggccctgcggctgagcgccagcgccctcttctgcctgctgctgatcaatggcctgggcgccgcccctcctggccggcctgaggcccagcccccacccctgagcagcgagcacaaggagcctgtggccggagatgctgtgcccggccccaaggatggcagcgcccctgaggtgcggggggccagaaattctgagccccaggatgaaggagagctgttccagggcgtggacccccgggccctggccgctgtgctgctgcaggccctggacaggcctgccagccccccagcccccagcggcagccagcagggccctgaggaggaggccgctgaggccctgctgacagagaccgtgcgcagccagacccacagcctgcctgcccctgagagccctgagcctgctgccccaccccggccccagaccccagaaaatggacctgaggccagtgaccccagcgaggagctggaggccctggccagcctgctgcaggagctgcgggacttcagccccagcagcgccaagaggcagcaggagacagctgctgctgagacagagaccaggacccacaccctgaccagggtgaacctggagagccctggccctgagcgggtgtggagggcctcctggggcgagttccaggcccgggtgcctgagcgggcccccctgcccccaccagcccccagccagttccaggccaggatgccagacagcggccccctgcctgagacccacaagtttggagagggcgtgagcagccccaagacccacctgggggaggccctggcccccctgagcaaggcctaccagggcgtggccgcccccttccccaaggcccggcggcctgagagcgccctgctgggcggcagcgaggccggggagcggctgctgcagcagggcctggcccaggtggaggccggccggcggcaggccgaggccacccggcaggccgccgcccaggaggagcggctggccgacctggccagtgacctgctgctgcagtacctgctgcagggcggggcccggcagaggggcctgggcggccggggcctgcaggaggccgctgaggagcgggagagcgcccgggaggaggaggaggccgagcaggagaggagaggaggagaggagcgggtgggggaggaggatgaggaggccgctgaggccgaggccgaggccgaggaggccgagcgggcccggcagaatgccctgctgtttgctgaggaggaggatggagaggccggggctgaggacaagaggagccaggaggagaccccaggccacaggaggaaggaggccgagggcacagaggagggcggggaggaggaggatgatgaggagatggacccccagaccatcgacagcctcatcgagctgagcaccaagctgcacctgcctgcagatgatgtggtgtccatcatcgaggaggtggaggagaagaggaagaggaagaagaatgcccctcctgagcctgtgcccccaccccgggccgccccagcccccacccacgtgcgcagcccccagcccccacctccagccccagccccagccagagatgagctgcctgactggaatgaggtgctgcccccctgggaccgggaggaggatgaggtgtacccacctggcccctaccaccccttccccaactacatccggcccaggaccctgcagcccccatctgccctgcggcggcggcactaccaccacgccctgccccccagccgccactacccaggccgggaggcccaggcccggcgggcccaggaggaggccgaggccgaggagcggcggctgcaggagcaggaggagctggagaactacattgaacatgtgctgctgcggcggccctag

SEQ ID NO: 307607 - DNA, 1134 bp, Artificial Sequence
  derived and/or modified sequence
atgaaggccctgcggctgagcgccagcgccctcttctgcctgctgctgatcaatggcctgggcgccgcccctcctggccggcctgaggcccagcccccacccctgagcagcgagcacaaggagcctgtggccggagatgctgtgcccggccccaaggatggcagcgcccctgaggtgcggggggccagaaattctgagccccaggatgaaggagagctgttccagggcgtggacccccgggccctggccgctgtgctgctgcaggccctggacaggcctgccagccccccagcccccagcggcagccagcagggccctgaggaggaggccgctgaggccctgctgacagagaccgtgcgcagccagacccacagcctgcctgcccctgagagccctgagcctgctgccccaccccggccccagaccccagaaaatggacctgaggccagtgaccccagcgaggagctggaggccctggccagcctgctgcaggagctgcgggacttcagccccagcagcgccaagaggcagcaggagacagctgctgctgagacagagaccaggacccacaccctgaccagggtgaacctggagagccctggccctgagcgggtgtggagggcctcctggggcgagttccaggcccgggtgcctgagcgggcccccctgcccccaccagcccccagccagttccaggccaggatgccagacagcggccccctgcctgagacccacaagtttggagagggcgtgagcagccccaagacccacctgggggaggccctggcccccctgagcaaggcctaccagggcgtggccgcccccttccccaaggcccggcggcctgagagcgccctgctgggcggcagcgaggccggggagcggctgctgcagcagggcctggcccaggtggaggccggccggcggcaggccgaggccacccggcaggccgccgcccaggaggagcggctggccgacctggccagtgacctgctgctgcagtttgctgctggccggggccctgctgcccggccctgccccctggccctgcccctgagccctggctgtgtgggcacctgccagacccccctgcccggccctgagcctgagctgcctgagctgacccggggctag

SEQ ID NO: 307608 - DNA, 1848 bp, Artificial Sequence
  derived and/or modified sequence
atgaaggccctgcggctgagcgccagcgccctgttctgcctgctgttaattaatgggctgggtgctgcacctcctggccgacccgaggctcagcctccccctctcagtagcgagcacaaggagcccgtggctggggatgccgtccctggaccaaaggatggaagtgccccggaggtgcgtggggcgcgtaacagtgaaccacaggacgaaggggagctattccagggggtcgatcctagggcactggctgcagtgttgttacaagctctcgaccgccccgcctctcccccagctcccagcggctctcaacaaggccctgaggaggaagctgcggaggctcttcttaccgaaaccgtgaggtcacaaacacatagcctgcccgccccagaaagcccggagcccgccgctccgccacgccctcagaccccggagaatggccccgaagcttccgaccccagcgaggagctagaagcgctggcctccctgctgcaggaattgagagattttagcccttcgtcagcaaagagacagcaagaaaccgccgctgcagagaccgagacacggacccacacactgacacgggtaaatcttgaatccccaggtcctgagcgagtctggcgcgcctcctggggtgaattccaggcccgggtccctgaacgggccccactgcccccacctgcccctagtcagttccaggctcggatgcccgatagtggtcccctgcctgaaacccataagttcggagaaggagttagctcccctaaaacccatctcggcgaggctctagcccctctttcgaaggcataccagggagtcgcggccccattccctaaagccaggcgacctgagtctgccctgcttggagggtccgaggctggcgaacgactcctgcagcagggactagctcaagttgaggcaggtcgtaggcaggctgaagccaccaggcaggctgccgcacaagaagaacgactggccgatctagcgagtgatctgcttctccagtatctcctgcagggaggggccagacagcggggtttggggggaagaggactgcaagaagccgccgaggaacgggaaagtgctagagaggaggaggaagccgagcaagagagaagagggggggaagagcgcgtgggggaggaagacgaagaagccgccgaggccgaagccgaggccgaggaggcggagcgcgcccgccagaacgcactcctgttcgccgaagaggaagacggtgaagcgggggctgaagacaaaagatctcaagaggagacaccgggccatcggcgcaaggaagcggaagggaccgaagaaggaggtgaagaagaggacgatgaggagatggatcctcagacaatcgatagcctgatcgagctgagcaccaagctgcatctgccagctgacgatgtggttagtatcattgaggaagtggaggaaaagaggaaaaggaagaaaaacgcgcccccagagcccgtgcctccacccagagcggctcctgcacctacccatgtgcgctctcctcagcctccgccaccggcaccggcccccgctagagacgaactaccggactggaacgaagttctcccaccatgggacagggaggaggatgaggtatacccaccaggcccttatcacccttttccaaattacatcaggccacgaacacttcagccgccctccgccctacggaggcggcactatcaccatgccctcccacccagccggcactaccctgggcgagaagcccaggcgcgacgagcacaggaggaggccgaagcagaggaacggcgcctacaagaacaggaagagctggaaaactatattgagcacgttctgctccgccgcccttag

SEQ ID NO: 307609 - DNA, 1848 bp, Artificial Sequence
  derived and/or modified sequence
atgaaggccctgcggctgagcgccagcgccctgttctgcctgctgctaataaatgggctgggagctgcaccacccggccggcctgaggcccagccaccacccctcagctccgagcacaaggaacccgtcgccggagatgcagtgcccggtcctaaggacggttccgcgcccgaggttaggggagccagaaactccgaaccccaggatgagggtgagctgtttcaaggtgtcgatccacgagccctggctgccgtgctgcttcaggcactagacaggccggcctccccgcccgcccccagtggttcccagcaagggccagaggaagaggcggcagaagcactattgacagaaactgtgaggagtcagacccacagtctgcctgctccagagtcccctgaaccagcggcacctccacgaccacagacgcccgaaaacggcccagaagctagtgacccatcagaggagttggaggcacttgctagtttactgcaggaactccgagatttctcaccatcctccgccaaaaggcagcaggagacagccgctgcagagacggagactcgcacacacacgctcacgcgggtaaatctggagagtccaggacccgagcgagtttggagagcaagttggggggagtttcaggctcgggtgccagaacgcgctcctttgcctccgcctgctccatcacagtttcaggcccgcatgccagacagcggaccattacctgagacccataagtttggagagggtgtgtcaagccccaagacacacctcggcgaagccctggctccactgtcaaaggcttaccagggagttgctgccccctttccaaaagccagaaggcccgaatccgccctgctggggggaagtgaagctggagaacgtttgctgcaacaaggtttagcccaggttgaggccggtaggcgccaggctgaagccaccagacaggctgccgctcaggaagagagactggcagaccttgcttcagatctgctgctccagtacctcttacagggcggtgcacggcagcggggtctgggagggagaggtctgcaggaggctgcagaggagcgggaatccgcgagggaagaggaggaggctgagcaggagagacgcggtggggaggaacgtgtcggagaggaggatgaagaggccgccgaggctgaggctgaggccgaggaagccgagcgggccaggcagaatgctctgctgttcgctgaggaggaagacggcgaagctggggctgaagataaacgaagccaggaagagacccctggccatcggcgaaaagaagccgaaggcacagaggagggaggcgaggaggaagatgacgaggagatggatcctcaaacaattgactcgctcatagaacttagtaccaagcttcacctacccgccgacgacgtagtttctataatcgaagaagttgaagaaaagagaaagcgcaaaaagaatgcgccacctgagccagtaccacctccaagagcagcccctgcgcccactcatgtcaggagccctcagccccctccccctgcccccgcgcctgcccgggatgaactgccggattggaatgaggtcctgccaccttgggatagagaagaagacgaagtgtaccctcccggaccataccaccccttccccaactatatcagaccaagaacactccaacccccaagcgctttgcggaggcgacactatcatcatgctttgccaccatctcggcactaccctgggagggaggcacaggctaggagagcccaggaggaagccgaagctgaggaaaggcgcctccaggagcaggaagaactggagaattatatcgaacatgtgttgcttcggcgcccctag

SEQ ID NO: 307610 - DNA, 1134 bp, Artificial Sequence
  derived and/or modified sequence
atgaaggccctgcggctgagcgccagcgccctgttctgcctgctgttgatcaatggactgggggcagcccctcctggccgtcccgaggcccaacccccacccctttccagcgagcataaggagcctgttgctggcgatgccgtgcccggacccaaggatggcagtgcccctgaggtgcgcggggcgcggaactcagaaccgcaggacgaaggtgagttgtttcagggcgtggaccctagagccctcgcggctgtgctgctgcaagccttggatcgccccgctagccctcccgcgcccagcggttctcagcagggcccagaagaggaggctgctgaggcactcctgactgagaccgtgcgttcacagactcactccctgcccgcacctgagtctcctgaacccgctgcaccgccacggcctcaaactcccgaaaacggcccagaagctagcgacccctccgaggagctcgaagcgctcgcctctttactgcaggagttaagagatttttcaccctcctctgccaaacggcagcaggaaactgcagccgcggagaccgagacgagaacccacacactcacccgtgtcaacttggagtctcctggtcctgagcgcgtgtggcgggcctcttggggtgagtttcaggcacgagtgcctgaacgggcacctctgcctcccccagcacccagccagtttcaggcgagaatgcccgactccgggcccttgccggagacccacaagttcggagaaggcgtgagttcacctaaaacgcatctgggtgaggccctagccccattgtctaaggcgtatcaaggggtggctgctcccttccctaaggccaggcggcccgagtccgcacttttaggagggtctgaagctggagagcgccttctgcagcagggtctggcccaagtggaagccggccgtcggcaagccgaagctactaggcaagccgctgctcaggaggagcgcctggctgacttggcaagcgatctgttactgcaattcgcagcagggagaggtccagccgctcgtccatgtcccctggcactgccactgagccccgggtgtgttggaacatgccagactcctctcccgggacctgagcctgagttgcctgagcttacgagagggtag

SEQ ID NO: 307611 - DNA, 1848 bp, Artificial Sequence
  derived and/or modified sequence
atgaaagcgttacgcctctccgcctctgcattgttctgccttctgcttataaacggtctgggagccgcaccgcctggccgacctgaggctcagccaccgccactgagctcagaacataaggaacccgtcgctggtgatgcggtgcctgggcctaaagatggctctgctcctgaagtcagaggggctaggaatagcgagccccaagacgaaggggagttgttccaaggagttgatccccgagccctcgcggcagtcctgttgcaggccctggatcggcctgcttctcctcccgcacctagcgggtcccagcagggacccgaggaagaggccgcagaagccctgttgacagagaccgtgcggtcccagacccacagtctacctgcacctgaatcgcccgagcctgcagctcctcccaggccgcagactccagaaaatggacccgaagcctctgaccctagcgaagagctggaagcactggcatcattgctccaagaactgcgggacttcagccccagttcagcaaagagacagcaggaaaccgctgccgctgagaccgagacaaggactcacacactgacgagggtaaacttggagagccccggtcccgaaagagtttggagagcatcctggggcgaattccaagccagagtgcccgaacgagcaccacttccacctcctgctcctagccaattccaagctagaatgccagattcaggacctctcccagagacacacaaattcggcgagggagtgtcatctcccaaaacacatttaggagaggccctggcacctctgagcaaggcctatcaaggagttgctgctccgttcccaaaagccaggcgtcccgaaagcgctctcttggggggatcagaagccggagagaggctgcttcagcaaggactggcccaggtggaggcagggcgacgacaggctgaggccacccgccaggccgcagcccaggaagaacgccttgctgatctcgcctccgacttattgcttcaatatctgctgcaagggggagcgagacagagagggctgggagggagaggcctgcaagaggcggctgaggagagagagagtgcaagggaagaagaagaggcagaacaagagcggcgtggcggtgaggaaagagtgggagaagaagacgaagaagccgctgaggcggaggcagaagccgaggaagcagagagggcacgacagaatgccctccttttcgctgaggaagaagatggggaagcaggcgcagaagataagaggagtcaggaggagacacctggccataggaggaaagaagccgaagggacggaggaaggtggcgaagaagaggatgacgaggagatggatccccagactatcgattcgttaatagaattaagtaccaagctgcacctcccagcagatgatgtggtgtcaatcattgaagaggtcgaagaaaagcggaaaagaaaaaaaaatgcccctcccgagcccgtgccgccaccacgcgctgcgccagcaccaacacatgttcgctccccacagccccctccccctgcacccgctccggctagggatgagctacccgactggaacgaggtcctacccccttgggaccgtgaagaagacgaagtctaccctccaggcccttaccacccatttcctaactatatccggccacgaacactgcagccgccttccgcattgagacgcagacactaccaccatgccctccccccatctcggcactatcctgggcgagaggcacaggcccgaagggcccaggaagaggcagaagccgaagaaagaagactgcaggaacaggaggaattggaaaattatatcgaacacgtgcttttaagacgcccttag

SEQ ID NO: 307612 - DNA, 1848 bp, Artificial Sequence
  derived and/or modified sequence
atgaaagctttgaggctttctgcctctgctctcttttgcctgctccttatcaatggactaggcgctgcccctcccggacgtcctgaggcacagccccctccactcagtagtgaacacaaggaaccagttgcgggagacgcggtgccaggtcccaaggacggctctgcgcctgaggtgcggggagccaggaattctgagccccaggacgaaggggagttgttccagggcgtggacccgcgtgccctggcagccgtcctgctgcaggcccttgatcggcctgcctcgccccctgctcctagcgggtctcaacagggtcctgaagaagaggcagcagaagctctgttaaccgagacagtccgaagccagacccatagcctacccgctcccgagagcccagaaccagccgctccacctcgcccacagaccccggagaacggcccagaggcgagcgacccttctgaggaactggaagctttggcatcactccttcaagagcttagagattttagtccttcctccgccaagagacagcaggagactgctgccgctgaaacagaaacccggactcacaccctgacgcgcgtgaacctggagtctcctggcccagagcgggtatggcgtgcgtcttggggggagtttcaggcacgcgtacccgaacgcgcaccgcttcctccgcctgctccaagccagtttcaagccagaatgccggatagcggaccactgccagagacccacaaatttggcgagggggtctcctcgcccaaaacgcacctcggcgaagcactggctccgctgagcaaggcataccagggagtcgccgcacctttcccaaaggctagacggccagaatctgccctgctcggagggtctgaggctggcgaacgcctgttgcagcaggggctggcccaggtcgaggccggaaggaggcaggcagaagcaacccggcaggcggcagcccaagaggagcggctggccgacctcgcaagcgatttactgttgcagtacctgctccaaggaggggctagacagcgcggactggggggacggggactgcaggaagccgctgaagagcgcgagtcagcaagagaggaagaagaggcggaacaggaacgacggggtggtgaggagcgggtaggcgaggaggatgaggaagccgcagaagctgaggcagaggcggaggaggctgaaagagctcgccagaatgctctgctttttgcagaggaggaggatggcgaggctggcgctgaggataaaaggtcccaggaggagactcctgggcataggaggaaagaggccgaaggcaccgaagagggcggtgaggaagaggatgacgaggagatggacccccagactatcgatagcttgatcgagctgagtacgaaactgcacttgcctgcagatgacgtcgtgagcatcatcgaggaagtggaagaaaagaggaaacgtaagaagaacgcaccaccggaacccgtccctccccctagagcggctcccgctccgacccatgtgcggtccccccagccacctccgccagcccctgcgccagctcgcgacgaactgcccgactggaatgaggtactgcccccttgggacagagaggaggatgaggtgtacccccctgggccataccatccattccctaactatattaggccaaggacgctgcagccaccatctgctcttcgcaggagacattatcaccacgcgttgccgccaagccggcactacccagggagagaagcgcaggcgagaagggcccaagaggaagccgaggctgaggaacgcagactccaggaacaggaagagcttgagaattatatcgagcacgtgctgcttaggcgaccttag

SEQ ID NO: 307613 - DNA, 1134 bp, Artificial Sequence
  derived and/or modified sequence
atgaaggctctccgccttagtgcttccgcattattctgtctcctgctgatcaatggattgggcgctgccccacccggacgtccagaagcccagcctcctccactcagcagcgagcataaggagccagtggccggagatgctgtcccgggtcccaaggacgggtcagcaccagaggtccggggagcacgaaatagtgagcctcaggacgagggagaactgttccagggagtagatccaagagccctggccgcagtgctcctacaggctcttgacagacctgcatcgccaccggctcctagcgggagccagcaggggccagaggaggaggcagccgaggctctgctgacggaaacggtccgttcccaaacgcacagccttcccgcacctgaaagccctgaacctgctgcaccacctcgccctcaaaccccagagaatggccctgaagccagcgatccaagcgaggaattggaggcccttgcttcactgctgcaggaactccgggacttctccccctcgtctgccaagcgtcaacaggaaactgccgcagccgagactgagacacggacccataccctcacacgggtgaacctcgaaagcccgggaccagagagagtgtggcgcgcatcctggggcgaatttcaggcgagggtgcctgaacgcgcaccattgcctccccctgctccttcccagtttcaggctaggatgccagacagcggccctctccctgagacacacaagttcggcgaaggcgtgagctcccctaaaactcacctgggcgaggcacttgcccctctctccaaggcctaccaaggtgttgcggctcccttccccaaggccagaagaccagaatccgcgttgttaggaggctcagaagctggagaacgcctgttgcagcagggcctcgctcaggtggaggccggacggaggcaagccgaggccacaaggcaagcagccgctcaagaggaaaggttagccgatctcgcatccgatctcctccttcagtttgctgcgggacgcggtcccgctgctcggccatgtcccttagcgctgccactcagtccagggtgtgtcggtacctgccagacgcccctccccggtcccgagccagagctcccagagctgacaaggggctag

SEQ ID NO: 307614 - DNA, 2575 bp, Artificial Sequence
  derived and/or modified sequence
gcggtggaggcgcgggcgctgtccagcgtgctgaagccggagcgagctagccgcccggagccgcgccgacccagctgagcccagcccacgggacgccagacctcgaccgtcgctcctaccccggccaccgctcggagccgaggcggacgcgtcccgatcttcccctgtccccaccctgccccgaccctcctctccacctctcgcgtcgtgacaccagctgtctccggcagcctcttggtcatgaaagccctcagattgtcggcttccgccctcttctgccttctgctgatcaacgggttaggggcagcaccccctggtcgccctgaggcgcagcctcctcctctcagctctgagcataaagagccggtagccggggacgcagtgcccgggccaaaggatggcagcgccccagaggtccgaggcgctcggaattccgagccgcaggacgagggagagcttttccagggcgtggatccccgggcgctggccgcggtgctgctgcaggcactcgaccgtcccgcctcacccccggcaccaagcggctcccagcaggggccggaggaagaagcagctgaagctctgctgaccgagaccgtgcgcagccagacccacagcctcccggcgccggagagcccggagcccgcggctccgcctcgccctcagactccggagaatgggcccgaggcgagcgatccctccgaggagctcgaggcgctagcgtccctgctccaggaactgcgagatttcagtccaagtagcgccaagcgccagcaggagacggcggcagcagagacggaaacccgcacgcacacgctgacccgagtgaatctggagagcccggggccagagcgcgtatggcgcgcttcctggggagagttccaggcgcgtgtcccggagcgcgcgcccctgccgcccccggccccctctcaattccaggcgcgtatgcccgacagcgggccccttcccgaaacccacaagttcggggaaggagtgtcctcccccaaaacacacctaggcgaggcattggcacccctgtccaaggcgtaccaaggcgtggccgccccgttccccaaggcgcgccggccggagagcgcactcctgggcggctccgaggcgggcgagcgccttctccagcaagggctggcgcaggtggaggccgggcggcggcaggcggaggccacgcggcaggccgcggcgcaggaagagcggctggccgacctcgcctcggacctgctgctccagtatttgctgcagggcggggcccggcagcgcggcctcgggggtcgggggctgcaggaggcggcggaggagcgagagagtgcaagggaggaggaggaggcggagcaggagagacgcggcggggaggagagggtgggggaagaggatgaggaggcggccgaggcggaggcagaggcggaggaggcggagagggcgcggcagaacgcgctcctgttcgcggaggaggaggacggggaagccggcgccgaggacaagcgctcccaggaggagacgccgggccaccggcggaaggaggccgaggggacagaggagggcggggaggaggaggacgacgaggagatggatccgcagacgatcgacagcctcattgagctgtccaccaaactccacctgccagcggacgacgtggtcagcatcatcgaggaggtggaggagaagcggaagcggaagaagaacgcccctcccgagcccgtgccgcccccccgtgccgcccccgcccccacccacgtccgctccccgcagcccccgccccccgcccccgctcccgcacgagacgagctgccggactggaacgaggtgctcccgccctgggatcgggaggaggacgaggtgtacccgccagggccgtaccaccctttccccaactacatccggccgcggacactgcagccgccctcggccttgcgccgccgccactaccaccacgccttgccgccttcgcgccactatcccggccgggaggcccaggcgcggcgcgcgcaggaggaggcggaggcggaggagcgccggctgcaggagcaggaggagctggagaattacatcgagcacgtgctgctccggcgcccgtgactgcccttcccggtcccgcccccgcgcgcccccgccgcgcgcgcgcgccggcgcccccctccgtgttgcccgctccccctcggtgtttgcatgcgccccggccctgccccttggccctgcccctgtccccgggctgcgtcgggacctgccagacccccctcccgggtcctgagcccgaactcccagagctcacccgcgggtgaccgggggccagcccaggagggcgggtggtttgtgcgagttcccttgccacgcggggccccggccccatcaagtccctctggggacgtccccgtcggaaaccggaaaaagcagttccagttaattgtgtgaagtgtgtctgtctccagcccttcgggcctcccacgagcccctccagcctctccaagtcgctgtgaattgaccccttctttcctttctctgttgtaaatacccctcacggaggaaatagttttgctaagaaataaaagtgactattttattagga

SEQ ID NO: 307615 - DNA, 2477 bp, Artificial Sequence
  derived and/or modified sequence
agatggctcagggaaggggccgaggaggccctgggtaagcgagggcttcgggggttattttcccatttacacggctccagagatcggcacaacatcttcctcctttgctcctaaacgttcctcttctggtctccggcagcctcttggtcatgaaagccctcagattgtcggcttccgccctcttctgccttctgctgatcaacgggttaggggcagcaccccctggtcgccctgaggcgcagcctcctcctctcagctctgagcataaagagccggtagccggggacgcagtgcccgggccaaaggatggcagcgccccagaggtccgaggcgctcggaattccgagccgcaggacgagggagagcttttccagggcgtggatccccgggcgctggccgcggtgctgctgcaggcactcgaccgtcccgcctcacccccggcaccaagcggctcccagcaggggccggaggaagaagcagctgaagctctgctgaccgagaccgtgcgcagccagacccacagcctcccggcgccggagagcccggagcccgcggctccgcctcgccctcagactccggagaatgggcccgaggcgagcgatccctccgaggagctcgaggcgctagcgtccctgctccaggaactgcgagatttcagtccaagtagcgccaagcgccagcaggagacggcggcagcagagacggaaacccgcacgcacacgctgacccgagtgaatctggagagcccggggccagagcgcgtatggcgcgcttcctggggagagttccaggcgcgtgtcccggagcgcgcgcccctgccgcccccggccccctctcaattccaggcgcgtatgcccgacagcgggccccttcccgaaacccacaagttcggggaaggagtgtcctcccccaaaacacacctaggcgaggcattggcacccctgtccaaggcgtaccaaggcgtggccgccccgttccccaaggcgcgccggccggagagcgcactcctgggcggctccgaggcgggcgagcgccttctccagcaagggctggcgcaggtggaggccgggcggcggcaggcggaggccacgcggcaggccgcggcgcaggaagagcggctggccgacctcgcctcggacctgctgctccagtatttgctgcagggcggggcccggcagcgcggcctcgggggtcgggggctgcaggaggcggcggaggagcgagagagtgcaagggaggaggaggaggcggagcaggagagacgcggcggggaggagagggtgggggaagaggatgaggaggcggccgaggcggaggcagaggcggaggaggcggagagggcgcggcagaacgcgctcctgttcgcggaggaggaggacggggaagccggcgccgaggacaagcgctcccaggaggagacgccgggccaccggcggaaggaggccgaggggacagaggagggcggggaggaggaggacgacgaggagatggatccgcagacgatcgacagcctcattgagctgtccaccaaactccacctgccagcggacgacgtggtcagcatcatcgaggaggtggaggagaagcggaagcggaagaagaacgcccctcccgagcccgtgccgcccccccgtgccgcccccgcccccacccacgtccgctccccgcagcccccgccccccgcccccgctcccgcacgagacgagctgccggactggaacgaggtgctcccgccctgggatcgggaggaggacgaggtgtacccgccagggccgtaccaccctttccccaactacatccggccgcggacactgcagccgccctcggccttgcgccgccgccactaccaccacgccttgccgccttcgcgccactatcccggccgggaggcccaggcgcggcgcgcgcaggaggaggcggaggcggaggagcgccggctgcaggagcaggaggagctggagaattacatcgagcacgtgctgctccggcgcccgtgactgcccttcccggtcccgcccccgcgcgcccccgccgcgcgcgcgcgccggcgcccccctccgtgttgcccgctccccctcggtgtttgcatgcgccccggccctgccccttggccctgcccctgtccccgggctgcgtcgggacctgccagacccccctcccgggtcctgagcccgaactcccagagctcacccgcgggtgaccgggggccagcccaggagggcgggtggtttgtgcgagttcccttgccacgcggggccccggccccatcaagtccctctggggacgtccccgtcggaaaccggaaaaagcagttccagttaattgtgtgaagtgtgtctgtctccagcccttcgggcctcccacgagcccctccagcctctccaagtcgctgtgaattgaccccttctttcctttctctgttgtaaatacccctcacggaggaaatagttttgctaagaaataaaagtgactatttt

SEQ ID NO: 307616 - DNA, 1622 bp, Artificial Sequence
  derived and/or modified sequence
gccggagcgagctagccgcccggagccgcgccgacccagctgagcccagcccacgggacgccagacctcgaccgtcgctcctaccccggccaccgctcggagccgaggcggacgcgtcccgatcttcccctgtccccaccctgccccgaccctcctctccacctctcgcgtcgtgacaccagctgtctccggcagcctcttggtcatgaaagccctcagattgtcggcttccgccctcttctgccttctgctgatcaacgggttaggggcagcaccccctggtcgccctgaggcgcagcctcctcctctcagctctgagcataaagagccggtagccggggacgcagtgcccgggccaaaggatggcagcgccccagaggtccgaggcgctcggaattccgagccgcaggacgagggagagcttttccagggcgtggatccccgggcgctggccgcggtgctgctgcaggcactcgaccgtcccgcctcacccccggcaccaagcggctcccagcaggggccggaggaagaagcagctgaagctctgctgaccgagaccgtgcgcagccagacccacagcctcccggcgccggagagcccggagcccgcggctccgcctcgccctcagactccggagaatgggcccgaggcgagcgatccctccgaggagctcgaggcgctagcgtccctgctccaggaactgcgagatttcagtccaagtagcgccaagcgccagcaggagacggcggcagcagagacggaaacccgcacgcacacgctgacccgagtgaatctggagagcccggggccagagcgcgtatggcgcgcttcctggggagagttccaggcgcgtgtcccggagcgcgcgcccctgccgcccccggccccctctcaattccaggcgcgtatgcccgacagcgggccccttcccgaaacccacaagttcggggaaggagtgtcctcccccaaaacacacctaggcgaggcattggcacccctgtccaaggcgtaccaaggcgtggccgccccgttccccaaggcgcgccggccggagagcgcactcctgggcggctccgaggcgggcgagcgccttctccagcaagggctggcgcaggtggaggccgggcggcggcaggcggaggccacgcggcaggccgcggcgcaggaagagcggctggccgacctcgcctcggacctgctgctccagtttgctgcagggcggggcccggcagcgcggccctgccccttggccctgcccctgtccccgggctgcgtcgggacctgccagacccccctcccgggtcctgagcccgaactcccagagctcacccgcgggtgaccgggggccagcccaggagggcgggtggtttgtgcgagttcccttgccacgcggggccccggccccatcaagtccctctggggacgtccccgtcggaaaccggaaaaagcagttccagttaattgtgtgaagtgtgtctgtctccagcccttcgggcctcccacgagcccctccagcctctccaagtcgctgtgaattgaccccttctttcctttctctgttgtaaatacccctcacggaggaaatagttttgctaagaaataaaagtgactattttattagg

SEQ ID NO: 307617 - DNA, 495 bp, Artificial Sequence
  derived and/or modified sequence
atggccgccccccggcccagccccgccatcagcgtgagcgtgagcgcccctgcgttctatgccccccagaagaaatttggtcctgttgtggcccccaagcctaaagttaatccatttcgccctggggattccgaacctccgccggcgcccggagcacagcgggcgcaaatgggaagggtgggagaaatacccccccctcccccagaggacttccctctgccccccccaccacttgcaggggatggagatgatgctgagggtgcactaggcggggccttccctcctcctccccccccaattgaggagagcttcccccccgcccctctggaagaagaaatctttccctcaccccctcccccgcctgaggaggaaggcggccccgaagcacccattcctcccccccctcagcctagagagaaggtgtcgagcattgaccttgagatcgacagcctgagctccttactcgatgatatgactaagaacgatcctttttag

SEQ ID NO: 307618 - protein, 540 aa, Artificial Sequence
  derived and/or modified sequence
AAPRPSPAISVSVSAPAFYAPQKKFGPVVAPKPKVNPFRPGDSEPPPAPGAQRAQMGRVGEIPPPPPEDFPLPPPPLAGDGDDAEGALGGAFPPPPPPIEESFPPAPLEEEIFPSPPPPPEEEGGPEAPIPPPPQVSSGYVPPPVATPFSSKSSTKPAAGGTAPLPPWKSPSSSQPLPQVPAPAQSQTQFHVQPQPQPKPQVQLHVQSQTQPVSLANTQPRGPPASSPAPAPKFSPVTPKFTPVASKFSPGAPGGSGSQPNQKLGHPEALSAGTGSPQPPSFTYAQQREKPRVQEKQHPVPPPAQNQNQVRSPGAPGPLTLKEVEELEQLTQQLMQDMEHPQRQNVAVNELCGRCHQPLARAQPAVRALGQLFHIACFTCHQCAQQLQGQQFYSLEGAPYCEGCYTDTLEKCNTCGEPITDRMLRATGKAYHPHCFTCVVCARPLEGTSFIVDQANRPHCVPDYHKQYAPRCSVCSEPIMPEPGRDETVRVVALDKNFHMKCYKCEDCGKPLSIEADDNGCFPLDGHVLCRKCHTARAQT

SEQ ID NO: 307619 - protein, 485 aa, Artificial Sequence
  derived and/or modified sequence
MGRVGEIPPPPPEDFPLPPPPLAGDGDDAEGALGGAFPPPPPPIEESFPPAPLEEEIFPSPPPPPEEEGGPEAPIPPPPQVSSGYVPPPVATPFSSKSSTKPAAGGTAPLPPWKSPSSSQPLPQVPAPAQSQTQFHVQPQPQPKPQVQLHVQSQTQPVSLANTQPRGPPASSPAPAPKFSPVTPKFTPVASKFSPGAPGGSGSQPNQKLGHPEALSAGTGSPQPPSFTYAQQREKPRVQEKQHPVPPPAQNQNQVRSPGAPGPLTLKEVEELEQLTQQLMQDMEHPQRQNVAVNELCGRCHQPLARAQPAVRALGQLFHIACFTCHQCAQQLQGQQFYSLEGAPYCEGCYTDTLEKCNTCGEPITDRMLRATGKAYHPHCFTCVVCARPLEGTSFIVDQANRPHCVPDYHKQYAPRCSVCSEPIMPEPGRDETVRVVALDKNFHMKCYKCEDCGKPLSIEADDNGCFPLDGHVLCRKCHTARAQT

SEQ ID NO: 307620 - DNA, 459 bp, Artificial Sequence
  derived and/or modified sequence
atgctgttcagcttcgagcacaaggccgtggccctgagcgccacccgaagggctacaccccggccccagccttgggtgcttgggttgcaaggcagaggcggggagggcgatgccaggacctgcggcgcaggacgagagaggggtctgcctgggccagcccttgatactgagccgaggtgggatcccaggcggctttgtgaggccttgcgcgccccaggccggcgcctggagggggctgggcagccaccagccacttccggaggtcccgcgacaagcggccgcagtaaggagccttggggtcacattagcggttgcggcgaccctccaggggcgtttcgcggtagcgggcgtatatgccaaggcacatctggcgcccggccctgcttctgcagagcaccggggtatccttggatggcagcgctttgccctagacggcgccctggacggcactccgggtag

SEQ ID NO: 307621 - DNA, 1623 bp, Artificial Sequence
  derived and/or modified sequence
gccgcccccagacccagccccgccatcagcgtgagcgtgagcgcccccgccttctacgccccccagaagaagttcggccccgtggtggcccccaagcccaaggtgaaccccttcagacccggcgacagcgagcccccccccgcccccggcgcccagagagcccagatgggcagagtgggcgagatccccccccccccccccgaggacttccccctgccccccccccccctggccggcgacggcgacgacgccgagggcgccctgggcggcgccttcccccccccccccccccccatcgaggagagcttcccccccgcccccctggaggaggagatcttccccagccccccccccccccccgaggaggagggcggccccgaggcccccatccccccccccccccaggtgagcagcggctacgtgcccccccccgtggccacccccttcagcagcaagagcagcaccaagcccgccgccggcggcaccgcccccctgcccccctggaagagccccagcagcagccagcccctgccccaggtgcccgcccccgcccagagccagacccagttccacgtgcagccccagccccagcccaagccccaggtgcagctgcacgtgcagagccagacccagcccgtgagcctggccaacacccagcccagaggcccccccgccagcagccccgcccccgcccccaagttcagccccgtgacccccaagttcacccccgtggccagcaagttcagccccggcgcccccggcggcagcggcagccagcccaaccagaagctgggccaccccgaggccctgagcgccggcaccggcagcccccagccccccagcttcacctacgcccagcagagagagaagcccagagtgcaggagaagcagcaccccgtgcccccccccgcccagaaccagaaccaggtgagaagccccggcgcccccggccccctgaccctgaaggaggtggaggagctggagcagctgacccagcagctgatgcaggacatggagcacccccagagacagaacgtggccgtgaacgagctgtgcggcagatgccaccagcccctggccagagcccagcccgccgtgagagccctgggccagctgttccacatcgcctgcttcacctgccaccagtgcgcccagcagctgcagggccagcagttctacagcctggagggcgccccctactgcgagggctgctacaccgacaccctggagaagtgcaacacctgcggcgagcccatcaccgacagaatgctgagagccaccggcaaggcctaccacccccactgcttcacctgcgtggtgtgcgccagacccctggagggcaccagcttcatcgtggaccaggccaacagaccccactgcgtgcccgactaccacaagcagtacgcccccagatgcagcgtgtgcagcgagcccatcatgcccgagcccggcagagacgagaccgtgagagtggtggccctggacaagaacttccacatgaagtgctacaagtgcgaggactgcggcaagcccctgagcatcgaggccgacgacaacggctgcttccccctggacggccacgtgctgtgcagaaagtgccacaccgccagagcccagacctag

SEQ ID NO: 307622 - DNA, 1458 bp, Artificial Sequence
  derived and/or modified sequence
atgggcagagtgggcgagatccccccccccccccccgaggacttccccctgccccccccccccctggccggcgacggcgacgacgccgagggcgccctgggcggcgccttcccccccccccccccccccatcgaggagagcttcccccccgcccccctggaggaggagatcttccccagccccccccccccccccgaggaggagggcggccccgaggcccccatccccccccccccccaggtgagcagcggctacgtgcccccccccgtggccacccccttcagcagcaagagcagcaccaagcccgccgccggcggcaccgcccccctgcccccctggaagagccccagcagcagccagcccctgccccaggtgcccgcccccgcccagagccagacccagttccacgtgcagccccagccccagcccaagccccaggtgcagctgcacgtgcagagccagacccagcccgtgagcctggccaacacccagcccagaggcccccccgccagcagccccgcccccgcccccaagttcagccccgtgacccccaagttcacccccgtggccagcaagttcagccccggcgcccccggcggcagcggcagccagcccaaccagaagctgggccaccccgaggccctgagcgccggcaccggcagcccccagccccccagcttcacctacgcccagcagagagagaagcccagagtgcaggagaagcagcaccccgtgcccccccccgcccagaaccagaaccaggtgagaagccccggcgcccccggccccctgaccctgaaggaggtggaggagctggagcagctgacccagcagctgatgcaggacatggagcacccccagagacagaacgtggccgtgaacgagctgtgcggcagatgccaccagcccctggccagagcccagcccgccgtgagagccctgggccagctgttccacatcgcctgcttcacctgccaccagtgcgcccagcagctgcagggccagcagttctacagcctggagggcgccccctactgcgagggctgctacaccgacaccctggagaagtgcaacacctgcggcgagcccatcaccgacagaatgctgagagccaccggcaaggcctaccacccccactgcttcacctgcgtggtgtgcgccagacccctggagggcaccagcttcatcgtggaccaggccaacagaccccactgcgtgcccgactaccacaagcagtacgcccccagatgcagcgtgtgcagcgagcccatcatgcccgagcccggcagagacgagaccgtgagagtggtggccctggacaagaacttccacatgaagtgctacaagtgcgaggactgcggcaagcccctgagcatcgaggccgacgacaacggctgcttccccctggacggccacgtgctgtgcagaaagtgccacaccgccagagcccagacctag

SEQ ID NO: 307623 - DNA, 1623 bp, Artificial Sequence
  derived and/or modified sequence
gccgctccacggccttcaccggcgatttcagtgtccgtgtcggccccagctttctatgctccacagaaaaagttcgggcccgtggtggcccctaaaccaaaggtgaatccgtttcggcctggggactctgagccgccccctgccccaggcgcacagcgcgcacagatgggccgggtgggggaaattccccccccaccacccgaggacttccctctcccccccccaccactggccggcgatggagatgatgccgagggggcgttgggaggcgctttcccgcctcctccaccccctatcgaggaatccttcccacctgccccactggaagaggagatcttccccagcccccctcctccccctgaggaggagggtggacccgaggctcctattcctccaccgcctcaggtctcctccggctatgtcccaccgccagtggccacgcctttttcctcaaaaagtagcacgaaaccagccgcgggaggaacagcaccactgccaccctggaaatcccccagcagtagccagcctctgccacaggtacccgcccctgcacaatcacaaacacaatttcacgtccagccccaaccgcaacctaaaccacaggtccaactacacgtgcaaagtcaaacgcagcccgtatccctggccaacacccagccccgcgggcctcctgccagttctcccgcacccgcccccaagttctctcccgtgaccccaaagttcactcccgtggcctcgaagtttagccccggcgctccgggaggttccggctcacagcctaatcagaagctgggacatcctgaagccctgagcgccggaactggctcacctcagcccccttccttcacctacgcacagcagcgcgaaaagccaagagtccaggagaagcagcacccagtgcccccacccgcgcaaaaccagaaccaggttagatcccccggagccccagggccacttacgctcaaggaggtcgaggagctggagcagctgacccaacaattgatgcaggatatggagcatccacagaggcagaatgtagctgtgaatgagctgtgcgggagatgtcaccaaccattggcccgcgcgcagccggcggtccgggcgcttgggcaactcttccatattgcctgcttcacatgccatcagtgcgcccagcaactccaggggcaacagttttattcactcgaaggcgccccctactgcgaagggtgttatacggacactttggagaaatgcaacacttgtggcgagcctatcaccgaccgtatgttacgggccaccggaaaggcgtaccatcctcattgctttacatgtgtcgtgtgtgcccgacccctggagggcactagtttcattgtggaccaggcaaacaggccccattgcgtgcccgactaccacaagcaatacgctccaagatgctcagtgtgttcagagccaatcatgcccgaacctggacgggatgaaacagttagagtcgtagccctggataagaacttccatatgaagtgctacaaatgtgaagattgcgggaagccactaagcatcgaggcagacgataatggatgtttcccactggacggacacgtgctgtgtcgcaagtgccatacagccagagctcagacttag

SEQ ID NO: 307624 - DNA, 1458 bp, Artificial Sequence
  derived and/or modified sequence
atgggacgggtcggggaaatacccccaccgccgcctgaggattttcccctacctccccctcctctggccggcgacggtgacgatgcggagggcgccctggggggggcatttccccctccaccgcctcccatcgaagaaagtttccccccagcgccgctggaggaggaaattttcccaagcccccctccgcccccagaagaagaggggggtccagaggcccctatcccacccccaccacaggtgagtagcggatatgtgccaccgcccgtcgcgactcccttttcatcaaagtcaagtaccaaacctgctgcaggtggaactgcccctctgcctccttggaaaagcccctcctcttcccagcctctgcctcaggtgcctgcccccgcccagagccagacgcagttccacgtgcagccacagcctcaacccaagccacaggttcaactgcacgtacaatctcagacccaaccggtctccctcgctaacactcaaccaagggggccgccagcatccagcccagctccggctcccaaatttagtccagtgacccctaagtttactcccgtggcttccaagttctccccaggggcgcctggcgggtctggcagccagccaaatcagaagctggggcaccccgaggctctgagtgcagggaccggttctccgcagcccccaagtttcacctatgctcagcagcgcgagaagcctcgagtgcaggagaagcaacaccccgtcccaccacccgcacagaatcagaaccaggtccgatcaccaggcgcaccaggaccgttaacactcaaagaagtggaagagcttgagcagctcacacagcagcttatgcaggatatggagcatcctcagcgtcaaaacgtcgcagtcaatgaactctgcgggcggtgccaccagccactggcacgggcccagcctgccgtccgggccctcggacagctattccacatcgcttgctttacatgtcatcagtgcgcccaacagctgcaggggcaacaattctattctttagagggcgccccttactgcgaaggctgctacacagataccctggaaaagtgcaatacttgtggggagcccattaccgacaggatgcttagagccacgggaaaagcctaccacccacactgttttacgtgtgtagtgtgcgcaagacctttagaaggtacctcatttatcgtggatcaggccaaccgcccccactgcgttccagattatcataagcagtatgcaccgcgttgctctgtttgttccgaacctattatgccagaaccaggccgagatgagactgtaagggtggtagcactggataagaactttcatatgaagtgctataagtgtgaagactgcggaaaaccgttgtctatagaggctgatgataacggatgtttccccctcgatggacatgtattgtgcaggaagtgtcatactgcgcgcgcccaaacctag

SEQ ID NO: 307625 - DNA, 1623 bp, Artificial Sequence
  derived and/or modified sequence
gctgccccccggcccagccctgccatctctgtgtctgtgtctgccccagccttctacgccccccagaagaagtttggacctgtggtggcccccaagcccaaggtgaaccccttccggcctggggacagcgagcccccaccagcccctggggcccagagggcccagatgggccgggtgggggagatccccccacctcctcctgaggacttccccctgcccccaccacccctggccggagatggagatgatgctgagggcgccctgggcggggccttccccccacctcctccacccatcgaggagagcttccccccagcccccctggaggaggagatcttccccagccccccacctcctcctgaggaggagggcggccctgaggcccccatccccccaccaccccaggtgagcagcggctacgtgcccccacctgtggccacccccttcagcagcaagagcagcaccaagccagctgctgggggcacagcccccctgcccccctggaagagccccagcagcagccagcccctgccccaggtgcctgccccagcccagagccagacccagttccacgtgcagccccagccccagcccaagccccaggtgcagctgcacgtgcagagccagacccagcctgtgtccctggccaacacccagccccggggccccccagccagcagccctgccccagcccccaagttcagccctgtgacccccaagttcacccctgtggccagcaagttcagccctggggcccctgggggcagcggcagccagcccaaccagaagctgggccaccctgaggccctgtctgctggcaccggcagcccccagcccccatccttcacctacgcccagcagcgggagaagccccgggtgcaggagaagcagcaccctgtgcccccaccagcccagaaccagaaccaggtgcgcagccctggggcccctggccccctgaccctgaaggaggtggaggagctggagcagctgacccagcagctgatgcaggacatggagcacccccagaggcagaatgtggccgtgaatgagctgtgtggccgctgccaccagcccctggcccgggcccagcctgctgtgcgggccctgggccagctgttccacatcgcctgcttcacctgccaccagtgtgcccagcagctgcagggccagcagttctacagcctggagggcgccccctactgtgagggctgctacacagacaccctggagaagtgcaacacctgtggggagcccatcacagacaggatgctgcgggccaccgggaaggcctaccacccccactgcttcacctgtgtggtgtgtgcccggcccctggagggcaccagcttcatcgtggaccaggccaaccggccccactgtgtgcctgactaccacaagcagtatgccccccgctgcagcgtgtgcagcgagcccatcatgcctgagcccggcagagatgagaccgtgcgggtggtggccctggacaagaacttccacatgaagtgctacaagtgtgaggactgtgggaagcccctgagcattgaagcagatgacaatggctgcttccccctggatggccacgtgctgtgcaggaagtgccacacagcccgggcccagacctag

SEQ ID NO: 307626 - DNA, 1458 bp, Artificial Sequence
  derived and/or modified sequence
atgggccgggtgggggagatccccccacctcctcctgaggacttccccctgcccccaccacccctggccggagatggagatgatgctgagggcgccctgggcggggccttccccccacctcctccacccatcgaggagagcttccccccagcccccctggaggaggagatcttccccagccccccacctcctcctgaggaggagggcggccctgaggcccccatccccccaccaccccaggtgagcagcggctacgtgcccccacctgtggccacccccttcagcagcaagagcagcaccaagccagctgctgggggcacagcccccctgcccccctggaagagccccagcagcagccagcccctgccccaggtgcctgccccagcccagagccagacccagttccacgtgcagccccagccccagcccaagccccaggtgcagctgcacgtgcagagccagacccagcctgtgtccctggccaacacccagccccggggccccccagccagcagccctgccccagcccccaagttcagccctgtgacccccaagttcacccctgtggccagcaagttcagccctggggcccctgggggcagcggcagccagcccaaccagaagctgggccaccctgaggccctgtctgctggcaccggcagcccccagccccccagcttcacctacgcccagcagcgggagaagccccgggtgcaggagaagcagcaccctgtgcccccaccagcccagaaccagaaccaggtgcgcagccctggggcccctggccccctgaccctgaaggaggtggaggagctggagcagctgacccagcagctgatgcaggacatggagcacccccagaggcagaatgtggccgtgaatgagctgtgtggccgctgccaccagcccctggcccgggcccagcctgctgtgcgggccctgggccagctgttccacatcgcctgcttcacctgccaccagtgtgcccagcagctgcagggccagcagttctacagcctggagggcgccccctactgtgagggctgctacacagacaccctggagaagtgcaacacctgtggggagcccatcacagacaggatgctgcgggccaccgggaaggcctaccacccccactgcttcacctgtgtggtgtgtgcccggcccctggagggcaccagcttcatcgtggaccaggccaaccggccccactgtgtgcctgactaccacaagcagtatgccccccgctgcagcgtgtgcagcgagcccatcatgcctgagcccggcagagatgaaacagtgcgggtggtggccctggacaagaacttccacatgaagtgctacaagtgtgaggactgtgggaagcccctgagcattgaagcagatgacaatggctgcttccccctggatggccacgtgctgtgcaggaagtgccacacagcccgggcccagacctag

SEQ ID NO: 307627 - DNA, 1623 bp, Artificial Sequence
  derived and/or modified sequence
gccgccccccggcccagccccgccatcagcgtgagcgtgagcgccccagcgttttacgcaccacagaagaagtttggaccggttgtggctcctaagccaaaagtgaatcccttcagacccggtgacagcgaaccaccccccgcaccgggagctcagcgggcccagatggggcgggtcggagagattccacctccaccacccgaagacttccctttaccccctcctccgctggctggcgacggcgacgatgccgagggagccctgggcggggccttcccccccccacctccacccattgaagaaagtttcccccccgcacccctggaagaagagattttcccaagtccacctcccccacccgaggaggagggaggacccgaggccccaattcctcctcccccgcaagtttcaagcggttacgtacctccacccgtcgccaccccattctcgtcgaaatcgtctacgaagcccgccgctggcgggaccgcccccctgccgccgtggaagtctccctcctcatcacagcctctgccccaggtccctgctcctgcccagtcccagacgcagtttcacgtgcagccccaacctcaaccaaagccgcaagtccagctccacgttcaaagtcagactcagcccgtatccctcgccaacacgcagccccgtggtccaccagcctctagtccagctcctgcacccaagttctcccccgttactccgaagtttacccctgttgccagcaaatttagccctggggcccccgggggcagcgggagccaaccgaatcagaaattgggccaccccgaagcgctaagcgccggaaccggctcaccccagcctccctctttcacctacgcccagcagcgggagaagccacgggtacaggaaaaacagcatcctgtgcccccacccgcccagaaccagaatcaagttcgtagccctggagcaccagggcctctaaccttgaaggaggtcgaggaactggaacagctcacacagcagttgatgcaggatatggagcaccctcagcggcagaatgtagcagtgaacgagctgtgcggtcgttgtcatcagcccctggctcgcgcacagcctgcagtgcgagccctgggacaacttttccacatcgcatgctttacatgtcatcagtgcgcgcagcagctgcaaggtcagcagttttacagcctcgaaggcgccccatattgtgagggctgctacaccgacacgctggaaaaatgtaacacatgcggggagcctataacagaccgcatgctgagggcaacaggtaaggcttaccatcctcattgctttacgtgcgttgtgtgcgcccggcccctggaagggacaagctttatcgtggaccaggccaaccggccccactgtgtacctgattatcacaagcagtatgccccacggtgcagtgtctgcagtgaacctataatgccggagccaggtcgagacgagaccgttagggtggtcgccctggacaagaatttccatatgaagtgctataaatgcgaagattgtggaaagcccttatcaatagaggcagacgataacggctgcttccccctcgacgggcacgtcttgtgtcgcaaatgccacactgccagggcgcagacatag

SEQ ID NO: 307628 - DNA, 1458 bp, Artificial Sequence
  derived and/or modified sequence
atgggccgggtgggcgagatccccccccccccccccgaggacttcccactcccgcccccccccttagccggcgacggagacgatgctgaaggcgctttgggtggcgcattcccccctcctccaccgcctattgaagagtcatttccaccggctcctttggaggaagagatcttcccaagcccccctcctccacccgaggaagagggggggccagaagcacccatcccacccccaccgcaggtcagttcaggatacgtaccaccaccagtggctacgcccttcagttctaagtcatctaccaaaccagcagctggcggcacagctccactccccccctggaagtctccttccagtagtcagccgctgccacaggtgccagccccggcccaatcccaaacccagttccatgttcagccccagccgcaacctaagcctcaggtccaactacacgtgcagtcacaaacccagccagtgtccttggccaacactcagcctcgtggccctcctgcatcttctcccgccccggctccgaagtttagcccggtgacgcccaaatttactcctgtggcctccaagttcagccccggggcaccggggggttccggaagtcagccaaaccagaagcttggtcatcctgaggccctttcagcgggcaccggctccccacagcctcctagttttacctacgcccaacagcgcgagaaacccagggtgcaggaaaagcagcacccagtgccgccacctgcccagaatcagaatcaggtgcgttcgcctggtgccccaggccctttaacattgaaggaggttgaagaactggagcagctcacccagcaactgatgcaggacatggagcacccacagcggcagaacgttgcagtgaacgagctgtgtggtcggtgccatcagccactggctagagcacaacctgccgtgcgcgccctgggccagttgttccacatagcctgttttacatgtcatcagtgcgcccagcagcttcaaggtcagcaattctactcgctcgaaggcgcgccctattgtgagggatgttacactgataccttggagaagtgcaatacttgtggcgaaccaatcacagatcgaatgctacgggccacaggaaaggcttaccatcctcactgtttcacatgtgtcgtgtgcgccagaccactggaaggcacatctttcatcgtcgaccaggcgaacaggccgcactgcgtccccgattatcacaaacaatatgcaccgagatgttcagtctgctccgagcctattatgccagagccaggaagagacgaaaccgtaagagtggtcgccttggataagaatttccacatgaagtgttacaagtgtgaggattgtggcaagcctctgtctattgaggctgatgacaacggatgctttcccttggacgggcatgttctctgccgtaaatgccacacagcccgggctcaaacatag

SEQ ID NO: 307629 - DNA, 1623 bp, Artificial Sequence
  derived and/or modified sequence
gccgcaccccgtcctagcccagcaatctccgtgtcggtttcagccccagcattttacgccccacagaaaaaatttggtcccgttgtcgcaccaaagcccaaagtgaatccgtttagacctggcgatagcgagccgccaccagctcccggagcgcaaagggctcagatgggtcgggtaggagaaatcccaccccctccgcctgaagatttccctcttcctcctcccccactcgccggtgacggagacgatgcagagggtgctctaggcggagctttccctcccccaccaccacctatagaggaaagctttcccccagcccctctggaagaagagatttttccctctccacctcctccacctgaggaagaggggggacccgaggcgcctatacctccaccaccccaggtcagctctggctacgtgccgccaccggtggccactcctttctcatccaaatcctctacaaagccagcagccggaggtacggcccctctgcccccatggaaaagccctagtagcagccaaccattgcctcaagttcccgctccagcccagtctcagacccagttccatgttcagccacagccgcagcctaagccgcaggttcagctccacgtccaaagccagacccagcccgtgagtctggccaacacacagcctagggggccacctgcatcgtctccagccccagccccaaagttctcgcctgttacaccaaagttcactcctgttgccagtaagttctccccaggggctcccggaggttctggtagtcagccaaatcagaagctcggtcatcccgaagcactgtctgctggtaccggttctccacaacccccttcttttacatacgcccaacaaagagaaaagccccgtgtccaagaaaagcagcatccagtgccgccacccgcacagaatcagaatcaggtgaggtccccgggtgccccagggccactcaccctgaaagaggtggaagaactcgagcagttgactcagcagctcatgcaggacatggagcacccccaacggcagaacgtggctgtgaatgagctctgcggcagatgtcaccagcccctggctcgtgctcaacccgctgtcagagcactgggacaactgtttcacatagcttgtttcacttgtcatcaatgcgcccaacagctccaggggcagcaattttacagcttagagggagccccatattgcgagggctgttacaccgacactttggaaaagtgcaacacatgcggcgagcccatcactgatcggatgctgcgggcaaccggcaaggcttaccatccccattgctttacttgtgtggtctgtgcacgccctcttgagggcacaagttttatcgtcgaccaagcaaaccggccacactgcgtgcctgattaccacaaacagtatgctcccagatgcagcgtctgtagcgagccaattatgcccgagccgggacgcgatgagactgtgcgcgtggttgcgctcgataagaacttccatatgaaatgttacaagtgtgaagactgtggtaagcctctttccattgaagccgatgacaatggctgttttcctctcgatggccacgtgctctgcagaaagtgtcacacggcaagggcacagacctag

SEQ ID NO: 307630 - DNA, 1458 bp, Artificial Sequence
  derived and/or modified sequence
atgggccgagtcggagaaattcctccaccccctccggaggacttcccgttgccaccaccacccctcgctggcgatggcgatgacgcagaaggggctctcggtggcgcattccctcctccgcctcctcccatcgaggaatcatttcccccagcccctcttgaggaagagatatttcccagccccccaccccctcccgaggaggagggcggaccggaagcacccataccgccacctcctcaagtgtcatccggctatgttcccccacccgttgcaaccccattctccagcaaatcctctactaagcccgctgcaggaggaacggcgccactgccaccctggaaaagcccttcctcgagccagccacttccccaagttccagcccctgcccagagtcagactcagttccacgtacagccccagccgcagccaaagccccaagtccaactccacgtccagtctcagacccaacccgtgtcgctggctaacacgcagccgagaggacctcctgctagctcgcccgctccagcacctaagttctctcccgtaacgcccaagtttaccccagtggctagcaaattcagtcctggcgcacccggagggtcaggtagtcagccgaaccagaagctaggccatcctgaggccctgagtgcaggcactggcagcccccaacccccaagcttcacctacgcccagcagcgcgagaagcctagggtgcaagagaaacaacacccagttcctccaccggctcagaatcagaaccaggtgcggtctcctggtgcaccagggccactgaccctcaaagaagtcgaagaactggaacagcttacgcagcagctcatgcaggacatggagcacccacagcgacaaaacgtggctgtaaacgaactgtgtgggaggtgtcaccagccactggccagggctcagccggctgtgcgcgctctgggtcagctgtttcatatcgcgtgctttacatgccaccagtgcgcgcagcagctgcagggccagcagttctattccctcgaaggggcaccatattgtgagggatgttatacggacaccctggaaaagtgtaacacgtgcggggagcctatcactgatcgaatgctccgcgcaacaggcaaggcctaccaccctcattgcttcacctgtgtagtctgcgctaggcccctggagggcacttctttcattgtcgatcaggccaaccggcctcattgcgtgccagactatcataaacagtacgcacccaggtgttcagtctgctcagaaccgatcatgcctgagcccggtagagatgagaccgtcagggtggtggccctggacaaaaacttccacatgaagtgctacaagtgtgaggattgcgggaaacctctgtcaattgaagcagacgacaacggctgcttcccgctcgatggccacgtcctctgccgcaagtgtcacaccgcgagggcccagacttag

SEQ ID NO: 307631 - DNA, 2050 bp, Artificial Sequence
  derived and/or modified sequence
gcggccccccgcccgtctcccgcgatctccgtttcggtctcggctccggctttttacgccccgcagaagaagttcggccctgtggtggccccaaagcccaaagtgaatcccttccggcccggggacagcgagcctcccccggcacccggggcccagcgcgcacagatgggccgggtgggcgagattcccccgccgcccccggaagactttcccctgcctccacctccccttgctggggatggcgacgatgcagagggtgctctgggaggtgccttcccgccgccccctcccccgatcgaggaatcatttccccctgcgcctctggaggaggagatcttcccttccccgccgcctcctccggaggaggagggagggcctgaggcccccataccgcccccaccacaggtgtcatctggatatgtgcccccaccagtggccactccattcagttccaagtccagtaccaagcctgcagccgggggcacagcacccctgcctccttggaagtccccttccagctcccagcctctgccccaggttccggctccggctcagagccagacacagttccatgttcagccccagccccagcccaagcctcaggtccaactccatgtccagtcccagacccagcctgtgtctttggctaacacccagccccgagggcccccagcctcatctccggctccagcccctaagttttctccagtgactcctaagtttactcctgtggcttccaagttcagtcctggagccccaggtggatctgggtcacaaccaaatcaaaaattggggcaccccgaagctctttctgctggcacaggctcccctcaacctcccagcttcacctatgcccagcagagggagaagccccgagtgcaggagaagcagcaccccgtgcccccaccggctcagaaccaaaaccaggtgcgctcccctggggccccagggcccctgactctgaaggaggtggaggagctggagcagctgacccagcagctaatgcaggacatggagcatcctcagaggcagaatgtggctgtcaacgaactctgcggccgatgccatcaacccctggcccgggcgcagccagccgtccgcgctctagggcagctgttccacatcgcctgcttcacctgccaccagtgtgcgcagcagctccagggccagcagttctacagtctggagggggcgccgtactgcgagggctgttacactgacaccctggagaagtgtaacacctgcggggagcccatcactgaccgcatgctgagggccacgggcaaggcctatcacccgcactgcttcacctgtgtggtctgcgcccgccccctggagggcacctccttcatcgtggaccaggccaaccggccccactgtgtccccgactaccacaagcagtacgccccgaggtgctccgtctgctctgagcccatcatgcctgagcctggccgagatgagactgtgcgagtggtcgccctggacaagaacttccacatgaagtgttacaagtgtgaggactgcgggaagcccctgtcgattgaggcagatgacaatggctgcttccccctggacggtcacgtgctctgtcggaagtgccacactgctagagcccagacctgagtgaggacaggccctcttcagaccgcagtccatgccccattgtggaccacccacactgagaccacctgcccccacctcagttattgttttgatgtctagcccctcccatttccaacccctccctagcatcccaggtgccctgacccaggacccaacatggtctagggatgcaggatccccgccctggggtctggtcctcgcccatcctgcagggattgcccaccgtcttccagacaccccacctgaggggggcaccaggtttagtgctgctgctttcactgctgcacccgcgccctcggccggccccccgagcagcctttgtactctgcttgcggagggctgggagaccctccaggacattcccaccctcccccatgctgccaagttgtagctatagctacaaataaaaaaaaaccttgttttccag

SEQ ID NO: 307632 - protein, 895 aa, Artificial Sequence
  derived and/or modified sequence
MWTEEAGATAEAQESGIRNKSSSSSQIPVVGVVTEDDEAQDVFKPMDLNRVIKLLEETDKDGLEEKQLKFVKKLVQCYQNGLPLRDLAQIFKILNLCSGKIKNQPRFIESAYDIIKLCGLPFLKKKVSDEITYAEDTANSIALLGDLMKIPSSELRIQICKCIVDFYHAEPPKKHIPGYQQASSSYKIQMAEVGGLAKTMVQSMTLLENQLVEKLWVLKVLQHLSTSEVNCTIMMKAQAASGICTHLNDPDPSGQLLFRSSEILWNLLEKSSKEEVIQQLSNLECLLALKEVFKNLFMRGFSHYDRQLRNDILVITTIIAQNPEAPMIECGFTKDLILFATFNEVKSQNLLVKGLKLSNSYEDFELKKLLFNVIVILCKDLPTVQLLIDGKVILALFTYVKKPEKQKIIDWSAAQHEELQLHAIATLSSVAPLLIEEYMSCQGNARVLAFLEWCESEDPFFSHGNSFHGTGGRGNKFAQMRYSLRLLRAVVYLEDETVNKDLCEKGTIQQMIGIFKNIISKPNEKEEAIVLEIQSDILLILSGLCENHIQRKEIFGTEGVDIVLHVMKTDPRKLQSGLGYNVLLFSTLDSIWCCILGCYPSEDYFLEKEGIFLLLDLLALNQKKFCNLILGIMVEFCDNPKTAAHVNAWQGKKDQTAASLLIKLWRKEEKELGVKRDKNGKIIDFENLPGLSAEDFVTLCIIHRYLDFKIGEIWNEIYEEIKLEKLRPVTTDKKALEAITTASENIGKMVASLQSDIIESQACQDMQNEQKVYAKIQATHKQRELANKSWEDFLARTSNAKTLKKAKSLQEKAIEASRYHKRPQNAIFHQTHIKGLNTTVPSGGVVTVESTPARLVGGPLVDTDIALKKLPIRGGALQRVKAVKIVDAPKKSIPT

SEQ ID NO: 307633 - DNA, 1113 bp, Artificial Sequence
  derived and/or modified sequence
atgatcccctgcaagcacgtgttttgctatgactgtgccatcctgcatgaaaagaaaggagataaaatgtgtccaggttgcagtgacccagtgcagaggatcgaacagtgcacgcgaggcagtttgtttatgtgttcaattgttcagggttgcaaaagaacttatctctcacaacgcgacctgcaggcgcacatcaatcacagacatatgcgcgctgggaagcccgtcacccgggcttctctagagaacgtacatcctcctattgcccctccacctaccgagatccctgagagatttatcatgccaccagacaaacaccatatgagccacatccccccgaagcagcacatcatgatgccaccgcctcctctgcaacatgtgccacacgagcactacaatcagccacacgaggacataagggccccccctgcagagctgagcatggcacccccgccaccaaggagtgtaagtcaagagacttttcgaatttcaactcgcaagcacagcaatctgatcacagtgccgattcaggacgattcaaattccggcgccagggagccacctcctccagcacctgctcctgcgcatcaccacccagagtatcagggtcagcccgtggtatctcatccccatcacattatgccgcctcagcagcactatgctccaccgccccctccacccccccccatctcacatccaatgccccatccaccacaggcagcgggaaccccacacttagtctattcacaggcacccccaccacccatgacatcagctccacctcccatcactcctcccccaggtcacatcatcgcccagatgcccccctatatgaaccatccgcctcccggccccccacctccacagcatgggggtccgcctgtgaccgccccccccccccaccattacaatcctaattcccttccacagtttactgaagatcagggaacgctctctcctccctttacgcaacctgggggtatgagccctggcatctggcctgcgccacgcggcccacctccgcctcctaggttgcaagggcctcctagtcagacacctctgcctggcccacaccatccagatcaaacacgctaccgcccctactatcagtag

SEQ ID NO: 307634 - DNA, 1113 bp, Artificial Sequence
  derived and/or modified sequence
atgatcccctgcaagcacgtgttctgctatgactgtgccatcctgcacgagaagaagggggacaagatgtgccccggctgcagcgaccctgtgcagagaattgagcagtgcacccggggcagcctcttcatgtgcagcatcgtgcagggctgcaagaggacctacctgagccagagggacctgcaggcccacatcaaccaccgccacatgagagctgggaagcctgtgacccgggccagcctggagaatgtgcacccccccatcgcccccccacccacagagatccctgagcgcttcatcatgcccccagacaagcaccacatgagccacatcccccccaagcagcacatcatgatgcctcctccacccctgcagcacgtgccccatgagcactacaaccagccccatgaggacatccgggcccccccagctgagctgtccatggcccctcctccacccaggtctgtgtcccaggagaccttccgcatcagcaccaggaagcacagcaacctgatcaccgtgcccatccaggatgacagcaacagcggggcccgggagcccccacctccagccccagccccagcccaccaccaccctgagtaccagggccagcctgtggtgagccacccccaccacatcatgccaccccagcagcactacgcccctcctcctcctcctcctccacccatcagccaccccatgccccaccccccccaggccgccggcaccccccacctggtgtacagccaggcccctcctccacccatgaccagcgcccccccacccatcaccccacctcctggccacatcatcgcccagatgccaccctacatgaaccaccccccacctggccccccaccaccccagcacggcggcccccctgtgacagcccccccaccccaccactacaaccccaacagcctgccccagttcacagaggaccagggcaccctgagcccccccttcacccagcccggcggcatgagccctggcatctggccagccccccggggccccccacctccaccccggctgcagggcccccccagccagacccccctgcccggcccccaccacccagaccagacccgctaccggccctactaccagtag

SEQ ID NO: 307635 - DNA, 1113 bp, Artificial Sequence
  derived and/or modified sequence
atgatcccctgcaagcacgtgttctgctacgactgcgccatcctgcatgagaaaaagggagataagatgtgtcctggctgctctgaccccgttcagaggatagagcagtgcacacggggcagcctgttcatgtgcagcatcgtgcaaggctgtaaacggacatacctgtctcagcgcgacctgcaggcccatatcaatcatcggcatatgagggccgggaagccagtgactcgggcctctcttgaaaacgtgcaccctccaatcgccccacctcctaccgagatccccgaacggttcatcatgccccctgacaaacaccacatgagtcacattccaccgaaacagcacattatgatgcctccgcccccgctccaacacgtgcctcatgagcactataaccaaccccatgaggacattagagctccccccgccgagctcagcatggccccaccgccgcctagatccgtatcccaagaaactttcagaatatccactagaaagcactctaacctgatcactgtgccaatacaggacgactccaattctggcgctcgcgaaccgcctcccccagctccggctccagcacatcatcacccagaatatcagggtcagcctgtagtctcgcatccccatcatataatgcctccccagcaacactacgctccccccccgccccctccccccccaatctcacatcctatgccacatccaccccaggccgccggtacccctcaccttgtttactctcaggctccacctccccctatgacatccgcgcctccgccaatcacaccacctcccggccacataattgcacagatgccgccttacatgaatcacccgccacccgggcctccccctccacagcacggcggccctcctgttacagcacccccaccacatcactacaacccaaattcccttccccagttcactgaggaccagggcactctgagtccgcccttcacccaacctggggggatgagccccgggatctggcctgcaccacgagggcccccgccgccaccacgactccagggtccaccttctcagactccattacctggaccacaccaccctgaccagacccgttacaggccctattaccagtag

SEQ ID NO: 307636 - DNA, 1113 bp, Artificial Sequence
  derived and/or modified sequence
atgattccatgtaaacacgtgttctgctatgactgcgctattttgcacgaaaagaagggcgacaagatgtgcccgggatgtagcgaccccgtgcagagaatcgagcaatgtacaaggggctctttgttcatgtgttccatcgtacaaggctgtaaacgcacttatctgtcacaaagagacctgcaggcccatatcaaccaccggcacatgagagctgggaagccggtcaccagagcgtccctggaaaatgtccatccgccaatcgcccctcctcctacggaaatccccgaacgtttcattatgccccctgataaacaccatatgtcacacattccccctaagcagcacatcatgatgccgccaccgcctctgcagcacgtgccccacgaacactacaatcaaccccatgaagatatacgtgcaccaccggctgagctgtcgatggcccctccacctccaaggagcgtgtctcaggagacatttcgaattagcacacggaaacacagtaacctgatcacagtgcctatccaggacgatagtaattccggcgctagggagcctccaccgccagcgcctgcccctgcccaccatcatccagagtaccagggccagccagtcgtatctcacccacaccacatcatgccccctcagcagcactacgcgcctccccctccccctccacccccaatctcccaccctatgccccatcccccacaggctgctggaacaccgcaccttgtttatagccaagcccctccgccacctatgacctccgcaccccctcccatcacccccccacccggtcatatcatcgcacagatgcccccttacatgaatcatcccccacctggccctccccctccacaacatgggggtccacctgtgaccgctccccctcctcaccattacaatccaaactcactgccacagttcaccgaggatcaggggactctttcccccccattcacccagcccggaggtatgtccccgggtatttggcccgctccgaggggtccaccccctccgcctaggctccaggggcctccaagtcagacccccctacccggacctcaccatccagaccagaccagataccgcccttattaccagtag

SEQ ID NO: 307637 - DNA, 1113 bp, Artificial Sequence
  derived and/or modified sequence
atgatcccctgcaagcacgtgttctgctacgactgcgccatcctgcacgagaagaagggcgacaagatgtgccccggctgcagcgaccccgtgcagagaatcgagcagtgcaccagaggcagcctgttcatgtgcagcatcgtgcagggctgcaagagaacctacctgagccagagagacctgcaggcccacatcaaccacagacacatgagagccggcaagcccgtgaccagagccagcctggagaacgtgcacccccccatcgcccccccccccaccgagatccccgagagattcatcatgccccccgacaagcaccacatgagccacatcccccccaagcagcacatcatgatgccccccccccccctgcagcacgtgccccacgagcactacaaccagccccacgaggacatcagagccccccccgccgagctgagcatggccccccccccccccagaagcgtgagccaggagaccttcagaatcagcaccagaaagcacagcaacctgatcaccgtgcccatccaggacgacagcaacagcggcgccagagagccccccccccccgcccccgcccccgcccaccaccaccccgagtaccagggccagcccgtggtgagccacccccaccacatcatgcccccccagcagcactacgccccccccccccccccccccccccccatcagccaccccatgccccaccccccccaggccgccggcaccccccacctggtgtacagccaggccccccccccccccatgaccagcgcccccccccccatcacccccccccccggccacatcatcgcccagatgcccccctacatgaaccaccccccccccggccccccccccccccagcacggcggcccccccgtgaccgccccccccccccaccactacaaccccaacagcctgccccagttcaccgaggaccagggcaccctgagcccccccttcacccagcccggcggcatgagccccggcatctggcccgcccccagaggccccccccccccccccagactgcagggcccccccagccagacccccctgcccggcccccaccaccccgaccagaccagatacagaccctactaccagtag

SEQ ID NO: 307638 - protein, 564 aa, Artificial Sequence
  derived and/or modified sequence
MDDFERRRELRRQKREEMRLEAERIAYQRNDDDEEEAARERRRRARQERLRQKQEEESLGQVTDQVEVNAQNSVPDEEAKTTTTNTQVEGDDEAAFLERLARREERRQKRLQEALERQKEFDPTITDASLSLPSRRMQNDTAENETTEKEEKSESRQERYEIEETETVTKSYQKNDWRDAEENKKEDKEKEEEEEEKPKRGSIGENQGEEKGTKVQAKREKLQEDKPTFKKEEIKDEKIKKDKEPKEEVKSFMDRKKGFTEVKSQNGEFMTHKLKHTENTFSRPGGRASVDTKEAEGAPQVEAGKRLEELRRRRGETESEEFEKLKQKQQEAALELEELKKKREERRKVLEEEEQRRKQEEADRKLREEEEKRRLKEEIERRRAEAAEKRQKMPEDGLSDDKKPFKCFTPKGSSLKIEERAEFLNKSVQKSSGVKSTHQAAIVSKIDSRLEQYTSAIEGTKSAKPTKPAASDLPVPAEGVRNIKSMWEKGNVFSSPTAAGTPNKETAGLKVGVSSRINEWLTKTPDGNKSPAPKPSDLRPGDVSSKRNLWEKQSVDKVTSPTKV

SEQ ID NO: 307639 - protein, 72 aa, Artificial Sequence
  derived and/or modified sequence
MDDFERRRELRRQKREEMRLEAERIAYQRNDDDEEEAARERRRRARQERLRQKQEEESLGQVTDQVEVNAQN

SEQ ID NO: 307640 - DNA, 444 bp, Artificial Sequence
  derived and/or modified sequence
tgaattgcgactaaagaggagtttacagcattcctccacccagaagaatatgactatatgaaggacatcgtggtccaagagaccatggaagacattgacaagaacgccgatggcttcatagatttagaagaatacattggggatatgtactcccacgacggtaacaccgacgagccagaatgggtcaagacagagcgcgagcaattcgtggagttccgcgacaagaatagagatggcaaaatggataaagaagaaacaaaggattggatcctgccctcagactacgaccatgcagaagctgaggcccgccatctggtttatgaatccgaccagaataaggatggaaagctaaccaaggaggagatagtagataaatacgatcttttcgttggttcccaagccacagactttggcgaggccttagtcaggcacgacgaattctag

SEQ ID NO: 307641 - DNA, 495 bp, Artificial Sequence
  derived and/or modified sequence
atgatggtgagggatgaaaggcgttttaaaatggccgataaagatggggatctgatcgccaccaaggaggagttcactgctttcttacaccccgaagaatatgattacatgaaagacattgtggtgcaggaaactatggaggatattgacaaaaatgcagacggattcatcgatctcgaagagtatattggtgacatgtattcgcacgatggcaacacagatgaacctgagtgggttaaaacggagagagaacagttcgttgaatttagggacaaaaacagagacggaaagatggataaggaagagactaaagactggattttacctagtgattacgatcacgcagaagcagaagcaagacaccttgtgtacgagtccgaccagaacaaggacggaaagctgactaaagaggagattgtggacaaatacgacttgtttgttgggagtcaggcaaccgactttggtgaggccttagtgaggcacgatgagttctag

SEQ ID NO: 307642 - DNA, 444 bp, Artificial Sequence
  derived and/or modified sequence
tgaattgccaccaaggaggagttcaccgccttcctgcaccctgaggagtatgactacatgaaggacatcgtggtgcaggagaccatggaggacatcgacaagaatgctgatggcttcatcgacctggaggagtacatcggggacatgtacagccatgatggcaacacagatgagcctgagtgggtgaagacagagcgggagcagtttgtggagttccgggacaagaacagagatggcaagatggacaaggaggagaccaaggactggatcctgcccagcgactatgaccacgccgaggccgaggcccggcacctggtgtatgaaagtgaccagaacaaggatggcaagctgaccaaggaggagatcgtggacaagtatgacctgtttgtgggcagccaggccacagactttggagaggccctggtgagacatgatgagttctag

SEQ ID NO: 307643 - DNA, 495 bp, Artificial Sequence
  derived and/or modified sequence
atgatggtgagagatgaaagacgcttcaagatggctgacaaggatggagacctgattgccaccaaggaggagttcaccgccttcctgcaccctgaggagtatgactacatgaaggacatcgtggtgcaggagaccatggaggacatcgacaagaatgctgatggcttcatcgacctggaggagtacatcggggacatgtacagccatgatggcaacacagatgagcctgagtgggtgaagacagagcgggagcagtttgtggagttccgggacaagaacagagatggcaagatggacaaggaggagaccaaggactggatcctgcccagcgactatgaccatgctgaggccgaggcccggcacctggtgtatgaaagtgaccagaacaaggatggcaagctgaccaaggaggagatcgtggacaagtatgacctgtttgtgggcagccaggccacagactttggagaggccctggtgagacatgatgagttctag

SEQ ID NO: 307644 - DNA, 444 bp, Artificial Sequence
  derived and/or modified sequence
tgaatcgccaccaaggaggagttcaccgccttcctgcaccccgaggagtacgactacatgaaggatattgtagttcaggagaccatggaggatattgataagaatgctgacggcttcatcgatctggaggagtatatcggcgacatgtacagtcacgatgggaatactgacgagccagagtgggttaaaacagaacgagagcagttcgtcgagtttagagacaagaatcgggacggaaagatggacaaggaagagaccaaggactggatcctgccatcagactatgaccacgcagaagcagaagcacgccacttggtgtacgagtcagaccagaacaaggacggtaaactcacgaaagaggaaatcgtggataagtatgatttgttcgtagggagccaggcaaccgatttcggtgaggcccttgtgcggcatgacgagttttag

SEQ ID NO: 307645 - DNA, 495 bp, Artificial Sequence
  derived and/or modified sequence
atgatggtgcgggacgagcggcggttcaagatggccgacaaggacggcgaccttattgccaccaaagaagaatttacagccttcctgcatcccgaggagtatgattatatgaaggacatcgtggtgcaggaaacaatggaagacatagataaaaatgctgacggattcatagatctggaagaatacatcggcgatatgtactcccacgacggtaacacagacgaacctgaatgggttaaaaccgagcgggagcagttcgtggaattcagggataaaaatagagacggaaagatggacaaggaagagacgaaggactggatcttaccttccgattacgaccacgccgaagccgaagctcgacacctggtgtacgagagtgatcagaacaaggacggaaagttaactaaggaggagattgttgacaaatatgatctctttgttgggtcacaagccactgattttggcgaggcactggtgaggcacgatgagttttag

SEQ ID NO: 307646 - DNA, 444 bp, Artificial Sequence
  derived and/or modified sequence
tgaattgctacaaaggaggagttcaccgctttccttcaccccgaggagtacgattacatgaaggatatcgtcgtacaagaaacgatggaggacatagacaagaacgcagacggcttcatcgatctggaggagtatatcggcgacatgtactctcacgatggcaatacagatgagcccgagtgggtgaagacggagagggagcaattcgtcgagtttagagataagaacagagatggaaaaatggacaaagaggagaccaaggattggattctaccttcagattatgaccacgctgaggctgaggccaggcatttagtgtatgaatccgatcagaataaggacggcaaacttacaaaagaggaaattgtggataagtatgacctctttgttggaagccaggccaccgatttcggtgaggcactagtgcgccatgatgaattctag

SEQ ID NO: 307647 - DNA, 495 bp, Artificial Sequence
  derived and/or modified sequence
atgatggtgcgggatgagagaaggttcaagatggcagacaaagacggtgacctgatcgctactaaagaagagttcactgcatttctgcatcccgaggaatatgattacatgaaggacattgtggtgcaggagacgatggaagacattgataagaacgctgatggattcatagatttggaggagtatatcggagatatgtacagccacgacggaaatacggatgaacccgaatgggtaaagacggagcgagagcagtttgtcgagtttagagataaaaatagagacggcaaaatggacaaagaagagaccaaggactggatcctgccttcggattatgaccatgcagaggctgaagctaggcaccttgtatacgagagtgatcagaacaaagacgggaagctgaccaaagaagaaatcgtggacaaatacgatctcttcgtagggtcccaggcgaccgattttggggaagctctcgtccggcacgacgagttttag

SEQ ID NO: 307648 - DNA, 444 bp, Artificial Sequence
  derived and/or modified sequence
tgaatcgccacgaaggaagaattcactgcttttttgcacccagaagaatacgactatatgaaggacatcgttgttcaggagacaatggaggatatcgataagaacgcagatgggtttatagacctcgaagagtacattggagacatgtattcacacgatggaaacaccgatgaaccagagtgggttaaaacagaaagagaacagtttgttgaatttcgtgataagaatcgtgacgggaagatggataaggaggaaactaaggactggatcctaccaagcgattatgaccatgccgaggccgaagctcgtcacctcgtttacgaatccgatcaaaataaagacgggaaactcacgaaggaagaaatcgtagataagtacgacctttttgtcggatcgcaagccacggactttggggaagccctcgttcgccacgacgaattttag

SEQ ID NO: 307649 - DNA, 495 bp, Artificial Sequence
  derived and/or modified sequence
atgatggtgcgtgatgagaggaggttcaaaatggctgacaaggacggcgacctaattgccactaaagaggagtttaccgctttcctgcaccctgaagaatatgattacatgaaagacatcgttgtccaggaaactatggaggacatcgacaagaacgctgacggatttatcgaccttgaggaatatattggcgatatgtactcgcatgatggtaacaccgacgagcccgagtgggtcaaaacggaaagggagcaattcgttgagtttagggacaaaaatagagatggcaaaatggataaggaggaaacaaaagattggatactgccatcggactacgaccacgccgaagccgaggctaggcatctggtgtacgaatctgaccagaacaaagatggaaagctcacaaaagaagaaattgtagacaaatacgatctgttcgtaggtagccaggcgacagatttcggtgaggcacttgtgcggcacgacgaattttag

SEQ ID NO: 307650 - DNA, 444 bp, Artificial Sequence
  derived and/or modified sequence
tagatcgccaccaaggaagaatttaccgcatttctgcatccagaggaatacgattacatgaaagacatcgtcgttcaggagactatggaagatattgataaaaatgctgatggcttcatcgatctagaagagtatattggcgacatgtacagtcacgacggcaacacagatgagccggaatgggttaagaccgagcgggaacaatttgtcgagttccgggacaaaaaccgagatggcaaaatggataaggaggagacaaaagactggatactcccaagcgactacgaccatgctgaggctgaggccaggcacttagtttacgaatcagatcagaataaggacggaaagctaactaaagaagagattgtagataagtacgatctatttgtgggatcacaagccaccgattttggggaagctttagtacgccatgatgaattctag

SEQ ID NO: 307651 - DNA, 495 bp, Artificial Sequence
  derived and/or modified sequence
atgatggtccgcgacgaacggcgctttaagatggcagataaagacggggatcttatagcaaccaaggaagaatttacagccttcctgcaccccgaggaatatgactatatgaaggacattgtagtacaagagaccatggaggatattgacaagaacgctgatggatttattgacctcgaagagtacatcggagacatgtacagccacgacgggaatactgacgaaccggaatgggtcaagacagaaagagaacagtttgtagaatttagggacaaaaatcgagacgggaagatggacaaggaagagacgaaagactggatcctcccgtcagactacgatcatgctgaggcagaagcccgccaccttgtgtatgaaagtgaccaaaataaagatggaaagctcaccaaagaggagatcgttgacaagtatgaccttttcgtcggctctcaggccacagattttggagaggctctcgtgcgccacgatgaattctag

SEQ ID NO: 307652 - DNA, 589 bp, Artificial Sequence
  derived and/or modified sequence
cattgccaccaaggaggagttcacagctttcctgcaccctgaggagtatgactacatgaaagatatagtagtacaggaaacaatggaagatatagataagaatgctgatggtttcattgatctagaagagtatattggtgacatgtacagccatgatgggaatactgatgagccagaatgggtaaagacagagcgagagcagtttgttgagtttcgggataagaaccgtgatgggaagatggacaaggaagagaccaaagactggatccttccctcagactatgatcatgcagaggcagaagccaggcacctggtctatgaatcagaccaaaacaaggatggcaagcttaccaaggaggagatcgttgacaagtatgacttatttgttggcagccaggccacagattttggggaggccttagtacggcatgatgagttctgagctacggaggaaccctcatttcctcaaaagccgtataactggagagacctgctgctcgttatataattatctgataccaaacacaagcgattctgaatgtacacacacgtttatctatagagcataaggtaaaacaattttgtttaa

SEQ ID NO: 307653 - DNA, 4418 bp, Artificial Sequence
  derived and/or modified sequence
gattggtcgggaggccgccggcgaggcggatgagggcggggtgcggacccgcttccggttgggcggtgcttgcgcgcgtgagctgagccggtgggtgagcggcggccacggcatcctgtgctgtgggggctacgaggaaaggacctcccaccctcccccactgagctgccttcccagtgatgaaagaaaaaatgtaaaagcctgaaaacccttcttcttgatttttaatttttttttttccctctaagaccttaaccactctggatagtatcacggggtatcagtagagtgtgctaaacagatgtgtactctgcagcttctttgcaggttttttgtcacatttttcagtcaagtgttccagctttgtgcttgttcattagagtcacctgtgactacagagattctgaaagtttgaatcagggcctgggaatctgtactttgaacagtactacaggtggtatttatgcctaggcaagtatgggaaacaactgtgcagaaggataaagacgttcttatctatgactagaccatctgaatgatttggcctttgaaggtgactcaaggttgagcctggatgttggagacttggtgctatagaccaaggaagctgccaagtatttcgctggttcctaatctcatgaacatcagaatcacctgaaaaacatttaaagctacgaatgtctgaattcagcttcagagactctaaatcaataggagaaacttaaagcttcctagatgattctaataaccagccatgtttgaagaccagaccaccaatgcgtacaagaagtaaaggatttggagtcaacatttaaaccttggttctttcacttttaattcttatgaacttgggcaaaaggattaaaattctactttggtatcttttgaaagaaaacagaaagtggacattttaactataagtttcttatcagcctacaatcagatgaaggaaactgatctaattatcatggacctgcgacagtttcttatgtgcctgtccctgtgcacagcctttgccttgagcaaacccacagaaaagaaggaccgtgtacatcatgagcctcagctcagtgacaaggttcacaatgatgctcagagttttgattatgaccatgatgccttcttgggtgctgaagaagcaaagacctttgatcagctgacaccagaagagagcaaggaaaggcttggaaagattgtaagtaaaatagatggcgacaaggacgggtttgtcactgtggatgagctcaaagactggattaaatttgcacaaaagcgctggatttacgaggatgtagagcgacagtggaaggggcatgacctcaatgaggacggcctcgtttcctgggaggagtataaaaatgccacctacggctacgttttagaatgattgtagataaaatagacgcggataaagatgggtttgtgacggagggggagctgaaatcctggattaagcacgcccagaagaaatacatatatgacaatgttgaaaaccaatggcaggagtttgatatgaatcaagacggcttaatctcctgggatgagtacagaaacgtgacttatggcacttacctggatgatccagatcctgatgatggatttaactataaacagatgatggttagagatgagcggaggtttaaaatggcagacaaggatggagacctcattgccaccaaggaggagttcacagctttcctgcaccctgaggagtatgactacatgaaagatatagtagtacaggaaacaatggaagatatagataagaatgctgatggtttcattgatctagaagagtatattggtgacatgtacagccatgatgggaatactgatgagccagaatgggtaaagacagagcgagagcagtttgttgagtttcgggataagaaccgtgatgggaagatggacaaggaagagaccaaagactggatccttccctcagactatgatcatgcagaggcagaagccaggcacctggtctatgaatcagaccaaaacaaggatggcaagcttaccaaggaggagatcgttgacaagtatgacttatttgttggcagccaggccacagattttggggaggccttagtacggcatgatgagttctgagctacggaggaaccctcatttcctcaaaagtaatttatttttacagcttctggtttcacatgaaattgtttgcgctactgagactgttactacaaactttttaagacatgaaaaggcgtaatgaaaaccatcccgtccccattcctcctcctctctgagggactggagggaagccgtgcttctgaggaacaactctaattagtacacttgtgtttgtagatttacactttgtattatgtattaacatggcgtgtttatttttgtatttttctctggttgggagtatgatatgaaggatcaagatcctcaactcacacatgtagacaaacattagctctttactctttctcaaccccttttatgattttaataattctcacttaactaattttgtaagcctgagatcaataagaaatgttcaggagagaggaaagaaaaaaaatatatgctccacaatttatatttagagagagaacacttagtcttgcctgtcaaaaagtccaacatttcataggtagtaggggccacatattacattcagttgctataggtccagcaactgaacctgccattacctgggcaaggaaagatccctttgctctaggaaagcttggcccaaattgattttcttctttttccccctgtaggactgactgttggctaattttgtcaagcacagctgtggtgggaagagttagggccagtgtcttgaaaatcaatcaagtagtgaatgtgatctctttgcagagctatagatagaaacagctggaaaactaaaggaaaaatacaagtgttttcggggcatacattttttttctgggtgtgcatctgttgaaatgctcaagacttaattatttgccttttgaaatcactgtaaatgcccccatccggttcctcttcttcccaggtgtgccaaggaattaatcttggtttcactacaattaaaattcactcctttccaatcatgtcattgaaagtgcctttaacgaaagaaatggtcactgaatgggaattctcttaagaaaccctgagattaaaaaaagactatttggataacttataggaaagcctagaacctcccagtagagtggggatttttttcttcttccctttctcttttggacaatagttaaattagcagtattagttatgagtttggttgcagtgttcttatcttgtgggctgatttccaaaaaccacatgctgctgaatttaccagggatcctcatacctcacaatgcaaaccacttactaccaggcctttttctgtgtccactggagagcttgagctcacactcaaagatcagaggacctacagagagggctctttggtttgaggaccatggcttacctttcctgcctttgacccatcacaccccatttcctcctctttccctctccccgctgccaaaaaaaaaaaaaaaggaaacgtttatcatgaatcaacagggtttcagtccttatcaaagagagatgtggaaagagctaaagaaaccaccctttgttcccaactccactttacccatattttatgcaacacaaacactgtccttttgggtccctttcttacagatggacctcttgagaagaattatcgtattccacgtttttagccctcaggttaccaagataaatatatgtatatataacctttattattgctatatctttgtggataatacattcaggtggtgctgggtgatttattataatctgaacctaggtatatcctttggtcttccacagtcatgttgaggtgggctccctggtatggtaaaaagccaggtataatgtaacttcaccccagcctttgtactaagctcttgatagtggatatactcttttaagtttagccccaatatagggtaatggaaatttcctgccctctgggttccccatttttactattaagaagaccagtgataatttaataatgccaccaactctggcttagttaagtgagagtgtgaactgtgtggcaagagagcctcacacctcactaggtgcagagagcccaggccttatgttaaaatcatgcacttgaaaagcaaaccttaatctgcaaagacagcagcaagcattatacggtcatcttgaatgatccctttgaaattttttttttgtttgtttgtttaaatcaagcctgaggctggtgaacagtagctacacacccatattgtgtgttctgtgaatgctagctctcttgaatttggatattggttattttttatagagtgtaaaccaagttttatattctgcaatgcgaacaggtacctatctgtttctaaataaaactgtttacattcatt

SEQ ID NO: 307654 - DNA, 2983 bp, Artificial Sequence
  derived and/or modified sequence
gattggtcgggaggccgccggcgaggcggatgagggcggggtgcggacccgcttccggttgggcggtgcttgcgcgcgtgagctgagccggtgggtgagcggcggccacggcatcctgtgctgtgggggctacgaggaaagatgatccagatcctgatgatggatttaactataaacagatgatggttagagatgagcggaggtttaaaatggcagacaaggatggagacctcattgccaccaaggaggagttcacagctttcctgcaccctgaggagtatgactacatgaaagatatagtagtacaggaaacaatggaagatatagataagaatgctgatggtttcattgatctagaagagtatattggtgacatgtacagccatgatgggaatactgatgagccagaatgggtaaagacagagcgagagcagtttgttgagtttcgggataagaaccgtgatgggaagatggacaaggaagagaccaaagactggatccttccctcagactatgatcatgcagaggcagaagccaggcacctggtctatgaatcagaccaaaacaaggatggcaagcttaccaaggaggagatcgttgacaagtatgacttatttgttggcagccaggccacagattttggggaggccttagtacggcatgatgagttctgagctacggaggaaccctcatttcctcaaaagtaatttatttttacagcttctggtttcacatgaaattgtttgcgctactgagactgttactacaaactttttaagacatgaaaaggcgtaatgaaaaccatcccgtccccattcctcctcctctctgagggactggagggaagccgtgcttctgaggaacaactctaattagtacacttgtgtttgtagatttacactttgtattatgtattaacatggcgtgtttatttttgtatttttctctggttgggagtatgatatgaaggatcaagatcctcaactcacacatgtagacaaacattagctctttactctttctcaaccccttttatgattttaataattctcacttaactaattttgtaagcctgagatcaataagaaatgttcaggagagaggaaagaaaaaaaatatatgctccacaatttatatttagagagagaacacttagtcttgcctgtcaaaaagtccaacatttcataggtagtaggggccacatattacattcagttgctataggtccagcaactgaacctgccattacctgggcaaggaaagatccctttgctctaggaaagcttggcccaaattgattttcttctttttccccctgtaggactgactgttggctaattttgtcaagcacagctgtggtgggaagagttagggccagtgtcttgaaaatcaatcaagtagtgaatgtgatctctttgcagagctatagatagaaacagctggaaaactaaaggaaaaatacaagtgttttcggggcatacattttttttctgggtgtgcatctgttgaaatgctcaagacttaattatttgccttttgaaatcactgtaaatgcccccatccggttcctcttcttcccaggtgtgccaaggaattaatcttggtttcactacaattaaaattcactcctttccaatcatgtcattgaaagtgcctttaacgaaagaaatggtcactgaatgggaattctcttaagaaaccctgagattaaaaaaagactatttggataacttataggaaagcctagaacctcccagtagagtggggatttttttcttcttccctttctcttttggacaatagttaaattagcagtattagttatgagtttggttgcagtgttcttatcttgtgggctgatttccaaaaaccacatgctgctgaatttaccagggatcctcatacctcacaatgcaaaccacttactaccaggcctttttctgtgtccactggagagcttgagctcacactcaaagatcagaggacctacagagagggctctttggtttgaggaccatggcttacctttcctgcctttgacccatcacaccccatttcctcctctttccctctccccgctgccaaaaaaaaaaaaaaaggaaacgtttatcatgaatcaacagggtttcagtccttatcaaagagagatgtggaaagagctaaagaaaccaccctttgttcccaactccactttacccatattttatgcaacacaaacactgtccttttgggtccctttcttacagatggacctcttgagaagaattatcgtattccacgtttttagccctcaggttaccaagataaatatatgtatatataacctttattattgctatatctttgtggataatacattcaggtggtgctgggtgatttattataatctgaacctaggtatatcctttggtcttccacagtcatgttgaggtgggctccctggtatggtaaaaagccaggtataatgtaacttcaccccagcctttgtactaagctcttgatagtggatatactcttttaagtttagccccaatatagggtaatggaaatttcctgccctctgggttccccatttttactattaagaagaccagtgataatttaataatgccaccaactctggcttagttaagtgagagtgtgaactgtgtggcaagagagcctcacacctcactaggtgcagagagcccaggccttatgttaaaatcatgcacttgaaaagcaaaccttaatctgcaaagacagcagcaagcattatacggtcatcttgaatgatccctttgaaattttttttttgtttgtttgtttaaatcaagcctgaggctggtgaacagtagctacacacccatattgtgtgttctgtgaatgctagctctcttgaatttggatattggttattttttatagagtgtaaaccaagttttatattctgcaatgcgaacaggtacctatctgtttctaaataaaactgtttacattcatt

SEQ ID NO: 307655 - DNA, 444 bp, Artificial Sequence
  derived and/or modified sequence
tgaatcgccaccaaggaggagttcaccgccttcctgcaccccgaggagtacgactacatgaaggacatcgtggtgcaggagaccatggaggacatcgacaagaacgccgacggcttcatcgacctggaggagtacatcggcgacatgtacagccacgacggcaacaccgacgagcccgagtgggtgaagaccgagagagagcagttcgtggagttcagagacaagaacagagacggcaagatggacaaggaggagaccaaggactggatcctgcccagcgactacgaccacgccgaggccgaggccagacacctggtgtacgagagcgaccagaacaaggacggcaagctgaccaaggaggagatcgtggacaagtacgacctgttcgtgggcagccaggccaccgacttcggcgaggccctggtgagacacgacgagttctag

SEQ ID NO: 307656 - DNA, 495 bp, Artificial Sequence
  derived and/or modified sequence
atgatggtgagagacgagagaagattcaagatggccgacaaggacggcgacctgatcgccaccaaggaggagttcaccgccttcctgcaccccgaggagtacgactacatgaaggacatcgtggtgcaggagaccatggaggacatcgacaagaacgccgacggcttcatcgacctggaggagtacatcggcgacatgtacagccacgacggcaacaccgacgagcccgagtgggtgaagaccgagagagagcagttcgtggagttcagagacaagaacagagacggcaagatggacaaggaggagaccaaggactggatcctgcccagcgactacgaccacgccgaggccgaggccagacacctggtgtacgagagcgaccagaacaaggacggcaagctgaccaaggaggagatcgtggacaagtacgacctgttcgtgggcagccaggccaccgacttcggcgaggccctggtgagacacgacgagttctag

SEQ ID NO: 307657 - DNA, 9243 bp, Artificial Sequence
  derived and/or modified sequence
gacaaggacagggaggcacgcgcccagatcgcgctccgagtcgacgagggggctcgtgcaggtcccggcgcgcgcgtggggagcggcccgggggcgccgagggagccggcggcagcgaggatgccggcacggggacgcggctgcctgctgggggtgtgagcgagaggctgagcgctgcccgctcggcgcatccattccgcaccgccccctccctgcgggcctcggaggaagccccccgcgctgtgcggaggcgcctcggctgccgggctgcggagccccggcccagcaagagggaaaagatgccgttccaccatgtgaccgccggcttgttgtacaaggggaattacctcaaccgatcgctctctgctggcagtgacagcgaacagctggctaatatctccgtggaggagctcgatgaaatccgagaggcctttcgggttctggaccgggatgggaacggcttcatctccaagcaggagctgggcatggccatgcgctctttggggtacatgccaagcgaggtggagctggccatcatcatgcagcgcttggacatggacggggatggccaggtggattttgatgaattcatgaccattcttggccccaaactggtgtcttcagaaggtcgcgatggttttcttgggaacacgatagacagcatattctggcagtttgacatgcaaaggataactctggaagagttgaagcacattctctatcatgccttccgagaccacctaacgatgaaggacattgagaacatcattatcaatgaggaagagagcctgaatgagacctcggggaactgccaaacagagtttgaaggagtgcattcccagaagcagaacagacagacctgcgtccggaagagcctcatatgcgcctttgctatggccttcatcatcagtgtcatgctgattgcagccaaccagatactccggagcggcatggagtagcagcctcccgccagccacactgtgttgcagctcaccgcgcatgtgcatgccgtgcgggcagactcttcctccacacagcagacacggacctatggactatggatggatgcggacgatggaaccgttcagtaaagaacccaaggttgagtgcaactggggttgcacttcagcttcatctccttggcagggacactaaagggctgtcttcagtgctttaatggttttgttttctaatgcaataaatcgccaggatttccaaattattgcttcaaccatcagtcataactctagagaaaaacttcatcttcatctcggaattccagcagccatccaggtataatggtgagagagcaagagagaggcatgaacacacagtcacctccactccccattctttcaacccaagggtcaacaggagactctctgctgaggtcaaccctcagttccaagaggctgacttcagggttgccacagaagagggggctttccatcccaccctggcttccttcctccacccagtggagacccccccaaggcatgaggggaaagccattaagtggggtgcagccctggcggtcttcagctgcacccctcaccgcttccgttcttactgccttttctagaggactgccattggtagagctggggtgctctcagtttccgtcggcacttggctttctgttcctagagcccatcccgcaccagcattttggaacctgcagagagcctttctcccagctttgccgcctgtgctgccattagagaaaaaaagaagcataatcgtgggcatctctataacatagacagatatatatatttggcttcttcgtgtgtgatgtcattcttccctaatcgcttacacctaatataagcttgtcctccctcccacactcatccctgcttctttggggcaggggtgaggcaggttgaggggggaggggactgggactggcggtgaggttttgatacccacacccagccatctggagtcatggagacccaccacgtctctatgccggatgacctttgtaagttaaggtccttgtgcatcttacctttcccttaccttggagtttgctttgttagtcttccccagctaaaaagagaaatgcaatccaaaatggaaagatggagagatcaaacgactgtattttcacataagatcttctggccttcagattctgcaactgactcattttcaggaggttgggggaaaagatgtttatgagtttagccaacagaacaggtaatttactcctgcctgcagaatacttttcgttggggaagagaactgaatccaaggatctgttttcaacaccattccaagtctgtaatttcctgacttttcctagatgtcagccactactatgaattcaagcttgtgtagtcagattagccagtaatctctagatgtaatagttccctttgtacttttccaagctcaggtctttattttgtaatggaattaccttgctcctacttcttttgattacatcctaaaactacatgcttccccccttccagtagcgagccaccagaagctttcttgtctctatgcagtgggtaggattttttggtgcgttgtgtgttcctgatctccctccctgtcttcctgctcagctttctccctactgccttttcagacttggagcacccaaggtctccaatgaaagttttctcattcacctctgcaagtgctactggcaacagcctgagggcagctgtagaaactttccctctgtgggagactatgaatattcctgatgagcacaagtaaaactaaggcttcagccataatatggaggagggagcagatgtaagctcccaagagcctgggggatcacaggtccctctgcaaaacttcctggagttcagcccagcaaggccagaccaaggaggcagcaacctgcctttcccccttacctgccctgctgcctgcacactgcatgcctgccccttctgctgctcctgttggctgactcaccactgtccccttaggattggaattctcaactagaaccggtccaaatgcagaatattaatacatcgaacaacttcatccttaatctctgccctgggcagtttgccctctcccatctggacttagatgggagggcatagcagatcttgaagggatatactttcctgtttttccctgacccccgaaccacccaaccacatccataggggtgcaggaccctaagtagactgggtagaaaccccagggatgattcttcaaagccccctcctccatgagaggggactgaaatgctgcagctgaggctggtcttcagggcagaaaatgagtacttctttgaaggtggcttttctgcgagttcttctgcctcctgctggagaacagagacccttcaagaggtgagggttagatttcattggcagagagattagccactgtgcaggagtagggaggaaaaggagttctggagaggcgccgccatcctgttttctggaaaggctgcaggattcctttcctaacggtgaccttcttcttgctcccagtgacctggaagcaagcccaccctccccaggggaaaatctaggagaatgcattcctctgcagactgctagagagagatggcaagaaggaagacacagaattctttctgacagcctaggagttatcttcccactgtggtaaccccccatgtggcacccagggactgaaggacacagtgcgtggagacggccctgagctagcggcattccttagacttcaggagctcagagtttgtcccggtgacttgcaccctggctgctttgcttggacagtttgtcttgggtatagggaagccttccttgtcaggcagccaactcccagccctgttcacacaaattttatgctagggccccatgccagtcagtgtccccatcatggtggctatgaagctcacggctgaagattccagaaggtcctggtctcccatgcccaagggatgccatgtagccccagctggaagtgacttccgcaggaattgagagggaatagctcacccctcattctgtcctccggacttaggaaccagtgaccttggctgcccaactgtgtggaggctgagtgattgacaaacacaggttggctcattcttgctgcaagagcaggtaccccccgccgcccccctggaaagcacaagtgatgagcaagaaggcattttccttgggagagaaggggaaatggaccctgacccccttgatccccaaagaagctgcgccccacctttccagatacccacaaagcccccagacagaatctagcatcgggactattagcaatggcttccagaatgtgcttgggtcccacgtgactgatctgacaaaaaaaaaagagggatattaccatggcaacccttgcattccaccctgagtttgccaaggcacacaaaaatagggaacattttcttaaagaacactccaattcagcctgagtgcaacctgactctctgcatctgtatcctgctgggagaggcaattacccttaaagaatctgggtggtatctctgcctttttgtctggcatttgaacttgtccttctatttactcaggagagcaggagctacctgtaagccctggtatctccccatccctactcccagccccttctcccagggtccagagccaggaccccttaatctaggtaaattgacagaaatatcatcttggaaggcaaacaagatattaagcctccaatctttaaaagtatcggtttgcctgttgagcacactcctgcaagccaaacacgtgaactttggtgaactgaggtttaggtgtggtcttaggcaaacccagtggtttcagaaatgtctgggtgttttatttgcagagaacaagatgtgtcttatgagtcttctttctcaatacctgccctgtctcaaatctcacttgacaaatggtctacgatcttgcagttatccaaaagagcctatgaaaaatggacagctgcttttgacaataatgcccctcccaacttcccattcatagaatcataaagcgatatgtttcagaactgagagagaaaagtttaccttttattccaaatgcctcgtactcggtttaagtccagactcaggtcataaatcaaagacagttttgcacgttgctcttcacctaaatctagcagtttccctgaggccctatgagggcatggacagaaaatgaaggatgcaaccacccaggacagctccctggtttgggctggcctggccacgtgtggtcacatgtcctgggatctgtgtttactgtgtccttgctctccttccttgcagaagctgctaagctctgctcctcctaactgcaggtctcaaaccctattgggtcattttgccacactatttctccaaaggcccatagtcattacattttttaccatttcaccaagataacagggggggtctggaattcccctgctaggaagggccccttttcctatatcaccgtgatggtacagatgaactgagatgaaacttttagacttcagcacgtcacacatcctggttgtataaccaggaggtctgcagagctgcaacccctgaagaacatctgtcttaaaagacctcaaatcagaacattctcattggcctcttcagtgatccccatggagctaagagtccgtaacctaaaggccttaccatagccatcttccctccacacctgattgctcaactgccccagaaggggagaatctatctgaaatagaaaagaagcattaaggaccaggtgcggtggctcacacctataatcccagcactttgggaggccaaggcaggtggatcacttaagatcaggagttcaagaccagcctggccaacgtggtgaaaccccatctctactaaaaaaaaaaaatacaaaaattagccaagcatggtgtcgggcacctgtaatcctagctactctggaggctgaggagggagaatcacttgaaccctggaggcggaggctgcagtgagctgagatcgcgccactgcactccagcctgggcaacagagcaaaacttcatctcaaaaaataattttaaaaaagaaacattattcaccagctaagacttttcaatttaaattatttaaagtgacagcaacatagaggagaatttgggctgcctcttaccgacccagtctccatgataatttgagtgtcacaactgttcagcttcacttcatacttgctttgactaagtcactcgggattgtcctcaattttttggccctgccataaataggtgtatgttagtccgttttgcattgctataaaggaataccttaacactgggtaatttataaagaaaagaggtttatttggctcgcagttctgcaggctgtttgagcaaggtatcaacatctgcttggcttctggtgagacctcagaaagctttgacccatggtggaaggtgaagggggagcaggcacgtcacacagcaagaacaggagcaagagagaggagaagaggtgccagtctccttttcttaacaacccgcaattgcatgaactaataaagtaagaattcactcattactacagggagggcaccgagtcattcatgaggaatctgtccctatgacccaaatatctcccagcaggccccacctccagcactggagatcaacatgaaatttggggggaacaaatatccagcctctatgattggtttggagcaatgagatcaattacaccaacaagccaagcatttctcttagtatcctatggtcattgctaatgcatatggtcattttgacagctgtggtttctccttcatattcatttgggactcttcatagggtctcgagagacatgacaatactgttcaaaacgtctccaaggcaaaattaattttattccgttgactggaaatatatcacaaagaatgaggtttttccagtcccacccacaagacagtcctctgaaagtggaaaagcttgcccggccacctgcccctaccctgaccttggggtagttcatcagttgagcacaacccccatgccgggcatagactcacccatctcttttcctcaggtgtgatgggttggctttcaaactagtgtttctcgcactgttagaagttattgtccaagtggaaaggatgcagaggctggaattttccagtgggatagaagagcaggctaattaggaaggaatattccagggaatgcaaggtgcaactgcgatattgctccatccctggacctgagggagacaaagaaagttcttaaagggctgcagatgctgtcctctgaaggtcttctctggatcgctggcctactttggaaacatgcaggccattgagtgccatggggctgcccatcagtctgatccacacgaaaggctctgtgcatttcaagagcaggctggtagctcgccattcctgggaggatgctgacatctgtcaagcccagaatgcctctctcagggctctcagacctgttaaactgaggccaggagagcagaagaaagaactcaaagtgtggacggtactaccagctggagaaagcccaggagccaggactcttccacccactatctaggttatgttgagtgacattcctccctggcttcaggtttctctaaagccagaggaaaagtaaaccagacaagccctcccatctattttgtctgaaacaagatggagtgaatgctccctactgagagggtctggatttcacccatgaattgcactaggaactgggagctcctttttgaacacaagtcccaagaggcagttgtgataaagtctctcttttggtgtccgctgtctgtaaatgaaacaatgcaaattggtgtatgttaaatgtgtcacagcttgcaggcaagaggttttgtttattctctaaggacttgctgactcgagggagcatcaaagatgagctttctgtctgtcttggcaagtgtgaaaataaagggagtcagtcacctccccaaaggtcatgtgaatcagaattcaggagaaagttggaggaaacaatggcagattccaagaagagatgcttgtttctccatttgagaaagccttactgaaagctactgaataaagagcacaatttccagttatttctttctttgcttttttttttttctggccactataacagcacttccagtatatgttgatagtagcttgtaattattcctaataccccagaaagaagagagtcgtgatctttggtgattgtgaggaattagattaacagtcgcgggggaccggctacctgcgacagccctttaaatggctaatgagggatgctgagtgctgagcggtgcctgcttttgatgtggcccacccatgaccagggagagagggcaggaagagagcagctgcaggatccacaagtctctaacccttctgccccaggcaacataaaaccctagattcttgttctttttccctcttcctaaagtagactgacgtcccagtaattgtttttctaacaagccctgttgttctccctgggaaagacctagattggccaagaaaggatcctgtcagctcctggtggagagttgcacaagccagtggctctcaactctctccaaggaaaattaaagcatattttctctttcttagctcaaaatcagctttcaggggtccttattggggtctgattttcttccccagttctgaatccaggaagaagctttttctccaaggaccaaccaaaaacaatgactttggagaaaaattagactcagaaagtctgtccaggcattgggttggtgaactgtcaactgttggatggggaggaggggtcgctgtgatcgtagcggtcattagacttgggacgtgagttgtctctcaaagcacagtagtaaatgactgtattttgtatattgcccccaatatgttgggtgtaaatagaagcacagctggggattgatcatggccaggacgattggagcttggcagctctcatatccagaataagccactaagacggaactcatcaatcaccatcttcccatttacctcattagcatcccattttctctcattcagtattagttgatgatttctgctattaagtgatgagaaagtcagcagactagtcaaaaaagaatctttatataaaatgtacatattaatataaattaacttagcatgcaacttaccgatcaaatgaagtatatattattaatatgttatcttagtgtataaaggaaaactgccatatttaccagatgttttctttaaccgaacttgtctgtaaatatataatctgtataaaaagagtctaatttaccattatttatgcaatagaaaaaataaaagtttttttttcttttga

SEQ ID NO: 307658 - DNA, 9189 bp, Artificial Sequence
  derived and/or modified sequence
tcccccgagatcagcaggagcttactgcttactctgggtccgcgccacctttaaagctcacggccgcggtctgcgtcttcgttcttgaagtcagcaagaccgcaagcccaccgggaggagcagacgactccggacgcgccatctttaagagctgtaacactcaccgcgaggtccgtggttttattcttaaagtcggcgagaccaacaacccagcagaaggaataaattccgcacacagggaaaagatgccgttccaccatgtgaccgccggcttgttgtacaaggggaattacctcaaccgatcgctctctgctggcagtgacagcgaacagctggctaatatctccgtggaggagctcgatgaaatccgagaggcctttcgggttctggaccgggatgggaacggcttcatctccaagcaggagctgggcatggccatgcgctctttggggtacatgccaagcgaggtggagctggccatcatcatgcagcgcttggacatggacggggatggccaggtggattttgatgaattcatgaccattcttggccccaaactggtgtcttcagaaggtcgcgatggttttcttgggaacacgatagacagcatattctggcagtttgacatgcaaaggataactctggaagagttgaagcacattctctatcatgccttccgagaccacctaacgatgaaggacattgagaacatcattatcaatgaggaagagagcctgaatgagacctcggggaactgccaaacagagtttgaaggagtgcattcccagaagcagaacagacagacctgcgtccggaagagcctcatatgcgcctttgctatggccttcatcatcagtgtcatgctgattgcagccaaccagatactccggagcggcatggagtagcagcctcccgccagccacactgtgttgcagctcaccgcgcatgtgcatgccgtgcgggcagactcttcctccacacagcagacacggacctatggactatggatggatgcggacgatggaaccgttcagtaaagaacccaaggttgagtgcaactggggttgcacttcagcttcatctccttggcagggacactaaagggctgtcttcagtgctttaatggttttgttttctaatgcaataaatcgccaggatttccaaattattgcttcaaccatcagtcataactctagagaaaaacttcatcttcatctcggaattccagcagccatccaggtataatggtgagagagcaagagagaggcatgaacacacagtcacctccactccccattctttcaacccaagggtcaacaggagactctctgctgaggtcaaccctcagttccaagaggctgacttcagggttgccacagaagagggggctttccatcccaccctggcttccttcctccacccagtggagacccccccaaggcatgaggggaaagccattaagtggggtgcagccctggcggtcttcagctgcacccctcaccgcttccgttcttactgccttttctagaggactgccattggtagagctggggtgctctcagtttccgtcggcacttggctttctgttcctagagcccatcccgcaccagcattttggaacctgcagagagcctttctcccagctttgccgcctgtgctgccattagagaaaaaaagaagcataatcgtgggcatctctataacatagacagatatatatatttggcttcttcgtgtgtgatgtcattcttccctaatcgcttacacctaatataagcttgtcctccctcccacactcatccctgcttctttggggcaggggtgaggcaggttgaggggggaggggactgggactggcggtgaggttttgatacccacacccagccatctggagtcatggagacccaccacgtctctatgccggatgacctttgtaagttaaggtccttgtgcatcttacctttcccttaccttggagtttgctttgttagtcttccccagctaaaaagagaaatgcaatccaaaatggaaagatggagagatcaaacgactgtattttcacataagatcttctggccttcagattctgcaactgactcattttcaggaggttgggggaaaagatgtttatgagtttagccaacagaacaggtaatttactcctgcctgcagaatacttttcgttggggaagagaactgaatccaaggatctgttttcaacaccattccaagtctgtaatttcctgacttttcctagatgtcagccactactatgaattcaagcttgtgtagtcagattagccagtaatctctagatgtaatagttccctttgtacttttccaagctcaggtctttattttgtaatggaattaccttgctcctacttcttttgattacatcctaaaactacatgcttccccccttccagtagcgagccaccagaagctttcttgtctctatgcagtgggtaggattttttggtgcgttgtgtgttcctgatctccctccctgtcttcctgctcagctttctccctactgccttttcagacttggagcacccaaggtctccaatgaaagttttctcattcacctctgcaagtgctactggcaacagcctgagggcagctgtagaaactttccctctgtgggagactatgaatattcctgatgagcacaagtaaaactaaggcttcagccataatatggaggagggagcagatgtaagctcccaagagcctgggggatcacaggtccctctgcaaaacttcctggagttcagcccagcaaggccagaccaaggaggcagcaacctgcctttcccccttacctgccctgctgcctgcacactgcatgcctgccccttctgctgctcctgttggctgactcaccactgtccccttaggattggaattctcaactagaaccggtccaaatgcagaatattaatacatcgaacaacttcatccttaatctctgccctgggcagtttgccctctcccatctggacttagatgggagggcatagcagatcttgaagggatatactttcctgtttttccctgacccccgaaccacccaaccacatccataggggtgcaggaccctaagtagactgggtagaaaccccagggatgattcttcaaagccccctcctccatgagaggggactgaaatgctgcagctgaggctggtcttcagggcagaaaatgagtacttctttgaaggtggcttttctgcgagttcttctgcctcctgctggagaacagagacccttcaagaggtgagggttagatttcattggcagagagattagccactgtgcaggagtagggaggaaaaggagttctggagaggcgccgccatcctgttttctggaaaggctgcaggattcctttcctaacggtgaccttcttcttgctcccagtgacctggaagcaagcccaccctccccaggggaaaatctaggagaatgcattcctctgcagactgctagagagagatggcaagaaggaagacacagaattctttctgacagcctaggagttatcttcccactgtggtaaccccccatgtggcacccagggactgaaggacacagtgcgtggagacggccctgagctagcggcattccttagacttcaggagctcagagtttgtcccggtgacttgcaccctggctgctttgcttggacagtttgtcttgggtatagggaagccttccttgtcaggcagccaactcccagccctgttcacacaaattttatgctagggccccatgccagtcagtgtccccatcatggtggctatgaagctcacggctgaagattccagaaggtcctggtctcccatgcccaagggatgccatgtagccccagctggaagtgacttccgcaggaattgagagggaatagctcacccctcattctgtcctccggacttaggaaccagtgaccttggctgcccaactgtgtggaggctgagtgattgacaaacacaggttggctcattcttgctgcaagagcaggtaccccccgccgcccccctggaaagcacaagtgatgagcaagaaggcattttccttgggagagaaggggaaatggaccctgacccccttgatccccaaagaagctgcgccccacctttccagatacccacaaagcccccagacagaatctagcatcgggactattagcaatggcttccagaatgtgcttgggtcccacgtgactgatctgacaaaaaaaaaagagggatattaccatggcaacccttgcattccaccctgagtttgccaaggcacacaaaaatagggaacattttcttaaagaacactccaattcagcctgagtgcaacctgactctctgcatctgtatcctgctgggagaggcaattacccttaaagaatctgggtggtatctctgcctttttgtctggcatttgaacttgtccttctatttactcaggagagcaggagctacctgtaagccctggtatctccccatccctactcccagccccttctcccagggtccagagccaggaccccttaatctaggtaaattgacagaaatatcatcttggaaggcaaacaagatattaagcctccaatctttaaaagtatcggtttgcctgttgagcacactcctgcaagccaaacacgtgaactttggtgaactgaggtttaggtgtggtcttaggcaaacccagtggtttcagaaatgtctgggtgttttatttgcagagaacaagatgtgtcttatgagtcttctttctcaatacctgccctgtctcaaatctcacttgacaaatggtctacgatcttgcagttatccaaaagagcctatgaaaaatggacagctgcttttgacaataatgcccctcccaacttcccattcatagaatcataaagcgatatgtttcagaactgagagagaaaagtttaccttttattccaaatgcctcgtactcggtttaagtccagactcaggtcataaatcaaagacagttttgcacgttgctcttcacctaaatctagcagtttccctgaggccctatgagggcatggacagaaaatgaaggatgcaaccacccaggacagctccctggtttgggctggcctggccacgtgtggtcacatgtcctgggatctgtgtttactgtgtccttgctctccttccttgcagaagctgctaagctctgctcctcctaactgcaggtctcaaaccctattgggtcattttgccacactatttctccaaaggcccatagtcattacattttttaccatttcaccaagataacagggggggtctggaattcccctgctaggaagggccccttttcctatatcaccgtgatggtacagatgaactgagatgaaacttttagacttcagcacgtcacacatcctggttgtataaccaggaggtctgcagagctgcaacccctgaagaacatctgtcttaaaagacctcaaatcagaacattctcattggcctcttcagtgatccccatggagctaagagtccgtaacctaaaggccttaccatagccatcttccctccacacctgattgctcaactgccccagaaggggagaatctatctgaaatagaaaagaagcattaaggaccaggtgcggtggctcacacctataatcccagcactttgggaggccaaggcaggtggatcacttaagatcaggagttcaagaccagcctggccaacgtggtgaaaccccatctctactaaaaaaaaaaaatacaaaaattagccaagcatggtgtcgggcacctgtaatcctagctactctggaggctgaggagggagaatcacttgaaccctggaggcggaggctgcagtgagctgagatcgcgccactgcactccagcctgggcaacagagcaaaacttcatctcaaaaaataattttaaaaaagaaacattattcaccagctaagacttttcaatttaaattatttaaagtgacagcaacatagaggagaatttgggctgcctcttaccgacccagtctccatgataatttgagtgtcacaactgttcagcttcacttcatacttgctttgactaagtcactcgggattgtcctcaattttttggccctgccataaataggtgtatgttagtccgttttgcattgctataaaggaataccttaacactgggtaatttataaagaaaagaggtttatttggctcgcagttctgcaggctgtttgagcaaggtatcaacatctgcttggcttctggtgagacctcagaaagctttgacccatggtggaaggtgaagggggagcaggcacgtcacacagcaagaacaggagcaagagagaggagaagaggtgccagtctccttttcttaacaacccgcaattgcatgaactaataaagtaagaattcactcattactacagggagggcaccgagtcattcatgaggaatctgtccctatgacccaaatatctcccagcaggccccacctccagcactggagatcaacatgaaatttggggggaacaaatatccagcctctatgattggtttggagcaatgagatcaattacaccaacaagccaagcatttctcttagtatcctatggtcattgctaatgcatatggtcattttgacagctgtggtttctccttcatattcatttgggactcttcatagggtctcgagagacatgacaatactgttcaaaacgtctccaaggcaaaattaattttattccgttgactggaaatatatcacaaagaatgaggtttttccagtcccacccacaagacagtcctctgaaagtggaaaagcttgcccggccacctgcccctaccctgaccttggggtagttcatcagttgagcacaacccccatgccgggcatagactcacccatctcttttcctcaggtgtgatgggttggctttcaaactagtgtttctcgcactgttagaagttattgtccaagtggaaaggatgcagaggctggaattttccagtgggatagaagagcaggctaattaggaaggaatattccagggaatgcaaggtgcaactgcgatattgctccatccctggacctgagggagacaaagaaagttcttaaagggctgcagatgctgtcctctgaaggtcttctctggatcgctggcctactttggaaacatgcaggccattgagtgccatggggctgcccatcagtctgatccacacgaaaggctctgtgcatttcaagagcaggctggtagctcgccattcctgggaggatgctgacatctgtcaagcccagaatgcctctctcagggctctcagacctgttaaactgaggccaggagagcagaagaaagaactcaaagtgtggacggtactaccagctggagaaagcccaggagccaggactcttccacccactatctaggttatgttgagtgacattcctccctggcttcaggtttctctaaagccagaggaaaagtaaaccagacaagccctcccatctattttgtctgaaacaagatggagtgaatgctccctactgagagggtctggatttcacccatgaattgcactaggaactgggagctcctttttgaacacaagtcccaagaggcagttgtgataaagtctctcttttggtgtccgctgtctgtaaatgaaacaatgcaaattggtgtatgttaaatgtgtcacagcttgcaggcaagaggttttgtttattctctaaggacttgctgactcgagggagcatcaaagatgagctttctgtctgtcttggcaagtgtgaaaataaagggagtcagtcacctccccaaaggtcatgtgaatcagaattcaggagaaagttggaggaaacaatggcagattccaagaagagatgcttgtttctccatttgagaaagccttactgaaagctactgaataaagagcacaatttccagttatttctttctttgcttttttttttttctggccactataacagcacttccagtatatgttgatagtagcttgtaattattcctaataccccagaaagaagagagtcgtgatctttggtgattgtgaggaattagattaacagtcgcgggggaccggctacctgcgacagccctttaaatggctaatgagggatgctgagtgctgagcggtgcctgcttttgatgtggcccacccatgaccagggagagagggcaggaagagagcagctgcaggatccacaagtctctaacccttctgccccaggcaacataaaaccctagattcttgttctttttccctcttcctaaagtagactgacgtcccagtaattgtttttctaacaagccctgttgttctccctgggaaagacctagattggccaagaaaggatcctgtcagctcctggtggagagttgcacaagccagtggctctcaactctctccaaggaaaattaaagcatattttctctttcttagctcaaaatcagctttcaggggtccttattggggtctgattttcttccccagttctgaatccaggaagaagctttttctccaaggaccaaccaaaaacaatgactttggagaaaaattagactcagaaagtctgtccaggcattgggttggtgaactgtcaactgttggatggggaggaggggtcgctgtgatcgtagcggtcattagacttgggacgtgagttgtctctcaaagcacagtagtaaatgactgtattttgtatattgcccccaatatgttgggtgtaaatagaagcacagctggggattgatcatggccaggacgattggagcttggcagctctcatatccagaataagccactaagacggaactcatcaatcaccatcttcccatttacctcattagcatcccattttctctcattcagtattagttgatgatttctgctattaagtgatgagaaagtcagcagactagtcaaaaaagaatctttatataaaatgtacatattaatataaattaacttagcatgcaacttaccgatcaaatgaagtatatattattaatatgttatcttagtgtataaaggaaaactgccatatttaccagatgttttctttaaccgaacttgtctgtaaatatataatctgtataaaaagagtctaatttaccattatttatgcaatagaaaaaataaaagtttttttttcttttga

SEQ ID NO: 307659 - DNA, 777 bp, Artificial Sequence
  derived and/or modified sequence
ggtccatcattctgaggagctgcagtgccctgctccttcctgatggcttagagattctccttaactcccagccatggatcttggagaatttcccccgagatcagcaggagggaaaagatgccgttccaccatgtgaccgccggcttgttgtacaaggggaattacctcaaccgatcgctctctgctggcagtgacagcgaacagctggctaatatctccgtggaggagctcgatgaaatccgagaggcctttcgggttctggaccgggatgggaacggcttcatctccaagcaggagctgggcatggccatgcgctctttggggtacatgccaagcgaggtggagctggccatcatcatgcagcgcttggacatggacggggatggccaggtggattttgatgaattcatgaccattcttggccccaaactggtgtcttcagaaggtcgcgatggttttcttgggaacacgatagacagcatattctggcagtttgacatgcaaaggataactctggaagagttgaagcacattctctatcatgccttccgagaccacctaacgatgaaggacattgagaacatcattatcaatgaggaagagagcctgaatgagacctcggggaactgccaaacagagtttgaaggagtgcattcccagaagcagaacagacagacctgcgtccggaagagcctcatatgcgcctttgctatggccttcatcatcagtgtcatgctgattgcagccaaccagatactccggagcggcatggagtag

SEQ ID NO: 307660 - DNA, 378 bp, Artificial Sequence
  derived and/or modified sequence
atgcccttccaccacgtgaccgccggcctgctgtacaagggcaactacctgaacagaagcctgagcgccggcagcgacagcgagcagctggccaacatcagcgtggaggagctggacgagatcagagaggccttcagagtgctggacagagacggcaacggcttcatcagcaagcaggagctgggcatggccatgagaagcctgggctacatgcccagcgaggtggagctggccatcatcatgcagagactggacatggacggcgacggccaggtggacttcgacgagttcatgaccatcctgggccccaagctggtgagcagcgagggcagagacggcttcctgggcaacaccatcgacagcatcttctggcagtag

SEQ ID NO: 307661 - DNA, 378 bp, Artificial Sequence
  derived and/or modified sequence
atgcccttccaccacgtaaccgcggggcttctgtataagggaaattatctcaacaggagcctgagcgcaggcagcgattcggagcagctggctaatatttctgtggaggaacttgacgagatccgggaagcatttcgggtcctggaccgggatggaaacggctttatctcaaagcaggagttggggatggctatgcgctcgctgggctacatgccaagcgaagtcgaacttgccattatcatgcagcgccttgacatggatggagatgggcaggtagacttcgacgagtttatgaccatcctggggcctaaactcgtctcctccgagggccgtgatgggtttctggggaacacaattgactcgatcttttggcagtag

SEQ ID NO: 307662 - DNA, 378 bp, Artificial Sequence
  derived and/or modified sequence
atgcccttccaccacgtgacagctggcctgctgtacaagggcaactacctgaacagaagcctgtctgctggcagtgacagcgagcagctggccaacatctctgtggaggagctggatgagatccgggaggccttccgggtgctggacagagatggaaatggcttcatcagcaagcaggagctgggcatggccatgaggagcctgggctacatgcccagcgaggtggagctggccatcatcatgcagaggctggacatggatggagatggccaggtggactttgatgagttcatgaccatcctgggccccaagctggtgagcagcgagggcagagatggcttcctgggcaacaccatcgacagcatcttctggcagtag

SEQ ID NO: 307663 - DNA, 378 bp, Artificial Sequence
  derived and/or modified sequence
atgcccttccaccacgtgaccgccggcctgctgtacaagggcaactacctgaatcggtccctcagcgcaggatctgattctgagcagcttgccaacataagtgtggaagagttagatgagatacgtgaggcttttcgggttttagatcgcgatggcaatggctttattagcaaacaggagcttgggatggcaatgcgttccctcggatacatgccaagtgaggtcgaacttgcaatcataatgcaacgcctggacatggatggcgacgggcaggttgacttcgacgaattcatgaccatcctggggcctaagctcgtgtcctccgaggggcgggacggcttcttggggaacactatagactctatcttttggcagtag

SEQ ID NO: 307664 - DNA, 378 bp, Artificial Sequence
  derived and/or modified sequence
atgccttttcatcacgttactgccggactgctctataagggcaactatctcaaccggtccctgtctgccggaagcgacagtgaacagctggcaaatatttccgtggaagaattggatgagatccgtgaggccttccgggtgctggatagggacggcaacggcttcatttcaaagcaggagctgggtatggccatgcgcagcctggggtacatgcccagcgaagtagagctggccattatcatgcaacgtctagatatggatggggatggacaggtagacttcgacgagttcatgaccattttgggccctaaactggtcagtagcgaaggcagagacggatttctcggcaatacaattgacagcattttttggcagtag

SEQ ID NO: 307665 - DNA, 550 bp, Artificial Sequence
  derived and/or modified sequence
gtgcctccctggacgtctccaggggcggtcacgcggaatgctggtccccgcagtttcggccattggcccctccacttcggcgccccgccttccccctgggctcaggtgtaatcgtggatctagggtgtgggcacctgggatgaagtagtgaaggcggcgggcgctaggggaaaagatgccgttccaccatgtgaccgccggcttgttgtacaaggggaattacctcaaccgatcgctctctgctggcagtgacagcgaacagctggctaatatctccgtggaggagctcgatgaaatccgagaggcctttcgggttctggaccgggatgggaacggcttcatctccaagcaggagctgggcatggccatgcgctctttggggtacatgccaagcgaggtggagctggccatcatcatgcagcgcttggacatggacggggatggccaggtggattttgatgaattcatgaccattcttggccccaaactggtgtcttcagaaggtcgcgatggttttcttgggaacacgatagacagcatattctggcag

SEQ ID NO: 307666 - protein, 110 aa, Artificial Sequence
  derived and/or modified sequence
MAQSQGWVKRYIKAFCKGFFVAVPVAVTFLDRVACVARVEGASMQPSLNPGGSQSSDVVLLNHWKVRNFEVHRGDIVSLVSPKNPEQKIIKRVIALEGDIVRDGRKLKRI

SEQ ID NO: 307667 - protein, 79 aa, Artificial Sequence
  derived and/or modified sequence
MAQSQGWVKRYIKAFCKGFFVAVPVAVTFLDRVACVARVEGASMQPSLNPGGSQSSDVVLLNHWKVRNFEVHRGDIVSL

SEQ ID NO: 307668 - DNA, 333 bp, Artificial Sequence
  derived and/or modified sequence
atggcccaatcccagggctgggttaagcgctacatcaaggccttctgtaagggcttcttcgtcgccgtgccagtggcagtcacgttcttggatagagtcgcctgcgtggccagagtagaaggtgcctctatgcaaccgtcactgaaccccggcggaagtcagagctctgacgtagtcctcctgaatcattggaaagtgcgcaacttcgaagtgcaccggggcgacattgtcagtctcgtttctccaaagaaccccgaacagaagatcattaaacgggtcatcgcgctggagggggatatcgtgcgggacggacggaaattaaaaagaatttag

SEQ ID NO: 307669 - DNA, 240 bp, Artificial Sequence
  derived and/or modified sequence
atggcacaaagtcagggatgggttaagcggtatatcaaggcattctgcaagggcttttttgtggctgtacccgtggctgttactttcctcgatcgtgtagcgtgtgtggcgcgagtggaaggagcttcaatgcagccatctctgaacccaggaggttcacagagctccgatgttgttctgctaaatcactggaaggttagaaattttgaagtgcaccggggggacattgtgtcactctag

SEQ ID NO: 307670 - DNA, 333 bp, Artificial Sequence
  derived and/or modified sequence
atggcacagtcacaagggtgggtgaaaagatacatcaaggccttttgtaaaggcttctttgtggcggtgcctgtggcagtgactttcttggatcgggtcgcctgtgtggcaagagtagaaggagcatcgatgcagccttctttgaatcctggggggagccagtcatctgatgtggtgcttttgaaccactggaaagtgaggaattttgaagtacaccgtggtgacattgtatcattggtgtctcctaaaaacccagaacagaagatcattaagagagtgattgctcttgaaggagatattgtcagagatgggagaaaactgaaaaggatatga

SEQ ID NO: 307671 - DNA, 421 bp, Artificial Sequence
  derived and/or modified sequence
ggtctgcgcggggacttcccccgggctgagctgcgcagcggggttttggccaaattgggcgagggcacaaaataaccacttaccccttctcaccgaggaagagcgggagaaaggtggcctgattcttttgagaagccttcctactccttactcccaaccctgatcaaaggaaaagccatgttgtatggcacagtcacaagggtgggtgaaaagatacatcaaggccttttgtaaaggcttctttgtggcggtgcctgtggcagtgactttcttggatcgggtcgcctgtgtggcaagagtagaaggagcatcgatgcagccttctttgaatcctggggggagccagtcatctgatgtggtgcttttgaaccactggaaagtgaggaattttgaagtacaccgtggtgacattgtatcattg

SEQ ID NO: 307672 - DNA, 333 bp, Artificial Sequence
  derived and/or modified sequence
atggcccagagccagggctgggtgaagcgctacatcaaggccttctgcaagggcttctttgtggccgtgcctgtggccgtgaccttcctggacagagtggcctgtgtggcccgggtggagggcgcctccatgcagcccagcctgaaccctgggggcagccagagcagtgatgtggtgctgctgaaccactggaaggtgaggaactttgaggtgcacagaggagacatcgtgtccctggtgagccccaagaaccctgagcagaagatcatcaagagggtcatcgccctggagggggacatcgtgagagatggcaggaagctgaagaggatctag

SEQ ID NO: 307673 - DNA, 240 bp, Artificial Sequence
  derived and/or modified sequence
atggcccagagccagggctgggtgaagcgctacatcaaggccttctgcaagggcttctttgtggccgtgcctgtggccgtgaccttcctggacagagtggcctgtgtggcccgggtggagggcgcctccatgcagcccagcctgaaccctgggggcagccagagcagtgatgtggtgctgctgaaccactggaaggtgaggaactttgaggtgcacagaggagacatcgtgtccctgtag

SEQ ID NO: 307674 - DNA, 333 bp, Artificial Sequence
  derived and/or modified sequence
atggcccagagccagggctgggtgaagcggtacatcaaggccttctgcaagggcttttttgtggcagtccctgtggccgttacttttctggaccgcgttgcctgcgtggcccgggtggaaggtgcctcaatgcaaccaagcctgaaccccggtggcagccagagcagcgatgtggtgctcttgaaccattggaaggtccgaaattttgaggtgcaccggggagacattgtgtccttagtatctcccaagaacccagaacagaagataatcaaacgggtgatcgctctggaaggagacattgtgagggatggcaggaagctgaaaagaatctag

SEQ ID NO: 307675 - DNA, 240 bp, Artificial Sequence
  derived and/or modified sequence
atggcccagagccagggctgggtgaagcggtacatcaaggccttctgcaagggcttcttcgtggcagtcccagtggcagtgaccttcctcgacagagtcgcctgcgtggctcgggtggaaggagcctctatgcaaccctcactcaatcccgggggcagccagagctcagatgttgtcttgctcaaccactggaaggtgagaaattttgaagtccatcgaggtgacattgtcagcctttag

SEQ ID NO: 307676 - DNA, 333 bp, Artificial Sequence
  derived and/or modified sequence
atggcccagagccaaggctgggtgaaacgttacatcaaggcgttctgcaaagggttcttcgtcgcggttccagtggccgtcacatttctcgatagggtcgcctgtgtggcaagggttgagggtgcctccatgcagccctccttgaacccaggcggttcgcagagcagcgacgtagtgctgttgaatcattggaaggtgaggaattttgaagtgcatcgaggagacatcgtgagtctggtttcacccaagaatcctgaacagaagatcatcaagcgcgtcatcgcccttgagggcgatatcgtgagagacggtaggaaactgaagaggatctag

SEQ ID NO: 307677 - DNA, 240 bp, Artificial Sequence
  derived and/or modified sequence
atggctcagtcacaaggctgggtgaaacgatatataaaggccttctgcaaaggcttttttgtcgctgtgcccgttgccgtaacctttctcgatcgagttgcctgtgttgctagagtagaaggcgcttccatgcagccgagcttgaaccctggcggaagccaaagctcagacgtggtcctcctaaaccattggaaggtgcgcaatttcgaggtccatcgcggagatattgtctccctctag

SEQ ID NO: 307678 - DNA, 333 bp, Artificial Sequence
  derived and/or modified sequence
atggcccagagccagggctgggtgaagagatacatcaaggccttctgcaagggcttcttcgtggccgtgcccgtggccgtgaccttcctggacagagtggcctgcgtggccagagtggagggcgccagcatgcagcccagcctgaaccccggcggcagccagagcagcgacgtggtgctgctgaaccactggaaggtgagaaacttcgaggtgcacagaggcgacatcgtgagcctggtgagccccaagaaccccgagcagaagatcatcaagagagtgatcgccctggagggcgacatcgtgagagacggcagaaagctgaagagaatctag

SEQ ID NO: 307679 - DNA, 240 bp, Artificial Sequence
  derived and/or modified sequence
atggcccagagccagggctgggtgaagagatacatcaaggccttctgcaagggcttcttcgtggccgtgcccgtggccgtgaccttcctggacagagtggcctgcgtggccagagtggagggcgccagcatgcagcccagcctgaaccccggcggcagccagagcagcgacgtggtgctgctgaaccactggaaggtgagaaacttcgaggtgcacagaggcgacatcgtgagcctgtag

SEQ ID NO: 307680 - protein, 226 aa, Artificial Sequence
  derived and/or modified sequence
MAQVAVSTLPVEEESSSETRMVVTFLVSALESMCKELAKSKAEVACIAVYETDVFVVGTERGCAFVNARTDFQKDFAKYCVAEGLCEVKPPCPVNGMQVHSGETEILRKAVEDYFCFCYGKALGTTVMVPVPYEKMLRDQSAVVVQGLPEGVAFQHPENYDLATLKWILENKAGISFIINRPFLGPESQLGGPGMVTDAERSIVSPSERHFTESRSCLSQERIRRS

SEQ ID NO: 307681 - DNA, 1869 bp, Artificial Sequence
  derived and/or modified sequence
aaagagaaaaaggagggcgagtggcgagcaggggcctcggccgccacccacacgccccgaagcgtgctcgtcccccgcgcggggctcccggccgccgccctcggccatcggctgctccccggtggcccaggcctcggactccgcggccggcccggcgcggcccagcgccctcagggatcatggcccaggtagcagtgtccaccctgcctgttgaagaagagtcctcctcagagaccaggatggtggtgacattcctcgtgtctgccctcgaatccatgtgtaaagaactggccaagtccaaggcagaagtggcctgcatcgcagtgtacgaaacagacgtgtttgtcgtcggaaccgagagaggatgcgcttttgttaatgccaggacggattttcagaaagattttgcaaaatactgcgttgcagagggactgtgtgaggtgaaacctccctgccctgtgaacgggatgcaggtccactcgggcgaaacggaaatactcaggaaggcagtggaggactatttctgcttttgttatggtaaagccttagggacaacagtgatggtgcctgttccctatgagaagatgctgcgagaccagtcggctgtggtagtgcaggggcttccggaaggcgttgcctttcaacaccctgagaattacgaccttgcaaccctgaaatggattttggagaacaaagcagggatttcattcatcataaatagacccttcctaggaccagagagtcagctgggtggccctgggatggtaacagatgcggagagatccatagtatcaccaagtgaaaggcatttcactgaaagcagaagctgtctcagtcaagaaagaatcagaagatcctaattactatcaatataatatgcaaggaagccacccttcttccacaagcaatgaagtaatagaaatggaattaccaatggaagattccactccgctggtcccttcagaagaaccaaatgaggaccctgaagccgaggtgaaaatcgaaggaaacacaaattcatccagtgttacaaattctgcagcaggtgttgaagatcttaacatcgttcaagtgactgttccagataatgagaaggaaagattatcaagcattgaaaagattaaacagctaagagaacaagttaatgacctctttagccgaaaatttggtgaagcaattggcgtggatttccctgtgaaagttccctacaggaagatcacattcaaccctggctgtgtggtgattgatggcatgcccccgggggtggtattcaaggcccccggctatctggaaatcagttccatgaggaggatcttggaggcagctgagtttatcaaattcacagtcatcaggccgcttccagggcttgagctcagtaatggacttttggaggccaaggcaagaggattgcttgaggccaggagtttgagaccagcctgggcaacatagcaagaccccatctctacaaaaaatttaaaaattagctggaaacagtggctcacacctgtagccccagctacttggcaggctaaagcaggaggatcacttaaactcaggagtttgagacagcagagaaccataattgcaatactatactccagcctgggtgacagaacaagaccctgtctctaaaaagaaaatgcaaacatattatcaaataattcctgtttaaactggacataacaagcacagctacatgctgaacctcatcaaaggtgtcttttgtttggctcatgtacttttgaaaataaggatgaggcctggcacggtggctcctgtaatcccagcactttgggaggccaaggcgggtggatcgcttgagcctggggtttcagaccagcctgggcaacaaggtaagactccagctct

SEQ ID NO: 307682 - DNA, 1869 bp, Artificial Sequence
  derived and/or modified sequence
aaagagaaaaaggagggcgagtggcgagcaggggcctcggccgccacccacacgccccgaagcgtgctcgtcccccgcgcggggctcccggccgccgccctcggccatcggctgctccccggtggcccaggcctcggactccgcggccggcccggcgcggcccagcgccctcagggatcatggcccaggtagcagtgtccaccctgcctgttgaagaagagtcctcctcagagaccaggatggtggtgacattcctcgtgtctgccctcgaatccatgtgtaaagaactggccaagtccaaggcagaagtggcctgcatcgcagtgtacgaaacagacgtgtttgtcgtcggaaccgagagaggatgcgcttttgttaatgccaggacggattttcagaaagattttgcaaaatactgcgttgcagagggactgtgtgaggtgaaacctccctgccctgtgaacgggatgcaggtccactcgggcgaaacggaaatactcaggaaggcagtggaggactatttctgcttttgttatggtaaagccttagggacaacagtgatggtgcctgttccctatgagaagatgctgcgagaccagtcggctgtggtagtgcaggggcttccggaaggcgttgcctttcaacaccctgagaattacgaccttgcaaccctgaaatggattttggagaacaaagcagggatttcattcatcataaatagacccttcctaggaccagagagtcagctgggtggccctgggatggtaacagatgcggagagatccatagtatcaccaagtgaaaggcatttcactgaaagcagaagctgtctcagtcaagaaagaatcagaagatcctaattactatcaatataatatgcaaggaagccacccttcttccacaagcaatgaagtaatagaaatggaattaccaatggaagattccactccgctggtcccttcagaagaaccaaatgaggaccctgaagccgaggtgaaaatcgaaggaaacacaaattcatccagtgttacaaattctgcagcaggtgttgaagatcttaacatcgttcaagtgactgttccagataatgagaaggaaagattatcaagcattgaaaagattaaacagctaagagaacaagttaatgacctctttagccgaaaatttggtgaagcaattggcgtggatttccctgtgaaagttccctacaggaagatcacattcaaccctggctgtgtggtgattgatggcatgcccccgggggtggtattcaaggcccccggctatctggaaatcagttccatgaggaggatcttggaggcagctgagtttatcaaattcacagtcatcaggccgcttccagggcttgagctcagtaatggacttttggaggccaaggcaagaggattgcttgaggccaggagtttgagaccagcctgggcaacatagcaagaccccatctctacaaaaaatttaaaaattagctggaaacagtggctcacacctgtagccccagctacttggcaggctaaagcaggaggatcacttaaactcaggagtttgagacagcagagaaccataattgcaatactacactccagcctgggtgacagaacaagaccctgtctctaaaaagaaaatgcaaacatattatcaaataattcctgtttaaactggacataacaagcacagctacatgctgaacctcatcaaaggtgtcttttgtttggctcatgtacttttgaaaataaggatgaggcctggcacggtggctcctgtaatcccagcactttgggaggccaaggcgggtggatcgcttgagcctggggtttcagaccagcctgggcaacaaggtaagactccagctct

SEQ ID NO: 307683 - protein, 949 aa, Artificial Sequence
  derived and/or modified sequence
MAQVAVSTLPVEEESSSETRMVVTFLVSALESMCKELAKSKAEVACIAVYETDVFVVGTERGCAFVNARTDFQKDFAKYCVAEGLCEVKPPCPVNGMQVHSGETEILRKAVEDYFCFCYGKALGTTVMVPVPYEKMLRDQSAVVVQGLPEGVAFQHPENYDLATLKWILENKAGISFIINRPFLGPESQLGGPGMVTDAERSIVSPSESCGPINVKTEPMEDSGISLKAEAVSVKKESEDPNYYQYNMQGSHPSSTSNEVIEMELPMEDSTPLVPSEEPNEDPEAEVKIEGNTNSSSVTNSAAGVEDLNIVQVTVPDNEKERLSSIEKIKQLREQVNDLFSRKFGEAIGVDFPVKVPYRKITFNPGCVVIDGMPPGVVFKAPGYLEISSMRRILEAAEFIKFTVIRPLPGLELSNVGKRKIDQEGRVFQEKWERAYFFVEVQNIPTCLICKQSMSVSKEYNLRRHYQTNHSKHYDQYMERMRDEKLHELKKGLRKYLLGLSDTECPEQKQVFAHPSPTQKSPVQPVEDLAGNLWEKLREKIRSFVAYSIAIDEITDINNTTQLAIFIRGVDENFDVSEELLDTVPMTGTKSGNEIFSRVEKSLKKFCIDWSKLVSVASTGTPAMVDANNGLVTKLKSRVATFCKGAELKSICCIIHPESLCAQKLKMDHVMDVVVKSVNWICSRGLNHSEFTTLLYELDSQYGSLLYYTEIKWLSRGLVLKRFFESLEEIDSFMSSRGKPLPQLSSIDWIRDLAFLVDMTMHLNALNISLQGHSQIVTQMYDLIRAFLAKLCLWETHLTRNNLAHFPTLKLASRNESDGLNYIPKIAELKTEFQKRLSDFKLYESELTLFSSPFSTKIDSVHEELQMEVIDLQCNTVLKTKYDKVGIPEFYKYLWGSYPKYKHHCAKILSMFGSTYICEQLFSIMKLSKTKYCSQLKDSQWDSVLHIAT

SEQ ID NO: 307684 - DNA, 3551 bp, Artificial Sequence
  derived and/or modified sequence
gaaagaaagagaaaaaggagggcgagtggcgagcaggggcctcggccgccacccacacgccccgaagcgtgctcgtcccccgcgcggggctcccggccgccgccctcggccatcggctgctccccggtggcccaggcctcggactccgcggccggcccggcgcggcccagcgccctcagggatcatggcccaggtagcagtgtccaccctgcctgttgaagaagagtcctcctcagagaccaggatggtggtgacattcctcgtgtctgccctcgaatccatgtgtaaagaactggccaagtccaaggcagaagtggcctgcatcgcagtgtacgaaacagacgtgtttgtcgtcggaaccgagagaggatgcgcttttgttaatgccaggacggattttcagaaagattttgcaaaatactgcgttgcagagggactgtgtgaggtgaaacctccctgccctgtgaacgggatgcaggtccactcgggcgaaacggaaatactcaggaaggcagtggaggactatttctgcttttgttatggtaaagccttagggacaacagtgatggtgcctgttccctatgagaagatgctgcgagaccagtcggctgtggtagtgcaggggcttccggaaggcgttgcctttcaacaccctgagaattacgaccttgcaaccctgaaatggattttggagaacaaagcagggatttcattcatcataaatagacccttcctaggaccagagagtcagctgggtggccctgggatggtaacagatgcggagagatccatagtatcaccaagtgaaagctgcggccccatcaatgtgaaaactgaacccatggaagattctggcatttcactgaaagcagaagctgtctcagtcaagaaagaatcagaagatcctaattactatcaatataatatgcaaggaagccacccttcttccacaagcaatgaagtaatagaaatggaattaccaatggaagattccactccgctggtcccttcagaagaaccaaatgaggaccctgaagccgaggtgaaaatcgaaggaaacacaaattcatccagtgttacaaattctgcagcaggtgttgaagatcttaacatcgttcaagtgactgttccagataatgagaaggaaagattatcaagcattgaaaagattaaacagctaagagaacaagttaatgacctctttagccgaaaatttggtgaagcaattggcgtggatttccctgtgaaagttccctacaggaagatcacattcaaccctggctgtgtggtgattgatggcatgcccccgggggtggtattcaaggcccccggctatctggaaatcagttccatgaggaggatcttggaggcagctgagtttatcaaattcacagtcatcaggccgcttccagggcttgagctcagtaatgtgggaaaacgcaagatagaccaggagggccgtgtgtttcaagaaaagtgggagagagcgtatttcttcgtggaagtacagaatattccaacatgtctcatatgcaaacaaagcatgtctgtgtccaaagaatataacctaagacgccactatcaaaccaatcacagcaagcattatgaccagtatatggaaagaatgcgtgacgagaagcttcacgagctgaaaaaagggctcaggaagtatctcttaggcttgtcagacaccgagtgtcccgagcaaaaacaagtgtttgcacacccaagtccaacccagaaatcccccgtgcagcctgtagaggacctagctgggaacttatgggagaagttacgtgaaaaaatcaggtcttttgtggcatattctatcgcaatcgatgagatcacggatataaataataccacccagttggccatattcatccgtggtgtcgatgagaatttcgatgtgtccgaagaacttctggacacggtgcccatgacgggtacaaaatctggcaacgagatcttttcgcgtgttgagaagagcctgaaaaagttctgtatcgactggtcgaaattagtaagcgtggcctccactggcaccccagcgatggtggatgccaataacgggcttgtcacaaaactgaagtccagggtggcgacgttctgcaagggtgcggaactgaagtccatctgttgtataattcatccggaatcactctgtgctcagaagttgaagatggaccacgtcatggacgtggtagtgaagtccgtgaactggatatgctcccggggactgaaccacagtgagttcacaaccttgctctatgagctggacagccagtatggtagcctcctgtactacacggagattaagtggctcagtcgcgggctcgtgctaaagagatttttcgaatccttggaagaaatcgactccttcatgtcatccagagggaaacccctgcctcaactgagctccatagattggatccgagacctggccttcttggttgacatgacgatgcatctgaacgctttgaacatctctctccaaggacactcccaaatcgtcacgcagatgtatgacctgatccgggcgttcctagcaaaactgtgcctctgggagactcatttgacgaggaataatctggcccactttcccaccctgaaattggcttccagaaatgaaagcgatggcctgaactacattcccaaaatcgcggaactcaagaccgaattccagaaaaggctgtctgatttcaaactctacgaaagcgaactgactctgttcagctccccgttctccacgaagatcgacagtgtgcacgaggagctccagatggaggttatcgacctgcaatgcaacacggtcctgaagacgaaatacgacaaggtgggaataccagaattctacaagtacctctggggtagctacccgaaatacaagcaccattgcgcaaagattctttccatgttcgggagcacctacatctgcgaacagctgttctccattatgaaactgagcaaaacaaaatactgctcccagttaaaggattcccagtgggattctgtactccacatcgcaacgtgatggagagaaaactcctggcagggccctatggtgggaaaggctggagtcttctagtcccaagggattgggagatgacaaaatgaatttttttttcttttttgagatggagtcttgctctgtcgcccaggttggagtgcagtggcgtgatctcggcttactgcaacttccagctcctgggttcgaacgattctcctgcctcagcctcccgagcagctgggactacaggcgtgcgccaccatgcctggctaatttttgtattagtagagatgaggtttcaccatgttggccaggctggtctccaactcctgacctcaggtgatccacctgcctcgacctcacaaagtgctgggattacaggcatgaaccactgtgcccagctgacaaaatgagttcttaaacttttttttttttcagttttttttccactttgaatcagaaatataatctgcagtatcatacttgtttatattacattgtgtgcctcactattcattaaaaatcaagaaagttttattgt

SEQ ID NO: 307685 - DNA, 3558 bp, Artificial Sequence
  derived and/or modified sequence
gggaaagaaagaaagagaaaaaggagggcgagtggcgagcaggggcctcggccgccacccacacgccccgaagcgtgctcgtcccccgcgcggggctcccggccgccgccctcggccatcggctgctccccggtggcccaggcctcggactccgcggccggcccggcgcggcccagcgccctcagggatcatggcccaggtagcagtgtccaccctgcctgttgaagaagagtcctcctcagagaccaggatggtggtgacattcctcgtgtctgccctcgaatccatgtgtaaagaactggccaagtccaaggcagaagtggcctgcatcgcagtgtacgaaacagacgtgtttgtcgtcggaaccgagagaggatgcgcttttgttaatgccaggacggattttcagaaagattttgcaaaatactgcgttgcagagggactgtgtgaggtgaaacctccctgccctgtgaacgggatgcaggtccactcgggcgaaacggaaatactcaggaaggcagtggaggactatttctgcttttgttatggtaaagccttagggacaacagtgatggtgcctgttccctatgagaagatgctgcgagaccagtcggctgtggtagtgcaggggcttccggaaggcgttgcctttcaacaccctgagaattacgaccttgcaaccctgaaatggattttggagaacaaagcagggatttcattcatcataaatagacccttcctaggaccagagagtcagctgggtggccctgggatggtaacagatgcggagagatccatagtatcaccaagtgaaagctgcggccccatcaatgtgaaaactgaacccatggaagattctggcatttcactgaaagcagaagctgtctcagtcaagaaagaatcagaagatcctaattactatcaatataatatgcaaggaagccacccttcttccacaagcaatgaagtaatagaaatggaattaccaatggaagattccactccgctggtcccttcagaagaaccaaatgaggaccctgaagccgaggtgaaaatcgaaggaaacacaaattcatccagtgttacaaattctgcagcaggtgttgaagatcttaacatcgttcaagtgactgttccagataatgagaaggaaagattatcaagcattgaaaagattaaacagctaagagaacaagttaatgacctctttagccgaaaatttggtgaagcaattggcgtggatttccctgtgaaagttccctacaggaagatcacattcaaccctggctgtgtggtgattgatggcatgcccccgggggtggtattcaaggcccccggctatctggaaatcagttccatgaggaggatcttggaggcagctgagtttatcaaattcacagtcatcaggccgcttccagggcttgagctcagtaatgtgggaaaacgcaagatagaccaggagggccgtgtgtttcaagaaaagtgggagagagcgtatttcttcgtggaagtacagaatattccaacatgtctcatatgcaaacaaagcatgtctgtgtccaaagaatataacctaagacgccactatcaaaccaatcacagcaagcattatgaccagtatatggaaagaatgcgtgacgagaagcttcacgagctgaaaaaagggctcaggaagtatctcttaggcttgtcagacaccgagtgtcccgagcaaaaacaagtgtttgcacacccaagtccaacccagaaatcccccgtgcagcctgtagaggacctagctgggaacttatgggagaagttacgtgaaaaaatcaggtcttttgtggcatattctatcgcaatcgatgagatcacggatataaataataccacccagttggccatattcatccgtggtgtcgatgagaatttcgatgtgtccgaagaacttctggacacggtgcccatgacgggtacaaaatctggcaacgagatcttttcgcgtgttgagaagagcctgaaaaagttctgtatcgactggtcgaaattagtaagcgtggcctccactggcaccccagcgatggtggatgccaataacgggcttgtcacaaaactgaagtccagggtggcgacgttctgcaagggtgcggaactgaagtccatctgttgtataattcatccggaatcactctgtgctcagaagttgaagatggaccacgtcatggacgtggtagtgaagtccgtgaactggatatgctcccggggactgaaccacagtgagttcacaaccttgctctatgagctggacagccagtatggtagcctcctgtactacacggagattaagtggctcagtcgcgggctcgtgctaaagagatttttcgaatccttggaagaaatcgactccttcatgtcatccagagggaaacccctgcctcaactgagctccatagattggatccgagacctggccttcttggttgacatgacgatgcatctgaacgctttgaacatctctctccaaggacactcccaaatcgtcacgcagatgtatgacctgatccgggcgttcctagcaaaactgtgcctctgggagactcatttgacgaggaataatctggcccactttcccaccctgaaattggcttccagaaatgaaagcgatggcctgaactacattcccaaaatcgcggaactcaagaccgaattccagaaaaggctgtctgatttcaaactctacgaaagcgaactgactctgttcagctccccgttctccacgaagatcgacagtgtgcacgaggagctccagatggaggttatcgacctgcaatgcaacacggtcctgaagacgaaatacgacaaggtgggaataccagaattctacaagtacctctggggtagctacccgaaatacaagcaccattgcgcaaagattctttccatgttcgggagcacctacatctgcgaacagctgttctccattatgaaactgagcaaaacaaaatactgctcccagttaaaggattcccagtgggattctgtactccacatcgcaacgtgatggagagaaaactcctggcagggccctatggtgggaaaggctggagtcttctagtcccaagggattgggagatgacaaaatgaatttttttttcttttttgagatggagtcttgctctgtcgcccaggttggagtgcagtggcgtgatctcggcttactgcaacttccagctcctgggttcgaacgattctcctgcctcagcctcccgagcagctgggactacaggcgtgcgccaccatgcctggctaatttttgtattagtagagatgaggtttcaccatgttggccaggctggtctccaactcctgacctcaggtgatccacctgcctcgacctcacaaagtgctgggattacaggcatgaaccactgtgcccagctgacaaaatgagttcttaaacttttttttttttcagttttttttccactttgaatcagaaatataatctgcagtatcatacttgtttatattacattgtgtgcctcactattcattaaaaatcaagaaagttttattgta

SEQ ID NO: 307686 - DNA, 219 bp, Artificial Sequence
  derived and/or modified sequence
atgagctaccagcagcagcagtgcaagcagccctgccagcccccccctgtctgccccgcccccaagtgccccgagccgtgtcccccccccaagtgtccagagccctgtcccccttccaagtgcccacagagctgtccaccccaacagtgccagcaaaagtgcccgcccgtgacaccgtcgcctccgtgccagcctaagtgcccccccaaatccaaatag

SEQ ID NO: 307687 - DNA, 180 bp, Artificial Sequence
  derived and/or modified sequence
atgacaagtgtctccacacagctaagcctggtgctgatgtctctcctgctggtattgcctgtagtcgaggctgtggaggctggggatgccattgcattgctgctgggggtcgttttgagcatcacaggaatatgcgcctgtctcggcgtgtacgcgcggaaaaggaacggccagatgtag

SEQ ID NO: 307688 - protein, 776 aa, Artificial Sequence
  derived and/or modified sequence
MSSTRSQNPHGLKQIGLDQIWDDLRAGIQQVYTRQSMAKSRYMELYTHVYNYCTSVHQSNQARGAGVPPSKSKKGQTPGGAQFVGLELYKRLKEFLKNYLTNLLKDGEDLMDESVLKFYTQQWEDYRFSSKVLNGICAYLNRHWVRRECDEGRKGIYEIYSLALVTWRDCLFRPLNKQVTNAVLKLIEKERNGETINTRLISGVVQSYVELGLNEDDAFAKGPTLTVYKESFESQFLADTERFYTRESTEFLQQNPVTEYMKKAEARLLEEQRRVQVYLHESTQDELARKCEQVLIEKHLEIFHTEFQNLLDADKNEDLGRMYNLVSRIQDGLGELKKLLETHIHNQGLAAIEKCGEAALNDPKMYVQTVLDVHKKYNALVMSAFNNDAGFVAALDKACGRFINNNAVTKMAQSSSKSPELLARYCDSLLKKSSKNPEEAELEDTLNQVMVVFKYIEDKDVFQKFYAKMLAKRLVHQNSASDDAEASMISKLKQACGFEYTSKLQRMFQDIGVSKDLNEQFKKHLTNSEPLDLDFSIQVLSSGSWPFQQSCTFALPSELERSYQRFTAFYASRHSGRKLTWLYQLSKGELVTNCFKNRYTLQASTFQMAILLQYNTEDAYTVQQLTDSTQIKMDILAQVLQILLKSKLLVLEDENANVDEVELKPDTLIKLYLGYKNKKLRVNINVPMKTEQKQEQETTHKNIEEDRKLLIQAAIVRIMKMRKVLKHQQLLGEVLTQLSSRFKPRVPVIKKCIDILIEKEYLERVDGEKDTYSYLA

SEQ ID NO: 307689 - protein, 703 aa, Artificial Sequence
  derived and/or modified sequence
MSSTRSQNPHGLKQIGLDQIWDDLRAGIQQVYTRQSMAKSRYMELYTQQWEDYRFSSKVLNGICAYLNRHWVRRECDEGRKGIYEIYSLALVTWRDCLFRPLNKQVTNAVLKLIEKERNGETINTRLISGVVQSYVELGLNEDDAFAKGPTLTVYKESFESQFLADTERFYTRESTEFLQQNPVTEYMKKAEARLLEEQRRVQVYLHESTQDELARKCEQVLIEKHLEIFHTEFQNLLDADKNEDLGRMYNLVSRIQDGLGELKKLLETHIHNQGLAAIEKCGEAALNDPKMYVQTVLDVHKKYNALVMSAFNNDAGFVAALDKACGRFINNNAVTKMAQSSSKSPELLARYCDSLLKKSSKNPEEAELEDTLNQVMVVFKYIEDKDVFQKFYAKMLAKRLVHQNSASDDAEASMISKLKQACGFEYTSKLQRMFQDIGVSKDLNEQFKKHLTNSEPLDLDFSIQVLSSGSWPFQQSCTFALPSELERSYQRFTAFYASRHSGRKLTWLYQLSKGELVTNCFKNRYTLQASTFQMAILLQYNTEDAYTVQQLTDSTQIKMDILAQVLQILLKSKLLVLEDENANVDEVELKPDTLIKLYLGYKNKKLRVNINVPMKTEQKQEQETTHKNIEEDRKLLIQAAIVRIMKMRKVLKHQQLLGEVLTQLSSRFKPRVPVIKKCIDILIEKEYLERVDGEKDTYSYLA

SEQ ID NO: 307690 - protein, 607 aa, Artificial Sequence
  derived and/or modified sequence
MELYTHVYNYCTSVHQSNQARGAGVPPSKSKKGQTPGGAQFVGLELYKRLKEFLKNYLTNLLKDGEDLMDESVLKFYTQQWEDYRFSSKVLNGICAYLNRHWVRRECDEGRKGIYEIYSLALVTWRDCLFRPLNKQVTNAVLKLIEKERNGETINTRLISGVVQSYVELGLNEDDAFAKGPTLTVYKESFESQFLADTERFYTRESTEFLQQNPVTEYMKKAEARLLEEQRRVQVYLHESTQDELARKCEQVLIEKHLEIFHTEFQNLLDADKNEDLGRMYNLVSRIQDGLGELKKLLETHIHNQGLAAIEKCGEAALNDPKMYVQTVLDVHKKYNALVMSAFNNDAGFVAALDKACGRFINNNAVTKMAQSSSKSPELLARYCDSLLKKSSKNPEEAELEDTLNQVMVVFKYIEDKDVFQKFYAKMLAKRLVHQNSASDDAEASMISKLKQACGFEYTSKLQRMFQDIGVSKDLNEQFKKHLTNSEPLDLDFSIQVLSSGSWPFQQSCTFALPSELERSYQRFTAFYASRHSGRKLTWLYQLSKGELVTNCFKNRYTLQASTFQMAILLQYNTEDAYTVQQLTDSTQIKMDILAQVLQILLKSKLL

SEQ ID NO: 307691 - DNA, 2331 bp, Artificial Sequence
  derived and/or modified sequence
atgagcagcaccagaagccagaacccccacggcctgaagcagatcggcctggaccagatctgggacgacctgagagccggcatccagcaggtgtacaccagacagagcatggccaagagcagatacatggagctgtacacccacgtgtacaactactgcaccagcgtgcaccagagcaaccaggccagaggcgccggcgtgccccccagcaagagcaagaagggccagacccccggcggcgcccagttcgtgggcctggagctgtacaagagactgaaggagttcctgaagaactacctgaccaacctgctgaaggacggcgaggacctgatggacgagagcgtgctgaagttctacacccagcagtgggaggactacagattcagcagcaaggtgctgaacggcatctgcgcctacctgaacagacactgggtgagaagagagtgcgacgagggcagaaagggcatctacgagatctacagcctggccctggtgacctggagagactgcctgttcagacccctgaacaagcaggtgaccaacgccgtgctgaagctgatcgagaaggagagaaacggcgagaccatcaacaccagactgatcagcggcgtggtgcagagctacgtggagctgggcctgaacgaggacgacgccttcgccaagggccccaccctgaccgtgtacaaggagagcttcgagagccagttcctggccgacaccgagagattctacaccagagagagcaccgagttcctgcagcagaaccccgtgaccgagtacatgaagaaggccgaggccagactgctggaggagcagagaagagtgcaggtgtacctgcacgagagcacccaggacgagctggccagaaagtgcgagcaggtgctgatcgagaagcacctggagatcttccacaccgagttccagaacctgctggacgccgacaagaacgaggacctgggcagaatgtacaacctggtgagcagaatccaggacggcctgggcgagctgaagaagctgctggagacccacatccacaaccagggcctggccgccatcgagaagtgcggcgaggccgccctgaacgaccccaagatgtacgtgcagaccgtgctggacgtgcacaagaagtacaacgccctggtgatgagcgccttcaacaacgacgccggcttcgtggccgccctggacaaggcctgcggcagattcatcaacaacaacgccgtgaccaagatggcccagagcagcagcaagagccccgagctgctggccagatactgcgacagcctgctgaagaagagcagcaagaaccccgaggaggccgagctggaggacaccctgaaccaggtgatggtggtgttcaagtacatcgaggacaaggacgtgttccagaagttctacgccaagatgctggccaagagactggtgcaccagaacagcgccagcgacgacgccgaggccagcatgatcagcaagctgaagcaggcctgcggcttcgagtacaccagcaagctgcagagaatgttccaggacatcggcgtgagcaaggacctgaacgagcagttcaagaagcacctgaccaacagcgagcccctggacctggacttcagcatccaggtgctgagcagcggcagctggcccttccagcagagctgcaccttcgccctgcccagcgagctggagagaagctaccagagattcaccgccttctacgccagcagacacagcggcagaaagctgacctggctgtaccagctgagcaagggcgagctggtgaccaactgcttcaagaacagatacaccctgcaggccagcaccttccagatggccatcctgctgcagtacaacaccgaggacgcctacaccgtgcagcagctgaccgacagcacccagatcaagatggacatcctggcccaggtgctgcagatcctgctgaagagcaagctgctggtgctggaggacgagaacgccaacgtggacgaggtggagctgaagcccgacaccctgatcaagctgtacctgggctacaagaacaagaagctgagagtgaacatcaacgtgcccatgaagaccgagcagaagcaggagcaggagaccacccacaagaacatcgaggaggacagaaagctgctgatccaggccgccatcgtgagaatcatgaagatgagaaaggtgctgaagcaccagcagctgctgggcgaggtgctgacccagctgagcagcagattcaagcccagagtgcccgtgatcaagaagtgcatcgacatcctgatcgagaaggagtacctggagagagtggacggcgagaaggacacctacagctacctggcctag

SEQ ID NO: 307692 - DNA, 2112 bp, Artificial Sequence
  derived and/or modified sequence
atgagcagcaccagaagccagaacccccacggcctgaagcagatcggcctggaccagatctgggacgacctgagagccggcatccagcaggtgtacaccagacagagcatggccaagagcagatacatggagctgtacacccagcagtgggaggactacagattcagcagcaaggtgctgaacggcatctgcgcctacctgaacagacactgggtgagaagagagtgcgacgagggcagaaagggcatctacgagatctacagcctggccctggtgacctggagagactgcctgttcagacccctgaacaagcaggtgaccaacgccgtgctgaagctgatcgagaaggagagaaacggcgagaccatcaacaccagactgatcagcggcgtggtgcagagctacgtggagctgggcctgaacgaggacgacgccttcgccaagggccccaccctgaccgtgtacaaggagagcttcgagagccagttcctggccgacaccgagagattctacaccagagagagcaccgagttcctgcagcagaaccccgtgaccgagtacatgaagaaggccgaggccagactgctggaggagcagagaagagtgcaggtgtacctgcacgagagcacccaggacgagctggccagaaagtgcgagcaggtgctgatcgagaagcacctggagatcttccacaccgagttccagaacctgctggacgccgacaagaacgaggacctgggcagaatgtacaacctggtgagcagaatccaggacggcctgggcgagctgaagaagctgctggagacccacatccacaaccagggcctggccgccatcgagaagtgcggcgaggccgccctgaacgaccccaagatgtacgtgcagaccgtgctggacgtgcacaagaagtacaacgccctggtgatgagcgccttcaacaacgacgccggcttcgtggccgccctggacaaggcctgcggcagattcatcaacaacaacgccgtgaccaagatggcccagagcagcagcaagagccccgagctgctggccagatactgcgacagcctgctgaagaagagcagcaagaaccccgaggaggccgagctggaggacaccctgaaccaggtgatggtggtgttcaagtacatcgaggacaaggacgtgttccagaagttctacgccaagatgctggccaagagactggtgcaccagaacagcgccagcgacgacgccgaggccagcatgatcagcaagctgaagcaggcctgcggcttcgagtacaccagcaagctgcagagaatgttccaggacatcggcgtgagcaaggacctgaacgagcagttcaagaagcacctgaccaacagcgagcccctggacctggacttcagcatccaggtgctgagcagcggcagctggcccttccagcagagctgcaccttcgccctgcccagcgagctggagagaagctaccagagattcaccgccttctacgccagcagacacagcggcagaaagctgacctggctgtaccagctgagcaagggcgagctggtgaccaactgcttcaagaacagatacaccctgcaggccagcaccttccagatggccatcctgctgcagtacaacaccgaggacgcctacaccgtgcagcagctgaccgacagcacccagatcaagatggacatcctggcccaggtgctgcagatcctgctgaagagcaagctgctggtgctggaggacgagaacgccaacgtggacgaggtggagctgaagcccgacaccctgatcaagctgtacctgggctacaagaacaagaagctgagagtgaacatcaacgtgcccatgaagaccgagcagaagcaggagcaggagaccacccacaagaacatcgaggaggacagaaagctgctgatccaggccgccatcgtgagaatcatgaagatgagaaaggtgctgaagcaccagcagctgctgggcgaggtgctgacccagctgagcagcagattcaagcccagagtgcccgtgatcaagaagtgcatcgacatcctgatcgagaaggagtacctggagagagtggacggcgagaaggacacctacagctacctggcctag

SEQ ID NO: 307693 - DNA, 1824 bp, Artificial Sequence
  derived and/or modified sequence
atggagctgtacacccacgtgtacaactactgcaccagcgtgcaccagagcaaccaggccagaggcgccggcgtgccccccagcaagagcaagaagggccagacccccggcggcgcccagttcgtgggcctggagctgtacaagagactgaaggagttcctgaagaactacctgaccaacctgctgaaggacggcgaggacctgatggacgagagcgtgctgaagttctacacccagcagtgggaggactacagattcagcagcaaggtgctgaacggcatctgcgcctacctgaacagacactgggtgagaagagagtgcgacgagggcagaaagggcatctacgagatctacagcctggccctggtgacctggagagactgcctgttcagacccctgaacaagcaggtgaccaacgccgtgctgaagctgatcgagaaggagagaaacggcgagaccatcaacaccagactgatcagcggcgtggtgcagagctacgtggagctgggcctgaacgaggacgacgccttcgccaagggccccaccctgaccgtgtacaaggagagcttcgagagccagttcctggccgacaccgagagattctacaccagagagagcaccgagttcctgcagcagaaccccgtgaccgagtacatgaagaaggccgaggccagactgctggaggagcagagaagagtgcaggtgtacctgcacgagagcacccaggacgagctggccagaaagtgcgagcaggtgctgatcgagaagcacctggagatcttccacaccgagttccagaacctgctggacgccgacaagaacgaggacctgggcagaatgtacaacctggtgagcagaatccaggacggcctgggcgagctgaagaagctgctggagacccacatccacaaccagggcctggccgccatcgagaagtgcggcgaggccgccctgaacgaccccaagatgtacgtgcagaccgtgctggacgtgcacaagaagtacaacgccctggtgatgagcgccttcaacaacgacgccggcttcgtggccgccctggacaaggcctgcggcagattcatcaacaacaacgccgtgaccaagatggcccagagcagcagcaagagccccgagctgctggccagatactgcgacagcctgctgaagaagagcagcaagaaccccgaggaggccgagctggaggacaccctgaaccaggtgatggtggtgttcaagtacatcgaggacaaggacgtgttccagaagttctacgccaagatgctggccaagagactggtgcaccagaacagcgccagcgacgacgccgaggccagcatgatcagcaagctgaagcaggcctgcggcttcgagtacaccagcaagctgcagagaatgttccaggacatcggcgtgagcaaggacctgaacgagcagttcaagaagcacctgaccaacagcgagcccctggacctggacttcagcatccaggtgctgagcagcggcagctggcccttccagcagagctgcaccttcgccctgcccagcgagctggagagaagctaccagagattcaccgccttctacgccagcagacacagcggcagaaagctgacctggctgtaccagctgagcaagggcgagctggtgaccaactgcttcaagaacagatacaccctgcaggccagcaccttccagatggccatcctgctgcagtacaacaccgaggacgcctacaccgtgcagcagctgaccgacagcacccagatcaagatggacatcctggcccaggtgctgcagatcctgctgaagagcaagctgctgtag

SEQ ID NO: 307694 - DNA, 3208 bp, Artificial Sequence
  derived and/or modified sequence
aggaggagggccgggcgggcaggggaggaggaggaggcgggcgccgtgtcgcacgcagctccaggcggggcagccccggtagctgagggacgcagctagaccttggcgggacggggctttcgccggggcccaggcccagggaccaggcggaggcgtcgcgggagcctttggggcaccacagagatgcgggtttgcctgcaatgagatttcattctctacatttaaaggacatcctttctgagctgctgtgaataaatttggaatggtactgtatattttcatctaatggagaactagctgtactttgaataaggattgctgcactggacgactttagaacatccctcacaatgtcgtcaacccggagccagaacccccacggcctgaagcagattggcctggaccagatctgggacgacctcagagccggcatccagcaggtgtacacacggcagagcatggccaagtccagatatatggagctctacactcatgtttataactactgtactagtgttcaccagtcaaaccaagcacgaggagctggagttcctccttctaagtcgaaaaaggggcagacacctggaggagctcagtttgttggcctggaattatataaacgacttaaggaatttttgaagaattacttgacaaatcttcttaaggatggagaagatttgatggatgagagtgtactgaaattctacactcaacaatgggaagattatcgattttcaagcaaagtgctgaatggaatttgtgcctacctcaatagacattgggttcgccgtgaatgtgacgaaggacgaaaaggaatatatgaaatctattcgcttgcattggtgacttggagagactgtctgttcaggccactgaataaacaggtaacaaatgctgttttaaagctgattgaaaaggaaaggaatggtgaaaccatcaatacaagattgattagtggagttgtacagtcttacgtggaattggggctgaatgaagatgatgcatttgcaaagggccctacgttaacagtgtataaagaatcctttgaatctcaatttttggctgacacagagagattttataccagagagagtactgaattcttgcagcagaacccagttactgaatatatgaaaaaggcagaggctcgtctgcttgaggaacaacgaagagttcaggtttaccttcatgaaagcacacaagatgaattagcaaggaaatgtgaacaagtcctcattgaaaaacacttggaaattttccacacagaatttcagaatttattggatgctgacaaaaatgaagatttgggacgcatgtataatcttgtatctagaatccaggatggcctaggagaattgaaaaaactgttggagacacacattcataatcagggtcttgcagccattgaaaagtgtggagaagctgctttaaatgaccccaaaatgtatgtacagacagtgcttgatgttcataaaaaatacaatgccctggtaatgtctgcattcaacaatgacgctggctttgtggctgctcttgataaggcttgtggtcgcttcataaacaacaacgcggttaccaagatggcccaatcatccagtaaatcccctgagttgctggctcgatactgtgactccttgttgaagaaaagttccaagaacccagaggaggcagaactagaagacacactcaatcaagtgatggttgtcttcaagtacatagaagacaaagacgtatttcagaagttctatgcgaagatgctcgccaagaggctcgtccaccagaacagtgcaagtgacgatgccgaagccagcatgatctccaagttaaagcaagcttgcgggttcgagtacacctctaaacttcagcgcatgtttcaagacattggcgtgagcaaagatctgaacgagcaattcaaaaagcacttgacaaactcagaacccctagacttggatttcagcattcaagtgctgagctccgggtcctggcccttccagcagtcttgtacatttgccttgccgtcagagttggaacgtagttatcagcgattcacagctttctacgccagccgccacagtggccgaaaattgacgtggttatatcagttgtctaaaggagaattggtaactaactgcttcaaaaacagatatactttgcaggcgtcgacattccagatggctatcctgcttcagtacaacacggaagatgcctacactgtgcagcagctgaccgacagcactcaaattaaaatggacattttggcgcaagttttacagattttattaaagtcgaagctattggtcttggaagatgaaaatgcaaatgttgatgaggtggaattgaagccagataccttaataaaattatatcttggttataaaaataagaaattaagggttaacatcaatgtgccaatgaaaaccgaacagaagcaggaacaagaaaccacacacaaaaacatcgaggaagaccgcaaactactgattcaggcggccatcgtgagaatcatgaagatgaggaaggttctgaaacaccagcagttacttggcgaggtcctcactcagctgtcctccaggttcaaacctcgagtccctgtgatcaagaaatgcattgacattctaattgagaaagaatatttggagcgagtggatggtgaaaaggacacctacagttacttggcttaacccttctggaagggtctgactgtgtgacccgcagcaaatagttcatgttggaaagaatgaaaacaactcaagttcatagcagccagcctgccgccattggacctcccttttaaaaactgagaccaagactcccatcagctggtctcggatttacatcggaactgctcaggattgatacatttcaagtctgtaaatacggacaccaacgccatttaccctaatttaagaacagcggggactgaccctccgtgccgagggctgcatgctaccgcactaagtcaatacatgggctccccgattcgcagctgtcgtcttggcagcacttgtcacgttggcagcactttgagagcaagtctgagtggacccacatgtaacctgctatgaaaaccatttgtatagtgtgtttcattttttaatgtgtgaaaataaagaaaattaaaggatttctgtacaagtcgcattgggttttgttttaagttttactaatttctatatgtaaataaaagatataatgattgtgcaaattt

SEQ ID NO: 307695 - DNA, 2857 bp, Artificial Sequence
  derived and/or modified sequence
actattttatatcacgactcatgccatccgtatgtgtaatcaaagccttctaagtcttgatatgtccttacaaagacgaaggatagagtgaatgtcaaaatttgccaaacaggagttactgaaagtctgaaggggaaagcctagttaggttttatcttagaagtgatttttaaaacgaaacacgcagataagctcgagctttctggagccgattcctaaggccttgcaggtggtaagggggtcgagaattggctgaggttcctcggaagtccgcgccgattcggagggccacctctgactttctgatctggggtgcaacccccagtccctgtcccggtcgacaaaggtgtggagtcaggttccaggtttgcctgcaatgagatttcattctctacatttaaaggacatcctttctgagctgctgtgaataaatttggaatggtactgtatattttcatctaatggagaactagctgtactttgaataaggattgctgcactggacgactttagaacatccctcacaatgtcgtcaacccggagccagaacccccacggcctgaagcagattggcctggaccagatctgggacgacctcagagccggcatccagcaggtgtacacacggcagagcatggccaagtccagatatatggagctctacactcatgtttataactactgtactagtgttcaccagtcaaaccaagcacgaggagctggagttcctccttctaagtcgaaaaaggggcagacacctggaggagctcagtttgttggcctggaattatataaacgacttaaggaatttttgaagaattacttgacaaatcttcttaaggatggagaagatttgatggatgagagtgtactgaaattctacactcaacaatgggaagattatcgattttcaagcaaagtgctgaatggaatttgtgcctacctcaatagacattgggttcgccgtgaatgtgacgaaggacgaaaaggaatatatgaaatctattcgcttgcattggtgacttggagagactgtctgttcaggccactgaataaacaggtaacaaatgctgttttaaagctgattgaaaaggaaaggaatggtgaaaccatcaatacaagattgattagtggagttgtacagtcttacgtggaattggggctgaatgaagatgatgcatttgcaaagggccctacgttaacagtgtataaagaatcctttgaatctcaatttttggctgacacagagagattttataccagagagagtactgaattcttgcagcagaacccagttactgaatatatgaaaaaggcagaggctcgtctgcttgaggaacaacgaagagttcaggtttaccttcatgaaagcacacaagatgaattagcaaggaaatgtgaacaagtcctcattgaaaaacacttggaaattttccacacagaatttcagaatttattggatgctgacaaaaatgaagatttgggacgcatgtataatcttgtatctagaatccaggatggcctaggagaattgaaaaaactgttggagacacacattcataatcagggtcttgcagccattgaaaagtgtggagaagctgctttaaatgaccccaaaatgtatgtacagacagtgcttgatgttcataaaaaatacaatgccctggtaatgtctgcattcaacaatgacgctggctttgtggctgctcttgataaggcttgtggtcgcttcataaacaacaacgcggttaccaagatggcccaatcatccagtaaatcccctgagttgctggctcgatactgtgactccttgttgaagaaaagttccaagaacccagaggaggcagaactagaagacacactcaatcaagtgatggttgtcttcaagtacatagaagacaaagacgtatttcagaagttctatgcgaagatgctcgccaagaggctcgtccaccagaacagtgcaagtgacgatgccgaagccagcatgatctccaagttaaagcaagcttgcgggttcgagtacacctctaaacttcagcgcatgtttcaagacattggcgtgagcaaagatctgaacgagcaattcaaaaagcacttgacaaactcagaacccctagacttggatttcagcattcaagtgctgagctccgggtcctggcccttccagcagtcttgtacatttgccttgccgtcagagttggaacgtagttatcagcgattcacagctttctacgccagccgccacagtggccgaaaattgacgtggttatatcagttgtctaaaggagaattggtaactaactgcttcaaaaacagatatactttgcaggcgtcgacattccagatggctatcctgcttcagtacaacacggaagatgcctacactgtgcagcagctgaccgacagcactcaaattaaaatggacattttggcgcaagttttacagattttattaaagtcgaagctattggtcttggaagatgaaaatgcaaatgttgatgaggtggaattgaagccagataccttaataaaattatatcttggttataaaaataagaaattaagggttaacatcaatgtgccaatgaaaaccgaacagaagcaggaacaagaaaccacacacaaaaacatcgaggaagaccgcaaactactgattcaggcggccatcgtgagaatcatgaagatgaggaaggttctgaaacaccagcagttacttggcgaggtcctcactcagctgtcctccaggttcaaacctcgagtccctgtgatcaagaaatgcattgacattctaattgagaaagaatatttggagcgagtggatggtgaaaaggacacctacagttacttggcttaa

SEQ ID NO: 307696 - DNA, 2848 bp, Artificial Sequence
  derived and/or modified sequence
agctccaggcggggcagccccggtagctgagggacgcagctagaccttggcgggacggggctttcgccggggcccaggcccagggaccaggcggaggcgtcgcgggagcctttggggcaccacagagatgcgggtttgcctgcaatgagatttcattctctacatttaaaggacatcctttctgagctgctgtgaataaatttggaatggtactgtatattttcatctaatggagaactagctgtactttgaataaggattgctgcactggacgactttagaacatccctcacaatgtcgtcaacccggagccagaacccccacggcctgaagcagattggcctggaccagatctgggacgacctcagagccggcatccagcaggtgtacacacggcagagcatggccaagtccagatatatggagctctacactcaacaatgggaagattatcgattttcaagcaaagtgctgaatggaatttgtgcctacctcaatagacattgggttcgccgtgaatgtgacgaaggacgaaaaggaatatatgaaatctattcgcttgcattggtgacttggagagactgtctgttcaggccactgaataaacaggtaacaaatgctgttttaaagctgattgaaaaggaaaggaatggtgaaaccatcaatacaagattgattagtggagttgtacagtcttacgtggaattggggctgaatgaagatgatgcatttgcaaagggccctacgttaacagtgtataaagaatcctttgaatctcaatttttggctgacacagagagattttataccagagagagtactgaattcttgcagcagaacccagttactgaatatatgaaaaaggcagaggctcgtctgcttgaggaacaacgaagagttcaggtttaccttcatgaaagcacacaagatgaattagcaaggaaatgtgaacaagtcctcattgaaaaacacttggaaattttccacacagaatttcagaatttattggatgctgacaaaaatgaagatttgggacgcatgtataatcttgtatctagaatccaggatggcctaggagaattgaaaaaactgttggagacacacattcataatcagggtcttgcagccattgaaaagtgtggagaagctgctttaaatgaccccaaaatgtatgtacagacagtgcttgatgttcataaaaaatacaatgccctggtaatgtctgcattcaacaatgacgctggctttgtggctgctcttgataaggcttgtggtcgcttcataaacaacaacgcggttaccaagatggcccaatcatccagtaaatcccctgagttgctggctcgatactgtgactccttgttgaagaaaagttccaagaacccagaggaggcagaactagaagacacactcaatcaagtgatggttgtcttcaagtacatagaagacaaagacgtatttcagaagttctatgcgaagatgctcgccaagaggctcgtccaccagaacagtgcaagtgacgatgccgaagccagcatgatctccaagttaaagcaagcttgcgggttcgagtacacctctaaacttcagcgcatgtttcaagacattggcgtgagcaaagatctgaacgagcaattcaaaaagcacttgacaaactcagaacccctagacttggatttcagcattcaagtgctgagctccgggtcctggcccttccagcagtcttgtacatttgccttgccgtcagagttggaacgtagttatcagcgattcacagctttctacgccagccgccacagtggccgaaaattgacgtggttatatcagttgtctaaaggagaattggtaactaactgcttcaaaaacagatatactttgcaggcgtcgacattccagatggctatcctgcttcagtacaacacggaagatgcctacactgtgcagcagctgaccgacagcactcaaattaaaatggacattttggcgcaagttttacagattttattaaagtcgaagctattggtcttggaagatgaaaatgcaaatgttgatgaggtggaattgaagccagataccttaataaaattatatcttggttataaaaataagaaattaagggttaacatcaatgtgccaatgaaaaccgaacagaagcaggaacaagaaaccacacacaaaaacatcgaggaagaccgcaaactactgattcaggcggccatcgtgagaatcatgaagatgaggaaggttctgaaacaccagcagttacttggcgaggtcctcactcagctgtcctccaggttcaaacctcgagtccctgtgatcaagaaatgcattgacattctaattgagaaagaatatttggagcgagtggatggtgaaaaggacacctacagttacttggcttaacccttctggaagggtctgactgtgtgacccgcagcaaatagttcatgttggaaagaatgaaaacaactcaagttcatagcagccagcctgccgccattggacctcccttttaaaaactgagaccaagactcccatcagctggtctcggatttacatcggaactgctcaggattgatacatttcaagtctgtaaatacggacaccaacgccatttaccctaatttaagaacagcggggactgaccctccgtgccgagggctgcatgctaccgcactaagtcaatacatgggctccccgattcgcagctgtcgtcttggcagcacttgtcacgttggcagcactttgagagcaagtctgagtggacccacatgtaacctgctatgaaaaccatttgtatagtgtgtttcattttttaatgtgtgaaaataaagaaaattaaagg

SEQ ID NO: 307697 - DNA, 2930 bp, Artificial Sequence
  derived and/or modified sequence
ggaggcgggcgccgtgtcgcacgcagctccaggcggggcagccccggtagctgagggacgcagctagaccttggcgggacggggctttcgccggggcccaggcccagggaccaggcggaggcgtcgcgggagcctttggggcaccacagagatgcgggtttgcctgcaatgagatttcattctctacatttaaaggacatcctttctgagctgctgtgaataaatttggaatggtactgtatattttcatctaatggagaactagctgtactttgaataaggattgctgcactggacgactttagaacatccctcacaatgtcgtcaacccggagccagaacccccacggcctgaagcagatatatggagctctacactcatgtttataactactgtactagtgttcaccagtcaaaccaagcacgaggagctggagttcctccttctaagtcgaaaaaggggcagacacctggaggagctcagtttgttggcctggaattatataaacgacttaaggaatttttgaagaattacttgacaaatcttcttaaggatggagaagatttgatggatgagagtgtactgaaattctacactcaacaatgggaagattatcgattttcaagcaaagtgctgaatggaatttgtgcctacctcaatagacattgggttcgccgtgaatgtgacgaaggacgaaaaggaatatatgaaatctattcgcttgcattggtgacttggagagactgtctgttcaggccactgaataaacaggtaacaaatgctgttttaaagctgattgaaaaggaaaggaatggtgaaaccatcaatacaagattgattagtggagttgtacagtcttacgtggaattggggctgaatgaagatgatgcatttgcaaagggccctacgttaacagtgtataaagaatcctttgaatctcaatttttggctgacacagagagattttataccagagagagtactgaattcttgcagcagaacccagttactgaatatatgaaaaaggcagaggctcgtctgcttgaggaacaacgaagagttcaggtttaccttcatgaaagcacacaagatgaattagcaaggaaatgtgaacaagtcctcattgaaaaacacttggaaattttccacacagaatttcagaatttattggatgctgacaaaaatgaagatttgggacgcatgtataatcttgtatctagaatccaggatggcctaggagaattgaaaaaactgttggagacacacattcataatcagggtcttgcagccattgaaaagtgtggagaagctgctttaaatgaccccaaaatgtatgtacagacagtgcttgatgttcataaaaaatacaatgccctggtaatgtctgcattcaacaatgacgctggctttgtggctgctcttgataaggcttgtggtcgcttcataaacaacaacgcggttaccaagatggcccaatcatccagtaaatcccctgagttgctggctcgatactgtgactccttgttgaagaaaagttccaagaacccagaggaggcagaactagaagacacactcaatcaagtgatggttgtcttcaagtacatagaagacaaagacgtatttcagaagttctatgcgaagatgctcgccaagaggctcgtccaccagaacagtgcaagtgacgatgccgaagccagcatgatctccaagttaaagcaagcttgcgggttcgagtacacctctaaacttcagcgcatgtttcaagacattggcgtgagcaaagatctgaacgagcaattcaaaaagcacttgacaaactcagaacccctagacttggatttcagcattcaagtgctgagctccgggtcctggcccttccagcagtcttgtacatttgccttgccgtcagagttggaacgtagttatcagcgattcacagctttctacgccagccgccacagtggccgaaaattgacgtggttatatcagttgtctaaaggagaattggtaactaactgcttcaaaaacagatatactttgcaggcgtcgacattccagatggctatcctgcttcagtacaacacggaagatgcctacactgtgcagcagctgaccgacagcactcaaattaaaatggacattttggcgcaagttttacagattttattaaagtcgaagctattgtaagaaattaagggttaacatcaatgtgccaatgaaaaccgaacagaagcaggaacaagaaaccacacacaaaaacatcgaggaagaccgcaaactactgattcaggcggccatcgtgagaatcatgaagatgaggaaggttctgaaacaccagcagttacttggcgaggtcctcactcagctgtcctccaggttcaaacctcgagtccctgtgatcaagaaatgcattgacattctaattgagaaagaatatttggagcgagtggatggtgaaaaggacacctacagttacttggcttaacccttctggaagggtctgactgtgtgacccgcagcaaatagttcatgttggaaagaatgaaaacaactcaagttcatagcagccagcctgccgccattggacctcccttttaaaaactgagaccaagactcccatcagctggtctcggatttacatcggaactgctcaggattgatacatttcaagtctgtaaatacggacaccaacgccatttaccctaatttaagaacagcggggactgaccctccgtgccgagggctgcatgctaccgcactaagtcaatacatgggctccccgattcgcagctgtcgtcttggcagcacttgtcacgttggcagcactttgagagcaagtctgagtggacccacatgtaacctgctatgaaaaccatttgtatagtgtgtttcattttttaatgtgtgaaaataaagaaaattaaaggat

SEQ ID NO: 307698 - DNA, 2331 bp, Artificial Sequence
  derived and/or modified sequence
atgtctagtactaggagccagaacccgcacgggctaaagcagatagggctggaccagatttgggacgatctccgggcgggtatccagcaggtttatacaaggcagtccatggcgaaaagccggtacatggaactgtacactcatgtctacaattattgcaccagtgtccatcagtccaaccaggctaggggtgcaggagtccctccctctaaatctaagaagggtcaaactcccggtggggcgcagtttgtcgggctggagctatacaagagacttaaggagttccttaaaaactatcttacaaatctgttaaaggatggagaagatctcatggacgagagcgtccttaagttctatacacagcagtgggaagattacagatttagctctaaggtactgaacggaatatgcgcatacctcaacagacactgggtgcggcgcgagtgcgacgagggaaggaaagggatctacgaaatctattctttagctctggttacctggagggattgtctttttcgccctctcaacaaacaggtgacaaatgccgtcctgaaactcattgagaaggagcgaaatggagaaaccattaacacccggcttatttcgggagtggtccagagctacgtggaattgggccttaacgaagatgatgcttttgcgaaagggcccaccctcacagtctacaaggagagttttgagagccaattcctcgccgatacggagcgcttttatacccgggagtccactgaattcttgcagcagaatccagtgaccgagtatatgaaaaaagctgaggctcggttgctggaggaacagcgccgggtgcaagtgtacctgcacgagtcaacccaggacgaactcgctagaaagtgcgaacaggtgctgatcgagaaacatcttgagatatttcataccgaatttcaaaacctactggacgcagacaagaatgaagacctgggtaggatgtataacctggtctctcgcatccaggacggacttggtgaactcaaaaaacttttggaaactcatatccacaatcagggacttgctgctatcgagaaatgcggcgaggcagcgctgaatgacccaaaaatgtacgtgcagaccgtgttagacgtccacaagaagtacaacgccctggttatgtctgcttttaacaacgatgcagggtttgtggctgctctggacaaagcttgtggccggtttatcaacaacaatgcggtcaccaagatggcccagtccagctctaaatcacctgaactcctggcgcgctactgtgattcccttctgaagaagagttctaaaaaccccgaagaggccgaactggaagataccctgaaccaggtcatggtcgtctttaagtacattgaggataaagatgtgtttcaaaaattttacgctaaaatgttggctaaaaggctagtacaccagaatagcgcatccgacgatgcagaagcaagcatgatctcgaaactgaagcaggcctgcgggttcgaatacacttcaaaactgcaaaggatgttccaggacattggcgtttctaaagatttgaatgagcagtttaagaaacatttgacaaactcggaaccgctggacctggatttttccattcaggtactgtctagcggctcttggccattccagcagtcctgtaccttcgcactgccttccgagttggagcgtagttatcagcggttcacagcattttatgcttccaggcacagtggtaggaaacttacctggctgtaccaacttagtaaaggcgagttagtgacaaattgtttcaagaatcgctatactttacaggcttctactttccaaatggctattctcttgcaatataatacagaggacgcttacactgtgcagcaactgacagactctactcagatcaaaatggatattctcgcacaggtactgcaaatcttgctgaagtccaagctgctggtactggaagacgaaaacgccaatgtggatgaagtcgagttgaagcctgatactctgatcaaactgtatctcggctacaagaataaaaagctgcgcgtgaatattaatgtgcctatgaaaactgagcagaaacaggagcaagagacaactcacaagaatattgaggaggacaggaagttactgattcaggcagcgatagttaggattatgaagatgcgaaaggtgcttaaacaccaacagctgctcggcgaagttctgacacaactgagctcacggttcaagcctcgggtcccagtgattaagaagtgtattgatatccttattgagaaggagtatctggagcgtgtggatggcgagaaagatacatactcgtatttggcgtag

SEQ ID NO: 307699 - DNA, 2331 bp, Artificial Sequence
  derived and/or modified sequence
atgtcaagcaccaggtctcaaaacccacacggcttaaagcaaatcggactggaccaaatttgggacgatttgcgagccggaattcagcaggtgtacaccaggcagtctatggccaagtctcggtacatggaactgtacacacatgtatataattattgcacctccgttcaccagagtaatcaggcccggggcgccggcgtccccccgagtaagagcaagaaggggcagactcctggaggggctcagtttgtgggtctggaattgtacaagcgcttgaaggagttcctcaaaaattacctaaccaatctgctgaaagacggggaggatctgatggatgagtcggtgcttaagttctacacgcagcagtgggaagattataggttctcttccaaggtattgaatgggatttgtgcctacctgaatcgccactgggtacgaagagagtgtgacgaaggccgtaagggcatttatgaaatctactccctggccttggtgacctggagagactgcctatttagacctctgaataaacaggttacgaacgccgtcctgaagttaatcgaaaaagagagaaatggcgagaccattaatactcgtctcattagtggagtggtgcaatcctatgttgaactgggtttgaacgaggacgacgcctttgctaaaggtcccacgctcacagtctataaggagagtttcgaaagccagttcctggccgacaccgagcggttttatacccgtgagagtaccgagttcctgcagcagaacccagtcacagagtatatgaagaaagctgaggccagactcctcgaggaacagcgcagagtgcaagtttaccttcacgagtccacccaggacgaactggctcgaaagtgcgagcaggtgctgatcgagaagcacttagaaatcttccacacagagtttcaaaacctcctggatgctgataagaacgaggacttggggcgtatgtacaatctggtatctcgaatccaagacggactgggggagctgaaaaagttgttagagacgcatatacacaaccagggacttgccgccattgaaaagtgcggagaggctgccctgaacgatcccaaaatgtatgtgcagacagtgctcgatgtacacaagaaatacaacgctctcgtgatgtcagcctttaacaatgatgctggctttgtggctgctctcgacaaggcctgcggccggttcattaacaacaatgcagttacaaaaatggctcagtcctccagcaagtcaccagagctgctagcacggtactgcgacagcctcctgaaaaaatcgtctaagaatcctgaggaggccgagttggaagacacgctgaatcaggtgatggtcgtcttcaaatacatcgaggataaagacgtgttccagaagttttacgcgaagatgttggcgaagagactggtgcaccagaacagcgccagcgacgacgccgaggcttccatgattagcaaactaaagcaagcttgcggattcgaatatacctcaaaattgcagcggatgttccaggatataggcgtatctaaggatctcaatgaacaatttaagaagcacctcactaatagtgaaccattagacttggactttagcatccaagtgttgtccagcggtagttggccgtttcagcagtcatgtaccttcgccctaccctccgagctcgagcgtagctatcagcgatttaccgcgttctacgcaagccggcatagcgggagaaaactcacatggctgtaccagcttagtaaaggcgaacttgtcacaaattgtttcaagaatcggtatacgttgcaggcttcgacattccagatggctatcttgctgcagtataatacagaagatgcatatactgtgcagcagttgacggatagcacccagataaaaatggatatactcgcccaggtgctgcagattctcctgaagagcaagctcctggtactggaggacgagaatgctaatgtggacgaagttgaactgaaaccagataccctaatcaaactttatcttggctataaaaataagaaacttcgcgtcaatataaacgtccccatgaaaacggagcagaaacaggagcaggagacaactcacaaaaatattgaggaagatcggaaactcctcatccaagccgctatcgtgagaatcatgaagatgcgcaaggtcctgaaacatcagcaactgctcggggaggtgttaacccaattaagctcccggtttaaacctcgggtcccagtgataaagaaatgtattgatattctcattgagaaggaatatctggagcgagtcgatggagagaaggacacctactcctaccttgcctag

SEQ ID NO: 307700 - DNA, 2112 bp, Artificial Sequence
  derived and/or modified sequence
atgtcgtccacccgttcacaaaatcctcacgggctgaagcagattggcttggaccagatctgggacgaccttcgcgccggtatccagcaagtctacacaagacaatctatggcaaaatccagatacatggagttgtacacacagcaatgggaggactatcgattctcctccaaggtactgaacggtatctgtgcctacctgaatagacactgggtgcgtagggagtgcgacgagggaagaaaaggtatttatgagatatatagcttagctctcgttacttggcgtgattgcctatttcgcccactcaataagcaggtcaccaatgccgtccttaaactgattgagaaagagcgaaacggggaaaccattaatacgcgactgatttcgggagtggtgcagagttatgtagaattaggactgaatgaagacgacgcctttgctaagggcccaaccctgaccgtgtacaaagagtcattcgagtctcagttcctggctgataccgaaaggttttatacacgcgaatccacggaattcctccagcagaaccctgttacagagtacatgaagaaagcagaggcccggctcctggaggaacaacgtcgggtgcaggtctatctgcatgagtccacgcaagacgaacttgccaggaagtgtgaacaggtactgatcgagaagcacctcgagatctttcacaccgagtttcagaatctactggacgctgataaaaacgaagacctggggcgtatgtacaacctagtgtcccgcatccaagacgggctgggtgagctgaaaaagttgctggagacacacatccataatcaggggctcgctgccatcgaaaagtgcggcgaggctgcactcaatgatccaaagatgtacgtgcagactgtgctggacgtgcacaaaaaatacaatgcactcgtaatgtccgcctttaacaatgacgccggattcgtggccgcactggacaaggcctgtggccggttcattaataacaatgctgtcacaaaaatggcccagtcctcctccaagtcccccgagctcttagctcggtactgcgattcgttattaaaaaagtcgtccaagaatcctgaagaagccgagctggaggataccttaaaccaggtgatggtagtatttaagtacatcgaggacaaagacgtgtttcagaagttctacgccaaaatgcttgcaaagcgtctggtgcatcaaaattcagcctcagacgacgctgaagcatccatgattagcaaattaaagcaggcatgtggcttcgagtatacctccaaacttcagcgcatgtttcaggatatcggagtgagtaaggaccttaatgaacaattcaagaaacatttaactaactctgagcccctggatctcgacttctccatccaggttttatcaagcggatcatggccgtttcaacaatcttgcacgttcgcactgccttccgagctggaacgatcctatcagcggtttaccgctttttatgcatcacgacactcaggtcgcaagctaacctggttgtaccagctgagtaagggcgaactggtgaccaactgctttaagaataggtacaccctccaggcctccacattccagatggccattttgctgcagtataataccgaagacgcttacacagttcaacagctcaccgacagcacccagattaagatggacatattggcacaggttctgcagattctgctgaagtcaaaactcctggtcctcgaggacgaaaatgctaatgtcgatgaagtggagttgaaaccggatacactgataaaactgtatttgggttacaagaacaaaaagctacgggtgaatatcaacgtgcctatgaagaccgaacagaaacaggagcaggagactacgcacaagaatatcgaggaggatcgcaagctgttgattcaggccgccatcgtgcgcattatgaaaatgcgaaaagtcctgaagcaccaacagttgttgggggaagtgctgacacagttgtcgtcaaggttcaagcccagagtccctgtcatcaagaagtgcatcgatatactcattgaaaaggagtatctggagagggttgacggggagaaggatacatactcatacttggcatag

SEQ ID NO: 307701 - DNA, 1824 bp, Artificial Sequence
  derived and/or modified sequence
atggagttgtacacccacgtgtataactactgcacttcagttcatcaatccaatcaagctagaggagcaggcgttcctccgagtaaaagtaagaagggccagacacccggcggcgcgcagttcgttggattagaactctataaaaggcttaaggaattcctgaaaaattacctgaccaatctgttaaaagacggggaggatcttatggacgaatccgtcctaaaattttacacgcagcagtgggaagattaccgattcagctctaaggttctgaatggtatttgtgcctacctaaatagacactgggttagaagggagtgcgatgaaggacgcaagggcatctacgagatttatagtttggctctcgtcacctggcgggattgcctctttaggccattgaataagcaggtcacaaacgcagtgctgaagctgattgagaaggaacgaaacggcgagaccatcaatacaaggttaatcagtggagtggtgcagagttatgtggagctgggactgaacgaggacgatgccttcgcaaaaggcccaacactgacggtatataaagaatctttcgaatcccaattcctggccgataccgagcggttctatacacgggagtccaccgaatttctccagcagaatcccgtcacagaatacatgaagaaagccgaggcacgactactggaggagcaaagaagagtccaggtctatctacacgagtccacacaggatgagctcgcccgaaaatgcgagcaggtgctgattgaaaagcacctggaaatctttcataccgaattccaaaacttgttggacgcagataagaacgaagatctgggacgcatgtacaatctggtttcccgcatccaagatgggctgggcgagcttaagaagttgttggagacacacattcacaatcagggcctcgccgctatcgaaaagtgcggggaggcagccctgaatgaccccaagatgtatgtgcagactgtactcgacgtgcataagaaatataacgcactcgtgatgtccgcctttaataacgatgccggattcgtggctgctttggacaaggcctgcgggcggtttatcaataataacgccgtaactaagatggcccaatcatcctctaagtcacctgaactgctggcccggtactgcgacagtttgctgaaaaaaagttccaaaaatccagaagaggccgaattggaggatactttgaaccaggtgatggtggtctttaagtacatcgaggacaaggacgtgttccaaaaattttacgccaaaatgctcgccaagcggctggtgcaccagaacagtgcgtcagatgacgcagaagcctcaatgatttccaaacttaagcaggcctgcggattcgagtatacttcaaagctccagaggatgttccaagatataggtgtttcaaaagacttgaacgagcagtttaagaaacatttaactaattccgaacccctagatctcgacttttcaattcaggtgctgtccagtgggagctggcctttccaacagtcctgcacgttcgcgctgccctcagagttagaaaggtcatatcagcgcttcacagcattttatgcatctcgacacagcggtagaaagctgacttggctctatcagctgtctaaaggggagttagtcaccaactgctttaagaaccggtacacactgcaggcatctacatttcaaatggccattctactccagtacaataccgaggatgcttatactgttcagcaactgacagactccacacagatcaagatggacattctagcccaagtgctacagattttgctgaagtccaaactactctag

SEQ ID NO: 307702 - DNA, 2331 bp, Artificial Sequence
  derived and/or modified sequence
atgagcagcaccaggagccagaacccccacggcctgaagcagatcggcctggaccagatctgggatgacctgcgggccggcatccagcaggtgtacacccggcagagcatggccaagagccgctacatggagctgtacacccacgtgtacaactactgcacctctgtgcaccagagcaaccaggcccggggagctggggtgccccccagcaagagcaagaagggccagacccctgggggcgcccagtttgtgggcctggagctgtacaagaggctgaaggagttcctgaagaactacctgaccaacctgctgaaggatggagaggacctgatggatgagagcgtgctgaagttctacacccagcagtgggaggactaccgcttcagcagcaaggtgctgaatggcatctgtgcctacctgaacagacactgggtgcggcgggagtgtgatgagggcaggaagggcatctatgagatctacagcctggccctggtgacctggagggactgcctcttccggcccctgaacaagcaggtgaccaatgctgtgctgaagctgattgagaaggagagaaatggagagaccatcaacaccaggctcatcagcggcgtggtgcagagctatgtggagctgggcctgaatgaagatgatgcctttgccaagggccccaccctgactgtgtacaaggagagctttgagagccagttcctggccgacacagagcgcttctacacccgggagagcacagagttcctgcagcagaaccctgtgacagagtacatgaagaaggccgaggcccggctgctggaggagcagaggagagtgcaggtgtacctgcacgagagcacccaggatgagctggccaggaaatgtgagcaggtgctgattgagaagcacctggagatcttccacacagagttccagaacctgctggatgctgacaagaatgaagacctgggccgcatgtacaacctggtgagccgcatccaggacggcctgggggagctgaagaagctgctggagacccacatccacaaccagggcctggccgccatcgagaagtgtggggaggccgccctgaatgaccccaagatgtatgtgcagacagtgctggatgtgcacaagaagtacaatgccctggtgatgtctgccttcaacaatgatgctggctttgtggccgccctggacaaggcctgtggccgcttcatcaacaacaatgctgtgaccaagatggcccagagcagcagcaagagccctgagctgctggcccgctactgtgacagcctgctgaagaagagcagcaagaaccctgaggaggccgagctggaggacaccctgaaccaggtgatggtggtgttcaagtacatcgaggacaaggatgtgttccagaagttctacgccaagatgctggccaagaggctggtgcaccagaacagcgccagtgatgatgctgaggcctccatgatcagcaagctgaagcaggcctgtggctttgagtacaccagcaagctgcagaggatgttccaggacattggagtgtccaaggacctgaatgagcagttcaagaagcacctgaccaacagcgagcccctggacctggacttcagcatccaggtgctgagcagcggctcctggcccttccagcagagctgcacctttgccctgcccagcgagctggagaggagctaccagcgcttcaccgccttctacgccagccgccacagcggcaggaagctgacctggctgtaccagctgagcaaaggagagctggtgaccaactgcttcaagaaccgctacaccctgcaggccagcaccttccagatggccatcctgctgcagtacaacacagaagatgcctacacagtgcagcagctgacagacagcacccagatcaagatggacatcctggcccaggtgctgcagatcctgctgaagagcaagctgctggtgctggaggatgaaaatgccaacgtggatgaggtggagctgaagccagacaccctcatcaagctgtacctgggctacaagaacaagaagctgcgggtgaacatcaacgtgcccatgaagacagagcagaagcaggagcaggagaccacccacaagaacatcgaggaggacaggaagctgctgatccaggccgccatcgtgcgcatcatgaagatgaggaaggtgctgaagcaccagcagctgctgggggaggtgctgacccagctgagcagccgcttcaagccccgggtgcctgtgatcaagaagtgcatcgacatcctgattgagaaggagtacctggagcgggtggatggagagaaggacacctacagctacctggcctag

SEQ ID NO: 307703 - DNA, 2112 bp, Artificial Sequence
  derived and/or modified sequence
atgagcagcaccaggagccagaacccccacggcctgaagcagatcggcctggaccagatctgggatgacctgcgggccggcatccagcaggtgtacacccggcagagcatggccaagagccgctacatggagctgtacacccagcagtgggaggactaccgcttcagcagcaaggtgctgaatggcatctgtgcctacctgaacagacactgggtgagaagagaatgtgatgagggcaggaagggcatctatgagatctacagcctggccctggtgacctggagggactgcctcttccggcccctgaacaagcaggtgaccaatgctgtgctgaagctgattgagaaggagagaaatggagagaccatcaacaccaggctcatctctggagtggtgcagagctatgtggagctgggcctgaatgaagatgatgcctttgccaagggccccaccctgactgtgtacaaggagagctttgagagccagttcctggccgacacagagcgcttctacacccgggagagcacagagttcctgcagcagaaccctgtgacagagtacatgaagaaggccgaggcccggctgctggaggagcagaggagagtgcaggtgtacctgcacgagagcacccaggatgagctggccaggaaatgtgagcaggtgctgattgagaagcacctggagatcttccacacagagttccagaacctgctggatgctgacaagaatgaagacctgggccgcatgtacaacctggtgagccgcatccaggacggcctgggggagctgaagaagctgctggagacccacatccacaaccagggcctggccgccattgaaaaatgtggggaggccgccctgaatgaccccaagatgtatgtgcagacagtgctggatgtgcacaagaagtacaatgccctggtgatgtctgccttcaacaatgatgctggctttgtggccgccctggacaaggcctgtggccgcttcatcaacaacaatgctgtgaccaagatggcccagagcagcagcaagagccctgagctgctggcccgctactgtgacagcctgctgaagaagagcagcaagaaccctgaggaggccgagctggaggacaccctgaaccaggtgatggtggtgttcaagtacatcgaggacaaggatgtgttccagaagttctacgccaagatgctggccaagaggctggtgcaccagaacagcgccagtgatgatgctgaggcctccatgatcagcaagctgaagcaggcctgtggctttgagtacaccagcaagctgcagaggatgttccaggacatcggcgtgtccaaggacctgaatgagcagttcaagaagcacctgaccaacagcgagcccctggacctggacttcagcatccaggtgctgagcagcggctcctggcccttccagcagagctgcacctttgccctgcccagcgagctggagaggagctaccagcgcttcaccgccttctacgccagccgccacagcggcaggaagctgacctggctgtaccagctgagcaagggggagctggtgaccaactgcttcaagaaccgctacaccctgcaggccagcaccttccagatggccatcctgctgcagtacaacacagaagatgcctacacagtgcagcagctgacagacagcacccagatcaagatggacatcctggcccaggtgctgcagatcctgctgaagagcaagctgctggtgctggaggatgaaaatgccaacgtggatgaggtggagctgaagccagacaccctcatcaagctgtacctgggctacaagaacaagaagctgcgggtgaacatcaacgtgcccatgaagacagagcagaagcaggagcaggagaccacccacaagaacatcgaggaggacaggaagctgctgatccaggccgccatcgtgcgcatcatgaagatgaggaaggtgctgaagcaccagcagctgctgggggaggtgctgacccagctgagcagccgcttcaagccccgggtgcctgtgatcaagaagtgcatcgacatcctgattgagaaggagtacctggagcgggtggatggagagaaggacacctacagctacctggcctag

SEQ ID NO: 307704 - DNA, 1824 bp, Artificial Sequence
  derived and/or modified sequence
atggagctgtacacccacgtgtacaactactgcacctctgtgcaccagagcaaccaggcccggggagctggggtgccccccagcaagagcaagaagggccagacccctgggggcgcccagtttgtgggcctggagctgtacaagaggctgaaggagttcctgaagaactacctgaccaacctgctgaaggatggagaggacctgatggatgagagcgtgctgaagttctacacccagcagtgggaggactaccgcttcagcagcaaggtgctgaatggcatctgtgcctacctgaacagacactgggtgcggcgggagtgtgatgagggcaggaagggcatctatgagatctacagcctggccctggtgacctggagggactgcctcttccggcccctgaacaagcaggtgaccaatgctgtgctgaagctgattgagaaggagagaaatggagagaccatcaacaccaggctcatcagcggcgtggtgcagagctatgtggagctgggcctgaatgaagatgatgcctttgccaagggccccaccctgactgtgtacaaggagagctttgagagccagttcctggccgacacagagcgcttctacacccgggagagcacagagttcctgcagcagaaccctgtgacagagtacatgaagaaggccgaggcccggctgctggaggagcagaggagagtgcaggtgtacctgcacgagagcacccaggatgagctggccaggaaatgtgagcaggtgctgattgagaagcacctggagatcttccacacagagttccagaacctgctggatgctgacaagaatgaagacctgggccgcatgtacaacctggtgagccgcatccaggacggcctgggggagctgaagaagctgctggagacccacatccacaaccagggcctggccgccatcgagaagtgtggggaggccgccctgaatgaccccaagatgtatgtgcagacagtgctggatgtgcacaagaagtacaatgccctggtgatgtctgccttcaacaatgatgctggctttgtggccgccctggacaaggcctgtggccgcttcatcaacaacaatgctgtgaccaagatggcccagagcagcagcaagagccctgagctgctggcccgctactgtgacagcctgctgaagaagagcagcaagaaccctgaggaggccgagctggaggacaccctgaaccaggtgatggtggtgttcaagtacatcgaggacaaggatgtgttccagaagttctacgccaagatgctggccaagaggctggtgcaccagaacagcgccagtgatgatgctgaggcctccatgatcagcaagctgaagcaggcctgtggctttgagtacaccagcaagctgcagaggatgttccaggacattggagtgtccaaggacctgaatgagcagttcaagaagcacctgaccaacagcgagcccctggacctggacttcagcatccaggtgctgagcagcggctcctggcccttccagcagagctgcacctttgccctgcccagcgagctggagaggagctaccagcgcttcaccgccttctacgccagccgccacagcggcaggaagctgacctggctgtaccagctgagcaaaggagagctggtgaccaactgcttcaagaaccgctacaccctgcaggccagcaccttccagatggccatcctgctgcagtacaacacagaagatgcctacacagtgcagcagctgacagacagcacccagatcaagatggacatcctggcccaggtgctgcagatcctgctgaagagcaagctgctgtag

SEQ ID NO: 307705 - DNA, 2331 bp, Artificial Sequence
  derived and/or modified sequence
atgagcagcacccggagccagaacccccacggcctgaagcagatcggcctggatcagatttgggacgacctccgagcgggaatccagcaggtgtatacaagacagtctatggccaagagtagatacatggagctttacacccacgtatataattactgcaccagtgtgcaccagtctaaccaagctcgtggagctggagtgcctccaagcaaatccaagaaggggcaaactccggggggtgcccaatttgtgggcttggagctttacaaaaggctgaaagagttcctgaagaattacctgaccaatttgttgaaggacggggaggatctaatggacgagtctgtgttaaagttctacacacaacagtgggaggactataggttttctagcaaggtactgaacggaatctgtgcgtatctaaatcgtcactgggtgaggcgcgaatgtgacgagggtcggaagggcatatacgagatttattctctggccctcgtgacatggcgagactgtctgttccgaccactgaacaagcaggttaccaacgcggtgttgaagcttatcgagaaggaaagaaacggcgagaccattaacaccagactgatatctggcgtggtgcaatcttacgtagagctcggcctgaatgaggacgatgcattcgccaaagggccaacactgaccgtctacaaagagtccttcgaaagtcaattcctcgccgacacagaacgtttttatacgagggaatccaccgagttcctccagcaaaaccccgtcacagaatacatgaagaaggcggaagccaggctgcttgaagagcagagaagggtgcaggtctaccttcatgaatcgacccaggacgagctcgctcggaagtgtgagcaggttttgattgaaaaacacctggagatcttccacacagagtttcagaacttacttgacgctgacaaaaatgaggatctcggtaggatgtacaatctggtgagtcgcattcaagacggactgggcgagctgaaaaagctcctggagacacacatccacaaccagggccttgcagcgatagaaaaatgcggggaggccgcactgaatgacccaaaaatgtatgtgcagacggtgctggatgtccataagaagtacaatgcccttgtcatgtcagccttcaacaacgatgccggcttcgtagcagcactagataaggcctgcggccgcttcataaataacaacgccgtgacgaagatggctcagagttccagcaagtctcctgagttactggcacgatattgcgactccctgctcaagaagagtagcaagaatccggaagaggcagaactggaagacaccctgaatcaggtgatggtcgtgtttaagtatatagaggacaaagacgtgttccagaaattctacgctaaaatgctggcaaagcgattagttcaccagaacagtgcgagtgatgacgccgaagcttcgatgatttccaagctgaagcaggcttgcggctttgagtatacaagcaagctgcagagaatgttccaggacattggtgtgtctaaagacctcaatgagcaatttaaaaaacacttaaccaactctgaacccctggatttagacttctcgatccaggtactgagctccgggtcctggccattccagcaaagttgcacattcgctctgccatcagagctggaaagaagttaccagcggtttacggccttctacgcgtccagacacagtggaaggaaacttacttggctctaccagctgagcaaaggggagctggtgacaaattgctttaaaaatcgctataccctgcaagcaagtactttccagatggccattttactgcagtacaatacagaggatgcttataccgtgcagcagctcacagatagcacccagattaagatggacatactcgcccaggtgctgcagattcttcttaagtccaaactgctggttctagaggacgagaatgccaacgtcgatgaagtcgaattgaagcctgataccctgattaaactttatctgggatacaaaaataagaagctgcgagttaacattaatgtccctatgaaaacggagcagaagcaagaacaggaaacaactcacaagaatatcgaggaagatcggaagctgctgattcaggcagctattgtgaggatcatgaagatgaggaaagtgctgaagcaccagcagctgctgggggaggtactgacacagctgagttctaggtttaagccccgggttccagtcatcaaaaaatgcatagacattctgatagagaaggagtacctggagcgggtggacggggagaaggacacatactcataccttgcgtag

SEQ ID NO: 307706 - DNA, 2331 bp, Artificial Sequence
  derived and/or modified sequence
atgagcagcacccggagccagaacccccacggcctgaagcagatcggcctggaccagatttgggacgatctgagagccggcattcagcaggtgtatactcgccagtctatggccaagtccagatacatggaactgtacactcacgtgtataactactgtacctccgtgcaccaaagtaatcaagctaggggggcgggagtccccccgtcaaagagcaagaaagggcaaacacccgggggagcacagttcgtcggcctagaactgtacaagagactgaaggaattcctgaagaattacctgaccaatttactaaaggacggggaggacctaatggatgagtccgtcctgaagttttacacacaacaatgggaagattaccggtttagctcaaaggtcctcaacggtatctgtgcatacctgaaccgccattgggtaagaagggaatgcgacgaaggcagaaagggcatctacgaaatctacagcctggcactggtgacctggagagactgtctcttcagaccactcaataaacaggtcacaaacgccgtcttaaaactgatagaaaaagagcgtaacggcgaaactataaacactcgtctcatatctggggttgttcagtcctatgtggagctcgggctgaacgaagacgacgcgtttgcgaaagggcccactctcactgtatataaagagtcatttgaatcacagtttctcgctgacaccgagcgcttttacaccagggaaagcacagaatttcttcaacagaaccccgtgactgagtacatgaagaaggcggaagcacggctcttggaggaacaaaggcgagtgcaggtatacctccacgagtctacccaagacgaattggctcgaaaatgcgagcaggtactgatagagaaacatcttgagatatttcacacagaatttcaaaacctgttagacgcagataagaatgaagatctcggacggatgtacaacctcgtcagtagaatccaagatggcttgggcgagctgaagaaactgctggaaacacatattcataatcagggactcgcagctatcgagaagtgcggagaagctgcgctcaacgatccaaagatgtacgtgcagaccgtgctagacgttcacaagaagtataatgccctagtgatgtcagcatttaataacgacgccggcttcgttgccgctctggacaaggcgtgcggccgtttcatcaacaacaatgcagtaaccaagatggcacagtccagttcaaagtctcctgaactgcttgccagatactgtgattcactcctcaagaagagctccaaaaatccggaggaagctgagctggaggacacactgaatcaagtaatggtggtcttcaagtatatcgaggacaaagatgtttttcagaaattttatgccaaaatgctggctaagaggctcgtgcaccaaaattctgcatcagacgacgccgaggcatcaatgattagtaaactgaaacaggcctgcggatttgaatatacaagtaagctacagaggatgttccaggacatcggggtgtctaaggacttgaacgagcagttcaagaagcacctgaccaattccgagcctttggatctggatttcagcattcaggtgctttcgtctggatcgtggccctttcagcagtcctgcaccttcgccctccctagtgagttggaaaggtcgtatcagcgctttacagctttttatgcttcccgccactctgggagaaagcttacctggctataccagcttagcaagggagagctggtaaccaactgctttaagaatagatataccttgcaggccagtaccttccagatggccatcctgctgcagtataacaccgaagacgcttacacagtacagcagttgaccgactcaacacagattaagatggacatcttggctcaggtgctgcagatcctattgaaatccaagctcttggtcctggaggacgagaacgccaacgtcgacgaggtggagttaaaaccagataccctaatcaagctgtacctagggtacaaaaataaaaagctacgggtgaatatcaatgtacccatgaagaccgaacagaaacaggagcaggagaccactcataaaaacatcgaggaagaccgcaagcttctcatacaggccgctatcgtcaggattatgaaaatgagaaaggtgttaaaacaccagcagctccttggagaagttcttacacagctctcctcacgttttaagccaagagttcctgtcattaagaagtgcatcgacatactcatcgagaaggagtatctggagcgcgtcgacggggaaaaagatacctatagttatctggcgtag

SEQ ID NO: 307707 - DNA, 2112 bp, Artificial Sequence
  derived and/or modified sequence
atgagcagcacccggagccagaacccccacggcctgaagcagatcggtctggatcagatttgggacgatctgcgggctggcattcagcaagtgtacacccgtcagagtatggccaaatcgcgctacatggagttgtacactcaacagtgggaggactaccgtttttcctcaaaggttctaaatggcatctgtgcatacttgaatcgccactgggtccgccgagaatgcgacgaaggcaggaaaggaatctatgagatctattctcttgctttggttacttggcgtgattgtctgtttaggcctcttaataagcaggtaacaaacgccgtgctgaaacttatagaaaaggagcggaatggcgagactatcaacaccaggttgatctcaggagtggtccagtcatacgtcgaattaggtctgaacgaggacgatgcgtttgcgaagggcccgacccttaccgtctataaggaatcttttgaaagtcaatttttggcagatacagaaagattttacactagggaaagtaccgaattcttgcagcagaacccagttacagagtatatgaagaaagctgaggccaggctgcttgaggaacaaagaagggtccaagtgtatctgcatgaaagtacgcaggacgagcttgcccgaaaatgtgaacaggtgctcattgagaagcacctggaaatcttccacactgaattccagaacctgctggacgccgataagaatgaggatttaggccggatgtacaatttggtgtcccgcatccaagacgggcttggagagcttaagaagttgttagaaacccacatacacaaccagggacttgcggcgatagagaaatgcggggaggcggccctgaacgatcccaagatgtacgtgcagaccgtcctagacgttcacaaaaaatataacgccttagttatgagtgcctttaacaatgacgccggatttgtggccgctttagataaggcctgcgggcggtttattaataacaatgctgtcaccaagatggcacagtccagcagcaagtcccccgagctcttggcgcgctactgcgatagcctgctgaagaaatccagtaaaaatcccgaggaagctgagttggaggataccctaaatcaagttatggttgtcttcaagtatatcgaagacaaggatgtctttcagaagttctatgctaaaatgctggcaaagcgcttagtccatcaaaacagtgcgtctgatgacgccgaagccagtatgatatcaaaactaaagcaggcctgcggattcgagtacactagcaaactgcagcgtatgttccaggacataggagtgtctaaggatctcaatgaacagttcaagaagcacctcaccaatagcgagccactggatttggacttttccatccaagtgctgagctccggcagctggccatttcaacagtcctgcactttcgctctgccttccgagctagagcggagctatcagaggttcactgctttttacgctagccggcattccgggcgcaagctgacatggctctatcagctcagtaagggtgaattggtgactaattgtttcaaaaacagatacactctgcaggcgtcaacctttcagatggcgatactgctccagtataatacagaagacgcatatacggtccagcaactgactgattccacgcagataaagatggatatcctagctcaggtgctgcaaatactgctgaaaagcaagctgctggtgctggaggacgagaacgcaaacgtcgatgaggtagagttgaagcctgataccctcattaagttatacctgggttacaaaaacaagaagctgcgagtgaacattaacgtgcccatgaagaccgagcaaaaacaggagcaggagactactcataagaacatagaggaggaccgcaagctgctcatccaagccgcaatcgtacggattatgaaaatgcggaaagtgctgaagcatcagcaattgctgggagaagtgttgacccagctttcatccaggtttaagcctagagttcctgttattaagaagtgcattgacatcttaatcgagaaggagtatctggaacgagttgacggggaaaaagacacctactcctacctggcatag

SEQ ID NO: 307708 - DNA, 1824 bp, Artificial Sequence
  derived and/or modified sequence
atggagctgtacacccacgtgtacaactactgcaccagcgtgcaccaaagcaaccaagcccggggtgctggcgtacctccgtcgaaaagcaagaaaggccagactcccgggggagcccagtttgtaggactggagctgtacaagcgcctgaaggagttccttaaaaattatctcaccaacttgctgaaggacggggaagacctgatggatgaaagtgttcttaaattctatacccagcagtgggaggattatcgcttctcgagcaaagtacttaatggcatttgtgcttacctcaatagacactgggtgcgccgggaatgtgacgaggggcgcaagggaatttatgagatctacagtttagctctcgtgacttggcgcgactgcctgtttagacctttgaataagcaagtgaccaatgctgtcctcaagttgattgaaaaagagcgtaacggtgagaccattaatacacgactgatttccggtgtagtgcagtcttacgtggagctggggctcaacgaggatgatgcatttgccaaaggccctactttgacggtctacaaggaaagtttcgaatcacagtttctagccgacaccgagcggttttatacccgcgagtcaacagagttcctgcagcagaatccggtcaccgaatacatgaaaaaagccgaggctagattgctggaggagcagcgcagagtgcaggtgtatctgcatgagagcacccaggacgaacttgctaggaaatgcgagcaggtcctaatcgagaagcatctcgaaatttttcatacggagttccaaaatctcctggacgccgacaagaacgaagaccttggcagaatgtataacctggtgagtagaatccaggatggactgggtgaattgaagaagctcctagagactcacatccataaccaggggctcgccgctatcgagaagtgcggcgaggcggcactaaacgaccccaagatgtatgtccagacagttctcgacgtgcacaagaaatacaacgcattagtgatgtctgcttttaataacgacgccggctttgtagccgccttagacaaagcttgcggccgtttcatcaataacaatgcggtcaccaagatggctcagtcttcaagtaaatctccggaattgctggccagatattgcgactctctgctcaagaagagctccaagaaccccgaagaggctgagctagaggataccctcaaccaagtgatggtagtgttcaaatatatcgaagacaaggatgtgttccagaagttctatgccaaaatgctggcaaagcgcctggttcaccaaaattctgcttcagacgatgccgaggctagcatgatcagtaagctcaaacaagcctgcgggtttgaatacacatcaaagttacagcgtatgttccaagacattggtgtctccaaagatctgaatgagcagttcaaaaagcacctcaccaactctgaaccccttgatttggacttcagtatccaggtgctctcctccgggagttggccttttcaacagtcctgcacatttgccctgccttcagagctggagcgtagttatcagaggtttaccgccttctacgcctctaggcactcagggcggaagcttacatggctgtaccagttaagcaaaggtgagctggtcaccaactgttttaaaaacaggtataccttacaggccagcaccttccagatggcaatcctccttcaatacaacaccgaggatgcctacactgtgcagcagctcacagattctacccaaatcaaaatggatatactcgcccaggtgttgcagatactgttaaagtcaaagctgctttag

SEQ ID NO: 307709 - DNA, 2331 bp, Artificial Sequence
  derived and/or modified sequence
atgtcctctacacgatcccagaacccacacggcctgaaacaaatcggcctggatcagatttgggacgacctgcgcgctggcattcaacaggtgtatactagacagagcatggctaaaagccgctacatggagctatacactcatgtctacaattattgcacaagcgtccaccagtctaatcaggcgcgtggggcaggggtcccgccatccaaatctaagaaaggtcagaccccagggggagcgcagtttgtagggctcgagctgtacaaacggctgaaggaattcctgaaaaactacctaacgaatctattaaaagatggagaggatctgatggacgaatcagtgctgaagttctatacccagcagtgggaagactataggttctcctccaaagtgcttaatgggatctgtgcctacctgaaccgtcactgggtgcggcgagaatgcgacgaagggagaaaaggaatttatgaaatatacagcttggccctcgtgacctggagggattgcctgttccgacccctcaacaaacaggtgactaatgccgtgctgaagctgatcgaaaaagagcgcaacggggagacaatcaacacgcgcctgatttcaggagttgtgcagtcttacgtggaactcggcctgaacgaagacgacgcctttgcaaagggccctacgcttactgtttataaagagtcatttgagagccagtttctggccgacaccgaacgtttctacacccgtgagagtaccgagttcttgcagcagaatcccgtcacagagtacatgaagaaggccgaggctagacttctcgaagagcagaggcgtgtccaggtttaccttcacgagtctactcaagacgagcttgccaggaaatgcgagcaagtattgatcgaaaaacatctcgagatctttcataccgagttccagaaccttcttgatgctgataaaaatgaggacctgggccgtatgtacaacctggtgtcccggatccaagatggcctcggtgagcttaaaaagctgctggagacgcacattcacaatcaagggctggccgctatcgagaagtgtggcgaggccgcattgaatgatcccaaaatgtacgtgcagactgttttggacgtccacaagaaatacaatgccctggtgatgtcggcttttaataacgacgctggcttcgtcgcggcattagataaagcctgcggcaggtttattaataacaacgctgtcacgaaaatggcccagtcttcttcaaagagccctgagttactggctagatactgtgatagccttcttaaaaaaagctcgaagaaccccgaagaggcggaactggaggatacactcaaccaggtgatggtggtgttcaaatacattgaagacaaagatgttttccagaagttctacgccaaaatgttagccaagcgactcgtacatcagaactcagcaagcgatgacgcggaggcatctatgatcagcaagctgaaacaggcctgcggttttgagtacaccagcaaactgcagcggatgttccaagatatcggtgtcagtaaggatctgaatgaacaattcaaaaaacaccttacgaatagcgagcctctggatttggacttttccatccaggtgctcagcagcgggtcttggcctttccagcaaagctgtacgtttgcactgcctagtgaactcgagcgtagctatcagcgttttaccgctttttatgcctcaaggcactctggtcgtaaactcacatggctatatcagctgagcaagggcgagcttgtgacaaattgtttcaagaataggtatacacttcaggcctcaacctttcagatggccatactactccaatataacaccgaggatgcttacacggtccagcagttgacagactccacgcagataaagatggacatactggctcaggtactacaaatcctgctcaagagcaagctgctggttctcgaggacgagaacgctaatgtggatgaggtagagctgaaacccgacacacttattaagttatacttaggttacaaaaataaaaagctacgcgttaacataaatgttcctatgaagaccgaacagaagcaggagcaggagaccactcacaaaaacatcgaggaggacagaaagctccttatccaggctgccatcgttagaattatgaagatgagaaaggtcttaaagcatcagcagcttctaggagaggtgctgactcaactgagctctcgctttaagccccgagtgcctgtaatcaagaagtgtattgacatccttatcgaaaaggagtacctggaaagggtggacggcgagaaggatacctacagctaccttgcatag

SEQ ID NO: 307710 - DNA, 2331 bp, Artificial Sequence
  derived and/or modified sequence
atgtcttccactcgcagtcagaatcctcatggcctgaaacagatcggactagatcagatttgggatgaccttcgggctggcatacagcaggtgtataccaggcagtccatggcgaaaagccggtacatggaattgtacacccacgtctataattactgtacttcagtgcatcagtctaaccaggcacggggtgccggagtgccgccttccaagtcaaaaaaggggcagacacccggaggcgcacagttcgtgggcttggagctttacaagcgcctcaaagaattcttgaaaaattatttgacaaacctcctgaaagatggtgaggacctgatggatgagagtgtgctaaagttctacacgcaacaatgggaagattaccgcttctcttcgaaggtgctgaacggaatttgtgcatatctaaatcggcattgggttcgtagagagtgtgatgaggggagaaaaggaatttacgaaatctatagcctggcactggtaacatggcgagactgtctgtttaggccgttaaacaagcaagtgaccaatgcagtgctgaagctcattgagaaagaacgtaatggcgaaacaatcaacacacgactgatctccggcgttgtccagtcttatgtggagctcggccttaacgaagatgacgcctttgccaagggccctactttgaccgtttacaaagaaagcttcgaatcacagtttctcgccgatactgaacggttctacacccgagaatctactgagttcctccaacagaatcccgtgaccgagtacatgaaaaaggctgaagcaaggttacttgaagaacagcgacgcgttcaagtgtatttacacgagtcaacccaggacgagctggcacgtaagtgcgagcaggtccttattgagaaacatctcgaaatctttcatacagagtttcagaaccttctggatgcagataaaaacgaggatctcggccgaatgtataatctcgtctcgcggattcaggatggactgggcgagctgaagaaattgctagagacgcatatccataatcagggtctcgcggctatcgagaagtgcggtgaagcggcacttaatgaccctaagatgtacgtccagacggttctcgacgtgcataagaagtataatgccctggttatgtctgcatttaacaatgatgctggcttcgttgctgccttggacaaagcctgcgggcgttttattaacaataacgctgttacaaagatggcgcagtcttccagcaagagcccagagctccttgcacggtactgtgacagcttactgaagaagagcagtaagaatcccgaggaggctgagctcgaagacacccttaatcaggtgatggtcgtctttaagtatatagaggataaagatgttttccagaaattttacgctaagatgctggcgaagcgcttagtccatcaaaatagtgccagcgatgacgccgaagcatccatgatctcaaagctgaagcaggcttgtggcttcgaatatacatccaagctgcagagaatgtttcaggacataggagtgagcaaagacttgaacgagcaatttaaaaaacatctcaccaattctgaaccgttggaccttgatttctcaatccaagtgctgagcagcgggtcctggccttttcaacagagttgcacctttgcattgccgagtgaacttgagaggagctatcagcgttttactgccttctacgcatccaggcatagcgggagaaaacttacatggttataccagctttcaaagggagagctggtgaccaactgcttcaagaacaggtatacgctgcaagcgagtaccttccaaatggcaatcctgttacaatacaataccgaggatgcttatacagtgcagcaactgacagactctacacagatcaaaatggacatcctggcccaggtgctgcaaatcctactgaaaagtaagctgctggtgttagaagatgagaatgccaacgtcgatgaggtcgaactaaaaccagatacattgattaaactctacctcggatataagaataaaaagctccgggtgaatattaatgtacctatgaagaccgagcagaaacaggagcaggagactacacataagaatattgaggaggatagaaagcttctgatacaggcagcaatagtcaggatcatgaagatgagaaaggtgctgaagcaccagcagctgctgggagaagtgctgacacaactctcatccagattcaaaccacgggtgccagtcatcaaaaagtgtatagacattttgatcgagaaagagtacctagagagggtggacggcgagaaggacacctactcctacttagcatag

SEQ ID NO: 307711 - DNA, 2112 bp, Artificial Sequence
  derived and/or modified sequence
atgagctccacccggtctcagaatccccatggacttaagcagattgggctcgatcagatctgggatgatttacgggcagggatccagcaggtgtatacccggcagtcaatggccaaatccaggtatatggagttgtatacacagcagtgggaagattaccgcttctcatcaaaagtcttgaatggcatctgcgcttacctcaaccgccactgggtcaggcgcgaatgcgacgaggggaggaagggcatctatgaaatctatagcctcgcattggtcacatggagagactgtttgtttaggcctctaaataagcaagtgaccaatgctgtgctgaagcttatagagaaggaacggaacggagagactatcaatacaaggcttatatctggggtcgtgcagagctacgttgaactgggtctgaacgaggatgatgcttttgccaaaggtcccacacttacagtgtataaagagagcttcgagtctcagttcttggccgacaccgagagattctacacgagggagtctactgagttccttcaacagaatccagttaccgagtacatgaagaaagctgaagctagactgcttgaggagcaacgccgagtgcaagtttaccttcacgagtctacgcaagacgaactggcccgtaagtgtgaacaagtcttaatagaaaagcatttggagatatttcacactgagttccagaacttactggatgccgacaagaacgaagatctcggccgaatgtacaatttggtgtcaagaatccaagatgggctcggagaacttaagaaacttttggagacccacatccacaatcagggcttagctgccatcgagaaatgcggggaggccgctcttaatgaccctaaaatgtacgtccaaaccgtccttgatgttcacaagaagtataatgctttggtcatgtctgcctttaataatgacgcagggtttgtggcagcccttgataaggcatgcggcaggtttatcaacaacaatgcggtgaccaagatggcccaatccagctccaagtctcccgaattgctggccagatattgcgacagccttcttaaaaaaagcagtaagaatcctgaggaagcagaactagaggacaccctgaatcaagttatggtcgtgttcaaatacattgaagacaaggatgtcttccaaaaattctatgcaaagatgttggctaagcgcctggtgcatcagaacagcgccagcgacgacgctgaagcatccatgatctccaagttaaagcaggcttgcggctttgaatatacaagtaagcttcagcgcatgttccaagatatcggcgtatctaaggatctgaatgagcaattcaaaaagcacttgaccaatagtgaacccctggatctggatttctccatccaggtgctcagttcagggtcgtggcccttccagcagtcttgtaccttcgctttgccatcagaattggaaaggtcatatcagaggttcaccgcattttacgcttctcggcacagtggaagaaaattgacatggctgtaccaactgagcaagggagagttagtcactaactgtttcaagaaccgttacacactgcaagcttccacatttcagatggctattttattacaatataacacagaggacgcgtataccgtgcagcagctcactgattcaacccagatcaaaatggatattcttgcccaggtgctgcagatcctcctgaaatctaagctgctcgtgctggaggacgagaacgcaaatgtggacgaggtcgagctcaaacctgatacactgataaaactgtatcttggctacaaaaataagaagttgcgcgtgaatatcaatgtacccatgaaaaccgaacaaaaacaggagcaggagactactcataaaaacatagaggaggatcggaagcttctcattcaagccgcaatcgtgcggatcatgaagatgcgaaaagtgttgaaacaccaacagctgctgggagaggttcttactcaacttagttccaggttcaagcctcgcgtgccagtcataaaaaaatgcattgatatcctgattgaaaaggaatacctagaaagggtggatggggagaaggacacatattcttacttggcttag

SEQ ID NO: 307712 - DNA, 1824 bp, Artificial Sequence
  derived and/or modified sequence
atggaactctacacccacgtgtacaactactgtacatcagtacatcagagcaatcaagcccgtggcgcaggggtccccccatctaaatcgaagaaggggcagacacctggcggagctcagttcgtgggcctcgaactttataagcgcctgaaggagttcttgaagaattatctaaccaatttactgaaggacggggaagacctcatggatgagtcagtgctgaagttttatacgcaacaatgggaagactaccggttttcatctaaagtgttaaacggaatttgtgcttacctgaatcgacattgggtgcgcagagagtgcgatgaggggaggaagggaatttatgaaatttactctttagccttggtgacctggcgcgactgcttgttccggcctctcaacaaacaggtcacaaacgcggtactgaagctgatagagaaagaacggaacggagagactatcaacacccgtctgatctctggggtggttcagtcctatgtcgaactgggactgaatgaagatgacgccttcgcgaaaggacccactctgaccgtttataaagaaagctttgagtcccagttccttgccgacacagagaggttctacacgcgggagagcacggagttcctccagcagaatcccgtgaccgagtacatgaagaaggcagaagcccgtctgttggaggagcaaaggcgggtccaggtctacttacatgaatccacccaggatgagctggctaggaagtgcgaacaggtcctcattgagaagcatctagaaatattccacaccgagtttcagaatctactggatgccgacaagaacgaggacctgggccgtatgtataatctcgtatctagaattcaggacggactgggagaactgaagaaactgcttgaaacacacatccataaccagggactcgctgccatcgaaaagtgcggggaggcagctttgaacgatcctaagatgtacgtccagacggtccttgacgttcacaaaaagtacaacgcattagtgatgtccgcctttaataatgacgctgggttcgtcgcagctctggataaagcatgcggcaggtttattaataacaacgccgtgaccaagatggcccagtccagtagcaagagccctgagctgctggcacgatactgcgactctctcttgaaaaagagctctaagaaccccgaggaagctgagttggaggatactctgaatcaggtgatggtggtgtttaaatacatcgaggacaaggacgtgttccagaagttctacgctaaaatgctggcaaagagactcgtgcatcagaactctgcatctgatgacgccgaagccagcatgattagtaagcttaaacaagcttgtggattcgagtatacttcaaaactccaacgtatgtttcaggacatcggtgttagcaaggatctcaatgaacagtttaagaagcatctgacaaactccgagccactggatcttgatttctccatccaggtgcttagcagtggtagctggcctttccagcagagttgtacatttgcattaccgagcgagctcgaacgttcctatcagcgcttcacggcattttatgcttcccgtcactctggtcgcaagcttacttggctgtatcaattgagtaaaggtgaattggtgacaaactgcttcaagaaccggtatacactccaggcatccacattccaaatggctatattacttcaatacaacacagaagacgcctacaccgtgcaacagctgaccgattctacgcagatcaaaatggatattctggcgcaggtcctgcagatcttgctcaaatctaagctgttgtag

SEQ ID NO: 307713 - protein, 56 aa, Artificial Sequence
  derived and/or modified sequence
MQGEAHPSASLIDRTIKMRKETEARKVVLAWGLLNVSMAGMIYTEMTGKLISSYYN

SEQ ID NO: 307714 - protein, 560 aa, Artificial Sequence
  derived and/or modified sequence
MQGEAHPSASLIDRTIKMRKETEARKVVLAWGLLNVSMAGMIYTEMTGKLISSYYNVTYWPLWYIELALASLFSLNALFDFWRYFKYTVAPTSLVVSPGQQTLLGLKTAVVQTTPPHDLAATQIPPAPPSPSIQGQSVLSYSPSRSPSTSPKFTTSCMTGYSPQLQGLSSGGSGSYSPGVTYSPVSGYNKLASFSPSPPSPYPTTVGPVESSGLRSRYRSSPTVYNSPTDKEDYMTDLRTLDTFLRSEEEKQHRVKLGSPDSTSPSSSPTFWNYSRSMGDYAQTLKKFQYQLACRSQAPCANKDEADLSSKQAAEEVWARVAMNRQLLDHMDSWTAKFRNWINETILVPLVQEIESVSTQMRRMGCPELQIGEASITSLKQAALVKAPLIPTLNTIVQYLDLTPNQEYLFERIKELSQGGCMSSFRWNRGGDFKGRKWDTDLPTDSAIIMHVFCTYLDSRLPPHPKYPDGKTFTSQHFVQTPNKPDVTNENVFCIYQSAINPPHYELIYQRHVYNLPKGRNNMFHTLLMFLYIIKTKESGMLGRVNLGLSGVNILWIFGE

SEQ ID NO: 307715 - DNA, 2322 bp, Artificial Sequence
  derived and/or modified sequence
gcttcctgtcttggaatctacgcgggttgtgggagttccgcgcctgctgatctgtcctgggttcagccaagggggatgtggctaggcgttccgcctctctaggggaagggaagaaagaagcaatagggttgctgaagttcgtgcccaggagccggggagggaagctctggactgggaaattgggacgcgggggctgagtggcgcgaaagctattgctctgtcctctgtgggatacgactgcttgtcgctggaacaagttttgcacgatgcagggggaggcacaccctagtgcttcccttattgacagaaccatcaagatgagaaaagaaacagaggctaggaaagtggtcttagcctggggactcctaaatgtatctatggctggaatgatatatactgaaatgactggaaaattgattagttcatactacaatgtgacatactggcccctctggtatattgagcttgcccttgcatctctcttcagccttaatgccttatttgatttttggagatatttcaaatatactgtggcaccaacaagtctggttgttagtcctggacagcaaacacttttagggttgaaaacagctgttgtacagactacgcctccacatgatctggcagcaacccaaatccctcccgctccaccttccccttcaattcagggtcagagtgtgttgagttatagcccttctcgttcgcccagtaccagtcccaagttcaccaccagctgtatgactggttacagccctcagctgcaaggtctgtcctcaggtggcagtggttcttatagccctggagtgacctactcgcccgtcagtggttataataagttggcgagctttagcccctctcctccttctccgtaccctaccactgttggaccagtggagagcagtggattgagatctcgctaccgttcttcacctaccgtctacaactcacctactgacaaagaagactacatgaccgacctacgaactttggatacttttctcagaagtgaagaggagaaacagcatagggttaagctggggagcccagattctacctctccttccagcagtcctactttctggaactatagtcgttctatgggggattatgcacaaactttaaagaagtttcagtatcagcttgcctgtaggtctcaggccccatgtgctaacaaagatgaagccgatctcagctctaaacaagccgcagaagaggtctgggcaagagtggctatgaatagacaacttcttgatcatatggattcatggacagctaaatttagaaattggatcaatgagacaatattagtgccacttgttcaagagattgagtctgtcagcacacagatgagacgaatgggttgtccagagctacagataggagaggctagtattactagcttgaaacaagctgccctggttaaagcgcctctcattccgactttgaacacaatcgttcagtatctagaccttactccaaatcaggaatacttgtttgaaaggatcaaagaactatctcagggaggttgtatgagctcatttcgatggaacagaggtggcgacttcaaaggacgaaagtgggatacagacctgcccaccgattctgctatcatcatgcatgtattttgcacctaccttgattccagattacctccacatccgaagtatcccgacggaaaaacttttacttctcagcactttgttcagacaccaaataaaccagatgttacaaatgagaatgttttttgcatttatcagagtgctatcaaccctccccattatgagctcatctaccagcgtcatgtatacaacctgccaaagggcagaaataatatgtttcatacattgttgatgtttctctacatcataaagaccaaagagtcaggaatgcttgggagagttaatcttggtctatctggtgtgaatatattgtggatctttggcgagtagcaagtcatatatttaattctgacatttagactatttcactgaaccagaagtcgaaactaaacatctctgagccactgactcttctgaaataaaatacacatgggtgtatgttacagactctttagatttaacagaaaatgtagctgttatgaaatgtaattgtaaaaatatgtcccgtatcttctatatcgagacattgcctttaattttatatcgcttttcagaaatttcagttgactacaaaactgcaacccttcggatttttattgactcaaaatagtgccattccccttaatgaaatagattttgagtctttttttcattgtaacccccaaatgagaatcatctacctgattcttgtaccaaaaaaaaa

SEQ ID NO: 307716 - protein, 736 aa, Artificial Sequence
  derived and/or modified sequence
MGNPENIEDAYVAVIRPKNTASLNSREYRAKSYEILLHEVPIEGQKKKRKKVLLETKLQGNSEITQGILDYVVETTKPISPANQGIRGKRVVLMKKFPLDGEKMGREASLFIVPSVVKDNTKYTYTPGCPIFYCLQDIMRVCSESSTHFATLTARMLIALDKWLDERHAQSHFIPALFRPSPLERIKTNVINPAYATESGQTENSLHMGYSALEIKSKMLALEKADTCIYNPLFGSDLQYTNRVDKVVINPYFGLGAPDYSKIQIPKQEKWQRSMSSVTEDKERQWVDDFPLHRSACEGDSELLSRLLSERFSVNQLDSDHWAPIHYACWYGKVEATRILLEKGKCNPNLLNGQLSSPLHFAAGGGHAEIVQILLNHPETDRHITDQQGRSPLNICEENKQNNWEEAAKLLKEAINKPYEKVRIYRMDGSYRSVELKHGNNTTVQQIMEGMRLSQETQQYFTIWICSENLSLQLKPYHKPLQHVRDWPEILAELTNLDPQRETPQLFLRRDVRLPLEVEKQIEDPLAILILFDEARYNLLKGFYTAPDAKLITLASLLLQIVYGNYESKKHKQGFLNEENLKSIVPVTKLKSKAPHWTNRILHEYKNLSTSEGVSKEMHHLQRMFLQNCWEIPTYGAAFFTGQIFTKASPSNHKVIPVYVGVNIKGLHLLNMETKALLISLKYGCFMWQLGDTDTCFQIHSMENKMSFIVHTKQAGLVVKLLMKLNGQLMPTERNS

SEQ ID NO: 307717 - protein, 69 aa, Artificial Sequence
  derived and/or modified sequence
MGNPENIEDAYVAVIRPKNTASLNSREYRAKSYEILLHEVPIEGQKKKRKKVLLETKLQGNSEITQGIL

SEQ ID NO: 307718 - protein, 565 aa, Artificial Sequence
  derived and/or modified sequence
MGNPENIEDAYVAVIRPKNTASLNSREYRAKSYEILLHEVPIEGQKKKRKKVLLETKLQGNSEITQGILDYVVETTKPISPANQGIRGKRVVLMKKFPLDGEKMGREASLFIVPSVVKDNTKYTYTPGCPIFYCLQDIMRVCSESSTHFATLTARMLIALDKWLDERHAQSHFIPALFRPSPLERIKTNVINPAYATESGQTENSLHMGYSALEIKSKMLALEKADTCIYNPLFGSDLQYTNRVDKVVINPYFGLGAPDYSKIQIPKQEKWQRSMSSVTEDKERQWVDDFPLHRSACEGDSELLSRLLSERFSVNQLDSDHWAPIHYACWYGKVEATRILLEKGKCNPNLLNGQLSSPLHFAAGGGHAEIVQILLNHPETDRHITDQQGRSPLNICEENKQNNWEEAAKLLKEAINKPYEKVRIYRMDGSYRSVELKHGNNTTVQQIMEGMRLSQETQQYFTIWICSENLSLQLKPYHKPLQHVRDWPEILAELTNLDPQRETPQLFLRRDVRLPLEVEKQIEDPLAILILFDEARYNLLKGFYTAPDAKLITLASLLLQSLWKL

SEQ ID NO: 307719 - protein, 25 aa, Artificial Sequence
  derived and/or modified sequence
MGNPENIEDAYVAVIRPKNTASLNS

SEQ ID NO: 307720 - protein, 12 aa, Artificial Sequence
  derived and/or modified sequence
MGNPENIEDAYV

SEQ ID NO: 307721 - protein, 98 aa, Artificial Sequence
  derived and/or modified sequence
MGNPENIEDAYVAVIRPKNTASLNSREYRAKSYEILLHEVPIEGQKKKRKKVLLETKLQGNSEITQGILDYVVETTKPISPANQGIRGKRVVLMKKFP

SEQ ID NO: 307722 - protein, 112 aa, Artificial Sequence
  derived and/or modified sequence
MGNPENIEDAYVAVIRPKNTASLNSREYRAKSYEILLHEVPIEGQKKKRKKVLLETKLQGNSEITQGILDYVVETTKPISPANQGIRGKRVVLMKKFPLDGEKMGREASLFI

SEQ ID NO: 307723 - protein, 34 aa, Artificial Sequence
  derived and/or modified sequence
MGNPENIEDAYVAVIRPKNTASLNSREYRAKSYE

SEQ ID NO: 307724 - protein, 58 aa, Artificial Sequence
  derived and/or modified sequence
MGNPENIEDAYVAVIRPKNTASLNSREYRAKSYEILLHEVPIEGQKKKRKKVLLETKL

SEQ ID NO: 307725 - protein, 162 aa, Artificial Sequence
  derived and/or modified sequence
MGNPENIEDAYVAVIRPKNTASLNSREYRAKSYEILLHEVPIEGQKKKRKKVLLETKLQGNSEITQGILDYVVETTKPISPANQGIRGKRVVLMKKFPLDGEKMGREASLFIVPSVVKDNTKYTYTPGCPIFYCLQDIMRVCSESSTHFATLTARMLIALDK

SEQ ID NO: 307726 - protein, 65 aa, Artificial Sequence
  derived and/or modified sequence
MGNPENIEDAYVAVIRPKNTASLNSREYRAKSYEILLHEVPIEGQKKKRKKVLLETKLQGNSEIT

SEQ ID NO: 307727 - DNA, 2211 bp, Artificial Sequence
  derived and/or modified sequence
atgggcaaccccgagaacatcgaggacgcctacgtggccgtgatcagacccaagaacaccgccagcctgaacagcagagagtacagagccaagagctacgagatcctgctgcacgaggtgcccatcgagggccagaagaagaagagaaagaaggtgctgctggagaccaagctgcagggcaacagcgagatcacccagggcatcctggactacgtggtggagaccaccaagcccatcagccccgccaaccagggcatcagaggcaagagagtggtgctgatgaagaagttccccctggacggcgagaagatgggcagagaggccagcctgttcatcgtgcccagcgtggtgaaggacaacaccaagtacacctacacccccggctgccccatcttctactgcctgcaggacatcatgagagtgtgcagcgagagcagcacccacttcgccaccctgaccgccagaatgctgatcgccctggacaagtggctggacgagagacacgcccagagccacttcatccccgccctgttcagacccagccccctggagagaatcaagaccaacgtgatcaaccccgcctacgccaccgagagcggccagaccgagaacagcctgcacatgggctacagcgccctggagatcaagagcaagatgctggccctggagaaggccgacacctgcatctacaaccccctgttcggcagcgacctgcagtacaccaacagagtggacaaggtggtgatcaacccctacttcggcctgggcgcccccgactacagcaagatccagatccccaagcaggagaagtggcagagaagcatgagcagcgtgaccgaggacaaggagagacagtgggtggacgacttccccctgcacagaagcgcctgcgagggcgacagcgagctgctgagcagactgctgagcgagagattcagcgtgaaccagctggacagcgaccactgggcccccatccactacgcctgctggtacggcaaggtggaggccaccagaatcctgctggagaagggcaagtgcaaccccaacctgctgaacggccagctgagcagccccctgcacttcgccgccggcggcggccacgccgagatcgtgcagatcctgctgaaccaccccgagaccgacagacacatcaccgaccagcagggcagaagccccctgaacatctgcgaggagaacaagcagaacaactgggaggaggccgccaagctgctgaaggaggccatcaacaagccctacgagaaggtgagaatctacagaatggacggcagctacagaagcgtggagctgaagcacggcaacaacaccaccgtgcagcagatcatggagggcatgagactgagccaggagacccagcagtacttcaccatctggatctgcagcgagaacctgagcctgcagctgaagccctaccacaagcccctgcagcacgtgagagactggcccgagatcctggccgagctgaccaacctggacccccagagagagaccccccagctgttcctgagaagagacgtgagactgcccctggaggtggagaagcagatcgaggaccccctggccatcctgatcctgttcgacgaggccagatacaacctgctgaagggcttctacaccgcccccgacgccaagctgatcaccctggccagcctgctgctgcagatcgtgtacggcaactacgagagcaagaagcacaagcagggcttcctgaacgaggagaacctgaagagcatcgtgcccgtgaccaagctgaagagcaaggccccccactggaccaacagaatcctgcacgagtacaagaacctgagcaccagcgagggcgtgagcaaggagatgcaccacctgcagagaatgttcctgcagaactgctgggagatccccacctacggcgccgccttcttcaccggccagatcttcaccaaggccagccccagcaaccacaaggtgatccccgtgtacgtgggcgtgaacatcaagggcctgcacctgctgaacatggagaccaaggccctgctgatcagcctgaagtacggctgcttcatgtggcagctgggcgacaccgacacctgcttccagatccacagcatggagaacaagatgagcttcatcgtgcacaccaagcaggccggcctggtggtgaagctgctgatgaagctgaacggccagctgatgcccaccgagagaaacagctag

SEQ ID NO: 307728 - DNA, 1698 bp, Artificial Sequence
  derived and/or modified sequence
atgggcaaccccgagaacatcgaggacgcctacgtggccgtgatcagacccaagaacaccgccagcctgaacagcagagagtacagagccaagagctacgagatcctgctgcacgaggtgcccatcgagggccagaagaagaagagaaagaaggtgctgctggagaccaagctgcagggcaacagcgagatcacccagggcatcctggactacgtggtggagaccaccaagcccatcagccccgccaaccagggcatcagaggcaagagagtggtgctgatgaagaagttccccctggacggcgagaagatgggcagagaggccagcctgttcatcgtgcccagcgtggtgaaggacaacaccaagtacacctacacccccggctgccccatcttctactgcctgcaggacatcatgagagtgtgcagcgagagcagcacccacttcgccaccctgaccgccagaatgctgatcgccctggacaagtggctggacgagagacacgcccagagccacttcatccccgccctgttcagacccagccccctggagagaatcaagaccaacgtgatcaaccccgcctacgccaccgagagcggccagaccgagaacagcctgcacatgggctacagcgccctggagatcaagagcaagatgctggccctggagaaggccgacacctgcatctacaaccccctgttcggcagcgacctgcagtacaccaacagagtggacaaggtggtgatcaacccctacttcggcctgggcgcccccgactacagcaagatccagatccccaagcaggagaagtggcagagaagcatgagcagcgtgaccgaggacaaggagagacagtgggtggacgacttccccctgcacagaagcgcctgcgagggcgacagcgagctgctgagcagactgctgagcgagagattcagcgtgaaccagctggacagcgaccactgggcccccatccactacgcctgctggtacggcaaggtggaggccaccagaatcctgctggagaagggcaagtgcaaccccaacctgctgaacggccagctgagcagccccctgcacttcgccgccggcggcggccacgccgagatcgtgcagatcctgctgaaccaccccgagaccgacagacacatcaccgaccagcagggcagaagccccctgaacatctgcgaggagaacaagcagaacaactgggaggaggccgccaagctgctgaaggaggccatcaacaagccctacgagaaggtgagaatctacagaatggacggcagctacagaagcgtggagctgaagcacggcaacaacaccaccgtgcagcagatcatggagggcatgagactgagccaggagacccagcagtacttcaccatctggatctgcagcgagaacctgagcctgcagctgaagccctaccacaagcccctgcagcacgtgagagactggcccgagatcctggccgagctgaccaacctggacccccagagagagaccccccagctgttcctgagaagagacgtgagactgcccctggaggtggagaagcagatcgaggaccccctggccatcctgatcctgttcgacgaggccagatacaacctgctgaagggcttctacaccgcccccgacgccaagctgatcaccctggccagcctgctgctgcagagcctgtggaagctgtag

SEQ ID NO: 307729 - DNA, 78 bp, Artificial Sequence
  derived and/or modified sequence
atgggcaaccccgagaacatcgaggacgcctacgtggccgtgatcagacccaagaacaccgccagcctgaacagctag

SEQ ID NO: 307730 - DNA, 39 bp, Artificial Sequence
  derived and/or modified sequence
atgggcaaccccgagaacatcgaggacgcctacgtgtag

SEQ ID NO: 307731 - DNA, 117 bp, Artificial Sequence
  derived and/or modified sequence
atgggcaaccccgagaacatcgaggacgcctacgtggccgtgatcagacccaagaacaccgccagcctgaacagcagagagtacagagccaagagctacgagatcctgctgcactag

SEQ ID NO: 307732 - DNA, 105 bp, Artificial Sequence
  derived and/or modified sequence
atgggcaaccccgagaacatcgaggacgcctacgtggccgtgatcagacccaagaacaccgccagcctgaacagcagagagtacagagccaagagctacgagtag

SEQ ID NO: 307733 - DNA, 2211 bp, Artificial Sequence
  derived and/or modified sequence
atggggaaccctgagaatatcgaggatgcttatgttgccgtgattcgcccaaaaaacacagcctcacttaactcacgagagtaccgggctaaatcctatgagattctcctccatgaggtgcctattgagggccagaaaaaaaagcgcaagaaagtcctgctcgagactaaactgcagggaaattccgaaatcacccagggcattctagattatgtggtggagactacgaaacctatctcaccagccaatcagggaattcgaggcaagagagtggtgctcatgaagaagtttccactggacggtgagaagatgggccgagaggcaagcctgtttatcgtccccagtgtcgtaaaggacaatactaagtacacttatactccgggatgccctatcttttattgtctgcaggacattatgcgggtgtgtagtgaatcctcaacccatttcgctactctgacggcaaggatgctgattgcgctggataagtggctcgatgaaagacacgcccagtcccatttcattccagcacttttcagaccatcacctctggaaaggataaaaacaaatgtgatcaatcctgcatatgcgacagaatcaggccaaaccgagaacagcctccatatggggtactcagcactggagatcaagagcaaaatgctggcactcgagaaggccgacacctgtatttacaatcctctgttcggcagcgatctccaatatactaacagagtggacaaggttgtcatcaatccctacttcggtctgggagcaccagactattccaaaatccagattcccaagcaggaaaagtggcaacgcagcatgagcagcgtaaccgaggacaaagagcgacagtgggtggacgatttcccgctgcacaggagcgcctgtgaaggagattctgaactgcttagtaggctgttatcagagagattttccgtcaaccagctcgactctgatcactgggccccaatccattacgcatgttggtacggcaaggtggaagccacccgcattctactcgagaaggggaagtgcaaccctaacctgctgaatggtcaactttctagtccactgcatttcgctgccggtggtggacatgcggaaatcgtacagatcctgttaaatcaccctgagacggacaggcacattacagaccagcaggggcgcagccctctgaatatctgcgaggagaacaagcagaacaattgggaagaggccgccaagctgttaaaagaggcgataaataagccgtacgagaaggtgaggatatataggatggacggaagctatagatccgtggagctcaagcatggcaataatacaactgttcagcagatcatggaggggatgagactaagtcaggagacgcagcagtatttcactatttggatatgcagcgagaacctgtcactgcaactaaaaccctaccacaaaccactgcaacacgtgcgcgactggccagaaattctggcggaactcacaaacctggatccacagagggagaccccccagttattcctgcggcgggatgtccgtctgcccctggaggtagagaaacagattgaggatccattggccatcttaattcttttcgatgaggcgcggtacaacctgctcaaggggttttacacggctcctgatgcaaaactcatcactttagcctccttgctgctccaaattgtctatgggaactacgaaagcaaaaaacataaacagggatttctgaacgaggaaaatctgaaatccattgtccccgttacaaagctgaagtctaaagccccccactggactaacagaatacttcacgagtataaaaatctgtcaacatcagagggtgtctcgaaagaaatgcaccacttacaacgcatgttcctacagaattgctgggagatccccacatacggagccgcttttttcaccggccaaattttcactaaggccagcccttctaaccataaggttatccctgtttatgtgggtgtaaacatcaaggggctgcacctcctgaacatggagaccaaggcccttttgatctcgctgaaatacggatgtttcatgtggcagctcggtgatacagatacatgcttccagattcactccatggagaacaagatgtcctttattgtccataccaaacaggccggtcttgtggttaagctgcttatgaagctgaatgggcaactgatgcccacagagcgtaattcatag

SEQ ID NO: 307734 - DNA, 2211 bp, Artificial Sequence
  derived and/or modified sequence
atgggcaatccggagaacatcgaagatgcgtacgtagctgtgattcggcccaagaacacagcctcactaaattcgcgggaatacagagccaagtcctacgagattctgttacacgaggtgcctatagagggacaaaagaaaaagaggaagaaggtgctgttagagaccaaacttcagggaaacagcgagatcacacaagggatattggactatgtggtggaaacaaccaagccaatctcccctgccaaccagggtatccgaggcaaaagggtggttttaatgaagaaattcccgctggatggagaaaaaatgggccgtgaggccagcttattcatagtccccagcgtggtgaaggacaatactaagtatacctacaccccagggtgcccgattttctactgtctgcaggatattatgcgggtgtgttccgaaagctctacccactttgcaaccttgactgccagaatgctgattgcccttgacaagtggttggatgagaggcacgctcaatctcattttatcccggcactcttccggccatcacccttggagcgaatcaaaaccaacgtaattaatcctgcttacgccaccgagtctggccagaccgagaattcattgcatatggggtatagtgctctagagattaagtccaaaatgctggccctagaaaaagccgatacatgtatatacaacccactgttcggctcagatttgcagtacaccaaccgcgtcgacaaggtggttatcaatccttattttgggttgggggcccccgactacagcaagatacagattcccaagcaggaaaagtggcagcggagtatgtcttcggtaacagaagataaggagaggcagtgggtagacgacttccctctgcacaggagtgcttgtgagggggattccgaactgctgtcccgcctcctatctgagcggttcagtgtgaaccagctggattccgaccactgggcccctatccactacgcctgttggtacggaaaggttgaggcaactcggatcttgctcgaaaaaggtaaatgtaacccgaaccttctaaacgggcaactttcttctcccctacactttgctgccggcggtggccatgccgagatagtccaaatcctgctgaaccatccagagactgatagacatattaccgaccaacagggaagaagtcctctcaacatttgcgaagagaacaagcagaataactgggaagaagctgccaagttgctgaaggaggcgattaacaagccctacgagaaggtaagaatctatcgcatggatggaagctatagatcagtagagcttaagcacggcaataatactacggtgcagcagatcatggagggcatgcgtttgtctcaggagacgcagcagtacttcaccatctggatttgcagtgagaatctgtccctgcagctgaagccttaccataagcccctgcagcatgtcagggactggccagagatactggcagagctcacgaacctagatccacagcgtgaaacaccccagctgttcctccggagggatgtgaggctcccactggaagttgagaaacagatcgaagatcctctcgccattcttatacttttcgatgaagcacgttataatctgctgaagggcttctatacagcccctgatgccaaattaattacacttgccagtttgttacttcagatcgtgtacgggaactacgagtctaagaagcataagcaaggcttcttgaacgaagaaaacttaaagtctattgtccccgtaaccaagctgaaatcaaaagctccacactggactaacagaatcttgcacgaatataaaaacttgagcacgtccgaaggagtatcaaaggaaatgcaccatcttcagcggatgtttctacagaactgttgggagattcccacttacggggccgcctttttcacaggccagatttttacaaaagcaagtcccagcaaccataaggttatccctgtttacgtgggcgtcaatattaaaggtttgcatctgctcaatatggaaactaaagcgctgctcatctccctgaaatacggctgtttcatgtggcaactgggagacactgacacatgttttcagatccacagcatggaaaacaaaatgagttttattgtgcatacaaagcaggctgggctggtggtcaagctcctgatgaagctgaatggccagctgatgcccaccgagaggaactcctag

SEQ ID NO: 307735 - DNA, 2211 bp, Artificial Sequence
  derived and/or modified sequence
atgggcaaccccgagaacattgaggacgcatacgtagcagtgatccgcccgaaaaatacagcatccttgaatagccgagagtatagggcaaaaagctacgaaatcctgttacacgaggtgcccatcgaaggccaaaagaagaagcggaagaaagtgcttctggagaccaaactccaaggaaactcagagatcacacaggggatcctggactacgtggtggagacaaccaagcccatttcccccgcaaaccagggcatccgcggcaagagagtcgtgttgatgaagaaatttccactcgacggcgagaaaatgggccgggaagcatcattgttcatcgtgccaagcgtggtcaaggataataccaagtacacatacacaccagggtgccctattttttactgtctccaggacatcatgcgggtatgctctgagagttcgacacatttcgccacacttaccgcccgcatgctgattgcccttgataagtggttggatgagaggcatgctcagagccactttattcctgccctgtttcggcctagcccactagagaggattaagactaatgtaataaaccctgcttacgcaactgagtcgggacagacagagaattcactccacatgggatactccgccctcgaaatcaagagcaaaatgctcgcattagagaaggctgacacctgcatatataatccactattcgggagcgatcttcagtacaccaatagagtcgataaggtggtgataaacccttattttggcttgggagcacctgactattccaaaatccaaattccaaaacaggagaagtggcagcgcagtatgtcttcagtgaccgaggacaaggaacgacaatgggtggatgactttcctctgcacaggagcgcctgcgagggcgacagcgagctgctttcgaggttgttgtcggaaagattcagtgtgaaccagctcgacagcgaccactgggcacctattcactatgcttgttggtatgggaaggtcgaagccacccgcatcctcttggagaaggggaaatgcaacccaaacctcctgaacggtcagctgtccagtccgctgcatttcgcagccgggggcggccacgcagaaatcgttcaaatcctcctgaatcaccccgagacggacagacacattacggatcaacagggcaggtcccctctgaacatttgtgaagagaacaagcaaaataactgggaagaagccgctaaattgttgaaagaggcaatcaacaagccttacgaaaaagtgcgaatctatcggatggacggcagctaccgatctgttgagcttaaacatggaaacaacacaactgtccagcagatcatggaggggatgcgactgagccaagagacccaacagtactttacaatttggatttgtagtgagaatctctcacttcagcttaagccctatcacaaacctctacagcacgttcgcgactggcccgagatcctggccgagttgactaatctggacccccaacgggagactcctcagctcttcttgcgcagagatgtgcgtctgccactggaggtggaaaagcagattgaggaccccctcgcgatactgattctgttcgacgaggccagatacaatctactgaaaggtttctatactgccccagatgcaaaactgattacactggcgtcactgcttttacaaatcgtgtacggaaactacgagtcaaagaagcataaacaaggattcctaaacgaggagaaccttaaatcaattgtgcctgtgacgaaactcaaatctaaagctccccactggactaaccggattctccacgaatataagaatctgagcacctccgaaggagtcagcaaggagatgcaccatttacagcgcatgtttctgcagaattgctgggaaatccccacctatggcgccgcctttttcacagggcagattttcactaaagcatcccctagcaaccacaaggtaattcccgtttatgttggcgtcaatattaagggattgcatcttctgaatatggagactaaagccctgttgattagtctgaaatacggctgctttatgtggcagctgggtgacaccgacacctgctttcagatccactccatggaaaataagatgtccttcatagtgcacactaaacaggcaggactcgtggtcaagcttttaatgaaacttaacggacaactcatgcccactgaaaggaactcgtag

SEQ ID NO: 307736 - DNA, 2211 bp, Artificial Sequence
  derived and/or modified sequence
atgggcaatcccgaaaatattgaggatgcctacgtggctgttatcagacctaagaatacagcatcactgaactctagggagtacagggcgaagagctatgagattctgcttcatgaagtgccgattgagggacaaaagaaaaagcgcaaaaaggtgctgcttgaaaccaagctgcagggtaactcagagattacccaggggattttagactacgttgtggagaccactaaacctattagcccagcaaatcagggaattaggggaaaacgcgtagtgctcatgaaaaagttccctttagacggcgagaagatgggccgtgaagcttccttgtttattgtcccttcagtcgtgaaggataacacaaaatacacctatacgcccggctgccccattttttactgcctccaggatatcatgcgcgtgtgcagtgaatcgtcgacccacttcgccacactgacagcccgcatgctgatcgcactggacaagtggctggatgagcggcacgcccagagtcacttcattcctgctctatttcggccaagtcccctggaacggatcaagaccaacgtgattaacccagcatatgccacggagagcggtcagacagaaaactccctgcatatgggctattcggcactggagattaagagcaagatgttggccttagaaaaggcagacacatgcatatacaatcctttgttcggatctgaccttcaatacaccaaccgagtggataaagtggtcattaacccatacttcggactcggggcccccgactattccaagatccagatcccaaagcaggagaaatggcagcgatcaatgagcagcgtaacggaagacaaggagcggcagtgggtggatgacttcccactccatcgctcagcctgtgaaggagacagtgagctcttgtccaggcttttaagcgagcgcttttctgtgaaccagttggactcagatcattgggcgcccatccactatgcatgctggtacggtaaggtcgaggccacgagaatcttgctggagaaaggaaaatgcaaccccaatctgttgaacggccagctctcaagccccctgcatttcgccgctggtggtggccatgccgagattgtacagattctgctgaatcaccccgagactgatcgacatattacggatcagcagggcaggagtcccctcaatatctgcgaagagaacaaacagaacaactgggaagaagccgccaagctcctgaaagaagctattaataaaccgtatgaaaaggtgcgcatctaccgtatggatgggagctacaggtccgtcgaactgaaacacgggaataacaccaccgtccagcagatcatggaaggcatgcggctctctcaggaaacacagcagtatttcacgatctggatctgctccgagaatctgtccttacagcttaaaccttatcataaacccctgcagcacgtccgagattggccagaaatcctggctgagttaacaaatttggatcctcagagagaaacccctcaactcttcctcaggcgcgatgtgcgtctacctctggaggtcgaaaagcagatcgaagacccgctagcgattctgatactgttcgacgaggcaaggtacaatctgcttaagggcttttatacagcccctgatgctaaattaatcacattggcctccctgctcttgcaaatcgtttacgggaactatgagtccaagaagcataagcaggggttcctcaatgaggagaacctgaagagcatcgtccccgtcaccaagctgaaatccaaggccccccattggacaaaccgcatactgcacgaatacaagaatttgagtactagtgaaggcgtgagtaaggagatgcatcacctacagcggatgtttctccaaaactgttgggaaatcccgacttacggagcggccttttttacggggcagattttcaccaaggccagcccttccaaccacaaggtgattccggtgtatgtgggtgtgaacattaagggtttgcacctgctgaatatggagaccaaagccctcctgatctccctgaaatacgggtgtttcatgtggcagctgggggacaccgacacctgttttcaaatccacagtatggaaaataaaatgagctttatcgtgcataccaagcaggccggccttgtcgtgaaactccttatgaagcttaatggccagcttatgcccacagagagaaattcatag

SEQ ID NO: 307737 - DNA, 1698 bp, Artificial Sequence
  derived and/or modified sequence
atgggcaatcctgagaatatagaagacgcctatgtagcggtcatccgcccaaagaacaccgctagccttaacagccgggagtaccgggctaagtcctatgaaattctgcttcatgaggtgccaattgagggccagaaaaagaaaaggaagaaagtcctgctggagacaaaactgcagggtaactcagagattacccagggcatcctggattacgtcgtcgaaaccaccaagcccatctctccggcaaaccaaggaatcagaggtaagagagtggtgttgatgaagaagtttcccctggatggggagaaaatggggagggaggcaagtctgttcatcgttccatccgtggtgaaagataacaccaaatatacctacaccccaggctgccccatattttattgtttgcaggacattatgagggtgtgctcggaatccagcactcatttcgccaccttaacggccagaatgctgattgctctggataagtggttagatgaacgacacgctcagagccactttatcccagcactctttcgaccctctccccttgagcgcatcaagaccaatgttatcaatcctgcctacgctaccgagtcaggccagactgagaattctctgcatatgggctattcagcgctggaaattaagagtaagatgctggcactggagaaagctgatacatgcatatataaccctttattcggcagcgacctgcagtatactaatcgtgtggataaagtcgtcattaatccatatttcggattaggcgccccggactattccaagatacagatcccgaagcaagaaaagtggcagcgatccatgtctagcgtgacggaagataaggagcgtcagtgggttgacgactttcctctacacagatcagcgtgcgagggagattcagagcttctctctagactcctcagcgagaggttttctgttaatcagctcgattctgatcactgggcacctattcattatgcctgctggtacggaaaagtggaagccacccggatactcctagagaagggaaaatgcaatcctaacctgctcaacggccaattatctagcccactacatttcgctgccggaggaggccatgccgagatcgtgcagattttacttaatcatccagagaccgataggcacatcacggaccagcagggacgctcccctttaaacatatgcgaggagaataagcaaaacaattgggaagaggcagccaagctgctcaaggaggccattaacaaaccatatgaaaaggttaggatttataggatggacggctcatatcgctctgtggagttgaaacatggcaataatacgaccgttcagcagatcatggaggggatgagactctctcaggaaactcagcaatactttaccatatggatatgcagtgaaaacctatccctacaactgaaaccttatcacaaacctctgcagcacgttcgcgactggccagaaatattggccgaactgacaaacctcgacccccagcgcgaaacaccacagctgttcttgcgaagggatgtgagactgcccttagaggttgaaaaacaaatagaggacccattagcgattctgattctgtttgacgaggcacgctacaacctactcaaaggcttctacacagcccctgacgcaaaactgataaccctggcgagcctgctccttcagtcactgtggaagttatag

SEQ ID NO: 307738 - DNA, 78 bp, Artificial Sequence
  derived and/or modified sequence
atgggtaacccggaaaatatagaagacgcatatgttgcagtgatcagacctaagaataccgccagcctaaatagctag

SEQ ID NO: 307739 - DNA, 39 bp, Artificial Sequence
  derived and/or modified sequence
atgggaaacccagagaacatagaggatgcttacgtctag

SEQ ID NO: 307740 - DNA, 117 bp, Artificial Sequence
  derived and/or modified sequence
atggggaacccagaaaatatagaggatgcttatgtggcagtaatacggcctaagaatacggcgtccttaaactctcgagaatatcgagccaaatcctacgaaatccttctgcactag

SEQ ID NO: 307741 - DNA, 105 bp, Artificial Sequence
  derived and/or modified sequence
atggggaaccctgagaacattgaagacgcatatgtcgctgtgatacgtccaaaaaataccgctagcctgaatagcagggaatacagagccaaatcatacgaatag

SEQ ID NO: 307742 - DNA, 2211 bp, Artificial Sequence
  derived and/or modified sequence
atgggcaacccagaaaatattgaagatgcctacgtggccgtcatccggcccaagaacacagccagcctgaacagccgggagtaccgggccaagagctatgagatcctgctgcacgaggtgcccatcgagggccagaagaagaagaggaagaaggtgctgctggagaccaagctgcagggcaacagcgagatcacccagggcatcctggactatgtggtggagaccaccaagcccatcagccctgccaaccagggcatccggggcaagagggtggtgctgatgaagaagttccccctggatggagagaagatgggccgggaggccagcctcttcatcgtgcccagcgtggtgaaggacaacaccaagtacacctacaccccaggctgccccatcttctactgcctgcaggacatcatgagggtgtgcagcgagagcagcacccactttgccaccctgacagccaggatgctgattgccctggacaagtggctggatgaaagacatgcccagagccacttcatcccagccctcttccggcccagccccctggagcgcatcaagaccaacgtcatcaacccagcctatgccacagaaagtggccagacagagaacagcctgcacatgggctacagcgccctggagatcaagagcaagatgctggccctggagaaggctgacacctgcatctacaaccccctgtttggaagtgacctgcagtacaccaacagagtggacaaggtggtgatcaacccctacttcggcctgggcgccccagactacagcaagatccagatccccaagcaggagaagtggcagaggtccatgagctctgtgacagaggacaaggagcggcagtgggtggatgacttccccctgcacaggtctgcctgtgagggggacagcgagctgctgagccggctgctgtctgagcgcttctctgtgaaccagctggacagcgaccactgggcccccatccactacgcctgctggtacggcaaggtggaggccacccgcatcctgctggagaagggcaagtgcaaccccaacctgctgaatggccagctgagcagccccctgcactttgctgctgggggcggccacgccgagatcgtgcagatcctgctgaaccaccctgagacagacagacacatcacagaccagcagggccgcagccccctgaacatctgtgaggagaacaagcagaacaactgggaggaggccgccaagctgctgaaggaggccatcaacaagccctatgagaaggtgcgcatctacaggatggatggcagctacagatctgtggagctgaagcacggcaacaacaccaccgtgcagcagatcatggagggcatgaggctgagccaggagacccagcagtacttcaccatctggatctgcagcgagaacctgagcctgcagctgaagccctaccacaagcccctgcagcacgtgcgggactggccagagatcctggccgagctgaccaacctggacccccagcgggagaccccccagctgttcctgcggagagatgtgcggctgcccctggaggtggagaagcagatcgaggaccccctggccatcctgatcctgtttgatgaggcccgctacaacctgctgaagggcttctacacagccccagatgccaagctgatcaccctggccagcctgctgctgcagatcgtgtatggcaactatgagagcaagaagcacaagcagggcttcctgaatgaggagaacctgaagagcatcgtgcctgtgaccaagctgaagagcaaggccccccactggaccaaccgcatcctgcacgagtacaagaacctgagcaccagcgagggcgtgtccaaggagatgcaccacctgcagaggatgttcctgcagaactgctgggagatccccacctatggagctgccttcttcaccggccagatcttcaccaaggccagccccagcaaccacaaggtgattcctgtgtatgtgggcgtgaacatcaagggcctgcacctgctgaacatggagaccaaggccctgctgatcagcctgaagtatggctgcttcatgtggcagctgggggacacagacacctgcttccagatccacagcatggagaacaagatgtccttcatcgtgcacaccaagcaggccggcctggtggtgaagctgctgatgaagctgaatggccagctgatgcccacagagaggaacagctag

SEQ ID NO: 307743 - DNA, 1698 bp, Artificial Sequence
  derived and/or modified sequence
atgggcaacccagaaaatattgaagatgcctacgtggccgtcatccggcccaagaacacagccagcctgaacagccgggagtaccgggccaagagctatgagatcctgctgcacgaggtgcccatcgagggccagaagaagaagaggaagaaggtgctgctggagaccaagctgcagggcaacagcgagatcacccagggcatcctggactatgtggtggagaccaccaagcccatcagccctgccaaccagggcatccggggcaagagggtggtgctgatgaagaagttccccctggatggagagaagatgggccgggaggccagcctcttcatcgtgcccagcgtggtgaaggacaacaccaagtacacctacaccccaggctgccccatcttctactgcctgcaggacatcatgagggtgtgcagcgagagcagcacccactttgccaccctgacagccaggatgctgattgccctggacaagtggctggatgaaagacatgcccagagccacttcatcccagccctcttccggcccagccccctggagcgcatcaagaccaacgtcatcaacccagcctatgccacagaaagtggccagacagagaacagcctgcacatgggctacagcgccctggagatcaagagcaagatgctggccctggagaaggctgacacctgcatctacaaccccctgtttggaagtgacctgcagtacaccaacagagtggacaaggtggtgatcaacccctacttcggcctgggcgccccagactacagcaagatccagatccccaagcaggagaagtggcagaggtccatgagctctgtgacagaggacaaggagcggcagtgggtggatgacttccccctgcacaggtctgcctgtgagggggacagcgagctgctgagccggctgctgtctgagcgcttctctgtgaaccagctggacagcgaccactgggcccccatccactacgcctgctggtacggcaaggtggaggccacccgcatcctgctggagaagggcaagtgcaaccccaacctgctgaatggccagctgagcagccccctgcactttgctgctgggggcggccacgccgagatcgtgcagatcctgctgaaccaccctgagacagacagacacatcacagaccagcagggccgcagccccctgaacatctgtgaggagaacaagcagaacaactgggaggaggccgccaagctgctgaaggaggccatcaacaagccctatgagaaggtgcgcatctacaggatggatggcagctacagatctgtggagctgaagcacggcaacaacaccaccgtgcagcagatcatggagggcatgaggctgagccaggagacccagcagtacttcaccatctggatctgcagcgagaacctgagcctgcagctgaagccctaccacaagcccctgcagcacgtgcgggactggccagagatcctggccgagctgaccaacctggacccccagcgggagaccccccagctgttcctgcggagagatgtgcggctgcccctggaggtggagaagcagatcgaggaccccctggccatcctgatcctgtttgatgaggcccgctacaacctgctgaagggcttctacacagccccagatgccaagctgatcaccctggccagcctgctgctgcagagcctgtggaagctgtag

SEQ ID NO: 307744 - DNA, 78 bp, Artificial Sequence
  derived and/or modified sequence
atgggcaacccagaaaatattgaagatgcctacgtggccgtcatccggcccaagaacacagccagcctgaacagctag

SEQ ID NO: 307745 - DNA, 39 bp, Artificial Sequence
  derived and/or modified sequence
atgggcaacccagaaaatattgaagatgcctacgtgtag

SEQ ID NO: 307746 - DNA, 117 bp, Artificial Sequence
  derived and/or modified sequence
atgggcaacccagaaaatattgaagatgcctacgtggccgtcatccggcccaagaacacagccagcctgaacagccgggagtaccgggccaagagctatgagatcctgctgcactag

SEQ ID NO: 307747 - DNA, 105 bp, Artificial Sequence
  derived and/or modified sequence
atgggcaacccagaaaatattgaagatgcctacgtggccgtcatccggcccaagaacacagccagcctgaacagccgggagtaccgggccaagagctatgaatag

SEQ ID NO: 307748 - DNA, 4553 bp, Artificial Sequence
  derived and/or modified sequence
gctccggctcagccgctggcacccccaccgccaccaccctagtctcctagtcgcctgccaccagcccctgagagactgcaggtccagtgaaaaggagcaggaacggcagcagcccggccgccgacccggaagctctttcaccgccaaccgcgaggctgcaaagggtgtgaacccggaagcgatttcatagccacggtaacggcggggtggaaagctaaggcctttgaagacctgggaccccgtagtttcgggagagggtgaggggtgaatggtgctgaggtgcgaggagagggaaggacagtaaagagcaggtgggcaggagggtctccgactccagagacctgagcttttggggcgcgggtgggagcgcgggggaaccctcaagacggctttcttttggcgactgagggtttttctgccacaggaagctgggccgggctgctgtgcctgggaggagggaaggaggaatgagaaagcggtgacggtccctgccccccctcgccaggtgactgtcccacccatttagttgaatgtagcggccagagaggcactcgcggcagcccgtacgggtgggacctctcggtgtccttcgggaaacaggaggagcaagttcgactccagcgagggaaaacggagcctcaccagaagtctttcatctcggtggtccaactcaggatctcagcctcattattttcttacccttctggagtgcatatgtgcctttacagtttctgtttgcaaacgctgtctagcatactaagaggatgttagcaaacctgttccatggacactaaatggcagttgtacatctcccctcatcagtcatagtgacaaccagaaatgccctccatattttccagtgatcccagtcttcaatgcgtctgtctcataatttgtaaacgtttattatcttgaagtcattgttaatctgtggtgaaaagtaattgctaaatagaaattctgagaagaaaaaggcctcatccttttcacatgatgtaggaaggtctgttgcatgagcaatgggaaatccagaaaacatagaagatgcatatgttgctgttattcgtccaaagaatactgccagtctcaattctcgggaatacagagctaagtcatatgaaattttgttgcatgaagttcccattgaaggacagaaaaaaaagagaaagaaagttttattggaaacgaaacttcaaggcaacagtgaaataacacaaggcatattggattacgtagtagaaaccaccaaaccaatttctcctgcaaaccagggtatcagaggaaaacgagttgtactaatgaaaaaatttcctctggatggagagaagatgggcagagaagcatcattatttattgttccatcagttgtcaaagataatactaaatacacatataccccaggatgcccaattttttactgcttacaagatattatgcgagtctgtagtgaatccagtactcattttgctacacttacagcaaggatgttaatagccttggataagtggttagatgaacgtcatgcacaatctcactttattccagctttattccgaccttctcctcttgagcggataaaaactaatgtcataaatcctgcatatgctactgaatcaggtcagacagaaaactcactacatatgggctatagtgcactagaaataaagagtaaaatgttagccctagagaaagcagatacctgtatttacaaccctttgtttggatcagatcttcagtatacaaatcgggtagataaagtggtaataaatccatactttggtctaggagctccagactactcaaaaatccaaatacctaaacaggaaaaatggcagagaagcatgagcagtgtcacagaagacaaggaacgacagtgggtagatgattttcctctccaccgaagcgcctgtgaaggagattcagaattactaagccgtcttctcagtgaaagattttcagtcaaccagttagatagtgaccactgggcacccattcattatgcatgctggtatggaaaagttgaggccactcgcatattgttagagaaaggaaagtgcaatccaaaccttttaaatggacaacttagttctcctcttcattttgctgctggaggaggacatgctgaaatagtacagattctcctaaaccacccagaaacggatagacatataacagaccaacaaggaagatctccattaaatatttgtgaagaaaacaaacaaaacaactgggaagaagctgcaaaattgttgaaggaagcaattaacaaaccatatgaaaaagttcgaatatacagaatggatgggtcatatcgttctgttgaattgaagcatggaaataataccacagtgcagcagataatggaaggaatgcgtctctctcaagaaactcagcaatatttcactatatggatttgttcagaaaacctcagccttcaactcaaaccatatcataaacccttgcaacatgttcgtgactggccagaaatacttgctgaattgactaatctggatcctcaaagggaaacacctcagctttttctaagaagagatgtgagacttcccttggaagttgaaaaacagattgaagacccactagctattcttattctctttgatgaagccagatataatttattgaagggcttttatacagctcctgatgctaagctgataacattggcaagtctgcttttgcaaatagtctatggaaattatgagagtaaaaaacacaagcaaggtttcctaaatgaagaaaatctaaaatccatcgtacctgttaccaaactgaaaagtaaggcacctcactggacaaatcgcatacttcatgaatacaagaatctcagtacaagtgaaggtgtcagtaaagaaatgcatcaccttcagcgcatgttcttacagaattgctgggaaattcctacttatggagcagcatttttcacaggacagatatttacaaaggcaagccccagcaatcataaagtcatccctgtgtatgtaggagtgaatataaaaggacttcatctcctcaacatggaaactaaggctttactcatcagtcttaagtatggttgttttatgtggcaattgggagatactgatacttgttttcagatccatagcatggaaaataaaatgagctttatagtacatacaaaacaggctggtctcgtggtaaaactgttaatgaagctaaatggacagttaatgcccactgaaagaaattcatgaaagagaagtaactgttactcaagccaccacattttgtaatgcagagttttttttccgtgaaagatttcttaaaatattacttttggccgagcatggtggctcacccctgtaattccagcactttgggaggctggggcaggcggatcacctgaagtcagagttcaagaccagcctggccaacatggtgaaaccctgtctctacaaaaatacaaaaattagctgggtgtggtggcgggcgcctataatcctagctactagggaggccaaggtgggagatcgcttaaacccaggaggtggaggttgtagtgagccaagattgcaccacggcacgctagcctgggtgacacagcaagactccatctcaaaaaaaaaaaaaaattactttcaacaaggcatatagtctcttgtaatatatatgtatactattacattgtacagaatctgtacttatgtttggtgtgtaatataccaattagttttatataatatcctcataagctattctaatttttgagagaaacacaaaaagttatagattgatagtctgtataatattagacaaaatagtaagctttataaaaagttatttttggtaaatggtaaggaatttggggtggaatgtgatgagattaaaatgtagctttggtataacttcatgtgtatttcaaaatatactgaacgtcaacatgatttgaataaagaaaatgtattttctacttgaaccacataacactgttatttaaaacagttttctgcagtctataaacatttctcaacatttttttaaaagtcttagttaaaatgtaaatctgatatacagtagtgtttctcaaagtatagttcatgaactccttgcatcataattacctagatgcctcttaaaaatgaagatttcagagacccattctaaacaagggcattcactctctggaagtagcatggccttgtgaacttaaatttggttttgttttttcttttttgctgttagaataatttcagacccaataaggaatttcgattattaaagttgagaaatttcacaaaactgcctggcacacaagcacacacatacatagacacattttaagtgataatctcttgatattagaagttgcatttgttaaatacatgctgtattttttatgagttgacttaatagtttatgtatattgactttgctttgtaggaagtaaatcaccagatatcttattgtttcatttaggaaagtagtgatatagatgaagagccaacttgatgaatgtgctattcataagctagaaactacagtttttccaaactaataaactgatgaattctaaataa

SEQ ID NO: 307749 - DNA, 3143 bp, Artificial Sequence
  derived and/or modified sequence
agcgatttcatagccacggtaacggcggggtggaaagctaaggcctttgaagacctgggaccccgtagtttcgggagagggtgaggggtgaatggtgctgaggtgcgaggagagggaaggacagtaaagagcaggtttttggctttcatcgctttttctacatgtttttagcctcaccagaagtctttcatctcggtggtccaactcaggatctcagcctcattattttcttacccttctggagtgcatatgtgcctttacagtttctgtttgcaaacgctgtctagcatactaagaggatgttagcaaacctgttccatggacactaaatggcagttgtacatctcccctcatcagtcatagtgacaaccagaaatgccctccatattttccagtgatcccagtcttcaatgcgtctgtctcataatttgtaaacgtttattatcttgaagtcattgttaatctgtggtgaaaagtaattgctaaatagaaattctgagaagaaaaaggcctcatccttttcacatgatgtaggaaggtctgttgcatgagcaatgggaaatccagaaaacatagaagatgcatatgttgctgttattcgtccaaagaatactgccagtctcaattctcgggaatacagagctaagtcatatgaaattttgttgcatgaagttcccattgaaggacagaaaaaaaagagaaagaaagttttattggaaacgaaacttcaaggcaacagtgaaataacacaaggcatattggattacgtagtagaaaccaccaaaccaatttctcctgcaaaccagggtatcagaggaaaacgagttgtactaatgaaaaaatttcctctggatggagagaagatgggcagagaagcatcattatttattgttccatcagttgtcaaagataatactaaatacacatataccccaggatgcccaattttttactgcttacaagatattatgcgagtctgtagtgaatccagtactcattttgctacacttacagcaaggatgttaatagccttggataagtggttagatgaacgtcatgcacaatctcactttattccagctttattccgaccttctcctcttgagcggataaaaactaatgtcataaatcctgcatatgctactgaatcaggtcagacagaaaactcactacatatgggctatagtgcactagaaataaagagtaaaatgttagccctagagaaagcagatacctgtatttacaaccctttgtttggatcagatcttcagtatacaaatcgggtagataaagtggtaataaatccatactttggtctaggagctccagactactcaaaaatccaaatacctaaacaggaaaaatggcagagaagcatgagcagtgtcacagaagacaaggaacgacagtgggtagatgattttcctctccaccgaagcgcctgtgaaggagattcagaattactaagccgtcttctcagtgaaagattttcagtcaaccagttagatagtgaccactgggcacccattcattatgcatgctggtatggaaaagttgaggccactcgcatattgttagagaaaggaaagtgcaatccaaaccttttaaatggacaacttagttctcctcttcattttgctgctggaggaggacatgctgaaatagtacagattctcctaaaccacccagaaacggatagacatataacagaccaacaaggaagatctccattaaatatttgtgaagaaaacaaacaaaacaactgggaagaagctgcaaaattgttgaaggaagcaattaacaaaccatatgaaaaagttcgaatatacagaatggatgggtcatatcgttctgttgaattgaagcatggaaataataccacagtgcagcagataatggaaggaatgcgtctctctcaagaaactcagcaatatttcactatatggatttgttcagaaaacctcagccttcaactcaaaccatatcataaacccttgcaacatgttcgtgactggccagaaatacttgctgaattgactaatctggatcctcaaagggaaacacctcagctttttctaagaagagatgtgagacttcccttggaagttgaaaaacagattgaagacccactagctattcttattctctttgatgaagccagatataatttattgaagggcttttatacagctcctgatgctaagctgataacattggcaagtctgcttttgcaaatagtctatggaaattatgagagtaaaaaacacaagcaaggtttcctaaatgaagaaaatctaaaatccatcgtacctgttaccaaactgaaaagtaaggcacctcactggacaaatcgcatacttcatgaatacaagaatctcagtacaagtgaaggtgtcagtaaagaaatgcatcaccttcagcgcatgttcttacagaattgctgggaaattcctacttatggagcagcatttttcacaggacagatatttacaaaggcaagccccagcaatcataaagtcatccctgtgtatgtaggagtgaatataaaaggacttcatctcctcaacatggaaactaaggctttactcatcagtcttaagtatggttgttttatgtggcaattgggagatactgatacttgttttcagatccatagcatggaaaataaaatgagctttatagtacatacaaaacaggctggtctcgtggtaaaactgttaatgaagctaaatggacagttaatgcccactgaaagaaattcatgaaagagaagtaactgttactcaagccaccacattttgtaatgcagagttttttttccgtgaaagatttcttaaaatattacttttggccgagcatggtggctcacccctgtaattccagcactttgggaggctggggcaggcggatcacctgaagtcagagttcaagaccagcctggccaacatggtgaaaccctgtctctacaaaaatacaaaaattagctgggtgtggtggcgggcgcctataatcctagctactagggaggccaaggtgggagatcgcttaaacccaggaggtggaggttgtagtgagccaagattgcaccacggcacgctagcctgggtgacacagcaagactccatctcaaaaaaaaaaaaaaa

SEQ ID NO: 307750 - DNA, 4762 bp, Artificial Sequence
  derived and/or modified sequence
gctccggctcagccgctggcacccccaccgccaccaccctagtctcctagtcgcctgccaccagcccctgagagactgcaggtccagtgaaaaggagcaggaacggcagcagcccggccgccgacccggaagctctttcaccgccaaccgcgaggctgcaaagggtgtgaacccggaagcgatttcatagccacggtgactgtcccacccatttagttgaatgtagcggccagagaggcactcgcggcagcccgtacgggtgggacctctcggtgtccttcgggaaacaggaggagcaagttcgactccagcgagggaaaacggaggtgggagactgaaccatctccacatctagttgccccaggtttttggctttcatcgctttttctacatgtttttagcctcaccagaagtctttcatctcggtggtccaactcaggatctcagcctcattattttcttacccttctggagtgcatatgtgcctttacagtttctgtttgcaaacgctgtctagcatactaagaggatgttagcaaacctgttccatggacactaaatggcagttgtacatctcccctcatcagtcatagtgacaaccagaaatgccctccatattttccagtgatcccagtcttcaatgcgtctgtctcataatttgtaaacgtttattatcttgaagtcattgttaatctgtggtgaaaagtaattgctaaatagaaattctgagaagaaaaaggcctcatccttttcacatgatgtaggaaggtctgttgcatgagcaatgggaaatccagaaaacatagaagatgcatatgttgctgttattcgtccaaagaatactgccagtctcaattctcgggaatacagagctaagtcatatgaaattttgttgcatgaagttcccattgaaggacagaaaaaaaagagaaagaaagttttattggaaacgaaacttcaaggcaacagtgaaataacacaaggcatattggattacgtagtagaaaccaccaaaccaatttctcctgcaaaccagggtatcagaggaaaacgagttgtactaatgaaaaaatttcctctggatggagagaagatgggcagagaagcatcattatttattgttccatcagttgtcaaagataatactaaatacacatataccccaggatgcccaattttttactgcttacaagatattatgcgagtctgtagtgaatccagtactcattttgctacacttacagcaaggatgttaatagccttggataagtggttagatgaacgtcatgcacaatctcactttattccagctttattccgaccttctcctcttgagcggataaaaactaatgtcataaatcctgcatatgctactgaatcaggtcagacagaaaactcactacatatgggctatagtgcactagaaataaagagtaaaatgttagccctagagaaagcagatacctgtatttacaaccctttgtttggatcagatcttcagtatacaaatcgggtagataaagtggtaataaatccatactttggtctaggagctccagactactcaaaaatccaaatacctaaacaggaaaaatggcagagaagcatgagcagtgtcacagaagacaaggaacgacagtgggtagatgattttcctctccaccgaagcgcctgtgaaggagattcagaattactaagccgtcttctcagtgaaagattttcagtcaaccagttagatagtgaccactgggcacccattcattatgcatgctggtatggaaaagttgaggccactcgcatattgttagagaaaggaaagtgcaatccaaaccttttaaatggacaacttagttctcctcttcattttgctgctggaggaggacatgctgaaatagtacagattctcctaaaccacccagaaacggatagacatataacagaccaacaaggaagatctccattaaatatttgtgaagaaaacaaacaaaacaactgggaagaagctgcaaaattgttgaaggaagcaattaacaaaccatatgaaaaagttcgaatatacagaatggatgggtcatatcgttctgttgaattgaagcatggaaataataccacagtgcagcagataatggaaggaatgcgtctctctcaagaaactcagcaatatttcactatatggatttgttcagaaaacctcagccttcaactcaaaccatatcataaacccttgcaacatgttcgtgactggccagaaatacttgctgaattgactaatctggatcctcaaagggaaacacctcagctttttctaagaagagatgtgagacttcccttggaagttgaaaaacagattgaagacccactagctattcttattctctttgatgaagccagatataatttattgaagggcttttatacagctcctgatgctaagctgataacattggcaagtctgcttttgcaaatagtctatggaaattatgagagtaaaaaacacaagcaaggtttcctaaatgaagaaaatctaaaatccatcgtacctgttaccaaactgaaaagtaaggcacctcactggacaaatcgcatacttcatgaatacaagaatctcagtacaagtgaaggtgtcagtaaagaaatgcatcaccttcagcgcatgttcttacagaattgctgggaaattcctacttatggagcagcatttttcacaggacagatatttacaaaggcaagccccagcaatcataaagtcatccctgtgtatgtaggagtgaatataaaaggacttcatctcctcaacatggaaactaaggctttactcatcagtcttaagtatggttgttttatgtggcaattgggagatactgatacttgttttcagatccatagcatggaaaataaaatgagctttatagtacatacaaaacaggctggtctcgtggtaaaactgttaatgaagctaaatggacagttaatgcccactgaaagaaattcatgaaagagaagtaactgttactcaagccaccacattttgtaatgcagagttttttttccgtgaaagatttcttaaaatattacttttggccgagcatggtggctcacccctgtaattccagcactttgggaggctggggcaggcggatcacctgaagtcagagttcaagaccagcctggccaacatggtgaaaccctgtctctacaaaaatacaaaaattagctgggtgtggtggcgggcgcctataatcctagctactagggaggccaaggtgggagatcgcttaaacccaggaggtggaggttgtagtgagccaagattgcaccacggcacgctagcctgggtgacacagcaagactccatctcaaaaaaaaaaaaaaattactttcaacaaggcatatagtctcttgtaatatatatgtatactattacattgtacagaatctgtacttatgtttggtgtgtaatataccaattagttttatataatatcctcataagctattctaatttttgagagaaacacaaaaagttatagattgatagtctgtataatattagacaaaatagtaagctttataaaaagttatttttggtaaatggtaaggaatttggggtggaatgtgatgagattaaaatgtagctttggtataacttcatgtgtatttcaaaatatactgaacgtcaacatgatttgaataaagaaaatgtattttctacttgaaccacataacactgttatttaaaacagttttctgcagtctataaacatttctcaacatttttttaaaagtcttagttaaaatgtaaatctgatatacagtagtgtttctcaaagtatagttcatgaactccttgcatcataattacctagatgcctcttaaaaatgaagatttcagagacccattctaaacaagggcattcactctctggaagtagcatggccttgtgaacttaaatttggttttgttttttcttttttgctgttagaataatttcagacccaataaggaatttcgattattaaagttgagaaatttcacaaaactgcctggcacacaagcacacacatacatagacacattttaagtgataatctcttgatattagaagttgcatttgttaaatacatgctgtattttttatgagttgacttaatagtttatgtatattgactttgctttgtaggaagtaaatcaccagatatcttattgtttcatttaggaaagtagtgatatagatgaagagccaacttgatgaatgtgctattcataagctagaaactacagtttttccaaactaataaactgatgaattctaaataagttcagagatatagtcatatttaaagttgtcctacagtttgcagataatttttatattactattcttcacattaacttctgcttatttttaatggtactatatgtaggccttattaaaattaagattgtatggttaagtaaagttaacaagaaagcctgatttatctttaattctgtgctaggtacttttgattctacatgaacaatacccttttcagttcccttcattctaatgtcctcaactgttaccaaataccctgttgactcccaaacctaagattttagcctcaacttcttttctgaacttcaaatcttaatttccaagttatacttgttctaggtccatctaaatggtctacagagaacttcagttgaatcatagctggaaacagaatttatttcctctatttgcttcattctgtccttccactatattccctattt

SEQ ID NO: 307751 - DNA, 3378 bp, Artificial Sequence
  derived and/or modified sequence
gagcaggtgggcaggagggtctccgactccagagacctgagcttttggggcgcgggtgggagcgcgggggaaccctcaagacggctttcttttggcgactgagggtttttctgccacaggaagctgggccgggctgctgtgcctgggaggagggaaggaggaatgagaaagcggtgacggtccctgccccccctcgccaggtgactgtcccacccatttagttgaatgtagcggccagagaggcactcgcggcagcccgtacgggtgggacctctcggtgtccttcgggaaacaggaggagcaagttcgactccagcgagggaaaacggaggtgggagactgaaccatctccacatctagttgccccaggtttttggctttcatcgctttttctacatgtttttagcctcaccagaagtctttcatctcggtggtccaactcaggatctcagcctcattattttcttacccttctggagtgcatatgtgcctttacagtttctgtttgcaaacgctgtctagcatactaagaggatgttagcaaacctgttccatggacactaaatggcagttgtacatctcccctcatcagtcatagtgacaaccagaaatgccctccatattttccagtgatcccagtcttcaatgcgtctgtctcataatttgtaaacgtttattatcttgaagtcattgttaatctgtggtgaaaagtaattgctaaatagaaattctgagaagaaaaaggcctcatccttttcacatgatgtaggaaggtctgttgcatgagcaatgggaaatccagaaaacatagaagatgcatatgttgctgttattcgtccaaagaatactgccagtctcaattctcgggaatacagagctaagtcatatgaaattttgttgcatgaagttcccattgaaggacagaaaaaaaagagaaagaaagttttattggaaacgaaacttcaaggcaacagtgaaataacacaaggcatattggattacgtagtagaaaccaccaaaccaatttctcctgcaaaccagggtatcagaggaaaacgagttgtactaatgaaaaaatttcctctggatggagagaagatgggcagagaagcatcattatttattgttccatcagttgtcaaagataatactaaatacacatataccccaggatgcccaattttttactgcttacaagatattatgcgagtctgtagtgaatccagtactcattttgctacacttacagcaaggatgttaatagccttggataagtggttagatgaacgtcatgcacaatctcactttattccagctttattccgaccttctcctcttgagcggataaaaactaatgtcataaatcctgcatatgctactgaatcaggtcagacagaaaactcactacatatgggctatagtgcactagaaataaagagtaaaatgttagccctagagaaagcagatacctgtatttacaaccctttgtttggatcagatcttcagtatacaaatcgggtagataaagtggtaataaatccatactttggtctaggagctccagactactcaaaaatccaaatacctaaacaggaaaaatggcagagaagcatgagcagtgtcacagaagacaaggaacgacagtgggtagatgattttcctctccaccgaagcgcctgtgaaggagattcagaattactaagccgtcttctcagtgaaagattttcagtcaaccagttagatagtgaccactgggcacccattcattatgcatgctggtatggaaaagttgaggccactcgcatattgttagagaaaggaaagtgcaatccaaaccttttaaatggacaacttagttctcctcttcattttgctgctggaggaggacatgctgaaatagtacagattctcctaaaccacccagaaacggatagacatataacagaccaacaaggaagatctccattaaatatttgtgaagaaaacaaacaaaacaactgggaagaagctgcaaaattgttgaaggaagcaattaacaaaccatatgaaaaagttcgaatatacagaatggatgggtcatatcgttctgttgaattgaagcatggaaataataccacagtgcagcagataatggaaggaatgcgtctctctcaagaaactcagcaatatttcactatatggatttgttcagaaaacctcagccttcaactcaaaccatatcataaacccttgcaacatgttcgtgactggccagaaatacttgctgaattgactaatctggatcctcaaagggaaacacctcagctttttctaagaagagatgtgagacttcccttggaagttgaaaaacagattgaagacccactagctattcttattctctttgatgaagccagatataatttattgaagggcttttatacagctcctgatgctaagctgataacattggcaagtctgcttttgcaaatagtctatggaaattatgagagtaaaaaacacaagcaaggtttcctaaatgaagaaaatctaaaatccatcgtacctgttaccaaactgaaaagtaaggcacctcactggacaaatcgcatacttcatgaatacaagaatctcagtacaagtgaaggtgtcagtaaagaaatgcatcaccttcagcgcatgttcttacagaattgctgggaaattcctacttatggagcagcatttttcacaggacagatatttacaaaggcaagccccagcaatcataaagtcatccctgtgtatgtaggagtgaatataaaaggacttcatctcctcaacatggaaactaaggctttactcatcagtcttaagtatggttgttttatgtggcaattgggagatactgatacttgttttcagatccatagcatggaaaataaaatgagctttatagtacatacaaaacaggctggtctcgtggtaaaactgttaatgaagctaaatggacagttaatgcccactgaaagaaattcatgaaagagaagtaactgttactcaagccaccacattttgtaatgcagagttttttttccgtgaaagatttcttaaaatattacttttggccgagcatggtggctcacccctgtaattccagcactttgggaggctggggcaggcggatcacctgaagtcagagttcaagaccagcctggccaacatggtgaaaccctgtctctacaaaaatacaaaaattagctgggtgtggtggcgggcgcctataatcctagctactagggaggccaaggtgggagatcgcttaaacccaggaggtggaggttgtagtgagccaagattgcaccacggcacgctagcctgggtgacacagcaagactccatctcaaaaaaaaaaaaaaa

SEQ ID NO: 307752 - DNA, 3056 bp, Artificial Sequence
  derived and/or modified sequence
tcgggagagggtgaggggtgaatggtgctgaggtgcgaggagagggaaggacagtaaagagcaggtttttggctttcatcgctttttctacatgtttttagcctcaccagaagtctttcatctcggtggtccaactcaggatctcagcctcattattttcttacccttctggagtgcatatgtgcctttacagtttctgtttgcaaacgctgtctagcatactaagaggatgttagcaaacctgttccatggacactaaatggcagttgtacatctcccctcatcagtcatagtgacaaccagaaatgccctccatattttccagtgatcccagtcttcaatgcgtctgtctcataatttgtaaacgtttattatcttgaagtcattgttaatctgtggtgaaaagtaattgctaaatagaaattctgagaagaaaaaggcctcatccttttcacatgatgtaggaaggtctgttgcatgagcaatgggaaatccagaaaacatagaagatgcatatgttgctgttattcgtccaaagaatactgccagtctcaattctcgggaatacagagctaagtcatatgaaattttgttgcatgaagttcccattgaaggacagaaaaaaaagagaaagaaagttttattggaaacgaaacttcaaggcaacagtgaaataacacaaggcatattggattacgtagtagaaaccaccaaaccaatttctcctgcaaaccagggtatcagaggaaaacgagttgtactaatgaaaaaatttcctctggatggagagaagatgggcagagaagcatcattatttattgttccatcagttgtcaaagataatactaaatacacatataccccaggatgcccaattttttactgcttacaagatattatgcgagtctgtagtgaatccagtactcattttgctacacttacagcaaggatgttaatagccttggataagtggttagatgaacgtcatgcacaatctcactttattccagctttattccgaccttctcctcttgagcggataaaaactaatgtcataaatcctgcatatgctactgaatcaggtcagacagaaaactcactacatatgggctatagtgcactagaaataaagagtaaaatgttagccctagagaaagcagatacctgtatttacaaccctttgtttggatcagatcttcagtatacaaatcgggtagataaagtggtaataaatccatactttggtctaggagctccagactactcaaaaatccaaatacctaaacaggaaaaatggcagagaagcatgagcagtgtcacagaagacaaggaacgacagtgggtagatgattttcctctccaccgaagcgcctgtgaaggagattcagaattactaagccgtcttctcagtgaaagattttcagtcaaccagttagatagtgaccactgggcacccattcattatgcatgctggtatggaaaagttgaggccactcgcatattgttagagaaaggaaagtgcaatccaaaccttttaaatggacaacttagttctcctcttcattttgctgctggaggaggacatgctgaaatagtacagattctcctaaaccacccagaaacggatagacatataacagaccaacaaggaagatctccattaaatatttgtgaagaaaacaaacaaaacaactgggaagaagctgcaaaattgttgaaggaagcaattaacaaaccatatgaaaaagttcgaatatacagaatggatgggtcatatcgttctgttgaattgaagcatggaaataataccacagtgcagcagataatggaaggaatgcgtctctctcaagaaactcagcaatatttcactatatggatttgttcagaaaacctcagccttcaactcaaaccatatcataaacccttgcaacatgttcgtgactggccagaaatacttgctgaattgactaatctggatcctcaaagggaaacacctcagctttttctaagaagagatgtgagacttcccttggaagttgaaaaacagattgaagacccactagctattcttattctctttgatgaagccagatataatttattgaagggcttttatacagctcctgatgctaagctgataacattggcaagtctgcttttgcaaagtctatggaaattatgagagtaaaaaacacaagcaaggtttcctaaatgaagaaaatctaaaatccatcgtacctgttaccaaactgaaaagtaaggcacctcactggacaaatcgcatacttcatgaatacaagaatctcagtacaagtgaaggtgtcagtaaagaaatgcatcaccttcagcgcatgttcttacagaattgctgggaaattcctacttatggagcagcatttttcacaggacagatatttacaaaggcaagccccagcaatcataaagtcatccctgtgtatgtaggagtgaatataaaaggacttcatctcctcaacatggaaactaaggctttactcatcagtcttaagtatggttgttttatgtggcaattgggagatactgatacttgttttcagatccatagcatggaaaataaaatgagctttatagtacatacaaaacaggctggtctcgtggtaaaactgttaatgaagctaaatggacagttaatgcccactgaaagaaattcatgaaagagaagtaactgttactcaagccaccacattttgtaatgcagagttttttttccgtgaaagatttcttaaaatattacttttggccgagcatggtggctcacccctgtaattccagcactttgggaggctggggcaggcggatcacctgaagtcagagttcaagaccagcctggccaacatggtgaaaccctgtctctacaaaaatacaaaaattagctgggtgtggtggcgggcgcctataatcctagctactagggaggccaaggtgggagatcgcttaaacccaggaggtggaggttgtagtgagccaagattgcaccacggcacgctagcctgggtgacacagcaagactccatctc

SEQ ID NO: 307753 - DNA, 2211 bp, Artificial Sequence
  derived and/or modified sequence
atgggcaaccccgagaacatcgaggacgcctacgtggccgtgatcagaccgaagaatacagcaagccttaactcccgcgagtatagggcaaaatcttacgaaattctgctacatgaggttccaattgagggacaaaaaaagaaacggaagaaagtgctgctcgaaacgaaactgcaaggcaacagcgaaattacccagggtattctagattatgtggtagagaccacaaagccgatttcccctgccaatcagggaatccggggaaaaagagtggttctgatgaagaaatttccactggacggggaaaaaatgggcagggaagcatcattgtttattgtgcctagtgtagttaaggataatacaaagtacacatacacaccaggctgtccgattttctactgcctgcaggacattatgcgggtgtgctcagaatcctccacgcattttgccaccttgacagcacgcatgctgattgccctcgataagtggttagacgaaagacacgcccagtcccacttcattcctgccctgtttcgtccctcccctctggagcgcatcaagaccaatgtaatcaacccagcgtacgccacggagtccggtcaaacagaaaacagcttgcacatgggctactccgcccttgaaattaagagcaaaatgcttgccttggaaaaagctgatacatgcatttacaaccctttattcggctcagacttgcagtacactaatagagttgacaaggtagtcattaacccttactttggccttggagccccagactattccaaaattcagattcctaagcaggaaaagtggcagcggagcatgtcatctgtgacagaggacaaagaacggcaatgggtagatgatttccccctgcaccggtcggcatgcgagggggacagcgagctgctgtcgagattactgagcgaacgcttttcagttaatcagctggacagcgaccactgggcacctatacattacgcttgttggtacggcaaggtcgaggccacacgaattctccttgagaagggcaagtgtaaccctaacttgctaaacggccagctttcgagtcctcttcattttgctgctggagggggtcatgctgagatcgtacagatccttctgaatcatccagagacagatcgccatattacagatcagcagggtaggagtcctctcaatatttgtgaggagaacaaacaaaataactgggaggaagcagccaagctcctgaaggaagcgattaacaagccctatgagaaagtgcgaatctatagaatggatgggtcctacagatctgtggaactgaaacacggcaacaacaccactgtgcagcagattatggagggaatgcgactgtcacaggaaactcaacagtatttcaccatttggatttgtagcgagaatctttccttacagttgaagccttatcataagcccctccagcatgtgcgagactggcctgagattctggcagagctgacgaacctggatccacagcgcgagacgccacagctctttctgcggcgtgacgtccgtctgcctcttgaggtggagaagcaaatcgaagatcccctggcaattctcattctgttcgatgaggccaggtataatctgttgaaaggattctatacggcacctgatgccaaactgattacactcgccagtttattactgcagatcgtgtacggtaattacgaatctaagaaacacaaacaggggttcttgaacgaggaaaacttaaagagcatcgtcccggtaaccaaactgaaatcaaaggccccgcactggacgaaccgcatcctgcatgagtacaaaaacctttccactagtgaaggcgtgtcaaaagagatgcaccatctgcaacggatgttcctgcagaactgctgggagatccctacttatggcgctgcgttctttaccgggcaaatcttcaccaaggccagcccttcaaaccacaaggtgatcccagtgtacgtgggcgttaatataaaaggcctgcatctcctgaacatggaaactaaggccctactgatctccctgaagtatggctgctttatgtggcagctcggggatacagatacctgctttcagatacacagcatggaaaataagatgagcttcattgtccatacgaagcaggccggcctggtagtgaagttgttgatgaagctcaacgggcagctgatgcctacagaaagaaattcctag

SEQ ID NO: 307754 - DNA, 2211 bp, Artificial Sequence
  derived and/or modified sequence
atgggcaaccccgagaacatcgaggacgcctacgtggccgtgatcagacccaaaaatactgcctcgctaaactcaagagaataccgagccaaatcttacgagatccttctgcacgaagtaccgattgagggtcagaagaaaaaacggaaaaaggtcttgttggagacaaagttgcagggaaattccgagattacgcagggcattctggactatgtcgttgagacgacaaagccaatatcacccgctaaccaaggcattcggggtaaaagagtggtcctgatgaaaaagttccctcttgatggcgaaaagatgggaagggaagcaagtctcttcattgtgccttccgtagttaaggacaatacgaagtacacatacaccccgggttgccctatattttactgcctccaggacattatgcgagtttgcagcgaatcgagcacacacttcgccacactcaccgctagaatgttgatcgcgctagataagtggttagacgagagacacgcccagagtcacttcatcccagccttgtttaggccaagccctcttgaaaggatcaagacaaacgttattaaccctgcatatgctactgagagcggccaaaccgagaattctctccatatgggatactccgcactggagatcaaaagcaaaatgctggcactcgagaaagccgacacgtgtatctacaaccccttattcggaagcgatctccagtacacaaatcgcgtggataaggtggttatcaacccatatttcggattgggcgctcccgactattccaaaattcagatccccaaacaagagaaatggcagaggagcatgtccagtgtcaccgaggacaaggaacgtcaatgggttgacgactttcccctgcacagaagcgcttgtgaaggcgacagcgagctgctcagcaggctcttgtctgagcggttcagcgttaaccaactggacagcgaccattgggcccccattcactatgcctgctggtatgggaaggttgaggcaacccgcatcctgctggagaagggcaagtgtaatccaaacctccttaacgggcagttaagctccccactgcacttcgcggccgggggcgggcacgccgagatcgtccagatactgcttaaccacccagagacggaccgccacattacggaccagcaggggcgaagcccactgaacatctgtgaagaaaataagcagaacaactgggaggaggccgcaaagctgctgaaggaggctatcaacaaaccatacgaaaaagtacggatctaccgaatggatggctcatacagatctgtggaactcaagcacggtaacaacacgaccgttcaacagatcatggaaggcatgcgcctgtcccaggagactcaacaatactttacaatctggatctgctctgagaatttgagccttcaacttaaaccgtaccacaagcctttacagcacgttcgagattggcccgagatcttggcagagctgaccaaccttgatccacagcgagaaacacctcagctgttcttgcgcagagatgttagactccccctggaagtagaaaaacaaattgaagacccgttggcaattctgatcctgtttgacgaggcgcgctacaaccttttgaaagggttctatacagcacccgatgcaaagcttatcaccctggcgtctctgctgctacagatagtttatggaaactatgagtcgaagaaacacaaacagggttttctgaacgaagagaatctgaaatccattgtgccagtgaccaagttaaaaagcaaggctcctcattggacaaaccggatattgcatgagtacaagaacctctccacctccgaaggcgttagcaaagagatgcaccacctgcagagaatgtttcttcagaactgctgggagataccaacctacggcgccgccttcttcacggggcagatcttcacaaaagcttccccttcaaatcataaggtcatcccagtgtacgtgggagttaatattaaaggcttgcatctgttgaacatggagacaaaagccttgctgatttctttaaaatatggctgcttcatgtggcagctgggcgataccgatacctgtttccagatacacagtatggaaaacaaaatgagtttcattgtccataccaagcaagcaggattagttgtcaaattgctcatgaagctgaacggacagttaatgcctacagagcgtaattcatag

SEQ ID NO: 307755 - DNA, 2211 bp, Artificial Sequence
  derived and/or modified sequence
atgggcaaccccgagaacatcgaggacgcctacgtggccgtgatcaggcctaaaaacaccgcgagcctgaactctcgcgaatacagggctaagtcttatgaaattctcttgcatgaagtgccgattgagggccagaaaaaaaagagaaagaaggttctgctggaaaccaagctacagggcaatagtgaaatcactcaagggatcttggactacgtggtcgagacaaccaagcccatcagtcccgccaatcaaggtatccggggcaagagagtggttctgatgaaaaagttccctttagatggtgagaagatgggacgagaagccagtttattcatcgtgcctagtgtagtgaaggacaacacaaaatacacttatactcctggctgtcctatcttttattgtttgcaagacatcatgcgggtgtgctcggagtcttccacccacttcgcaaccctcactgctaggatgttaatcgctctggataagtggttggatgagaggcatgcacaaagtcacttcattcctgccttgttcaggccctcccctctcgagcgcataaagaccaacgttatcaaccccgcttatgccaccgaaagcgggcagacagaaaatagcctgcacatgggatattctgccctggagataaaatcaaagatgctagctctggagaaagcggacacctgtatctacaaccccctgtttggatcagacctccagtataccaatcgcgtcgacaaggtcgttatcaatccctactttgggttgggggcaccagattatagcaagatccaaatccccaaacaggaaaaatggcagcgatcaatgagctcagtgactgaggacaaagaacggcagtgggtggacgatttcccacttcacagatctgcttgtgaaggggattcggagctgctcagccgcctgctctccgagaggttctctgtcaatcagcttgactctgatcactgggcccccattcactacgcctgctggtacggcaaagtggaagccacacgaatattgctggagaaaggcaagtgcaatccaaacctgttaaacggccagctgtcttccccacttcatttcgcagctggtggcggacacgcggagatagtgcaaatactcctcaatcatccagaaaccgatcgacacatcacagatcaacagggtaggtcacctctgaatatttgcgaagagaacaaacaaaataattgggaagaggctgccaagctgctcaaggaggccataaataaaccgtacgaaaaagtacgtatctataggatggatggtagttatcgcagtgtcgagctgaagcacggaaataatacaactgtccaacaaattatggaagggatgaggctgagtcaggaaacgcagcaatacttcacgatttggatctgctctgagaatctaagcctgcagttaaagccataccacaagccccttcaacacgtcagggattggcctgaaatactggccgagcttacaaacctggacccccagcgagagacacctcagttgttcctgcggcgggatgtaagactgcctctggaggtggagaaacagattgaagatcccctcgccattctgattctttttgacgaagcccgatacaatctcctcaagggcttctatacagcccctgatgccaagctcattaccctcgcctcccttctgctgcagatcgtgtatggcaattacgaatctaaaaagcataagcaggggtttctgaatgaggaaaatcttaaatccattgtccccgtgaccaagctcaagtccaaggcccctcactggaccaatcgtatcttacacgagtacaagaatctcagcacctctgagggcgtcagcaaggagatgcaccatctgcagaggatgtttctccagaactgctgggaaatccccacctatggcgccgctttctttacaggccagatatttacaaaagccagccctagcaatcacaaggttatcccggtctatgtgggtgtgaacatcaaaggtcttcatctgctgaatatggagacaaaggctctactgatcagtctgaagtatgggtgttttatgtggcagctcggagacacggacacttgtttccagattcatagcatggagaataagatgagctttatcgtccacactaaacaggccggcctcgtggtgaagctgctgatgaaactgaatggtcagcttatgccgacggagagaaacagctag

SEQ ID NO: 307756 - DNA, 2211 bp, Artificial Sequence
  derived and/or modified sequence
atgggcaaccccgagaacatcgaggacgcctacgtggccgtgatccggcccaaaaacaccgctagccttaacagcagagaatatcgcgctaaatcctacgagatcttgctccatgaggtccctattgaaggtcagaagaagaaacgaaaaaaagtgcttctggaaacaaagctgcagggcaacagtgagattacacaggggattctcgactatgtggtcgagacaactaagcctatctctcccgctaaccaaggaatacgggggaagcgggtggttctgatgaaaaaatttcctctggacggggagaaaatgggaagggaagcctccctattcatcgttccctctgtagtaaaagataacaccaaatatacttataccccaggttgtcccattttttactgcttgcaggatattatgagggtctgcagtgagagttccactcactttgcaacactcaccgcacgcatgttaatcgccttggataagtggcttgacgagagacacgcccagtctcacttcattccagcactttttcgaccctcccccttagaacggatcaaaaccaatgtcatcaacccagcatatgccaccgagtctgggcagaccgagaactctctccacatggggtactccgcacttgagatcaaatccaagatgctcgcactcgagaaagcagacacttgcatttataacccgctcttcggctctgaccttcagtatacaaaccgggtggataaggtggtgatcaatccatactttgggctgggtgcacctgattacagcaagatccagatacccaagcaggagaagtggcaaaggtccatgtctagcgtgaccgaagataaagagaggcagtgggtcgacgactttcccttgcacaggtccgcctgtgaaggggattcagagctgctgagcagactcctcagtgaaaggttttctgtaaatcagctggacagcgatcattgggcaccaatccattacgcttgctggtatggcaaggttgaagccacgcgaatcctgctggaaaaaggaaagtgtaaccctaatctcctgaatgggcaactttcttcaccactgcattttgcagccggaggggggcacgccgaaatcgtgcagatcctgctgaatcacccggagactgatcgacacattacagaccagcaaggaaggtctccccttaacatctgcgaagagaacaaacagaacaactgggaggaggccgccaaactgctgaaggaggccattaacaagccgtacgaaaaagttcgtatttatcgcatggacggatcgtaccgatccgttgaactaaagcacggcaataatactaccgtacagcagattatggagggcatgcgtctgtctcaggaaacccagcagtatttcacaatttggatttgctcagaaaatttgtctctgcagctgaagccctaccataagcccctgcagcatgtgagagattggccggagatcttggcggaacttactaacctcgatcctcagcgggaaacaccacagctgttcctgcgcagagatgtcagacttcctctcgaggtggagaaacagatagaggacccactcgcaattttgatccttttcgacgaagcccgctacaacctgctgaaaggcttctataccgcccctgacgccaaactcatcaccttggcctccttgctcctgcagattgtgtacggcaactacgagagcaaaaagcataaacaaggtttccttaatgaagagaatctaaaatccattgtccccgttaccaaattgaaatccaaagctccacactggacaaatcggatcctccacgagtacaaaaacttgtctaccagtgaaggagtgtccaaggagatgcatcacctgcagagaatgtttctgcagaactgctgggagatccccacctatggtgcagcttttttcacaggacaaatcttcaccaaggcaagcccttctaatcacaaagtgataccagtctatgtgggggtcaacattaaggggctccatctgctcaatatggaaacaaaggctctgcttatatctctgaagtacggctgctttatgtggcaactcggcgacactgacacctgcttccagatacattcaatggaaaataagatgtcgtttattgtgcataccaaacaagctgggcttgtcgtcaagctgctgatgaagttgaacgggcaactgatgcccactgagaggaatagttag

SEQ ID NO: 307757 - DNA, 1698 bp, Artificial Sequence
  derived and/or modified sequence
atgggcaaccccgagaacatcgaggacgcctacgtggccgtgatcagacccaagaacacagccagcttgaacagccgtgagtaccgggcaaagagctacgaaatcctgttgcacgaagtgccaatcgagggacagaaaaagaaacgcaagaaagttctgcttgagaccaagctgcaaggaaacagtgagatcacacaggggatactggattatgtcgtcgagactaccaagccaatatcccctgcaaatcaaggtataagaggcaagcgagttgtgctgatgaaaaagtttcctctcgacggggaaaagatggggagagaagccagtctgttcattgtcccctctgttgtgaaagacaacaccaagtacacatacacccccggctgccccatcttttactgcctccaggacatcatgagggtgtgttccgagtcatccacgcacttcgccacattgaccgcaaggatgcttatcgccttggataaatggcttgatgaaagacacgcccagtcacacttcatacccgcactattccgcccgtcaccgctggaacgaatcaagaccaacgtgatcaatcccgcgtacgctaccgagagtgggcagaccgagaactccctccacatgggatattctgcgctggaaattaaaagtaaaatgcttgcactggagaaggctgatacttgcatctacaatcccctcttcggtagcgacttgcagtacactaacagagttgataaggtggtaataaacccatacttcggactcggcgctcccgactacagcaaaatacagattcctaaacaggaaaaatggcagcgatccatgtcctcggtgactgaggataaggaacgccagtgggtcgatgactttccgctgcatcggagcgcatgtgaaggggactcagaactgttgagcaggctgctatcagaacgcttcagtgtgaatcagctcgatagcgatcactgggcccccattcattacgcctgttggtacggcaaggtggaggcaacacggatcctgctcgaaaaaggcaaatgtaacccaaatctgctgaatggccaactgagttccccactgcactttgcagcaggtgggggacatgcggaaatcgtgcagatcctgctaaaccaccctgaaacagataggcatattaccgatcaacaagggcgcagtccgttgaacatttgtgaggaaaacaagcagaataactgggaggaagcagccaagctgctgaaggaggctatcaataagccttacgagaaggtgagaatttaccgcatggacggaagttacaggtccgtcgagctgaagcacggaaacaacactacggttcaacagatcatggagggcatgaggctctcacaggagacccagcagtactttacgatatggatctgctccgaaaatctgagcctccaactaaagccttatcataaaccgctgcagcatgtccgggattggccggagatactggcagagctcacaaatttagacccccagagggagacacctcagttgttcctcaggagggatgtgaggcttccactggaggtcgagaagcagatcgaagacccactcgctattctgatactcttcgatgaggcacgatataacctactgaaaggattttacactgcccctgatgccaagctcatcactctggccagcctactgctgcagagcctgtggaaactttag

SEQ ID NO: 307758 - DNA, 78 bp, Artificial Sequence
  derived and/or modified sequence
atgggcaaccccgagaacatcgaggacgcctacgtggccgtgatcagacccaagaacaccgctagtctgaacagctag

SEQ ID NO: 307759 - DNA, 117 bp, Artificial Sequence
  derived and/or modified sequence
atgggcaaccccgagaacatcgaggacgcctacgtggccgtgatccggcctaaaaataccgcaagcctgaattccagggagtatagagctaaatcctatgaaattctacttcactag

SEQ ID NO: 307760 - DNA, 105 bp, Artificial Sequence
  derived and/or modified sequence
atgggcaaccccgagaacatcgaggacgcctacgtggccgtgatccggcctaagaacacggccagtctgaactctagagaatatagagctaaaagttacgagtag

SEQ ID NO: 307761 - DNA, 2211 bp, Artificial Sequence
  derived and/or modified sequence
atggggaacccagaaaatatcgaagacgcttatgtggcagtgatcagaccaaaaaatacggcttcattaaattctcgagagtatagggcaaagtcctatgaaattttgctgcacgaggtcccaattgagggccagaaaaaaaagagaaaaaaggttctgttggagacaaagctgcaaggaaactctgagattactcagggcatactggactatgtggtggaaacaacaaagcccatttccccagctaaccagggcatccgcggaaaacgcgtggtcctaatgaaaaagtttccactagacggggagaagatgggcagagaggccagcctgtttatagttccttccgtggtgaaggacaatacgaagtacacctacacacccggttgcccaatcttttactgtttgcaagacataatgagagtatgcagtgagtcaagcacacactttgcaacactcacagctcggatgctgattgccttagacaagtggctggacgagagacacgctcagtcccactttattcccgctctgttccgcccttcccctctggaacgcatcaagacaaacgtgattaatcctgcatatgcaaccgagtcaggtcagactgaaaactcccttcacatgggttactccgcccttgaaatcaaaagtaagatgctggccctcgaaaaagccgatacctgtatatacaaccctttattcggaagcgacctgcagtataccaatcgggtagacaaagtggtaattaacccctacttcggcctgggcgcacccgactactcgaagatacaaattccaaaacaagagaagtggcagaggtcaatgtcctccgtaacagaggacaaagagcggcagtgggtcgatgatttccccctacacagaagtgcctgtgaaggggatagtgaacttttatcacgcttactgtcagagcgtttttcggttaaccaactagattcagaccactgggccccaatccactatgcctgctggtacggaaaagttgaagccactaggattctgctcgaaaagggcaaatgcaaccccaacctgctgaacggccagttgagttcgccgctgcattttgcggcaggtgggggtcacgccgaaattgtgcagattttactgaaccaccccgagacagacaggcatattactgaccagcagggacgctctcctctgaatatctgcgaggaaaataagcagaacaactgggaagaggccgctaagctgctgaaggaggccatcaacaagccatacgagaaggtgcggatctacaggatggacggaagctatagatccgtcgaacttaagcacggtaataataccactgtccaacagatcatggaagggatgcgtttgtcccaagaaacacagcagtacttcacaatctggatttgcagtgagaacttgtccttacagctcaagccatatcataaaccactccagcatgtgcgcgattggcccgaaatcctggccgagttaactaatctcgacccacagcgcgaaaccccacagctgtttcttcggagggacgtgagactgcctctcgaagttgaaaagcagatcgaagacccccttgccatcctgatcctgttcgacgaggccaggtataacctcctcaagggattttacacagcacctgatgctaaattaatcactctggcgtccttactcctgcagatcgtttacggtaactatgagagcaaaaagcacaaacagggattcctcaatgaagagaatctcaaatccatagtgcctgtaacaaagctgaagagtaaggcaccgcactggacaaatcgaatcctccacgagtataaaaatctctcaacttctgaaggagtgagcaaggagatgcatcacctgcagagaatgttcctgcagaattgctgggagataccaacatacggagccgcattctttaccgggcagatctttaccaaggcatcacctagtaaccacaaagtaattccagtgtacgtgggagttaacatcaaggggctgcacctgctgaacatggaaaccaaggcactcctgataagcctgaagtacgggtgcttcatgtggcagctcggcgataccgacacgtgttttcaaatccactcgatggaaaacaagatgtcgtttatcgtccataccaagcaagccggtctggtagtcaagctgctgatgaaactgaacgggcagctgatgccgacagagcgcaactcctag

SEQ ID NO: 307762 - DNA, 2211 bp, Artificial Sequence
  derived and/or modified sequence
atgggcaaccctgagaacattgaagacgcatatgttgccgtcatccgacccaaaaacaccgcctccctcaatagccgcgaatacagagctaagtcctacgagatccttctccacgaagtgccgatagagggccagaagaaaaagcggaaaaaagtgctgcttgaaacgaaactccaggggaacagtgagatcactcagggtatactcgactacgtcgtggagaccaccaagcctatcagcccggctaaccagggcatacgagggaagcgcgttgttctaatgaagaagttccctctggatggagagaagatggggagggaggcctcactgttcatagtgcctagtgtggttaaggataatactaaatacacgtatacacccggttgccctatcttctactgtctgcaggatatcatgcgggtttgttccgagtctagtacccatttcgcaaccttgacggcgcgaatgctgatcgctctagataaatggcttgacgagaggcatgctcagtctcatttcattcccgctctgttccgccctagtccccttgagcggatcaaaacaaatgtcattaacccagcttacgctaccgagagtgggcaaacggagaactctctgcacatgggctatagtgcattggaaatcaaaagtaagatgctggccctcgagaaggcagacacatgcatttataatccactttttggcagcgatctacaatataccaaccgtgtcgacaaggtggtcatcaacccctacttcgggctgggcgcacccgattattccaaaatacagattcccaagcaagagaaatggcaaaggagcatgtctagcgtgaccgaggataaagagaggcagtgggtggatgattttccgctccaccggtcagcttgcgagggcgacagtgaactactgagtagactgctgtctgaaaggttcagtgttaaccagttggactcggaccattgggcccctatccattatgcatgttggtatgggaaagtggaagcaacaagaatacttttagagaaaggcaagtgcaatccaaatttattgaatggccaactctcttcccctttgcattttgccgctggcggaggacacgcggaaatagtgcagatccttctgaatcatccggagacagatcgccatattacagaccaacagggcagaagccctctgaatatttgcgaggagaataagcagaacaactgggaagaggccgctaaactgctcaaagaggctatcaacaagccatatgagaaggttcggatctacagaatggacgggagctaccgtagcgtggagctaaagcatgggaataatacaaccgtccagcagatcatggaagggatgcggctctcacaagagacccagcagtattttaccatatggatctgttctgaaaatctgtcactccagctgaaaccataccataagccattgcagcatgtcagggattggcctgagattctcgccgagctgacaaatcttgaccctcagcgtgagaccccccagttatttctacgaagggacgttaggcttcctctggaggtggaaaagcagattgaggaccccctggccattctcatcctgtttgacgaagccaggtataatttgcttaagggtttttacacagcacctgacgctaagctcattactctagctagtctacttcttcaaatcgtgtatgggaactatgaaagcaaaaaacacaaacaggggttcttaaacgaagagaacctaaagtctatcgttcctgtcacaaagctgaagtcaaaggcaccgcactggacgaatcgaatcctccacgagtataaaaacctgagcactagcgaaggggtgtctaaagagatgcatcatctgcagcgtatgttcttgcaaaactgttgggaaatcccaacttacggggcagccttcttcactggacagatcttcacgaaagcttcgccaagcaaccacaaggtgatccctgtgtacgttggcgtcaacatcaaaggtctgcacctgctgaatatggaaacaaaagcattgcttatcagcctcaagtacggatgctttatgtggcaactcggggacactgatacgtgttttcaaattcactccatggaaaataagatgagcttcatcgttcataccaagcaggccggactggtggttaaactgctgatgaagctgaatgggcagttaatgcctactgaacgcaatagctag

SEQ ID NO: 307763 - DNA, 2211 bp, Artificial Sequence
  derived and/or modified sequence
atgggcaatcccgagaacatcgaggacgcctacgtcgcagttattcgtcctaagaataccgcgtccctgaattcccgcgaatatagggctaagtcgtatgaaattctcttgcacgaggtgcccatagagggacagaagaaaaagcggaagaaagtgctgctcgagactaagctgcagggcaattcggaaattactcaaggcatcctagattatgtggtggagacaacaaaaccgattagtcctgcaaaccaggggattcggggtaaacgggtcgtgctgatgaagaagtttcctcttgacggcgagaagatgggcagggaggcatctctttttattgtgccctctgtagtgaaggataataccaagtatacttataccccgggatgccccattttttactgcctgcaagacatcatgcgagtgtgctcggaatcatccacacattttgcgaccctgactgccaggatgctaatcgccctcgataaatggctggacgagcgacatgcccaaagtcactttatccccgctcttttcaggccttcgcccctagagcgcattaaaacaaacgtcatcaatcccgcatacgctactgagagtgggcaaactgagaactcccttcatatgggatacagcgcgctggaaataaagtccaaaatgttggcgctagagaaagcagacacctgtatctacaatcctttgttcgggtcagacctccagtatacaaatcgagtagacaaggtggtgattaacccctactttgggcttggtgcaccggattactctaaaatccagatccctaaacaggaaaaatggcagcgctccatgagttccgtgaccgaggataaggagcgccagtgggttgacgattttcccttacaccgaagtgcttgcgagggcgacagcgagctactgagtagattacttagtgagagattttctgtcaatcagttagacagcgaccactgggctcccatccactacgcgtgctggtacggcaaagtggaggctactagaatcttactcgagaaaggaaagtgcaacccgaacttgctaaacggacagctttcttcgcccctccattttgccgcagggggtgggcatgctgaaattgtgcagatcctgttgaaccacccagaaacagatcgccatatcaccgatcagcaggggagatcacctttgaatatctgtgaagagaataagcagaacaattgggaggaagcagctaagctgttaaaggaggccatcaacaagccatatgaaaaagtccgtatctaccgcatggatggcagctacagatccgtggagctaaaacatggaaacaacaccacagtacagcaaatcatggagggaatgagactgagccaggaaacacagcagtatttcacaatttggatctgctccgagaatctatcattacagctgaagccataccacaaacccctccagcacgtgcgcgattggcccgagattctagccgaactgactaatttggacccccagcgagagacccctcagctgttcctgcgtcgggacgtgcggctccccttggaggtcgagaagcagatcgaggaccctcttgcaatcctcatactctttgacgaggcaaggtacaacctgctcaagggcttttacactgcacccgacgccaagcttataacacttgccagcttgttactgcagatcgtctacgggaattatgagtccaagaaacacaagcaaggcttccttaacgaagaaaacctaaagagtatcgtcccagtgacaaaactgaagtcgaaggcccctcattggacaaatcgaatcttacacgaatataaaaaccttagcacctctgaaggggtgtctaaggagatgcaccacttacagaggatgtttctgcagaattgttgggagatccctacatatggggcagcttttttcaccgggcagatcttcaccaaagccagtccctccaaccacaaagtaattccggtgtatgtaggcgtgaatattaaaggactccacctcctgaacatggagacgaaggccctgctcatttcactgaagtacggatgcttcatgtggcaactcggagacactgacacctgttttcagatccactctatggagaataaaatgtctttcatcgtgcatacgaaacaagcgggattggtcgtcaagctactaatgaaattaaatggccagctcatgcctacagagcgtaacagttag

SEQ ID NO: 307764 - DNA, 2211 bp, Artificial Sequence
  derived and/or modified sequence
atgggtaatcctgagaatatcgaggacgcctacgtagcagttattaggccaaaaaatactgcatcactgaactccagggaatatagggctaagtcttatgaaatccttctgcacgaagtgcctatcgaagggcagaaaaagaaaaggaaaaaggtccttttggagacgaagctccaagggaattcggagattacccagggtatcctggattatgtggtggaaacaacgaagcctatttccccagcaaatcaaggaatcaggggtaagcgggtcgtcctaatgaagaagttcccactcgatggagagaagatgggcagagaagcttctctcttcatcgtgccaagcgtggtgaaggataatacaaaatatacatatacacccggatgtccaatcttttactgcttgcaagatattatgagagtatgctccgaatcatctacccacttcgccacccttactgcccgtatgctgatcgccctagacaagtggctggacgagcggcatgcccagagccactttatccctgcactctttcgacccagtccactggaacgcatcaagaccaatgtgatcaaccctgcctatgctacagagtccggtcagactgagaactcccttcacatgggttactcagcccttgagatcaagtccaaaatgctagcactggaaaaagcagatacatgcatctataaccccctttttggctctgatctgcaatatactaaccgggtagataaggtagtcataaacccgtatttcggcctgggcgcaccggattactccaagatacagattcccaagcaggagaaatggcaaaggtctatgtcctcagtgactgaggataaggaacggcaatgggttgacgacttccccctccatcgaagtgcttgtgaaggtgacagcgagctgctttctcgtctgctgtccgaacgtttcagtgtgaaccagctggacagcgatcattgggcccctatacactatgcatgctggtacggtaaggtggaggctacaagaatcttgctggagaagggtaaatgcaaccctaatctgctaaacggccagctgtcctctcccctgcacttcgctgccggaggagggcacgctgaaattgtgcagatccttctgaaccaccccgagaccgatcgccacatcactgaccaacagggacggtctccactgaatatctgtgaggagaacaaacagaacaactgggaggaggcggctaaactgctcaaggaggccatcaataagccttatgaaaaggttaggatttacaggatggatggctcttacaggtctgttgagctcaagcacgggaataacacgacagttcagcagattatggaagggatgagactcagtcaggagacgcagcaatactttaccatatggatatgcagcgagaatctgtccttacagctaaagccctaccacaaacctttgcagcacgtcagagattggcctgagattctggcggaactgaccaatttggatccacagagagagacaccccagctatttttgagaagagatgtgagactaccgctggaggtagagaaacagatagaggacccccttgccattctgatcctgtttgatgaagcacgctacaatctgctgaagggtttctatacggctccagatgccaagcttataacccttgcatctctcctgctgcaaatcgtctacggcaactatgaatctaaaaaacacaaacagggctttctgaacgaagaaaacctcaaatctatcgtgcccgttacaaagcttaagagcaaggcaccacattggaccaacaggatactccacgaatacaaaaacttgagtactagtgaaggcgtgagcaaagaaatgcatcacctccaacggatgttcctccagaactgctgggagattcctacctatggagccgcattctttaccgggcagatctttacaaaggcttccccatccaaccacaaggtgattccagtgtatgtcggggtgaacattaaagggctccatttgctcaatatggagacaaaggcgctgctcatttccctaaagtacggatgctttatgtggcaactgggggatacagacacatgcttccagattcacagtatggagaataaaatgtctttcattgttcacactaagcaggccggactggtggtgaagctgttaatgaaattgaatggacaactcatgccaaccgaaaggaatagctag

SEQ ID NO: 307765 - DNA, 1698 bp, Artificial Sequence
  derived and/or modified sequence
atgggaaatcctgaaaatattgaagacgcttatgtggccgttatcagaccaaaaaacaccgcctcactgaatagccgcgaatatcgggcaaaatcctacgaaattctgctccatgaggtacccattgaggggcagaaaaagaaaagaaaaaaagtgctgctcgagacaaagctgcagggcaatagcgaaatcacccagggaatcctggattacgtggtggaaacaactaaacccatatcccctgccaaccaaggaattagaggtaaaagagtggtactcatgaaaaaatttcctttagacggcgagaaaatgggccgtgaggcttcgttgttcatcgtacccagcgtcgtgaaagataacaccaagtatacatatacgcccggttgcccaatattctattgtcttcaggacatcatgcgggtatgttcagagtcctctacccattttgctactttgactgcccgaatgctcatagctctggacaagtggttggatgagcgacacgcccaaagtcacttcattcctgcactgtttcgtccaagcccattagaaagaatcaaaaccaacgtcattaatcctgcctacgccacagaatcaggccaaaccgagaacagtttgcacatgggatattccgctctcgagatcaaatccaagatgctggcactggagaaagcggatacatgcatatataacccactgtttgggagcgatcttcagtacaccaatcgtgtagacaaagtggttataaatccctactttggtttgggcgctcctgattactcgaagatccagatccccaagcaagaaaagtggcagcggagcatgtcttctgtgacggaggataaggagcgccaatgggtggacgactttcccctccacagatcagcctgcgagggagactctgagttgctctcgaggttactgtccgaacggtttagcgtcaaccagcttgatagcgatcattgggcaccgattcattatgcctgttggtatggaaaggtggaggccaccaggatcctcttggaaaaaggcaagtgcaacccgaacctgttaaatggtcagttatcctctcccctgcattttgcagcagggggaggtcacgctgagattgttcagattcttttgaaccaccctgaaacagaccgccatattacagatcagcagggcagaagccccctgaacatctgtgaagagaacaagcagaataattgggaagaggctgccaagctgctgaaggaggcaattaataagccttacgagaaggtgcggatttatcgtatggatggaagctataggagtgtcgagctgaagcacggcaacaacaccacggtgcagcagattatggaagggatgagactgagtcaagagactcagcaatattttactatttggatttgtagcgagaatttatccctccagctcaagccctaccataagcctctgcagcacgtccgcgactggcccgaaatattggcagagctgacaaacctggacccacagagggagaccccccaactcttccttagacgggacgttcgcctcccacttgaagtcgagaagcaaatcgaagatcctttggctatcctgatcttgttcgatgaagctcgatataacctccttaagggcttttacactgcacctgatgctaaattgattactttggcttcccttttactgcaatctctctggaagttgtag

SEQ ID NO: 307766 - DNA, 78 bp, Artificial Sequence
  derived and/or modified sequence
atgggaaacccggagaacatcgaggacgcttacgtggctgtgattcgtccaaagaatacagcttctctgaattcatag

SEQ ID NO: 307767 - DNA, 39 bp, Artificial Sequence
  derived and/or modified sequence
atgggtaatcctgagaacatcgaggatgcctatgtctag

SEQ ID NO: 307768 - DNA, 117 bp, Artificial Sequence
  derived and/or modified sequence
atgggcaatcctgaaaatatcgaagacgcctacgtggctgtgatcaggcctaaaaatacagcctccctcaattcacgggaatatcgggctaaaagctatgaaatcttactacattag

SEQ ID NO: 307769 - DNA, 105 bp, Artificial Sequence
  derived and/or modified sequence
atgggaaacccagagaacatcgaagacgcttacgtggctgtcattagacccaaaaacaccgcttcgctgaactctcgggagtaccgagcgaagtcatacgagtag

SEQ ID NO: 307770 - DNA, 2211 bp, Artificial Sequence
  derived and/or modified sequence
atggggaaccctgaaaacattgaggacgcatacgtggctgtcatccggcctaaaaacactgcctccttaaatagccgcgaatatcgtgccaaatcctatgagattctcctccatgaagtgccgattgaaggccagaagaagaagcgtaaaaaagtcctcctcgagactaagctccaggggaattccgagatcacacaagggatcctggactatgtcgtcgaaactactaaacccatctcgcccgccaatcagggaattcgagggaaaagagtagtcctcatgaagaaattccccctggatggcgaaaaaatgggacgggaggcgagcttgtttatcgtgcccagcgtcgtcaaggacaacacgaaatacacgtacacgcctggttgccccatcttttattgtctccaagatataatgagggtgtgttccgagtcctctacccacttcgcgaccctgacagcgaggatgttaattgctctggataaatggctggacgaacgccatgcacagtcacacttcatcccagctctgttccgcccctctcctttagagcggattaagactaacgttattaatcctgcatatgcaacagagagtggacaaacagaaaatagtctacacatgggatactccgccctcgagattaaatctaagatgttagcactcgaaaaagccgacacatgcatctacaatcccctgtttggttcagatctgcagtacaccaatagggtggataaggtggtaatcaatccatactttggcctgggggctcctgattactccaaaatccagatccctaaacaggagaagtggcagcggtccatgtcttcagttaccgaagataaagagagacaatgggttgacgactttccccttcatcgatcagcttgcgaaggagattctgaactgctgagcagactcttgagcgagcgtttctcagtgaatcagctcgactccgatcactgggctcctatacactacgcatgttggtacggcaaggtcgaggcaacgaggattttactggaaaaagggaagtgcaatcccaaccttctgaacggccagctgagctcaccactccacttcgccgcaggaggcggtcacgctgagattgtgcaaattctattgaatcatccggagacggatcggcacatcaccgatcaacaaggaagaagcccactgaacatctgcgaagagaacaaacagaacaactgggaagaggccgcaaaactgctgaaggaggcgatcaacaaaccgtacgagaaagttcgaatctatcgcatggacgggtcttaccgctccgtcgagttgaaacatggtaacaatacaacagtgcagcaaatcatggagggcatgcgacttagtcaagaaacccaacagtatttcactatttggatctgttcggaaaatttatctctccaactcaaaccataccacaaaccattacagcacgtgcgagactggccggaaattttggcagagctcacgaatctggatcctcagagagaaacccctcagctattcctcagaagggacgtccggctccctttggaggtcgaaaaacagatcgaagatccattagcgattctgatcctgttcgacgaggctcgttataatctcctgaagggcttttataccgccccagacgccaaattaatcacacttgcatcgctcctgctccagatcgtgtacggaaactatgagtcgaagaagcataagcaggggtttctgaacgaggagaatctcaagagcatcgtccccgtgaccaagctgaagtccaaggctccacactggacaaatcgaatcttacacgaatataagaacttatcaacatcggaaggcgtcagcaaggaaatgcaccaccttcaaaggatgttcctgcagaactgctgggagatccccacttacggcgcagctttctttacagggcagatctttaccaaggcgtctcctagtaaccacaaggtgatcccggtatatgtgggcgttaatatcaaagggctgcacttgctgaacatggagacgaaggccctgcttatttcgttgaagtatggatgcttcatgtggcaacttggggatacagatacatgcttccaaatccacagcatggagaataagatgagttttatagtccacactaagcaagctggactggtcgtgaaattgttgatgaagctcaatggccagctcatgcctacggaacggaattcgtag

SEQ ID NO: 307771 - DNA, 2211 bp, Artificial Sequence
  derived and/or modified sequence
atgggcaaccccgagaacatcgaggacgcctacgtggccgtgatcagacccaaaaacactgcatccctgaactccagagaatatcgcgctaagagttatgagattctgttgcatgaggttcctatagaaggccagaaaaaaaaacgcaagaaggttttgctggagactaagctgcaagggaactctgaaattacccagggcatactcgactacgtggtcgagacaacgaaacccatctctccagccaaccaaggcatcagaggcaagagggttgtgctgatgaaaaaattcccattagatggcgaaaaaatgggccgcgaggccagcttatttatcgtgccctccgtagtaaaggacaacaccaagtatacctacacacccggatgcccgatcttttactgtctgcaggacatcatgcgcgtgtgtagtgaaagctccactcatttcgcaacacttaccgcccgcatgctaatcgccctagacaagtggctggatgaaagacatgcgcaatcccatttcattccggctctgttcagaccttcaccgctcgagcggatcaaaaccaacgtgatcaatccggcttacgcaaccgaaagtgggcagaccgagaatagtctgcacatgggctattccgctctggaaatcaagtctaagatgctggctttagaaaaagcggacacctgtatatataaccccctgtttgggagcgatttgcaatatacaaatagagttgataaagtcgtgatcaacccgtacttcggcctcggggccccagactacagcaagattcagatccctaaacaggagaaatggcagcgcagcatgagctctgtgaccgaagataaggaacggcagtgggtggacgacttcccgttgcatcggtcagcctgcgagggagatagcgagctgctgtcgaggctgctgtccgagagattctccgttaatcagctagattctgaccattgggcaccaattcattacgcttgttggtacgggaaggtagaagccacccgcatcctactggagaaaggcaaatgcaacccaaacctgctgaacggccagctgagctcgcctttgcatttcgctgctggaggaggccacgccgagatagtgcaaattctgctgaatcatcctgaaactgatagacacattacagatcagcagggacggtcccccttgaacatttgcgaagagaataagcagaataattgggaagaggccgcaaagttactcaaggaagccattaacaaaccctacgagaaggttcggatatatcgaatggacggcagctaccgcagtgtggagctaaagcacggcaataacaccaccgtccagcaaatcatggagggaatgcggctgtctcaggaaactcagcagtactttactatctggatctgctctgagaatttatcactgcaactaaagccttatcacaaaccattgcagcacgtacgggactggcccgaaattctggcagagctgacaaatctggacccacagcgagaaactcctcaattgtttctgaggcgggacgtgcgactccctctggaggtggagaaacagattgaagatccacttgccatcttgatcttgttcgacgaagctcgctataatctattgaaggggttctataccgccccagatgcgaagctaattactctggcctctttgttattgcagatcgtatatggtaactacgagtcaaagaaacacaaacaggggttcttgaacgaggaaaacctgaaaagcattgtcccagtgacaaaactcaagagcaaggcgccgcattggactaatcggatacttcatgaatacaaaaacttaagcacaagcgagggggtgtccaaggaaatgcaccacctccagcggatgtttctacaaaattgttgggagattcctacatatggagcagccttcttcacgggccagattttcacaaaagcatcccccagtaatcacaaggttatcccagtttatgtcggcgtcaacattaaagggctgcacttattgaacatggagacaaaggcactgctgatcagcctcaagtatgggtgttttatgtggcagcttggagatacagacacatgtttccaaattcactcaatggagaacaagatgagcttcatcgtgcatacgaaacaggcagggctggtcgttaaactcctgatgaaactgaacggccagcttatgcccacggagcggaattcctag

SEQ ID NO: 307772 - DNA, 2211 bp, Artificial Sequence
  derived and/or modified sequence
atgggcaacccagagaatattgaggacgcttatgtggcggtcatcaggcctaagaacacagccagcctgaactccagagagtatcgcgcaaaaagttatgaaatcttgttgcacgaggttcctatcgagggtcagaaaaaaaaaaggaagaaagtgttgcttgagaccaaactgcaggggaactctgagatcacacaaggtatacttgactacgtggtagaaactaccaagccaatcagcccagcaaatcagggtattagaggaaagcgggtggtcctgatgaagaagtttccactcgacggagagaagatgggaagagaggcatccctgtttattgttccctccgtggtcaaggacaacacaaaatatacctatactcccggatgcccaatcttctattgcctccaggatatcatgagggtttgctctgagagttcaactcatttcgctaccctgactgcacgcatgttgattgcgctggacaagtggctcgatgagaggcacgctcagtcccactttatcccggctttatttagaccttctcctttggaaaggatcaagacaaacgttatcaatcccgcatacgctactgaatccggacagaccgaaaactccctacatatgggatacagtgcactggagattaaaagtaagatgctcgcactggagaaagctgatacctgcatatacaatcccctgtttgggtctgacctacaatatactaatcgggttgacaaagtcgtcatcaacccctacttcggcctgggagcgccagattacagtaagattcagatcccgaagcaggagaaatggcaaagatccatgtcttcagtgacagaagataaggagagacagtgggtggacgactttccactgcaccgctctgcttgtgagggggactccgaactgctcagtcggttattgagcgagcggttttcggtcaaccagctggattctgaccactgggcccctatccactacgcatgctggtacgggaaagtagaagccactagaatactgttagaaaagggaaaatgcaatccgaatctgttaaatggacagctctcctcgccattgcacttcgcagccggtggcggacatgcagaaatagtgcagatactcctcaatcacccagagacggatcggcacataaccgatcagcaggggcgaagccccctgaacatctgcgaggagaacaaacagaataattgggaggaagctgccaagctactaaaggaagcaatcaacaagccatatgaaaaagtgagaatttaccggatggacggtagctacaggtctgtagagctgaagcacggcaacaataccaccgtccagcagattatggagggcatgcgtctgtcacaggagacacagcagtattttactatctggatctgtagcgagaacttatcactgcagctcaaaccttatcacaagccgcttcagcacgtgagagactggccagagattctggccgagctcaccaacctggacccacagagggagacacctcagctattcctgcggagggatgtccgcctgcccctggaggtagagaaacaaattgaggatcccttagccatcctaatcctgttcgatgaggccagatataacctattaaagggattctacaccgcacccgacgccaagcttataacactggcgtctcttcttctgcaaattgtctatggtaactacgagagtaagaaacacaagcagggatttctgaacgaagagaatcttaaatccatagttccagtgaccaagctgaagagtaaggcaccccactggactaatcggatcctgcacgagtacaagaatctctctaccagcgagggcgtgtcaaaggagatgcatcacctgcagcggatgtttctgcaaaattgctgggaaattccaacgtacggcgcagccttctttacagggcagatattcaccaaagcctcacctagcaatcacaaggtgatccccgtctacgtgggtgtgaacatcaaaggactgcacctccttaatatggaaaccaaagcattgctcatatcactgaagtacgggtgcttcatgtggcagctcggggacactgatacatgttttcaaatacactcaatggagaacaagatgagctttatcgtccacacaaagcaggccggactggtggtgaaactcctgatgaagctgaacgggcagttaatgcctacggagcggaacagctag

SEQ ID NO: 307773 - protein, 471 aa, Artificial Sequence
  derived and/or modified sequence
MQLPRWWELGDPCAWTGQGRGTRRMSPATTGTFLLTAFLLSCADGINGTVNWKTRQANNFIISRKMAAGMKDVYSIFSKVHSDRNVYPSAGVLFVHVLEREYFKGEFPPYPKPGEISNDPITFNTNLMGYPDRPGWLRYIQRTPYSDGVLYGSPTAENVGKPTIIEITAYNRRTFETARHNLIINIMSAEDFPLPYQAEFFIKNMNVEEMLASEVLGDFLGAVKNVWQPERLNAINITSALDRGGRVPLPINDLKEGVYVMVGADVPFSSCLREVENPQNQLRCSQEMEPVITCDKKFRTQFYIDWCKISLVDKTKQVSTYQEVIRGEGILPDGGEYKPPSDSLKSRDYYTDFLITLAVPSAVALVLFLILAYIMCCRREGVEKRNMQTPDIQLVHHSAIQKSTKELRDMSKNREIAWPLSTLPVFHPVTGEIIPPLHTDNYDSTNMPLMQTQQNLPHQTQIPQQQTTGEC

SEQ ID NO: 307774 - protein, 1662 aa, Artificial Sequence
  derived and/or modified sequence
AVSVPWCYYSKNHSYHVEGNLVNTNAGFTARLKNLPSSPVFGSNVDNVLLTAEYQTSNRFHFKLTDQTNNRFEVPHEHVQSFSGNAAASLTYQVEISRQPFSIKVTRRSNNRVLFDSSIGPLLFADQFLQLSTRLPSTNVYGLGEHVHQQYRHDMNWKTWPIFNRDTTPNGNGTNLYGAQTFFLCLEDASGLSFGVFLMNSNAMEVVLQPAPAITYRTIGGILDFYVFLGNTPEQVVQEYLELIGRPALPSYWALGFHLSRYEYGTLDNMREVVERNRAAQLPYDVQHADIDYMDERRDFTYDSVDFKGFPEFVNELHNNGQKLVIIVDPAISNNSSSSKPYGPYDRGSDMKIWVNSSDGVTPLIGEVWPGQTVFPDYTNPNCAVWWTKEFELFHNQVEFDGIWIDMNEVSNFVDGSVSGCSTNNLNNPPFTPRILDGYLFCKTLCMDAVQHWGKQYDIHNLYGYSMAVATAEAAKTVFPNKRSFILTRSTFAGSGKFAAHWLGDNTATWDDLRWSIPGVLEFNLFGIPMVGPDICGFALDTPEELCRRWMQLGAFYPFSRNHNGQGYKDQDPASFGADSLLLNSSRHYLNIRYTLLPYLYTLFFRAHSRGDTVARPLLHEFYEDNSTWDVHQQFLWGPGLLITPVLDEGAEKVMAYVPDAVWYDYETGSQVRWRKQKVEMELPGDKIGLHLRGGYIFPTQQPNTTTLASRKNPLGLIIALDENKEAKGELFWDNGETKDTVANKVYLLCEFSVTQNRLEVNISQSTYKDPNNLAFNEIKILGTEEPSNVTVKHNGVPSQTSPTVTYDSNLKVAIITDIDLLLGEAYTVEWSIKIRDEEKIDCYPDENGASAENCTARGCIWEASNSSGVPFCYFVNDLYSVSDVQYNSHGATADISLKSSVYANAFPSTPVNPLRLDVTYHKNEMLQFKIYDPNKNRYEVPVPLNIPSMPSSTPEGQLYDVLIKKNPFGIEIRRKSTGTIIWDSQLLGFTFSDMFIRISTRLPSKYLYGFGETEHRSYRRDLEWHTWGMFSRDQPPGYKKNSYGVHPYYMGLEEDGSAHGVLLLNSNAMDVTFQPLPALTYRTTGGVLDFYVFLGPTPELVTQQYTELIGRPVMVPYWSLGFQLCRYGYQNDSEIASLYDEMVAAQIPYDVQYSDIDYMERQLDFTLSPKFAGFPALINRMKADGMRVILILDPAISGNETQPYPAFTRGVEDDVFIKYPNDGDIVWGKVWPDFPDVVVNGSLDWDSQVELYRAYVAFPDFFRNSTAKWWKREIEELYNNPQNPERSLKFDGMWIDMNEPSSFVNGAVSPGCRDASLNHPPYMPHLESRDRGLSSKTLCMESQQILPDGSLVQHYNVHNLYGWSQTRPTYEAVQEVTGQRGVVITRSTFPSSGRWAGHWLGDNTAAWDQLKKSIIGMMEFSLFGISYTGADICGFFQDAEYEMCVRWMQLGAFYPFSRNHNTIGTRRQDPVSWDAAFVNISRNVLQTRYTLLPYLYTLMQKAHTEGVTVVRPLLHEFVSDQVTWDIDSQFLLGPAFLVSPVLERNARNVTAYFPRARWYDYYTGVDINARGEWKTLPAPLDHINLHVRGGYILPWQEPALNTHLSRKNPLGLIIALDENKEAKGELFWDDGQTKDTVAKKVYLLCEFSVTQQVVFLNIVFN

SEQ ID NO: 307775 - DNA, 558 bp, Artificial Sequence
  derived and/or modified sequence
atggcaagaaagaagctcaagaagtttacaaccttagaaattgtcctatccgtgctgctgctggtgttattcataatttccattgtcctgattgtattattagctaaggaatccctgaaatccaccgccccagaccccgggactaccgggacaccagaccccgggacaacggggacacctgaccccggaaccactggcaccacccatgctcgcaccacaggaccacccgaccctggaactaccggcaccaccccggttagcgcagagtgcccagtggtaaacgaattagagcgaatcaattgcatcccagatcaaccaccaacaaaagctacatgcgatcagcgagggtgctgttggaacccacagggcgccgtctctgtgccctggtgctattattcaaaaaaccactcttatcacgtggagggcaacttagtgaataccaatgctggattcactgcaaggctgaaaaacctaccaagctcaccagtatttggaagcaacgtggataatgttctgctcaccgccgagtaccagacttcaaacaggtttcatttttag

SEQ ID NO: 307776 - DNA, 4989 bp, Artificial Sequence
  derived and/or modified sequence
gctgtctctgtgccctggtgctactactccaaaaatcactcctatcacgtcgagggcaacctggttaataccaatgctggcttcacagctaggttaaaaaatctcccaagctccccggtgtttggatctaatgttgacaacgtgctgctcactgcagaataccaaacatctaaccgcttccacttcaaacttaccgatcaaaccaacaatcggttcgaggttccccacgagcacgtacagtctttctcaggaaatgccgcggcctctttgacctaccaagtcgaaatctctagacagccattcagtatcaaagttaccaggagatccaataaccgggttctgtttgatagctcaataggtcccctactgtttgcagatcagttcctccagctttctacgcgcctgccgtccactaacgtttatggccttggcgagcacgtgcaccagcaatacagacatgatatgaactggaaaacatggcctatctttaatcgggacacaacccccaatggtaacgggaccaatctctacggagctcagaccttcttcctgtgtctggaggatgcctccggactgtcctttggcgtgttcctaatgaattctaacgccatggaggtggtgctgcagccggccccagccatcacctatagaactattggagggattctggacttttacgtttttctcggcaatacccccgagcaggtcgtccaggagtacctcgaactgattggacgcccagctctgccatcttactgggcactcggctttcacttaagcagatatgaatacggaacgttggacaacatgcgggaggttgtggaacgcaaccgcgccgcacagttaccgtacgacgtgcagcacgccgatatcgactacatggatgagcgaagggacttcacttatgacagtgtggattttaaaggctttcctgagtttgtgaatgagttgcacaataacggccagaaactcgtgataatagtggaccctgctatctcaaacaactcaagctcttcaaagccctacgggccgtacgaccgcggctccgatatgaagatatgggtgaatagtagcgatggagttactccactgatcggggaagtgtggcccggtcagaccgtgttccccgactataccaaccccaactgcgctgtctggtggaccaaggagttcgaactgtttcacaatcaagtggagttcgatggcatttggatcgacatgaacgaagtaagtaacttcgtggacggctccgtctccggctgttccactaacaacctcaacaatcctccattcacccctcggatcctcgacggctatctcttctgtaaaaccctttgcatggacgctgtccaacattggggcaagcagtacgatattcataatctgtacggctacagcatggcagtggcaaccgcggaggcagccaagacagtttttccaaacaaacggagtttcattttaacgaggtctaccttcgctggcagcgggaagttcgccgcacactggctaggagataacacagctacctgggatgacctccgatggtctattccaggcgtccttgagtttaacctcttcggcattcctatggtgggaccagatatttgtggcttcgccctagacacacccgaggaattgtgtaggcggtggatgcagctgggagctttttatcccttcagccggaatcataacgggcaaggttacaaagaccaggacccggcctcattcggcgctgattccttattacttaattctagtcgacactacctgaacattagatacaccctgcttccgtacttatacaccctctttttccgagcacactcccgaggggatacagtggcgaggccacttctgcatgaattttacgaagataattccacctgggacgtgcatcagcaattcctgtggggaccagggctgctcatcacccccgtcctagatgagggtgccgagaaagttatggcctacgtccccgacgcagtatggtatgattacgagacaggatcccaggtgagatggcggaagcagaaggttgaaatggagctgccgggagacaagatcggccttcatttgcggggcgggtatattttcccaactcaacagcccaacactaccactctggcatccaggaaaaacccactgggtctaataattgccctggacgagaacaaggaggcgaaaggggaattattctgggataacggggagacgaaggacactgtcgccaataaagtatacttgctttgtgagttctcagttacccagaacagacttgaggtgaacatcagccaatccacgtataaagaccctaataacctggctttcaatgaaatcaagatcttgggtacagaggaaccctccaatgtgactgtgaagcataatggggttccttcacaaacctcacccacagtcacatacgattccaacttaaaagtggctattattaccgacattgacctgcttctaggtgaagcgtacaccgtcgagtggagcattaagataagggatgaagagaagatcgactgctacccagatgagaatggggctagcgctgagaattgtaccgctcggggctgcatctgggaggcaagcaattctagcggggttcccttctgctattttgtcaatgacctatactccgtgagcgacgtgcaatacaattctcatggagcaaccgcggacatctccttgaagtcttccgtttatgcaaacgcattcccttccacacccgtgaatcctctgcgcctcgatgtcacctaccataagaacgagatgttgcagtttaagatttacgatcccaataagaatcgttatgaagtgccggtcccattaaatatcccctctatgcctagtagcactcccgagggccaactctatgacgtgctcatcaagaaaaaccctttcggcatcgaaataagacgtaaatccacagggaccatcatttgggacagtcagctgctgggctttaccttctcagacatgtttatcaggattagcaccaggctgccttcaaaatacctgtacggcttcggcgagactgagcaccggagttacaggcgggatttggagtggcacacttggggtatgttctcccgcgaccagcctcctgggtataagaaaaacagttatggagtccacccttactatatgggactcgaagaagatggttctgcacatggggttcttcttttgaatagcaatgcaatggacgtgacttttcaacccctgcccgctctcacctaccggacaacaggcggtgtcctcgatttttatgtctttttaggcccgactcccgagctggtcacccaacagtacaccgagctgattggtcgtccagtgatggtgccatattggtcactggggtttcaactttgtcgatacggctaccaaaacgattccgagattgcaagtctgtatgatgagatggtggctgctcagattccctatgatgtgcaatattccgatatcgattatatggagcggcagctggattttactctttccccaaagtttgcaggatttcccgcactaatcaacagaatgaaggcagacggcatgagagtgatcctgatcctagatcccgccatctcaggaaacgaaacccagccttaccccgcatttacccggggggtcgaggacgacgttttcatcaagtatccaaatgatggggatattgtttggggcaaggtctggcctgactttcctgatgtggtggtaaacggatcccttgattgggactcgcaggtggagctgtacagggcctacgtggcatttcccgatttttttcggaatagcacggccaagtggtggaaacgggagatcgaggagttgtacaacaaccctcagaaccccgagcggtcccttaagtttgatggcatgtggatagatatgaacgaaccgagctctttcgtaaatggcgcagtctcaccaggttgcagagatgcatctttgaatcatccaccttacatgccccacctggaaagcagagacaggggactctcctccaagacactttgtatggaaagccagcagatcttaccggacggttccttggttcaacactataacgtgcataacctgtacgggtggagtcagactaggcctacctacgaagctgtgcaggaagtgaccggtcagcggggggttgttatcaccaggagtacgtttccctcgtcgggacgctgggccggtcactggcttggggacaataccgcagcctgggatcagctgaagaaatctattataggaatgatggaattctccctcttcggaataagctacactggggccgatatctgtgggttctttcaggatgccgagtacgagatgtgtgttaggtggatgcaactcggagccttttatccattctcaagaaaccacaacactatcgggactcggaggcaggaccctgttagttgggatgctgcttttgtgaacatttcccggaacgttctgcagactcgatataccctgctcccttatctgtacaccctcatgcaaaaggcacataccgaaggtgtcacagtggttcggccccttttgcatgaattcgtttccgatcaggttacctgggatattgattcccagtttttgctgggcccagctttcttggttagtcctgttttggaacgcaatgcacgcaacgtgactgcttatttcccaagagcccggtggtatgactattacacaggggtcgacataaacgccaggggcgagtggaagacactccccgctcctctggaccacattaacctgcatgtgaggggtggatatatacttccttggcaagagccggcgctcaatactcacttgtccagaaagaacccattagggctcataattgctcttgacgaaaacaaagaagcgaagggagaactcttctgggatgatggccagactaaggataccgtggcgaaaaaggtgtaccttctgtgcgaattttccgttactcaacaggtagtgttcctcaatatcgtgttcaactag

SEQ ID NO: 307777 - DNA, 558 bp, Artificial Sequence
  derived and/or modified sequence
atggccaggaagaagctgaagaagttcaccaccctggagatcgtgctgtctgtgctgctgctggtgctcttcatcatcagcatcgtgctgattgtgctgctggccaaggagagcctgaagagcacagccccagaccccggcaccaccggcaccccagaccccggcaccaccggcaccccagaccccggcaccaccggcaccacccacgcccggaccactggacctccagaccccggcaccaccggcaccacccctgtgtctgcagaatgtcctgtggtgaatgagctggagcgcatcaactgcatcccagaccagccccccaccaaggccacctgtgaccagaggggctgctgctggaacccccagggcgctgtgtctgtgccctggtgctactacagcaagaaccacagctaccacgtggagggcaacctggtgaacaccaatgccggcttcaccgcccggctgaagaacctgcccagcagccctgtgtttggcagcaatgtggacaacgtgctgctgacagctgagtaccagaccagcaaccgcttccacttctag

SEQ ID NO: 307778 - DNA, 4989 bp, Artificial Sequence
  derived and/or modified sequence
gctgtgtctgtgccctggtgctactacagcaagaaccacagctaccacgtggagggcaacctggtgaacaccaatgccggcttcaccgcccggctgaagaacctgcccagcagccctgtgtttggcagcaatgtggacaacgtgctgctgacagctgagtaccagaccagcaaccgcttccacttcaagctgacagaccagaccaacaacagatttgaggtgccccatgagcacgtgcagagcttctctggaaatgctgctgccagcctgacctaccaggtggagatcagccggcagcccttcagcatcaaggtgaccaggaggagcaacaacagagtgctgtttgacagcagcatcggccccctgctgtttgctgaccagttcctgcagctgagcacccggctgcccagcaccaacgtgtatggcctgggggagcacgtgcaccagcagtacagacatgacatgaactggaagacctggcccatcttcaacagagacaccaccccaaatggaaatggcaccaacctgtatggagcccagaccttcttcctgtgcctggaggatgccagcggcctgagctttggagtcttcctgatgaacagcaatgccatggaggtggtgctgcagcctgccccagccatcacctaccgcaccatcggcggcatcctggacttctacgtgttcctgggcaacaccccagagcaggtggtgcaggagtacctggagctgattggccgcccagccctgcccagctactgggccctgggcttccacctgagccgctatgaatatggcaccctggacaacatgagggaggtggtggagaggaacagagctgcccagctgccctatgatgtgcagcacgccgacatcgactacatggatgaaagaagagacttcacctatgacagcgtggacttcaagggcttccctgagtttgtgaatgagctgcacaacaacggccagaagctggtgatcatcgtggaccctgccatcagcaacaacagcagcagcagcaagccctacggcccctatgaccggggcagtgacatgaagatctgggtgaacagcagtgatggagtgacccccctgattggagaggtgtggccaggccagacagtgtttcctgactacaccaaccccaactgtgctgtgtggtggaccaaggagtttgagctgttccacaaccaggtggagtttgatggcatctggattgacatgaatgaggtgagcaactttgtggatggctctgtgtctggctgcagcaccaacaacctgaacaacccccccttcaccccccgcatcctggatggctacctgttctgcaagaccctgtgcatggatgctgtgcagcactggggcaagcagtatgacatccacaacctgtatggctacagcatggctgtggccacagctgaggccgccaagacagtgttccccaacaagaggagcttcatcctgaccaggagcacctttgctggcagcggcaagtttgctgcccactggctgggggacaacacagccacctgggatgacctgcgctggagcatccctggggtgctggagttcaacctgtttggcatccccatggtgggccctgacatctgtggctttgccctggacaccccagaggagctgtgccgccgctggatgcagctgggcgccttctaccccttcagcaggaaccacaacggccagggctacaaggaccaggaccctgccagctttggagctgacagcctgctgctgaacagcagccgccactacctgaacatccgctacaccctgctgccctacctgtacaccctcttcttccgggcccacagcagaggagacacagtggcccggcccctgctgcacgagttctatgaggacaacagcacctgggatgtgcaccagcagttcctgtggggccctggcctgctgatcacccctgtgctggatgagggcgctgagaaggtgatggcctacgtgcctgatgctgtgtggtatgactatgagaccggcagccaggtgcgctggaggaagcagaaggtggagatggagctgcccggggacaagattggcctgcacctgcggggcggctacatcttccccacccagcagcccaacaccaccaccctggccagcaggaagaaccccctgggcctcatcatcgccctggatgagaacaaggaggccaagggggagctgttctgggacaatggagagaccaaggacacagtggccaacaaggtgtacctgctgtgtgagttctctgtgacccagaaccggctggaggtgaacatcagccagagcacctacaaggaccccaacaacctggccttcaatgagatcaagatcctgggcacagaggagcccagcaatgtgacagtgaagcacaatggagtgcccagccagaccagccccaccgtgacctatgacagcaacctgaaggtggccatcatcacagacatcgacctgctgctgggggaggcctacacagtggagtggagcatcaagatcagagatgaggagaagattgactgctacccagatgaaaatggagccagcgctgagaactgcacagcccggggctgcatctgggaggccagcaacagcagcggcgtgcccttctgctactttgtgaatgacctgtacagcgtgtctgatgtgcagtacaacagccacggggccacagctgacatcagcctgaagagctctgtgtatgccaatgccttccccagcacccctgtgaaccccctgcggctggatgtgacctaccacaagaatgagatgctgcagttcaagatctatgaccccaacaagaacagatatgaggtgcctgtgcccctgaacatccccagcatgcccagcagcaccccagagggccagctgtatgatgtgctgatcaagaagaacccctttggaattgagatccggaggaagagcacaggcaccatcatctgggacagccagctgctgggcttcaccttcagtgacatgttcatccgcatcagcacccggctgcccagcaagtacctgtatggctttggagaaacagagcacaggagctaccgccgggacctggagtggcacacctggggcatgttcagccgggaccagcccccaggctacaagaagaacagctatggagtgcacccctactacatgggcctggaggaggatggcagcgcccacggcgtgctgctgctgaacagcaatgccatggatgtgaccttccagcccctgcctgccctgacctaccgcaccactggaggagtgctggacttctacgtgttcctgggccccaccccagagctggtgacccagcagtacacagagctgattggccggcctgtgatggtgccctactggagcctgggcttccagctgtgccgctatggctaccagaatgacagcgagatcgccagcctgtatgatgagatggtggccgcccagatcccctatgatgtgcagtacagcgacatcgactacatggagcggcagctggacttcaccctgagccccaagtttgctggcttccctgccctgatcaacaggatgaaggcagatggcatgagggtcatcctgatcctggaccctgccatctctggaaatgagacccagccctacccagccttcacccggggcgtggaggatgatgtgttcatcaagtacccaaatgatggagacatcgtgtggggcaaggtgtggccagacttcccagatgtggtggtgaatggcagcctggactgggacagccaggtggagctgtaccgggcctacgtggccttcccagacttcttcaggaacagcacagccaagtggtggaagcgggagattgaggagctgtacaacaacccccagaaccctgagaggagcctgaagtttgatggcatgtggattgacatgaatgagcccagcagctttgtgaatggagctgtgtccccaggctgcagagatgccagcctgaaccaccccccctacatgccccacctggagagccgggaccggggcctgagcagcaagaccctgtgcatggagagccagcagatcctgcctgatggcagcctggtgcagcactacaacgtgcacaacctgtatggctggagccagacccggcccacctatgaagctgtgcaggaggtgacaggccagaggggcgtggtgatcaccaggagcaccttccccagcagcggccgctgggccggccactggctgggggacaacacagctgcctgggaccagctgaagaagagcatcatcggcatgatggagttcagcctgtttggcatctcctacacaggagctgacatctgtggcttcttccaggatgctgaatatgagatgtgtgtgcgctggatgcagctgggcgccttctaccccttcagcaggaaccacaacaccatcggcacccggcggcaggaccctgtgtcctgggatgctgcctttgtgaacatcagcagaaatgtgctgcagacccgctacaccctgctgccctacctgtacaccctgatgcagaaggcccacacagaaggagtgacagtggtgcggcccctgctgcacgagtttgtgtctgaccaggtgacctgggacatcgacagccagttcctgctgggccctgccttcctggtgtcccctgtgctggagagaaatgccagaaatgtgacagcctacttcccccgggcccgctggtatgactactacacaggagtggacatcaatgcccggggggagtggaagaccctgcctgcccccctggaccacatcaacctgcacgtgcggggcggctacatcctgccctggcaggagcccgccctgaacacccacctgagcaggaagaaccccctgggcctcatcatcgccctggatgagaacaaggaggccaagggggagctgttctgggatgatggccagaccaaggacacagtggccaagaaggtgtacctgctgtgtgagttctctgtgacccagcaggtggtgttcctgaacatcgtgttcaactag

SEQ ID NO: 307779 - DNA, 790 bp, Artificial Sequence
  derived and/or modified sequence
gggttaacactgggaaataaaaacttcccacccacttcttgcaggaggctgtgtggttaaatcctgttacattatacttcagctcttaccatggccttgtcattgggttgaactggagctgtattttagattttgccaacaataacaagcgctgccaagtacttcagctgagatcacccaaataatactctactagcaaaagctttgcgtggcgttctaaccatcagaaactgagatggcaagaaagaagctgaaaaaatttactactttggagattgtgctcagtgttcttctgcttgtgttgtttatcatcagtattgttctaattgtgcttttagccaaagagtcactgaaatcaacagccccagatcctgggacaactggtaccccagatcctgggacaactggtaccccagatcctggaacaactggtaccacacatgctaggacaacgggtcccccagatcctggaacaactggtaccactcctgtttctgctgaatgtccagtggtaaatgaattggaacgaattaattgcatccctgaccagccgccaacaaaggccacatgtgaccaacgtggctgttgctggaatccccagggagctgtaagtgttccctggtgctactattccaagaatcatagctaccatgtagagggcaaccttgtcaacacaaatgcaggattcacagcccggttgaaaaatctgccttcttcaccagtgtttggaagcaatgttgacaatgttcttctcacagcagaatatcagacatctaatcgtttccacttt

SEQ ID NO: 307780 - DNA, 4986 bp, Artificial Sequence
  derived and/or modified sequence
gctgtaagtgttccctggtgctactattccaagaatcatagctaccatgtagagggcaaccttgtcaacacaaatgcaggattcacagcccggttgaaaaatctgccttcttcaccagtgtttggaagcaatgttgacaatgttcttctcacagcagaatatcagacatctaatcgtttccactttaagttgactgaccaaaccaataacaggtttgaagtgccccacgaacacgtgcagtccttcagtggaaatgctgctgcttctttgacctaccaagttgaaatctccagacagccatttagcatcaaagtgaccagaagaagcaacaatcgtgttttgtttgactcgagcattgggcccctactgtttgctgaccagttcttgcagctctccactcgactgcctagcactaacgtgtatggcctgggagagcatgtgcaccagcagtatcggcatgatatgaattggaagacctggcccatatttaacagagacacaactcccaatggaaacggaactaatttgtatggtgcgcagacattcttcttgtgccttgaagatgctagtggattgtcctttggggtgtttctgatgaacagcaatgccatggaggttgtccttcagcctgcgccagccatcacttaccgcaccattgggggcattctcgacttctatgtgttcttgggaaacactccagagcaagttgttcaagaatatctagagctcattgggcggccagcccttccctcctactgggcgcttggatttcacctcagtcgttacgaatatggaaccttagacaacatgagggaagtcgtggagagaaatcgcgcagcacagctcccttatgatgttcagcatgctgatattgattatatggatgagagaagggacttcacttatgattcagtggattttaaaggcttccctgaatttgtcaacgagttacacaataatggacagaagcttgtcatcattgtggatccagccatctccaacaactcttcctcaagtaaaccctatggcccatatgacaggggttcagatatgaagatatgggtgaatagttcagatggagtgactccactcattggggaggtctggcctggacaaactgtgtttcctgattataccaatcccaactgtgctgtttggtggacaaaggaatttgagctttttcacaatcaagtagagtttgatggaatctggattgatatgaatgaagtctccaactttgttgatggttcggtctcaggatgttccacaaacaacctaaataatcccccattcactcccagaatcctggatgggtacctgttctgcaagactctctgtatggatgcagtgcagcactggggcaagcagtatgacattcacaatctgtatggctactccatggcggtcgccacagcagaagctgccaagactgtgttccctaataagagaagcttcattctgacccgttctacctttgcgggctctggcaagtttgcagcacattggttaggagacaacactgccacctgggatgacctgagatggtccatccctggcgtgcttgagttcaacctttttggcatcccaatggtgggtcctgacatatgtggctttgctttggacacccctgaggagctctgtaggcggtggatgcagttgggtgcattttatccgttttctagaaatcacaatggccaaggctacaaggaccaggatcctgcctcctttggagctgactccctgctgttgaattcctccaggcactaccttaacatccgctatactctattgccctacctatacaccctcttcttccgtgctcacagccgaggggacacggtggccaggccccttttgcatgagttctacgaggacaacagcacttgggatgtgcaccaacagttcttatgggggcccggcctcctcatcactccagttctggatgaaggtgcagagaaagtgatggcatatgtgcctgatgctgtctggtatgactacgagactgggagccaagtgagatggaggaagcaaaaagtcgagatggaacttcctggagacaaaattggacttcaccttcgaggaggctacatcttccccacacagcagccaaatacaaccactctggccagtcgaaagaaccctcttggtcttatcattgccctagatgagaacaaagaagcaaaaggagaacttttctgggataatggggaaacgaaggatactgtggccaataaagtgtatcttttatgtgagttttctgtcactcaaaaccgcttggaggtgaatatttcacaatcaacctacaaggaccccaataatttagcatttaatgagattaaaattcttgggacggaggaacctagcaatgttacagtgaaacacaatggtgtcccaagtcagacttctcctacagtcacttatgattctaacctgaaggttgccattatcacagatattgatcttctcctgggagaagcatacacagtggaatggagcataaagataagggatgaagaaaaaatagactgttaccctgatgagaatggtgcttctgccgaaaactgcactgcccgtggctgtatctgggaggcatccaattcttctggagtccctttttgctattttgtcaacgacctatactctgtcagtgatgttcagtataattcccatggggccacagctgacatctccttaaagtcttccgtttatgccaatgccttcccctccacacccgtgaacccccttcgcctggatgtcacttaccataagaatgaaatgctgcagttcaagatttatgatcccaacaagaatcggtatgaagttccagtccctctgaacatacccagcatgccatccagcacccctgagggtcaactctatgatgtgctcattaagaagaatccatttgggattgaaattcgccggaagagtacaggcactataatttgggactctcagctccttggctttaccttcagtgacatgtttatccgcatctccacccgccttccctccaagtacctctatggctttggggaaactgagcacaggtcctataggagagacttggagtggcacacttgggggatgttctcccgagaccagcccccagggtacaagaagaattcctatggtgtccacccctactacatggggctggaggaggacggcagtgcccatggagtgctcctgctgaacagcaatgccatggatgtgacgttccagcccctgcctgccttgacataccgcaccacagggggagttctggacttttatgtgttcttggggccgactccagagcttgtcacccagcagtacactgagttgattggccggcctgtgatggtaccttactggtctttggggttccagctgtgtcgctatggctaccagaatgactctgagatcgccagcttgtatgatgagatggtggctgcccagatcccttatgatgtgcagtactcagacatcgactacatggagcggcagctggacttcaccctcagccccaagtttgctgggtttccagctctgatcaatcgcatgaaggctgatgggatgcgggtcatcctcattctggatccagccatttctggcaatgagacacagccttatcctgccttcactcggggcgtggaggatgacgtcttcatcaaatacccaaatgatggagacattgtctggggaaaggtctggcctgattttcctgatgttgttgtgaatgggtctctagactgggacagccaagtggagctatatcgagcttatgtggccttcccagactttttccgtaattcaactgccaagtggtggaagagggaaatagaagaactatacaacaatccacagaatccagagaggagcttgaagtttgatggcatgtggattgatatgaatgaaccatcaagcttcgtgaatggggcagtttctccaggctgcagggacgcctctctgaaccaccctccctacatgccacatttggagtccagggacaggggcctgagcagcaagaccctttgtatggagagtcagcagatcctcccagacggctccctggtgcagcactacaacgtgcacaacctgtatgggtggtcccagaccagacccacatacgaagccgtgcaggaggtgacgggacagcgaggggtcgtcatcacccgctccacatttccctcttctggccgctgggcaggacattggctgggagacaacacggccgcatgggatcagctgaagaagtctatcattggcatgatggagttcagcctctttggcatatcctatacgggagcagatatctgtgggttctttcaagacgctgagtacgagatgtgtgttcgctggatgcagctgggggccttttaccccttctcaagaaaccacaataccattgggaccaggagacaagaccctgtgtcctgggatgctgcttttgtgaatatttccagaaatgtcctgcagaccagatacaccctgttgccatatctgtataccttgatgcaaaaggcccacacggagggcgtcactgttgtgcggcctctgctccatgagtttgtgtcagaccaggtgacatgggacatagacagtcagttcctgctgggcccagccttcctggtcagccctgtcctggagcgcaatgccagaaatgtcactgcatatttccctagagcccgttggtacgattactacacgggtgtggatattaatgcaagaggagagtggaagaccttgccagcccctcttgaccacattaatcttcatgtccgtgggggctacatcctgccctggcaagagcctgcactgaacacccacttaagtcgaaagaaccctcttggtcttattattgccctagatgaaaacaaagaagcaaaaggagaacttttctgggatgatgggcaaacaaaggatactgtggccaagaaagtatatcttttatgtgagttttctgtcactcaacaagtagtgtttctaaatatagtttttaat

SEQ ID NO: 307781 - DNA, 558 bp, Artificial Sequence
  derived and/or modified sequence
atggcccggaagaagctgaagaagttcaccaccctggagatcgtgctgagcgtgttactattagtgttgtttatcatcagcatagttctcattgtcctattggctaaagagagcctaaaaagcaccgctccagatcccggaactaccgggacccccgatcctggcactacaggcacacctgatccaggcacaactggtacaacacacgcccgcaccaccggcccacctgatcccggcacaacaggtactacacccgttagtgctgagtgtcctgtggtgaatgagctcgagcggatcaactgcattccggaccagccccctaccaaggccacatgtgaccaacgcgggtgctgctggaatccccaaggtgcagtgtccgtgccttggtgctactactccaaaaatcattcttatcatgtcgagggcaatctggtgaatacaaatgccggtttcactgccagactcaagaaccttcctagctcaccagtgttcggctccaatgtggacaatgtgctacttactgcagagtatcagacatctaataggtttcacttctag

SEQ ID NO: 307782 - DNA, 4989 bp, Artificial Sequence
  derived and/or modified sequence
gccgtgagcgtgccctggtgctactacagcaagaaccacagctaccatgtggaaggcaacctggttaacaccaacgccggattcacagcacgcctgaagaatcttccatccagcccagtattcggaagcaatgttgataatgttttgctcacagccgaataccagacctcaaatcggttccattttaagttgacagatcagaccaacaaccgctttgaagtcccacatgagcatgtgcaatcctttagcggcaacgcagccgcctccctgacatatcaggtcgagattagtcgccagccattcagcatcaaggtaacgcgccgctctaataaccgcgttctattcgattccagtatcgggcctctcttgtttgcggatcagttcctgcaactctcaacgcgtctaccctctaccaacgtgtacggtctcggggagcacgttcaccagcagtacagacacgatatgaattggaagacatggccaatcttcaatcgagacaccacgcccaatgggaatggtactaacttgtatggagcccagaccttcttcctgtgccttgaagacgcatccgggctgagtttcggcgtcttcctgatgaacagcaatgccatggaggttgtgctgcaaccagccccagctattacatacagaactatcggagggatcctggatttctacgtgtttttgggaaacacccccgagcaagtcgtccaagagtacctggagctgatagggcgaccagctctgccctcatattgggcacttggctttcacctctcccgctacgagtacggtaccctggataacatgcgggaggtggtcgagcgaaaccgtgccgctcaacttccatatgatgtgcaacatgccgacatcgactacatggatgaacgacgcgatttcacctatgattcagtcgatttcaagggatttccagaattcgtgaatgagctacacaataacggccagaaactagtgataatagtggatcctgcgatttctaacaacagctcatcgagcaaaccgtatggcccctacgaccggggatctgatatgaaaatttgggtgaacagttcggacggagttaccccacttataggtgaggtgtggcctggccagacagtgttccccgactatacaaaccccaactgtgcggtgtggtggacaaaggagttcgagctgttccacaatcaagttgagttcgacgggatttggatcgatatgaacgaggtgtcgaatttcgtcgacggctcagtgtctggttgttctaccaataacctcaataatccccccttcacaccgcggatcctggacggctacctcttctgcaagaccttgtgcatggacgccgtgcaacattggggcaaacagtatgacatccacaacttgtacggatactcaatggcagtggcaacagctgaggctgccaagacagttttccccaacaaaaggagcttcatcttgacccgatccacctttgcaggctccggcaaatttgccgctcattggcttggggataatactgccacatgggatgatctgagatggagcattccgggtgtcttggaatttaacctgtttggcattccaatggttgggccagatatttgcgggtttgctctggacacccctgaagaactgtgtcgccggtggatgcagctcggggcgttttatcctttttctaggaaccacaacgggcaaggatataaggatcaggacccagccagttttggtgccgattccctgctgctaaacagttctcggcactacctgaacatccgatacactttgttgccctatttgtatacgctcttctttagagcccacagccggggcgacactgtcgcgagaccattgttacatgagttttatgaggataatagcacttgggatgtgcaccagcagttcctgtggggacctggattactgattacccccgtgttagatgagggtgctgaaaaggtgatggcatacgtacctgacgccgtttggtatgactatgagacaggtagtcaggtgagatggagaaaacagaaagttgaaatggagttgcccggtgacaagatagggctgcacctgcgagggggctatatttttcccactcaacagcccaacactactacactggcctcaagaaagaaccccctggggctgatcatcgctctggacgagaataaggaagccaagggagagctgttttgggataatggggagacaaaggacaccgtcgctaataaagtttatctcctgtgtgaattcagtgtgacacaaaatagactggaagtgaatattagccagtcaacctacaaggatcccaacaacctcgcgtttaatgagatcaagattcttggaactgaggaaccatctaatgtgactgtcaaacacaatggtgttcccagtcagacttctcctacagtgacatacgattctaacctgaaagttgctataattactgatattgatttactgttaggcgaggcgtatacggttgaatggtctattaaaattcgcgatgaggaaaagatcgactgctacccggacgaaaatggcgccagtgccgagaattgcacagccaggggatgcatctgggaagctagcaactccagcggagttccattttgctacttcgtgaatgacctgtatagtgtcagcgacgtgcagtacaactctcatggagcgacggctgacataagtttaaaatcttcagtctatgccaacgcatttccaagcacgccggtgaaccctctgaggctcgatgtcacctaccacaaaaacgaaatgctacaatttaaaatctacgaccccaataaaaacagatatgaagtacccgttcccctgaatattccaagcatgccttctagtacacccgaaggtcagctgtacgacgttctaattaaaaaaaatcctttcggaatcgagataagacggaaaagcactggaaccatcatttgggattcacagctgcttggctttactttcagcgatatgtttattcgcatcagcacccggcttccatctaagtacctctatggttttggggagacagagcatcggtcctatagaagagacctcgagtggcatacttgggggatgttctcgcgtgatcagcctccagggtataaaaagaattcctacggggttcacccctactacatgggcctagaggaggacggatcagcccatggggtccttctgctaaactctaatgcaatggatgtgaccttccagccgttgcctgcattgacataccgcaccactggtggagtgctcgacttctacgtgtttctgggccccactcctgagctagtgacccagcagtataccgaactaatcggtagacccgtcatggttccttattggtctctaggattccagttatgtaggtacggttatcagaacgactcagagattgcctccttgtatgacgagatggtcgctgcgcagatcccctacgatgtccagtactccgatatcgactacatggaacgtcagctggacttcacgctctccccaaagttcgctgggtttccggccctgattaatagaatgaaggctgatggcatgagggtgatcctgattctcgatccggctatctcaggtaatgagacacagccctacccggcgttcacacggggagttgaagatgatgtgtttattaagtatcccaatgacggcgacatagtttggggcaaggtttggcccgattttcctgatgttgtggtgaacggatcgctggactgggatagccaggtcgagctctacagagcatacgtggcttttcctgactttttcagaaacagcaccgctaaatggtggaagagagagatcgaggaactgtataacaaccctcagaaccctgaaagatctctgaagtttgatgggatgtggattgatatgaacgagcccagcagtttcgttaatggcgcagtctccccaggctgccgggacgctagcctgaatcatcctccgtatatgccacacctagaaagcagagacagaggcctgtcaagtaagacgttgtgcatggagtcacagcagatactgcctgatgggagcttagtgcagcattacaacgtgcacaatctgtacggctggtcccaaacacgtcccacttacgaggccgtccaagaggtgacagggcaacggggagttgtcattacacgttccactttcccctcatctggcaggtgggccgggcattggctcggagacaacactgcagcctgggatcagttgaagaagtccatcatcgggatgatggagttcagcctcttcggtataagctacaccggcgccgatatttgtggcttttttcaggatgccgaatatgagatgtgcgtgcggtggatgcagctcggggcattctatcccttttctcggaaccacaacacaattggcacgagaaggcaggaccctgtctcctgggacgctgcctttgtgaacataagcagaaacgtcctgcagaccaggtataccctcctgccatatctttataccctcatgcaaaaggcccacaccgagggcgtgaccgtggtcaggccactcctccatgagttcgtcagtgatcaggtaacatgggacatagactcgcaatttctgttaggccccgctttcctggtgtcacccgtgttggaaagaaatgccaggaacgtgaccgcttacttcccgcgcgctcggtggtatgattactacacgggagtggacatcaacgccaggggcgagtggaaaactttgcccgctcctttggatcacatcaacctgcatgtacgaggtggttacatacttccatggcaggagcctgcactaaacacgcacctttccagaaaaaatccgttagggcttattattgcattagacgagaataaagaggcaaaaggagagttgttttgggatgacggacagactaaagacacagtggccaagaaagtgtacctgctgtgcgagttttccgttacacaacaggtggtatttttaaatatcgtgttcaactag

SEQ ID NO: 307783 - DNA, 558 bp, Artificial Sequence
  derived and/or modified sequence
atggctagaaagaaactgaagaagtttaccactctggagatcgttctatctgtactattgctggttttgtttatcatcagcatcgtgcttatagtccttttagctaaagaaagtctcaaaagtacagccccagatccagggacgactgggaccccagatccgggaacgaccggtacgcccgaccctggcacgacggggaccactcacgcccgaacaacaggtccaccagatccaggaacaaccggaacaacccccgttagcgccgagtgtcctgtcgtgaacgagttggagcggataaactgtattcccgatcaaccacccactaaggccacgtgcgaccaacgcggatgttgttggaacccccagggagcggttagcgttccctggtgttactattccaaaaaccattcataccatgtcgagggtaatcttgtgaacaccaacgctggattcactgctcggctcaaaaacctaccttcgagtcctgtcttcggttctaatgtggataatgtgcttcttactgcagaatatcagacttccaatcgcttccacttttag

SEQ ID NO: 307784 - DNA, 4989 bp, Artificial Sequence
  derived and/or modified sequence
gctgtgtctgtcccctggtgctactactcaaagaatcattcataccatgttgaagggaacctggtgaatactaatgccggatttactgcacggctcaagaaccttccctcaagcccagtattcggcagtaatgtagacaacgtgctgctgaccgcagagtatcagacctcaaatcgatttcactttaagctgacagatcagactaataacaggtttgaggtgcctcatgaacatgtgcagtcattttcaggaaatgccgcagcgtctctgacctatcaggtggagatatctaggcagccatttagcattaaagtcacgcgaaggagcaataacagggttcttttcgacagcagcatcgggccactcctgttcgccgaccaatttctgcaactaagcactcggctgccctccacaaacgtctacgggttgggggaacatgtacaccaacagtatcgccacgacatgaactggaagacctggccaatttttaatcgggacactactcccaacgggaacgggaccaatttgtatggtgctcagacatttttcttatgcttggaggacgcgtccggactgtcctttggggtttttctgatgaactcaaatgcaatggaagtcgtgctccaaccggcaccagcgatcacatatcgcacgattggtgggatcttagatttctacgtatttcttggcaatacaccagagcaggtggtccaggagtacttggagctgataggacggccagccctgccgagctactgggctctgggtttccatctgtctcggtacgagtatggaacactcgataatatgagggaggttgtggagcgcaaccgcgctgcacagctgccgtacgacgttcagcatgccgatattgattatatggatgagaggagagatttcacttacgattctgtggacttcaaagggttcccagagttcgtgaacgagctccataataatggccagaaactggtcatcatcgtcgatcctgcaatctctaacaattccagttcgtctaagccatatggcccttacgaccggggatccgatatgaagatctgggttaacagctccgacggagtgactcctcttattggcgaagtgtggcctggacagaccgttttccctgattacaccaacccaaactgcgctgtgtggtggactaaggaattcgaactctttcacaaccaggttgaattcgacggcatttggattgacatgaacgaagtcagcaacttcgtggacggaagcgtgtctggctgttcaaccaataacttgaataaccccccatttacacccagaattctggatggctatttattttgtaaaaccctgtgtatggatgccgtccagcactgggggaaacaatacgacatccacaacctgtatggctatagcatggcagtcgctacagcagaagctgctaaaaccgtgtttcctaacaaaaggagcttcattctcacccggagcacatttgcaggcagtggaaaattcgcagcccattggctaggtgacaataccgcaacatgggatgacctgaggtggtctatcccaggggtgttggagtttaatctctttggcatcccaatggtgggacccgatatctgtggatttgcattggacacccccgaagaactctgcaggaggtggatgcagctcggagctttttaccctttctctcggaaccataacggtcaggggtacaaagatcaggatccagcctcttttggagccgacagtctcctgctgaattccagccggcactatctgaacattaggtacactcttctgccttacctctacaccctatttttccgtgcccacagtcggggagacaccgtagctcgaccactgcttcatgaattctacgaggacaactctacatgggacgttcaccagcagttcttgtggggccctggtctgctgatcacgccggtgcttgacgagggggctgagaaggttatggcctatgtgcctgatgccgtatggtatgactacgaaaccggttcacaagtgcgctggcggaaacaaaaagtggaaatggagctgccaggtgacaaaataggcctccatctccgcggtggctacatcttccctacccagcagccgaacactaccactctggcctcacgcaagaatccactgggactgataattgctctcgatgagaacaaggaggcaaaaggcgaactgttttgggacaatggcgagactaaggataccgtggccaataaagtgtatctgctgtgtgaattctccgtaacgcagaatcgtctggaggttaacatatcgcagtccacctacaaagatccaaacaatttagcattcaacgagatcaagatacttggtaccgaggaaccaagtaacgtcacagtcaagcacaacggggtcccttctcagacaagtcctacggtaacctacgattcgaacctgaaggtcgcaatcataaccgacattgaccttttactgggagaagcctataccgttgagtggtcaatcaaaatccgcgacgaggagaaaattgattgctacccagatgagaacggcgcaagtgctgaaaactgtaccgcgagaggatgcatttgggaggctagcaacagcagtggtgtgcctttctgctatttcgtgaatgacttgtactccgtgtcagatgtgcaatacaactctcatggagctactgctgatatcagcctgaagtcaagcgtgtacgctaacgcgttccctagcacgccagttaacccactgcggctggatgtgacctatcacaagaacgagatgttacagttcaagatttatgaccctaacaaaaatcggtacgaagtgcccgtcccacttaacattccgtccatgccttcgtcaacacccgaggggcagctttacgatgtgttaatcaagaaaaatccgtttggaattgagatccggagaaagtccactggcacaatcatctgggattcacaactgttagggttcacgtttagcgatatgtttatacgcatcagcacaagattaccctccaagtacttgtacgggttcggtgagactgagcatcgctcgtacaggcgcgaccttgaatggcatacctggggcatgtttagccgggatcagccacctggctataaaaagaatagctatggcgtgcatccttactacatgggtctggaggaggatggttcagctcacggcgtcctgctcctaaattcaaacgctatggatgtaacattccagcctcttccagcccttacttaccgtactaccggcggagtgctcgatttttacgtctttctcggacctacacccgaacttgtcacccagcagtataccgagctgattggtcgtcctgtcatggtcccttattggtccctgggattccaattgtgtagatatggataccagaatgacagcgagatcgcctccttgtacgacgagatggtcgccgctcagatcccttacgatgtgcagtattcggatattgattacatggaacggcagctggattttacactctcccccaaatttgcaggattccctgcactgataaaccgcatgaaggccgacgggatgcgtgtgattttgatactcgatcctgcaatctcgggaaatgagactcagccttacccagcatttacacggggtgtagaagacgatgtcttcatcaagtaccccaacgatggggatattgtgtggggcaaagtgtggccggatttcccagacgtggttgtaaatggatccctagactgggactcccaggtggaactgtatcgggcttatgtcgcttttcctgatttctttcgaaacagcaccgcgaagtggtggaaaagagaaatcgaggagttgtacaataacccgcagaatcctgagaggtctctgaaatttgacggcatgtggattgacatgaatgagccctcttcatttgttaatggggcagtgagccccggttgccgcgacgcaagcctgaatcaccccccatacatgccacatttggaatctcgagaccggggactctcctcaaagacattatgcatggagtcccagcagattcttcctgacggatccttggtgcagcattataacgtgcacaacctttacggttggagccagacacgacctacatatgaggctgtccaggaggtcacagggcagaggggggtcgtgatcacacggagtacgttcccctcttctgggcgatgggccggacactggctcggcgataatactgcggcatgggatcaactgaagaagtctataataggtatgatggagttcagtctgtttgggatttcatatacgggggctgacatctgcggtttcttccaggacgctgagtatgaaatgtgtgtgaggtggatgcagctgggcgcattctaccccttctccaggaatcataacacgatcgggactcggagacaggatcctgtttcctgggacgccgcttttgtcaacatttctcggaacgtcttgcaaacacggtacacgctactaccctatttatacaccttgatgcaaaaggcacatacagaaggcgtgactgtcgtcaggcctcttctgcatgagttcgtttccgatcaggtcacctgggacatcgacagtcagttcctcctcggtcctgctttcttggtctctcccgtgcttgagaggaacgcacgtaacgtgaccgcctattttccacgcgcaagatggtacgattattacacaggtgtggatataaacgcacgcggagaatggaagacactgcccgctcctcttgaccacatcaacttgcacgtacggggtgggtatatcctgccatggcaggagcccgctctgaacacccacctctcaagaaagaaccccctaggtctcattattgctctggacgagaacaaagaggctaagggggagctgttctgggacgatggacagacaaaagatacagtggcaaaaaaggtttatctgctgtgtgaattcagtgtgacacagcaggtggtcttcctcaatatcgtgttcaattag

SEQ ID NO: 307785 - DNA, 558 bp, Artificial Sequence
  derived and/or modified sequence
atggccagaaagaagctgaagaagttcaccaccctggagatcgtgctgagcgtgctgctgctggtgctgttcatcatcagcatcgtgctgatcgtgctgctggccaaggagagcctgaagagcaccgcccccgaccccggcaccaccggcacccccgaccccggcaccaccggcacccccgaccccggcaccaccggcaccacccacgccagaaccaccggcccccccgaccccggcaccaccggcaccacccccgtgagcgccgagtgccccgtggtgaacgagctggagagaatcaactgcatccccgaccagccccccaccaaggccacctgcgaccagagaggctgctgctggaacccccagggcgccgtgagcgtgccctggtgctactacagcaagaaccacagctaccacgtggagggcaacctggtgaacaccaacgccggcttcaccgccagactgaagaacctgcccagcagccccgtgttcggcagcaacgtggacaacgtgctgctgaccgccgagtaccagaccagcaacagattccacttctag

SEQ ID NO: 307786 - DNA, 4989 bp, Artificial Sequence
  derived and/or modified sequence
gccgtgagcgtgccctggtgctactacagcaagaaccacagctaccacgtggagggcaacctggtgaacaccaacgccggcttcaccgccagactgaagaacctgcccagcagccccgtgttcggcagcaacgtggacaacgtgctgctgaccgccgagtaccagaccagcaacagattccacttcaagctgaccgaccagaccaacaacagattcgaggtgccccacgagcacgtgcagagcttcagcggcaacgccgccgccagcctgacctaccaggtggagatcagcagacagcccttcagcatcaaggtgaccagaagaagcaacaacagagtgctgttcgacagcagcatcggccccctgctgttcgccgaccagttcctgcagctgagcaccagactgcccagcaccaacgtgtacggcctgggcgagcacgtgcaccagcagtacagacacgacatgaactggaagacctggcccatcttcaacagagacaccacccccaacggcaacggcaccaacctgtacggcgcccagaccttcttcctgtgcctggaggacgccagcggcctgagcttcggcgtgttcctgatgaacagcaacgccatggaggtggtgctgcagcccgcccccgccatcacctacagaaccatcggcggcatcctggacttctacgtgttcctgggcaacacccccgagcaggtggtgcaggagtacctggagctgatcggcagacccgccctgcccagctactgggccctgggcttccacctgagcagatacgagtacggcaccctggacaacatgagagaggtggtggagagaaacagagccgcccagctgccctacgacgtgcagcacgccgacatcgactacatggacgagagaagagacttcacctacgacagcgtggacttcaagggcttccccgagttcgtgaacgagctgcacaacaacggccagaagctggtgatcatcgtggaccccgccatcagcaacaacagcagcagcagcaagccctacggcccctacgacagaggcagcgacatgaagatctgggtgaacagcagcgacggcgtgacccccctgatcggcgaggtgtggcccggccagaccgtgttccccgactacaccaaccccaactgcgccgtgtggtggaccaaggagttcgagctgttccacaaccaggtggagttcgacggcatctggatcgacatgaacgaggtgagcaacttcgtggacggcagcgtgagcggctgcagcaccaacaacctgaacaacccccccttcacccccagaatcctggacggctacctgttctgcaagaccctgtgcatggacgccgtgcagcactggggcaagcagtacgacatccacaacctgtacggctacagcatggccgtggccaccgccgaggccgccaagaccgtgttccccaacaagagaagcttcatcctgaccagaagcaccttcgccggcagcggcaagttcgccgcccactggctgggcgacaacaccgccacctgggacgacctgagatggagcatccccggcgtgctggagttcaacctgttcggcatccccatggtgggccccgacatctgcggcttcgccctggacacccccgaggagctgtgcagaagatggatgcagctgggcgccttctaccccttcagcagaaaccacaacggccagggctacaaggaccaggaccccgccagcttcggcgccgacagcctgctgctgaacagcagcagacactacctgaacatcagatacaccctgctgccctacctgtacaccctgttcttcagagcccacagcagaggcgacaccgtggccagacccctgctgcacgagttctacgaggacaacagcacctgggacgtgcaccagcagttcctgtggggccccggcctgctgatcacccccgtgctggacgagggcgccgagaaggtgatggcctacgtgcccgacgccgtgtggtacgactacgagaccggcagccaggtgagatggagaaagcagaaggtggagatggagctgcccggcgacaagatcggcctgcacctgagaggcggctacatcttccccacccagcagcccaacaccaccaccctggccagcagaaagaaccccctgggcctgatcatcgccctggacgagaacaaggaggccaagggcgagctgttctgggacaacggcgagaccaaggacaccgtggccaacaaggtgtacctgctgtgcgagttcagcgtgacccagaacagactggaggtgaacatcagccagagcacctacaaggaccccaacaacctggccttcaacgagatcaagatcctgggcaccgaggagcccagcaacgtgaccgtgaagcacaacggcgtgcccagccagaccagccccaccgtgacctacgacagcaacctgaaggtggccatcatcaccgacatcgacctgctgctgggcgaggcctacaccgtggagtggagcatcaagatcagagacgaggagaagatcgactgctaccccgacgagaacggcgccagcgccgagaactgcaccgccagaggctgcatctgggaggccagcaacagcagcggcgtgcccttctgctacttcgtgaacgacctgtacagcgtgagcgacgtgcagtacaacagccacggcgccaccgccgacatcagcctgaagagcagcgtgtacgccaacgccttccccagcacccccgtgaaccccctgagactggacgtgacctaccacaagaacgagatgctgcagttcaagatctacgaccccaacaagaacagatacgaggtgcccgtgcccctgaacatccccagcatgcccagcagcacccccgagggccagctgtacgacgtgctgatcaagaagaaccccttcggcatcgagatcagaagaaagagcaccggcaccatcatctgggacagccagctgctgggcttcaccttcagcgacatgttcatcagaatcagcaccagactgcccagcaagtacctgtacggcttcggcgagaccgagcacagaagctacagaagagacctggagtggcacacctggggcatgttcagcagagaccagccccccggctacaagaagaacagctacggcgtgcacccctactacatgggcctggaggaggacggcagcgcccacggcgtgctgctgctgaacagcaacgccatggacgtgaccttccagcccctgcccgccctgacctacagaaccaccggcggcgtgctggacttctacgtgttcctgggccccacccccgagctggtgacccagcagtacaccgagctgatcggcagacccgtgatggtgccctactggagcctgggcttccagctgtgcagatacggctaccagaacgacagcgagatcgccagcctgtacgacgagatggtggccgcccagatcccctacgacgtgcagtacagcgacatcgactacatggagagacagctggacttcaccctgagccccaagttcgccggcttccccgccctgatcaacagaatgaaggccgacggcatgagagtgatcctgatcctggaccccgccatcagcggcaacgagacccagccctaccccgccttcaccagaggcgtggaggacgacgtgttcatcaagtaccccaacgacggcgacatcgtgtggggcaaggtgtggcccgacttccccgacgtggtggtgaacggcagcctggactgggacagccaggtggagctgtacagagcctacgtggccttccccgacttcttcagaaacagcaccgccaagtggtggaagagagagatcgaggagctgtacaacaacccccagaaccccgagagaagcctgaagttcgacggcatgtggatcgacatgaacgagcccagcagcttcgtgaacggcgccgtgagccccggctgcagagacgccagcctgaaccaccccccctacatgccccacctggagagcagagacagaggcctgagcagcaagaccctgtgcatggagagccagcagatcctgcccgacggcagcctggtgcagcactacaacgtgcacaacctgtacggctggagccagaccagacccacctacgaggccgtgcaggaggtgaccggccagagaggcgtggtgatcaccagaagcaccttccccagcagcggcagatgggccggccactggctgggcgacaacaccgccgcctgggaccagctgaagaagagcatcatcggcatgatggagttcagcctgttcggcatcagctacaccggcgccgacatctgcggcttcttccaggacgccgagtacgagatgtgcgtgagatggatgcagctgggcgccttctaccccttcagcagaaaccacaacaccatcggcaccagaagacaggaccccgtgagctgggacgccgccttcgtgaacatcagcagaaacgtgctgcagaccagatacaccctgctgccctacctgtacaccctgatgcagaaggcccacaccgagggcgtgaccgtggtgagacccctgctgcacgagttcgtgagcgaccaggtgacctgggacatcgacagccagttcctgctgggccccgccttcctggtgagccccgtgctggagagaaacgccagaaacgtgaccgcctacttccccagagccagatggtacgactactacaccggcgtggacatcaacgccagaggcgagtggaagaccctgcccgcccccctggaccacatcaacctgcacgtgagaggcggctacatcctgccctggcaggagcccgccctgaacacccacctgagcagaaagaaccccctgggcctgatcatcgccctggacgagaacaaggaggccaagggcgagctgttctgggacgacggccagaccaaggacaccgtggccaagaaggtgtacctgctgtgcgagttcagcgtgacccagcaggtggtgttcctgaacatcgtgttcaactag

SEQ ID NO: 307787 - protein, 982 aa, Artificial Sequence
  derived and/or modified sequence
MNPSSSAGEEKGATGGSSSSGSGAGSCCLGAEGGADPRGAGSAAAAGAAALDEPAAAGQKEKDEALEEKLRNLTFRKQVSYRKAISRAGLQHLAPAHPLSLPVANGPAKEPRATLDWSENAVNGEHLWLETNVSGDLCYLGEENCQVRFAKSALRRKCAVCKIVVHTACIEQLEKINFRCKPTFREGGSRSPRENFVRHHWVHRRRQEGKCKQCGKGFQQKFSFHSKEIVAISCSWCKQAFHNKVTCFMLHHIEEPCSLGAHAAVIVPPTWIIKVKKPQNSLKASNRKKKRTSFKRKASKRGMEQENKGRPFVIKPISSPLMKPLLVFVNPKSGGNQGTKVLQMFMWYLNPRQVFDLSQEGPKDALELYRKVPNLRILACGGDGTVGWILSILDELQLSPQPPVGVLPLGTGNDLARTLNWGGGYTDEPVSKILCQVEDGTVVQLDRWNLHVERNPDLPPEELEDGVCKLPLNVFNNYFSLGFDAHVTLEFHESREANPEKFNSRFRNKMFYAGAAFSDFLQRSSRDLSKHVKVVCDGTDLTPKIQELKFQCIVFLNIPRYCAGTMPWGNPGDHHDFEPQRHDDGYIEVIGFTMASLAALQVGGHGERLHQCREVMLLTYKSIPMQVDGEPCRLAPAMIRISLRNQANMVQKSKRRTSMPLLNDPQSVPDRLRIRVNKISLQDYEGFHYDKEKLREASISDWLRTIAGELVQSFGAIPLGILVVRGDCDLETCRMYIDRLQEDLQSVSSGSQRVHYQDHETSFPRALSAQRLSPRWCFLDATSADRFYRIDRSQEHLHFVMEISQDEIFILDPDMVVSQPAGTPPGMPDLVVEQASGSPVSSEDHAILQAVIAGDLMKLIESYKNGGSLLIQGPDHCSLLHYAAKTGNGEIVKYILDHGPSELLDMADSETGETALHKAACQRNRAVCQLLVDAGASLRKTDSKGKTPQERAQQAGDPDLAAYLESRQNYKVIGHEDLETAV

SEQ ID NO: 307788 - DNA, 2949 bp, Artificial Sequence
  derived and/or modified sequence
atgaacccttccagttctgccggagaagaaaagggggccaccgggggatcaagcagctccggatctggagccgggtcatgctgcctgggtgctgaggggggggctgatccacggggtgccggatcagcagctgctgccggggctgctgctttggacgagccagccgcagccggccagaaggaaaaggacgaagctctcgaagaaaaacttcgcaatctgacattcaggaaacaagtatcgtaccggaaagccattagcagggccggcctgcaacatttggcccctgctcaccctctttctctgcctgtggctaatgggcccgccaaagagccccgggccacactcgattggagcgagaacgcagtgaatggtgagcatctgtggttggaaaccaacgtgagcggcgatctgtgctatctgggggaagagaactgtcaggtacgtttcgctaagagcgcgctgcggcgtaaatgtgccgtttgcaaaatcgtagtgcatacagcctgcatcgagcagctggaaaagatcaattttcgctgcaagccaacctttagggaaggggggagcaggagcccccgcgaaaacttcgtgcgccaccattgggtgcaccgccgacggcaggaggggaaatgcaaacaatgtggaaagggattccagcagaaattcagcttccactctaaggagatcgttgctattagctgctcctggtgtaaacaggctttccacaacaaggtcacctgctttatgctgcaccacatagaggaaccctgtagtctcggagcccacgctgccgtgatcgttcctcccacctggatcattaaagtaaagaaacctcaaaactccttgaaagcttccaatagaaagaagaaacggacctccttcaagaggaaagcatctaaaaggggcatggaacaggagaataaaggcaggccattcgtgatcaagccgatctcttccccccttatgaaacctctgttggtctttgtgaatcccaaaagcggaggaaaccagggaacgaaagtacttcagatgtttatgtggtatctgaacccacggcaggtcttcgatctttcccaggaggggcccaaggacgcattggaattatacaggaaagtgccaaacctacgtattctcgcctgtggcggcgatggaaccgtcgggtggatccttagcattctcgatgagctccagttgtcaccacagccacctgtgggagtgcttccattggggacagggaatgatttagctcgcactctcaattggggaggtgggtacacagatgaaccggtatccaagattctgtgccaggtagaagatggaacagtcgtgcagctggatagatggaatctacatgttgagagaaatcctgaccttccgcctgaagaattggaggatggggtttgcaagctgccattgaacgtttttaacaattattttagcctgggcttcgacgcccatgtgacattggagttccacgagagtcgtgaggcaaatcccgaaaagttcaacagtcgatttcgtaataagatgttctatgcaggggctgcattttccgactttctgcagagatcctctagagacctcagcaagcatgtgaaagtcgtctgcgatggaactgaccttacacccaaaatccaggagcttaagttccagtgcatagtgtttctaaacatcccccggtactgtgccgggactatgccatgggggaatcctggcgaccaccacgatttcgaacctcagagacatgacgacggatacattgaagtgattggattcacgatggcctccctcgctgcgctgcaggtgggcggacacggcgagcgtctgcaccagtgccgagaagtcatgcttctgacgtataaatcaatcccaatgcaagtggacggtgagccttgtcggctggcaccagccatgatccgaatcagcttacgcaatcaggcaaatatggtccaaaagtctaaaaggcgcacttccatgcctctgctgaatgacccacagagcgtccctgatcggctacggattagggtgaacaagatctccttgcaggactacgagggattccattacgacaaggagaagctgagagaggccagcatctccgattggctgcgtacgattgcaggtgaactcgtccagtcctttggcgccatcccgcttgggattttggtcgtccgtggtgattgtgacctggagacttgtcgcatgtatatagaccgtttgcaagaggatctccagagcgtgtcatcggggagtcagcgcgtgcattatcaagatcacgaaacatcatttccgcgcgctttgagcgcccagcgacttagcccaaggtggtgcttcctggacgcaaccagtgcagataggttttataggatcgataggagtcaagagcacctgcattttgtgatggaaatttcccaggacgagatttttatcctggatcccgatatggtggtaagccagccagcaggcaccccacctgggatgccagatctagttgtggagcaggcctctggatcccctgtgtcatccgaagatcatgctattcttcaggctgtaatagcaggagacctcatgaagttgatcgaatcctacaagaacggcggtagtctgttaatacaaggacctgaccactgctctcttctacattatgccgccaaaactggcaatggagaaatcgtgaaatatattctggaccacggcccctctgaactactggacatggccgatagtgagacgggtgaaacagctctccataaggctgcttgccagcggaaccgagcggtctgtcagttgctggtcgacgcgggagcttctctgaggaagactgacagtaaaggtaagacacctcaggagcgggcacagcaagcaggtgacccggacctggctgcctatctcgaatccaggcagaactacaaagtgatcggtcacgaggacctggaaaccgccgtctag

SEQ ID NO: 307789 - DNA, 2949 bp, Artificial Sequence
  derived and/or modified sequence
atgaaccccagcagcagcgctggggaggagaagggggccaccggcggcagcagcagcagcggcagcggggccggcagctgctgcctgggcgctgagggcggcgctgaccccaggggggccggcagcgctgctgctgctggagctgctgccctggatgagcctgctgctgctggccagaaggagaaggatgaggccctggaggagaagctgaggaacctgaccttcaggaagcaggtgtcctacaggaaggccatcagccgggccggcctgcagcacctggccccagcccaccccctgagcctgcctgtggccaatggacctgccaaggagccccgggccaccctggactggagcgaaaatgctgtgaatggagagcacctgtggctggagaccaacgtgtctggggacctgtgctacctgggggaggagaactgccaggtgcgctttgccaagagcgccctgcggaggaaatgtgctgtgtgcaagatcgtggtgcacacagcctgcatcgagcagctggagaagatcaacttccgctgcaagcccaccttccgggagggcggcagccgcagcccccgggagaactttgtgcgccaccactgggtgcacagaagacggcaggagggcaagtgcaagcagtgtgggaagggcttccagcagaagttctccttccacagcaaggagatcgtggccatcagctgctcctggtgcaagcaggccttccacaacaaggtgacctgcttcatgctgcaccacatcgaggagccctgcagcctgggcgcccatgctgctgtgattgtgccccccacctggatcatcaaggtgaagaagccccagaacagcctgaaggccagcaacaggaagaagaagaggaccagcttcaagaggaaggccagcaagaggggcatggagcaggagaacaagggccggcccttcgtcatcaagcccatcagcagccccctgatgaagcccctgctggtgtttgtgaaccccaagagcggcggcaaccagggcaccaaggtgctgcagatgttcatgtggtacctgaacccccggcaggtgtttgacctgagccaggagggccccaaggatgccctggagctgtacaggaaggtgcccaacctgcgcatcctggcctgtggaggagatggcaccgtgggctggatcctgagcatcctggatgagctgcagctgagcccccagccccctgtgggcgtgctgcccctgggcactggaaatgacctggcccggaccctgaactggggcggcggctacacagatgagcctgtgtccaagatcctgtgccaggtggaggatggcaccgtggtgcagctggaccgctggaacctgcacgtggagaggaacccagacctgcccccagaggagctggaggatggagtgtgcaagctgcccctgaatgtgttcaacaactacttcagcctgggctttgatgcccacgtgaccctggagttccacgagagccgggaggccaaccctgagaagttcaacagccgcttcaggaacaagatgttttatgctggggccgccttcagtgacttcctgcagaggagcagccgggacctgagcaagcacgtgaaggtggtgtgtgatggaacagacctgacccccaagatccaggagctgaagttccagtgcatcgtgttcctgaacatcccccgctactgtgccggcaccatgccctggggcaaccctggggaccaccacgactttgagccccagagacatgatgatggctacattgaagtcatcggcttcaccatggccagcctggccgccctgcaggtgggcggccatggagagcggctgcaccagtgccgggaggtgatgctgctgacctacaagagcatccccatgcaggtggatggagagccctgccgcctggccccagccatgatccgcatcagcctgaggaaccaggccaacatggtgcagaagagcaagaggaggacctccatgcccctgctgaatgacccccagagcgtgcctgaccggctgcgcatccgggtgaacaagatcagcctgcaggactatgagggcttccactatgacaaggagaagctgcgggaggccagcatcagtgactggctgcggaccatcgccggggagctggtgcagagctttggagccatccccctgggcatcctggtggtgcggggggactgtgacctggagacctgcaggatgtacatcgaccggctgcaggaggacctgcagagcgtgagcagcggcagccagagggtgcactaccaggaccacgagaccagcttcccccgggccctgagcgcccagaggctgagcccccgctggtgcttcctggatgccaccagcgctgaccgcttctacagaattgacaggagccaggagcacctgcactttgtgatggagatcagccaggatgagatcttcatcctggaccctgacatggtggtgtcccagcctgctggcaccccacctggcatgccagacctggtggtggagcaggccagcggcagccctgtgtccagtgaagatcatgccatcctgcaggccgtgattgctggggacctgatgaagctgattgagagctacaagaatggaggcagcctgctgatccagggccctgaccactgcagcctgctgcactatgctgccaagacaggaaatggagaaattgtgaagtacatcctggaccacggccccagcgagctgctggacatggctgacagcgagactggagaaacagccctgcacaaggccgcctgccagaggaacagagctgtgtgccagctgctggtggatgctggggccagcctgaggaagacagacagcaagggcaagaccccccaggagcgggcccagcaggccggggaccctgacctggccgcctacctggagagccggcagaactacaaggtgattggacatgaggacctggagacagctgtgtag

SEQ ID NO: 307790 - DNA, 2949 bp, Artificial Sequence
  derived and/or modified sequence
atgaaccccagcagcagcgccggcgaggagaagggcgccaccggcggcagtagttcttctggcagcggggctggctcttgttgtctcggtgcagagggtggggcagacccaaggggcgcgggtagcgccgctgccgctggtgctgccgctctggacgaaccagctgctgccggacaaaaggaaaaggatgaagctcttgaagagaagctgcgcaatctgacatttaggaaacaggtgagttatcgtaaggccatcagccgagccgggctgcagcacctggcgccagcccaccctctgagcctgccagtagcaaatgggccggcaaaagagccacgcgccactctggactggtccgaaaatgctgtgaacggggagcacttgtggctggaaacgaatgttagtggggacctgtgctatcttggagaagaaaactgtcaggtgagatttgcaaaaagtgccctgaggcggaagtgcgccgtgtgtaagatcgtcgtgcacacagcttgtattgagcaactggagaagatcaactttcgctgtaaacccacgttcagggagggtggttcacgctctccgcgcgaaaactttgtgagacaccactgggtgcaccgccggcgacaagagggtaaatgtaagcagtgtggtaaggggttccagcagaaattttcatttcactctaaggagatcgtggcgatttcttgctcatggtgtaaacaggcgttccataacaaggtgacttgttttatgcttcatcatatcgaagagccgtgtagtctgggagcacatgctgcagtgattgttcctcccacttggattattaaggttaaaaagccccagaatagtctcaaggcctctaatcgtaaaaagaaacggaccagtttcaaaaggaaggccagcaagcgggggatggagcaggaaaacaagggccgcccatttgtcattaaacccatctcaagtccgctcatgaagccacttctggtcttcgtgaatcccaagagtggggggaaccaggggaccaaggtgctgcagatgttcatgtggtatctgaatccccggcaggtatttgacttgagccaggaagggcccaaggatgcactagagctgtaccgcaaggttccgaatctgcgcattttggcatgcggtggagacggcacagtaggttggatactatctatcctcgacgaactgcagttatcgccccagcccccagtgggggtattacccctcggcactggaaatgatttagcccggactcttaactggggaggcggctacaccgatgagcctgtgtctaagatcctgtgtcaggtagaagacgggacagtggtgcaactggaccggtggaatctgcatgtggaaaggaatccagacttgcctcccgaggagctggaggatggagtatgtaaactgcccctgaacgtctttaataattatttctctcttggattcgatgcccacgtgacgttggagttccatgagagcagagaggctaaccccgaaaaattcaattcgaggtttcgcaacaaaatgttttacgcaggagccgcattctctgacttccttcaaagatcgtccagggatttgagcaaacatgttaaggtcgtttgtgacggtacagatttgacaccgaagatccaggaactgaaattccaatgcatagttttcttgaacattccaaggtattgtgccggaaccatgccctggggcaaccccggggaccatcacgattttgaaccgcaacgacatgacgatggctacattgaagttatcggttttacaatggccagtttggcggcactgcaggtgggcggccacggtgaacgactgcatcaatgtcgtgaggtgatgctcttgacctataagtctattcccatgcaggtggacggggaaccttgcaggctggctccggccatgatcagaatttcacttaggaaccaggctaatatggtccagaagagcaagagaagaacttccatgccccttttgaacgacccacagagcgtgccggatcggctccggattcgcgtgaataagatctccctgcaagattatgaaggcttccactacgacaaagagaaactgagagaggcaagcataagtgactggttgaggactatcgccggggaactcgttcagagtttcggcgccatcccccttggtatccttgttgtgaggggtgattgcgacctggagacatgccgcatgtatattgacagactgcaggaagatctgcaatctgtctccagcggttcacagagagtgcactaccaggatcatgaaacatctttcccgcgcgccctgagcgcacaacggttgtcacctcgttggtgctttctggatgccactagcgccgatcggttttaccgaatcgacagaagccaggagcatctccacttcgtaatggagatctcacaagatgaaatctttatacttgacccagacatggtagtgtcacagccggccggcaccccccccgggatgccagatcttgtggtggaacaggcatctggtagcccagtgtcctccgaagaccacgccatcctgcaggccgtgatcgccggcgatctcatgaagttaatcgaatcatacaagaacgggggatcgttgctcatccagggcccagaccactgctctctgctgcactacgccgcgaagaccggtaacggggagatcgtgaaatacattcttgaccacgggccctctgagctcttggacatggcagattcagagaccggtgagacggcattacacaaggcggcctgtcagagaaatcgagccgtttgccagctcctagtggacgcaggtgcaagcctcaggaagaccgatagcaaaggcaaaacccctcaggagcgagcccagcaggccggagatccggatctggccgcctatctggaatcacggcagaactacaaggtgattgggcatgaggacttagagaccgctgtgtag

SEQ ID NO: 307791 - DNA, 2949 bp, Artificial Sequence
  derived and/or modified sequence
atgaacccatcgtcctctgcgggagaggaaaagggagcgacgggaggtagcagctcctccggtagcggagcgggtagttgctgcctgggcgctgaggggggtgccgaccccaggggcgctgggagtgctgccgcagctggtgccgctgccctcgatgagcctgctgcagcgggtcagaaggaaaaggacgaggctcttgaggagaagttgcggaacctgacgttccgaaagcaggtaagttacaggaaagctatttcaagagccggattgcagcacttggctcctgcccaccctctttcgcttccagtcgcaaatggaccagctaaggaaccaagagccaccctcgattggagcgagaatgctgtcaacggagaacatctgtggcttgagaccaacgtcagcggagatttgtgctatctaggggaggaaaactgtcaggtgcgctttgccaaaagcgcccttcgcaggaagtgcgccgtgtgcaagatcgtagtacatacggcatgcatagagcagctggagaagattaattttcgttgcaagcccacttttcgggagggcggttcccgaagtcctagggaaaactttgttcggcaccactgggtgcaccggagacggcaagaaggtaaatgtaagcagtgtggaaaaggattccagcaaaagttcagcttccatagcaaggagatcgtggctataagttgctcatggtgcaaacaggcgtttcacaacaaagtcacctgcttcatgctgcaccacatcgaagagccgtgcagcctcggcgcacacgccgctgtgattgtgcctcctacctggatcatcaaggttaagaagcctcagaactctttaaaagctagcaaccgtaaaaagaaacggacttcttttaaacggaaagcttccaagcgcggaatggagcaggagaacaagggcaggccctttgtgatcaagccaatatcttcccctctcatgaaacctttgttggtatttgtcaatcctaaatctggaggaaatcaaggaacgaaagtgttgcaaatgttcatgtggtatctcaatcccagacaggtgtttgacttaagccaggaggggccaaaagatgccctagagctttatcggaaagttcctaacctccggatcctggcctgcggtggggacggcactgtgggatggatcctgtccattctcgacgaactccagctgtcacctcaaccgcctgttggagtgcttcccttgggcactggcaacgacttggccaggacactgaactggggcggaggctacacagacgaaccagtctccaagatcctttgtcaagtggaagatggcacggtggtccagctcgaccgctggaacctccacgtagagaggaaccccgacctgcctcccgaggaactcgaagatggggtttgtaaactcccgctgaatgtgttcaacaattatttcagtttgggcttcgatgctcacgttacacttgaattccacgaaagccgagaggcgaatcccgaaaagtttaattcccggtttcggaacaagatgttctacgcaggggcagccttttctgacttcctccagcgctcctctcgcgacctgtctaaacacgttaaagtggtatgcgacgggaccgacctgactcccaagatacaagagttgaagtttcagtgcatcgtgtttctgaacattcctaggtactgtgctgggacgatgccctggggaaacccgggagaccatcacgactttgaacctcaaaggcacgatgacgggtatatcgaagtgataggcttcacgatggctagcttggctgcattacaagtggggggacacggggaaagactgcaccagtgccgcgaggtgatgctgctgacctacaagtccatcccaatgcaggtggacggggagccctgtaggcttgcacctgcgatgattcggatctcattaaggaaccaggctaatatggtgcagaaatcaaagcggaggacatcgatgccactgctgaatgaccctcagagtgtgccagatagactgaggattagagtaaataaaatctctctccaggattatgaaggctttcactacgacaaggaaaagttacgggaggcctctattagtgactggctacggactatagccggagagctcgtgcagagttttggggctatcccactgggcatactagtggtgaggggcgactgcgatctcgaaacttgccgaatgtatatcgatagattgcaagaagacttacagagtgttagttcagggagccaaagagttcactatcaagatcacgaaacctcttttccacgcgcactgagtgcgcagaggttgtctcctcggtggtgtttccttgatgcaacctctgccgataggttctacagaattgaccggagtcaggagcacctgcattttgtcatggagatcagccaggatgaaattttcatcctcgaccccgatatggtagtgtcccagccagccggaacaccaccaggaatgcccgatctcgtggtggagcaagcctctggcagccccgtgtctagcgaggaccacgcaatcttgcaggccgtgattgcaggggacctgatgaaactgatagagtcctataagaatggcggatcccttctgattcaaggtccggaccactgtagtttactgcactacgccgcaaagacggggaatggggagatcgtcaaatatatccttgatcacgggccttctgagctccttgatatggccgatagcgagactggtgaaactgccctgcataaagccgcatgtcagaggaaccgggctgtgtgtcagctgctggttgacgccggtgccagtctgcgtaaaactgacagcaaggggaaaaccccgcaggaaagagcgcaacaggctggggaccccgatctggctgcctatctggaaagtcgtcagaactataaggtgatcgggcacgaggatctggagaccgcagtgtag

SEQ ID NO: 307792 - DNA, 2949 bp, Artificial Sequence
  derived and/or modified sequence
atgaaccccagcagcagcgccggcgaggagaagggcgccaccggcggcagcagcagcagcggcagcggcgccggcagctgctgcctgggcgccgagggcggcgccgaccccagaggcgccggcagcgccgccgccgccggcgccgccgccctggacgagcccgccgccgccggccagaaggagaaggacgaggccctggaggagaagctgagaaacctgaccttcagaaagcaggtgagctacagaaaggccatcagcagagccggcctgcagcacctggcccccgcccaccccctgagcctgcccgtggccaacggccccgccaaggagcccagagccaccctggactggagcgagaacgccgtgaacggcgagcacctgtggctggagaccaacgtgagcggcgacctgtgctacctgggcgaggagaactgccaggtgagattcgccaagagcgccctgagaagaaagtgcgccgtgtgcaagatcgtggtgcacaccgcctgcatcgagcagctggagaagatcaacttcagatgcaagcccaccttcagagagggcggcagcagaagccccagagagaacttcgtgagacaccactgggtgcacagaagaagacaggagggcaagtgcaagcagtgcggcaagggcttccagcagaagttcagcttccacagcaaggagatcgtggccatcagctgcagctggtgcaagcaggccttccacaacaaggtgacctgcttcatgctgcaccacatcgaggagccctgcagcctgggcgcccacgccgccgtgatcgtgccccccacctggatcatcaaggtgaagaagccccagaacagcctgaaggccagcaacagaaagaagaagagaaccagcttcaagagaaaggccagcaagagaggcatggagcaggagaacaagggcagacccttcgtgatcaagcccatcagcagccccctgatgaagcccctgctggtgttcgtgaaccccaagagcggcggcaaccagggcaccaaggtgctgcagatgttcatgtggtacctgaaccccagacaggtgttcgacctgagccaggagggccccaaggacgccctggagctgtacagaaaggtgcccaacctgagaatcctggcctgcggcggcgacggcaccgtgggctggatcctgagcatcctggacgagctgcagctgagcccccagccccccgtgggcgtgctgcccctgggcaccggcaacgacctggccagaaccctgaactggggcggcggctacaccgacgagcccgtgagcaagatcctgtgccaggtggaggacggcaccgtggtgcagctggacagatggaacctgcacgtggagagaaaccccgacctgccccccgaggagctggaggacggcgtgtgcaagctgcccctgaacgtgttcaacaactacttcagcctgggcttcgacgcccacgtgaccctggagttccacgagagcagagaggccaaccccgagaagttcaacagcagattcagaaacaagatgttctacgccggcgccgccttcagcgacttcctgcagagaagcagcagagacctgagcaagcacgtgaaggtggtgtgcgacggcaccgacctgacccccaagatccaggagctgaagttccagtgcatcgtgttcctgaacatccccagatactgcgccggcaccatgccctggggcaaccccggcgaccaccacgacttcgagccccagagacacgacgacggctacatcgaggtgatcggcttcaccatggccagcctggccgccctgcaggtgggcggccacggcgagagactgcaccagtgcagagaggtgatgctgctgacctacaagagcatccccatgcaggtggacggcgagccctgcagactggcccccgccatgatcagaatcagcctgagaaaccaggccaacatggtgcagaagagcaagagaagaaccagcatgcccctgctgaacgacccccagagcgtgcccgacagactgagaatcagagtgaacaagatcagcctgcaggactacgagggcttccactacgacaaggagaagctgagagaggccagcatcagcgactggctgagaaccatcgccggcgagctggtgcagagcttcggcgccatccccctgggcatcctggtggtgagaggcgactgcgacctggagacctgcagaatgtacatcgacagactgcaggaggacctgcagagcgtgagcagcggcagccagagagtgcactaccaggaccacgagaccagcttccccagagccctgagcgcccagagactgagccccagatggtgcttcctggacgccaccagcgccgacagattctacagaatcgacagaagccaggagcacctgcacttcgtgatggagatcagccaggacgagatcttcatcctggaccccgacatggtggtgagccagcccgccggcaccccccccggcatgcccgacctggtggtggagcaggccagcggcagccccgtgagcagcgaggaccacgccatcctgcaggccgtgatcgccggcgacctgatgaagctgatcgagagctacaagaacggcggcagcctgctgatccagggccccgaccactgcagcctgctgcactacgccgccaagaccggcaacggcgagatcgtgaagtacatcctggaccacggccccagcgagctgctggacatggccgacagcgagaccggcgagaccgccctgcacaaggccgcctgccagagaaacagagccgtgtgccagctgctggtggacgccggcgccagcctgagaaagaccgacagcaagggcaagaccccccaggagagagcccagcaggccggcgaccccgacctggccgcctacctggagagcagacagaactacaaggtgatcggccacgaggacctggagaccgccgtgtag

SEQ ID NO: 307793 - DNA, 4687 bp, Artificial Sequence
  derived and/or modified sequence
gatggatgctgcgggaaggggctgccatttgctgcccctgccagcggcgcgcggacctgcccgcgctcctgcagccgccgccgccgccgccgccagcccgcccggcccctgcagcggcgccgcctgcgctccctccgcggccgccggagcgggcgccatgaaccccagctcctcggcgggagaggagaaaggggcgacgggcggcagcagcagcagcggaagcggcgccgggagctgctgcctgggcgccgagggcggcgcggacccgcggggcgcagggtcagccgcggcggcgggggccgctgccctggacgagcccgcggccgccggccagaaggagaaggacgaagcgctggaggagaagctgaggaacttaactttccggaagcaggtctcgtacaggaaagcaatctcccgggcaggcctccagcatctggctcctgcacatcccctcagccttcctgtggcaaatggtccagccaaggagcccagagcgactttggactggagtgagaatgccgtgaatggagaacacctgtggctggagaccaacgtctcgggagacctctgctaccttggagaggagaactgccaagtcagatttgcaaaatcagctctcaggaggaagtgtgcagtctgtaaaatcgtcgtccacaccgcctgcattgagcagctagaaaagattaatttcagatgtaaaccaacatttcgagaaggaggctcaaggtcaccaagagaaaattttgtacgtcatcactgggtgcacaggcgtcggcaggaggggaaatgtaagcagtgtggtaagggcttccagcaaaagttctccttccacagtaaagagattgtggctatcagctgttcctggtgcaagcaggcgtttcacaataaggtgacctgcttcatgctgcatcacattgaagaaccctgctccctgggggctcatgctgctgttattgtcccgcccacttggatcattaaggtgaagaaacctcagaactccctgaaggcttcaaatcggaagaagaagagaacaagctttaaaagaaaagccagtaaaagagggatggaacaggaaaacaaaggtcgtccttttgtgataaaacccatctcttctcctctcatgaaacccttgcttgtatttgtgaatcccaagagtggaggcaaccagggaaccaaagtcctgcagatgttcatgtggtacctgaatccacggcaagtctttgatctttctcaggaagggccaaaagatgcgcttgaattgtataggaaagtaccaaatctgcgaattctggcctgtggtggggatggaacggtgggctggatcctttccatcctggatgaactgcagctgagccctcagcctcctgtgggggtccttcctctggggactgggaatgacctggctcgaactctcaactggggagggggctacactgatgaacctgtttctaagatcctgtgtcaagtggaagatgggacagttgtacagctagatcgctggaacctccatgtggaaagaaaccccgacttgcctccagaagaacttgaagatggcgtatgtaagctccctctgaatgttttcaataactacttcagccttggatttgatgcccatgtcacactggagttccatgaatccagagaagcaaatccagagaaattcaacagtcgttttcgaaataaaatgttctatgcaggggcagctttttctgacttcctacagagaagttctagagatctatccaaacatgttaaagttgtttgtgatggaacagatctcaccccaaagattcaggaactgaagttccagtgtatagtatttttaaatatacccagatattgtgctggcacaatgccctggggaaacccaggtgatcaccatgatttcgaacctcagcgtcatgatgatggttatattgaagtcattggatttaccatggcctctttggcagccctgcaagttgggggccatggagagaggctacaccagtgtcgagaagtcatgcttctaacttacaaatccatccccatgcaagtggatggggagccctgtaggttggccccagctatgattcggatctccctgaggaatcaggccaacatggtacagaagagcaagaggagaacatccatgcctttactcaatgatccccagtctgtcccagatcgtctgaggatccgggtgaacaaaatcagtttacaagactatgaaggattccactatgacaaggagaaactccgagaagcttctatttcagactggttaagaaccattgctggggaactagtgcagtcatttggagcgatacctctgggtattctagttgtgcgtggagactgtgatttggagacttgccgtatgtacatagaccgcctacaggaggacctacagtcagtttcttctggctcccagagagttcattaccaggaccatgaaacctccttccccagggctctctcagcacagaggctctctcctcggtggtgcttcctagatgcaacttctgctgatcgcttttatcgaatagacagatctcaggaacatttgcactttgtgatggagatttcccaagatgagatttttattctggacccagatatggtggtgtcacagccggcggggacacctccgggcatgcctgacctggtggtggaacaagcctcggggtcaccagtctcttcagaagatcatgcaattttgcaggcagtaatagctggtgatcttatgaagctaatagaaagctataaaaatggaggcagtctgctaattcagggaccagaccactgttcactccttcactacgcagctaaaaccggcaacggggagattgtgaaatatatccttgaccacggaccttccgagttattggatatggcagacagtgaaacgggtgagactgcactgcacaaggctgcctgccagcggaaccgggctgtgtgccagcttctggtggatgcaggagcatctctgagaaagacggactccaagggtaagacacctcaagaaagagcacagcaggctggggacccagacttggctgcttacctagaaagccgtcagaactataaggtcattggccatgaggacctggaaactgctgtttgaccctggtattcgggcaaagaggacatgagcaagcgtatcacatctgccctccctgcaattgggcagctcccctggaagaagctgatggaattcatatatctgtctctctcctgcaagaatctacctgagaccatgccactagcttttaagggctaccaagatgtacaacagaacatgatagcccattgagaaggaggcaggatacctggagatttgtggaatacagtacgagttccacaaaatttgatccttattgcttccagcaagtagcatgaacttctgtgttcacctgtataatttattttaaagattcaaaggatgttcgtataaatggcactgctccatcctccccctatgcattggtttttttccctgtaccatacaattctactgtaactacccatcaacttaaagaaaaatattatctcttctctttacattcagtcttggaagaccacaagattgtctgaaggccttctaaaaccttctgaatgtcctgcagaaatataactgtaaaaccacttccatttctaagactaaatatatcaagactatttagtgactctctctgcatgtccccctcacccgccaaccctccgtttcattatataggagctgggaagtgccacatggataatgtcaacttgtgtgctatatctctgaggaatggtgaggtggcatgggagatgtctgtgcttggaggtacctcagagaggtaacccaggggtcagcccaggctgctgggctgtagccaatagccatgcaggactggttcagcttgggctgtctgtacagctccgtactgcctatgtgtagccatctttgccttttgctgcaatagaagatgagcaaaggattaaacagaggcccacagctagtttgcagaaccactcaattttaagtgctgtttaaattgcagagcaaataatcctgtgtgggaactgtggttacaggaaatggagcactctaacaatgtttacttctaaactttgttgaatgataatagaaagcaccctaattgacttggaaaaaaaaaacagcaaaagcaaaagtagcaacatatgtcaacatatgtcactgaaataggaaacagtcattggaatgttgcacagaggctaataactatagactgttggatacagtggtgagaggagccccattttaggtctttcttttaggtttttggttttcattactccaagtaatccttgacccaagaacaaaggcttgttgtatgagttccactgccagatttatgggatgcctggatcattcagaaggatgcttcaactattatttgtcaggtccaaaggtcgtacttaataaccccattttctatgtatggggtagtctaatatattattttatctactttatttttcccttttcagaaagtccttagtgcaaaccaccattggaatctagccagaaatgtctgtcagatagttagaattgtaacatctaaacctgccacggatcgaatggtacttacaggtacctctcttagggactctgtgatccctaaaatatcagaagaaaatgtctgtctttctgtccaaatatctacttgacttgggggta

SEQ ID NO: 307794 - DNA, 3318 bp, Artificial Sequence
  derived and/or modified sequence
tggatcccatctgagaagcagacctttttcacagtcatagcatccttccgcgggactgtgccatatgggctttccctggagatcggcgataccgtccagattctcgaaaagtgcgacggatggtaccgtggctttgctctgaaaaatccaaacatcaaaggcattttcccttcctcttatgtgcatctcaagaacgcgtgtgtaaaaaacaaaggccagtttgagatggtgatccccactgaggattctgtcatcacagaaatgacctctacgctgcgcgactggggcaccatgtggaagcagctttacgtccgtaacgagggagacctattccataggctttggcacattatgaatgaaattttagatctgagacgccaggttttagtcgggcatctcacccatgacagaatgaaagacgtcaaaagacatattaccgccaggcttgactggggcaatgagcagctcgggttggatcttgtacccagaaaagagtacgccatggtggatcctgaggatatttccattaccgagttataccgcctgatggaacaccggcaccgtaaaaaggataccccggtgcaggcttccagccatcacctgttcgttcagatgaaatcgctgatgtgttcaaatcttggcgaggaactcgaagtcatttttagcctcttcgactcaaaggagaacaggccgatctccgaaagattttttcttcggttgaatcggaacggcctgcctaaagcacccgacaaaccggagagacactgctccctgttcgtagacctgggcagctcagagcttcggaaagatatttatatcacagtgcacatcattcgaatcggtcggatgggcgccggggaaaagaagaacgcttgttccgtgcagtatcggaggccttttggttgtgctgtactgtctattgctgaccttctgacgggagagacgaaggatgatctcatactgaaggtgtacatgtgcaacactgaatcggagtggtaccagatccacgagaacattataaagaagctcaacgccagatataacttgaccgggtcaaatgctggcctggccgtgtctctacagcttctgcatggggacatcgaacagatacgccgtgagtattcctcggtattctcccatggagtttctatcacccgaaagttgggcttttctaacatcatcatgccaggcgaaatgcgaaacgacttatatattaccatcgaaagaggggagttcgagaaaggtggtaagtcagtggcccggaatgtcgaagtcaccatgtttatcgtggactcctctggacagactctgaaagacttcatcagctttggttccggcgagccacccgcctccgagtaccattcgttcgtgctttaccataacaatagtccgcgatggagcgaactgcttaagttgcctataccagtggataaatttcgaggtgctcatattaggttcgagtttcggcactgttctacaaaagagaagggggagaaaaaactgtttgggtttagtttcgtgccgctcatgcaggaggatgggcgcactctacccgatggaactcatgaactcatcgtgcacaagtgtgaagagaatacaaatcttcaagacacaactcggtatctgaagctgcccttttctaaagggatttttttaggcaacaacaaccaggcaatgaaggccaccaaggaaagcttttgcatcaccagctttctctgtagcacaaaactgacccagaatggtgatatgctcgacttgttaaagtggagaactcacccagacaaaatcacgggatgtctcagtaaactgaaggaaatcgatggatctgagatcgttaaattcctgcaggacacactcgacaccctgttcggcattctggacgaaaattcccagaaatacgggagtaaggttttcgattcgctggtccacattatcaatctcctacaagactctaagttccaccactttaagcccgtgatggacacctacatcgagagccacttcgccggggcactggcgtatagggatctgattaaggtgcttaaatggtacgtggatagaattaccgaagccgagcgccaggagcacatccaggaggtgctgaaggcccaggagtacatcttcaaatatatcgtacagtctcggcgactgttctcactcgctacaggcggccagaacgaggaagagtttcgatgttgtatacaggagctccttatgagcgtgagattctttctgagtcaggagtctaaggggtccggtgctctgagtcagagccaagcagtgttcctgtcatcattcccagccgtgtattctgaactgctcaaactattcgacgtgcgggaggttgccaacttggtccaggatacattaggaagtttacccaccattctgcacgtggatgattcactccaggcaattaagctgcaatgtatcggtaagaccgtagaaagtcagctgtacaccaatccagatagcagatatattctcctcccagtggtgttgcaccacttacacatacacttgcaggagcaaaaagacctgataatgtgtgcacggatcctgtccaatgtgttctgtttaatcaagaaaaattctagtgagaaatctgtgctggaggagattgacgtcatcgtggcatcactgttggacatccttttgcgtactatactagagatcacgagtaggccacagccctcctccagcgcgatgcgctttcagttccaggatgtgaccggcgaattcgtggcgtgcctgctgtccctgcttaggcaaatgacagaccgtcattatcaacaactgcttgattcatttaacacgaaggaggagctgcgtgactttctgctgcaaatttttacagttttccgcatcctgattcgaccagagatgtttccgaaagattggaccgtgatgcggcttgtagctaataatgttattattacaaccgtgctttacttatctgatgccttaagaaagaattttcttaacgaaaactttgactataaaatttgggactcttatttctatttggctgtgatttttataaaccagctgtgcctgcagctcgaaatgttcacccctagtaagaaaaaaaaggtccttgagaaatacggagatatgagggttacaatgggatgtgagatcttctccatgtggcagaatctgggggagcacaagctccatttcattcccgccttaagacaggagaacagactgaacctgggcggtggcgggtgctcagagccaagggcatgccattgcacaccagcctgggccactaagagggattgcgtgtcaaagaaaaaggagaagaagacatag

SEQ ID NO: 307795 - DNA, 3318 bp, Artificial Sequence
  derived and/or modified sequence
tggatccccagcgagaagcagaccttcttcaccgtgattgccagcttccggggcaccgtgccctacggcctgagcctggagatcggggacacagtgcagatcctggagaagtgtgatggctggtaccggggctttgccctgaagaaccccaacatcaagggcatcttccccagcagctatgtgcacctgaagaatgcctgtgtgaagaacaagggccagtttgagatggtgatccccacagaagattctgtcatcacagagatgaccagcaccctgcgggactggggcaccatgtggaagcagctgtatgtgagaaatgaaggagacctcttccaccggctgtggcacatcatgaatgagatcctggacctgcggcggcaggtgctggtgggccacctgacccatgacaggatgaaggatgtgaagaggcacatcacagcccggctggactggggcaatgagcagctgggcctggacctggtgcccaggaaggagtatgccatggtggaccctgaggacatcagcatcacagagctgtaccgcctgatggagcaccgccacaggaagaaggacacccctgtgcaggccagcagccaccacctgtttgtgcagatgaagagcctgatgtgcagcaacctgggggaggagctggaggtgatcttcagcctgtttgacagcaaggagaaccggcccatcagcgagcgcttcttcctgcggctgaacagaaatggcctgcccaaggccccagacaagccagagcggcactgcagcctgtttgtggacctgggcagcagcgagctgaggaaggacatctacatcaccgtgcacatcatccgcatcggccgcatgggcgctggggagaagaagaatgcctgcagcgtgcagtacagaagacccttcggctgtgctgtgctgagcattgctgacctgctgaccggggagaccaaggatgacctgatcctgaaggtgtacatgtgcaacacagagagcgagtggtaccagatccacgagaacatcatcaagaagctgaatgcccgctacaacctgaccggcagcaatgccggcctggccgtgtccctgcagctgctgcacggggacatcgagcagatcagaagagagtacagcagcgtcttcagccacggcgtgtccatcaccaggaagctgggcttcagcaacatcatcatgcctggagagatgagaaatgacctgtacatcaccatcgagcggggggagtttgagaagggcggcaagtctgtggccagaaatgtggaggtgaccatgtttattgtggacagcagcggccagaccctgaaggacttcatcagctttggaagtggagagcccccagccagcgagtaccacagctttgtgctgtaccacaacaacagcccccgctggagcgagctgctgaagctgcccatccctgtggacaagttccggggggcccacatccgctttgagttccgccactgcagcaccaaggagaagggggagaagaagctgtttggcttctcctttgtgcccctgatgcaggaggatggccgcaccctgcctgatggcacccatgagctgattgtgcacaagtgtgaggagaacaccaacctgcaggacaccacccgctacctgaagctgcccttcagcaagggcatcttcctgggcaacaacaaccaggccatgaaggccaccaaggagagcttctgcatcaccagcttcctgtgcagcaccaagctgacccagaatggagacatgctggacctgctgaagtggaggacccacccagacaagatcaccggctgcctgagcaagctgaaggagattgatggcagcgagatcgtgaagttcctgcaggacaccctggacaccctgtttggcatcctggatgagaacagccagaagtatggcagcaaggtgtttgacagcctggtgcacatcatcaacctgctgcaggacagcaagttccaccacttcaagcctgtgatggacacctacatcgagagccactttgctggggccctggcctacagagacctgatcaaggtgctgaagtggtacgtggaccgcatcacagaagctgagcggcaggagcacatccaggaggtgctgaaggcccaggagtacatcttcaagtacatcgtgcagagcagaagactcttcagcctggccaccggcggccagaatgaggaggagttccgctgctgcatccaggagctgctgatgtctgtgcgcttcttcctgagccaggagagcaagggcagcggggccctgagccagagccaggccgtgttcctgagcagcttccctgctgtgtacagcgagctgctgaagctgtttgatgtgcgggaggtggccaacctggtgcaggacaccctgggcagcctgcccaccatcctgcacgtggatgacagcctgcaggccatcaagctgcagtgcatcggcaagacagtggagagccagctgtacaccaacccagacagccgctacatcctgctgcctgtggtgctgcaccacctgcacatccacctgcaggagcagaaggacctgatcatgtgtgcccgcatcctgagcaatgtgttctgcctgatcaagaagaacagcagcgagaagtctgtgctggaggagattgatgtgattgtggccagcctgctggacatcctgctgcggaccatcctggagatcaccagccggccccagcccagcagcagcgccatgaggttccagttccaggatgtgactggagaatttgtggcctgcctgctgagcctgctgcggcagatgacagacagacactaccagcagctgctggacagcttcaacaccaaggaggagctgcgggacttcctgctgcagatcttcaccgtcttccgcatcctgatccggcctgagatgttccccaaggactggacagtgatgaggctggtggccaacaacgtcatcatcaccaccgtgctgtacctgagtgatgccctgaggaagaacttcctgaatgaaaattttgactacaagatctgggacagctacttctacctggccgtcatcttcatcaaccagctgtgcctgcagctggagatgttcacccccagcaagaagaagaaggtgctggagaagtacggggacatgagggtgaccatgggctgtgagatcttctccatgtggcagaacctgggggagcacaagctgcacttcatcccagccctgcggcaggagaaccggctgaacctgggcggcggcggctgcagcgagccccgggcctgccactgcaccccagcctgggccaccaagagggactgtgtgtccaagaagaaggagaagaagacctag

SEQ ID NO: 307796 - DNA, 3318 bp, Artificial Sequence
  derived and/or modified sequence
tggatccccagcgagaagcagaccttcttcaccgtgatcgccagcttcaggggcacggtcccctacggcttgtctctggaaattggggacaccgtgcaaattttggagaagtgcgacggctggtaccgaggtttcgctttaaagaatcctaacatcaagggaattttccccagcagctatgtgcatctgaagaatgcttgcgtcaaaaacaagggccagttcgagatggtgatccccaccgaggacagcgtgattacagaaatgaccagcacactcagagactggggaacgatgtggaaacagctgtatgttcgaaacgaaggtgatctctttcatcgcctgtggcacataatgaacgaaatattagacctcagacggcaggttttggtgggacacctcacacacgaccgaatgaaagatgtgaaaaggcatatcactgctaggttggactggggcaatgaacagttaggtcttgatctagtgccgagaaaagagtatgccatggtggaccctgaagatatctctattaccgaactgtaccgcctgatggaacaccggcataggaagaaggacactcctgtgcaggcgagcagccatcatctgttcgtacagatgaaatctttgatgtgctctaacctcggcgaggagctggaagttatcttctccctcttcgacagtaaggaaaacagacccatctcagagcgtttctttctgaggctgaacaggaatgggctacccaaagcacctgataagccagagcggcactgcagcctcttcgttgacctcggcagcagtgagcttagaaaagacatttatatcactgtgcacattatccgtatcgggagaatgggcgcaggcgaaaaaaagaatgcgtgttcagtgcaataccggcgaccttttgggtgtgccgtgctgtctatcgcggatctgctgactggagagactaaggacgatttgatactcaaggtctacatgtgtaacacagaatctgagtggtatcagatccatgagaatattatcaagaaactgaacgcacgctacaatctgacagggtccaacgccggattggctgtatctctacagctgctccacggggacattgaacagatcaggcgcgagtattcaagcgtgttcagtcacggagtgtccattaccagaaaattaggcttttctaatattatcatgcctggcgagatgaggaatgatctctatatcaccatcgaacgtggcgagtttgagaagggggggaagtccgtcgccagaaacgtagaggtaaccatgttcatcgtggactcctcagggcagacacttaaggacttcatctcattcgggtccggcgagccacctgcaagcgaataccacagctttgtgctctaccacaacaactcccctagatggagtgagctgctcaaactgcccattcccgtagacaaatttagaggggcgcacatccgatttgagttcaggcattgcagcacgaaagaaaagggagaaaagaagctgttcgggttctctttcgtgcccctgatgcaagaggatgggcgcactctgccagatggaacacacgagcttattgtgcacaaatgtgaagagaacactaacctgcaggacacgacccgatatctgaagttaccttttagcaaggggattttccttgggaacaacaaccaggccatgaaagcaaccaaagaaagcttttgcatcacatcatttctctgcagcacaaaactgacgcagaatggagacatgttagacctactcaagtggcggacccatccggataagattacaggatgcctgagtaagctgaaggaaatcgatggttcagagattgtcaagtttctgcaagacacccttgacaccctttttggcatcctggatgagaatagccagaagtacggatcgaaggtgttcgacagcttggtgcatattatcaacctactgcaagatagcaagttccaccactttaagcccgtgatggatacctacattgagagtcacttcgctggggctttggcttacagggatctgattaaagtgctgaagtggtacgtcgaccgcatcacagaagctgaacgccaggagcacattcaggaggtgctcaaagcccaggagtatatatttaagtacattgtccagtcacggagacttttctccctggccaccggtggtcaaaatgaagaggagtttagatgctgcatccaagagttgttgatgtccgtgcgctttttcctatcccaggaatccaaggggagcggagctctgtctcaatcacaggccgtgttcctgtcctcctttccagcagtctacagcgagctgctgaaactattcgacgtgagagaagtggcaaacctggtgcaagacactctgggatccctccccactatcctgcatgtggacgactcactgcaggcgatcaaactccagtgcattggcaagaccgtggaatcccagctctatacaaaccccgactcgcggtatatactgctgcccgtagttttgcaccacctgcacatccatttgcaggagcagaaggatctgataatgtgtgctagaatcctcagtaatgtgttctgcctgattaagaaaaactcttctgagaagagcgtactggaggagattgatgtgatcgtggcctctctgctggatatcttgctcagaaccattctggagatcacatcccgccctcagccctcctcctctgctatgcggttccaatttcaggacgtgactggtgagttcgtggcctgtcttttaagcctgttgcgtcaaatgaccgatcgacattaccagcagctgctggactcatttaatactaaggaggaattaagggacttccttctgcagattttcacagtcttcaggattttgatcagaccagagatgtttccgaaggattggacagtcatgagactggtagctaataatgtcatcataactactgtgctctatttatctgacgctctcagaaagaattttctgaatgagaattttgactataagatttgggatagctacttttacttagccgtgatcttcattaatcagctgtgcctccagctcgaaatgtttaccccctcaaagaaaaagaaagtcctcgagaaatacggtgatatgcgagtcacaatggggtgtgagattttcagtatgtggcagaatctgggcgagcacaaactgcacttcattccggccctgcgacaggaaaatcgcttgaacctgggcggcggcgggtgctcagaaccacgcgcctgccattgcactccggcttgggccactaagcgcgattgtgtttccaaaaagaaagaaaagaagacatag

SEQ ID NO: 307797 - DNA, 3318 bp, Artificial Sequence
  derived and/or modified sequence
tggatcccctctgagaagcaaacattttttaccgttattgcatctttccgtgggaccgtcccgtacggtctcagcttagagattggcgatacggtgcagattctggaaaaatgtgatggatggtacaggggatttgccctcaaaaacccgaacatcaaaggaatttttcccagtagctacgtgcatctgaaaaatgcttgtgttaaaaacaaaggccaatttgaaatggtgatcccaaccgaagacagtgttattaccgagatgaccagcaccctgagggactggggtaccatgtggaagcagctgtatgtccgaaacgagggtgacctattccatcgtctatggcacataatgaatgagattcttgatttgcggagacaggtgcttgtgggccacctcactcacgacaggatgaaagatgtgaagagacatatcacagcccgactggattggggaaatgaacagctgggtctcgacctggtgccgaggaaagaatacgcaatggtggatcctgaggacatctcgataacagagctctatcggctcatggagcaccggcataggaaaaaagatacaccagtccaggcgagcagccaccacttatttgtacagatgaagtcactgatgtgttccaacctaggtgaggaacttgaagtcatattttcacttttcgactccaaggagaataggcccatttccgagaggttcttccttcggctaaaccggaacggactcccaaaggctcccgacaagccagaaagacactgcagcttattcgtggacttaggatccagcgagctccggaaagacatctatattacagtccacatcattcgcattggaaggatgggagccggagagaagaagaacgcctgttctgttcagtaccgaagaccattcggatgcgcagttctgagcattgccgacctactcacaggtgaaactaaggatgatctaattctgaaagtatatatgtgcaatacagagagtgagtggtaccaaatccacgaaaacatcatcaagaaattaaatgcacggtacaacctgaccggctctaatgccggtttggccgtctctctccaactgctgcacggggatattgagcagatcaggagggagtactcatctgtcttttcacacggggtgtccataacgagaaagctcgggttttccaatattatcatgcccggagaaatgaggaatgacctgtatatcactatcgagcgtggggagtttgagaaaggcggaaaatctgtggccaggaacgtcgaagtcaccatgttcatcgtggactcttcaggtcaaacgctcaaggactttatttccttcggatccggggaacctcctgcttctgagtaccactcttttgtgctctatcacaataactcccccaggtggtcagaactgttaaagcttcccatccctgttgataaattcaggggggcacatattcgcttcgagtttcgtcactgcagcacgaaagagaagggagagaaaaaattgtttgggttcagcttcgtccctctgatgcaggaagacggtaggacattacctgatggaacacacgagctgatcgtgcataagtgtgaggaaaacacaaatctccaggacacaacaaggtaccttaaactaccattctctaaaggaatctttctcggaaacaacaaccaggctatgaaagcaaccaaggagagtttttgtataaccagttttttgtgctctacaaaactgacccagaacggtgatatgctggacttgctcaagtggcgtacccaccccgacaaaatcacggggtgtctctctaaactaaaagagattgatggtagcgagatcgttaagtttctgcaggacaccttggatacactgttcggcatcctagacgaaaacagtcagaaatacggctctaaagtgtttgacagcctggtccatataataaatttactgcaggactctaaattccaccactttaagcctgtaatggacacatatatagagagtcactttgccggtgccctggcctacagggatttgatcaaagtgctgaaatggtatgtagaccgaataactgaggcagagcggcaggagcacatccaggaagtgctcaaggcccaggaatatatcttcaagtatatcgtgcaatcccgaaggctgttttccttagcaacggggggacagaatgaggaggaattccggtgttgcatccaggagctactgatgagtgtccggtttttcttatcgcaggagagcaaaggaagcggcgctctgtcccagtcccaagctgtctttctctcaagttttccagctgtctacagtgaactcctcaaattatttgatgtgcgtgaagtcgccaacctggtgcaggatacactgggaagcctgcctactatcctgcatgtggatgactcactgcaggcaattaaattgcagtgtatcggcaagaccgtggagtcgcaattgtacacaaaccccgactctaggtatatcctgctgcctgtggtccttcaccatctccatattcacctacaagagcaaaaagaccttatcatgtgtgctaggatattgagcaacgtcttttgtctgattaagaagaattcctccgagaagagtgttcttgaagaaatcgatgtcattgttgccagtctcctcgacatcttgcttcgtacaatccttgagatcaccagtcgtcctcagccatcatcatctgctatgagatttcaatttcaggacgtgacaggagaatttgtagcttgcttattgtccctgctgaggcaaatgacagatcgccattaccagcagttgctcgattcattcaacacgaaggaggaactcagagacttcctccttcaaatattcacggtgtttaggattttgattcgccctgaaatgtttcccaaggattggactgtgatgcgcctggtagccaataacgtgataatcacaacggtactgtatttgtcggatgcccttagaaaaaacttcttgaatgaaaatttcgattacaagatctgggatagctacttttatctggccgtcatctttatcaatcagttgtgcctgcagctggagatgttcacgccctcaaaaaagaagaaagtcctggaaaaatacggcgatatgcgtgtaacaatggggtgcgaaatattctcaatgtggcaaaacctgggcgaacacaaactgcatttcattcccgctctgaggcaggagaaccgactcaacctgggcggaggcggttgctccgagccaagagcatgtcactgcacccccgcttgggctacaaagcgtgactgcgtgagcaagaagaaagagaagaagacatag

SEQ ID NO: 307798 - DNA, 3318 bp, Artificial Sequence
  derived and/or modified sequence
tggatccccagcgagaagcagaccttcttcaccgtgatcgccagcttcagaggcaccgtgccctacggcctgagcctggagatcggcgacaccgtgcagatcctggagaagtgcgacggctggtacagaggcttcgccctgaagaaccccaacatcaagggcatcttccccagcagctacgtgcacctgaagaacgcctgcgtgaagaacaagggccagttcgagatggtgatccccaccgaggacagcgtgatcaccgagatgaccagcaccctgagagactggggcaccatgtggaagcagctgtacgtgagaaacgagggcgacctgttccacagactgtggcacatcatgaacgagatcctggacctgagaagacaggtgctggtgggccacctgacccacgacagaatgaaggacgtgaagagacacatcaccgccagactggactggggcaacgagcagctgggcctggacctggtgcccagaaaggagtacgccatggtggaccccgaggacatcagcatcaccgagctgtacagactgatggagcacagacacagaaagaaggacacccccgtgcaggccagcagccaccacctgttcgtgcagatgaagagcctgatgtgcagcaacctgggcgaggagctggaggtgatcttcagcctgttcgacagcaaggagaacagacccatcagcgagagattcttcctgagactgaacagaaacggcctgcccaaggcccccgacaagcccgagagacactgcagcctgttcgtggacctgggcagcagcgagctgagaaaggacatctacatcaccgtgcacatcatcagaatcggcagaatgggcgccggcgagaagaagaacgcctgcagcgtgcagtacagaagacccttcggctgcgccgtgctgagcatcgccgacctgctgaccggcgagaccaaggacgacctgatcctgaaggtgtacatgtgcaacaccgagagcgagtggtaccagatccacgagaacatcatcaagaagctgaacgccagatacaacctgaccggcagcaacgccggcctggccgtgagcctgcagctgctgcacggcgacatcgagcagatcagaagagagtacagcagcgtgttcagccacggcgtgagcatcaccagaaagctgggcttcagcaacatcatcatgcccggcgagatgagaaacgacctgtacatcaccatcgagagaggcgagttcgagaagggcggcaagagcgtggccagaaacgtggaggtgaccatgttcatcgtggacagcagcggccagaccctgaaggacttcatcagcttcggcagcggcgagccccccgccagcgagtaccacagcttcgtgctgtaccacaacaacagccccagatggagcgagctgctgaagctgcccatccccgtggacaagttcagaggcgcccacatcagattcgagttcagacactgcagcaccaaggagaagggcgagaagaagctgttcggcttcagcttcgtgcccctgatgcaggaggacggcagaaccctgcccgacggcacccacgagctgatcgtgcacaagtgcgaggagaacaccaacctgcaggacaccaccagatacctgaagctgcccttcagcaagggcatcttcctgggcaacaacaaccaggccatgaaggccaccaaggagagcttctgcatcaccagcttcctgtgcagcaccaagctgacccagaacggcgacatgctggacctgctgaagtggagaacccaccccgacaagatcaccggctgcctgagcaagctgaaggagatcgacggcagcgagatcgtgaagttcctgcaggacaccctggacaccctgttcggcatcctggacgagaacagccagaagtacggcagcaaggtgttcgacagcctggtgcacatcatcaacctgctgcaggacagcaagttccaccacttcaagcccgtgatggacacctacatcgagagccacttcgccggcgccctggcctacagagacctgatcaaggtgctgaagtggtacgtggacagaatcaccgaggccgagagacaggagcacatccaggaggtgctgaaggcccaggagtacatcttcaagtacatcgtgcagagcagaagactgttcagcctggccaccggcggccagaacgaggaggagttcagatgctgcatccaggagctgctgatgagcgtgagattcttcctgagccaggagagcaagggcagcggcgccctgagccagagccaggccgtgttcctgagcagcttccccgccgtgtacagcgagctgctgaagctgttcgacgtgagagaggtggccaacctggtgcaggacaccctgggcagcctgcccaccatcctgcacgtggacgacagcctgcaggccatcaagctgcagtgcatcggcaagaccgtggagagccagctgtacaccaaccccgacagcagatacatcctgctgcccgtggtgctgcaccacctgcacatccacctgcaggagcagaaggacctgatcatgtgcgccagaatcctgagcaacgtgttctgcctgatcaagaagaacagcagcgagaagagcgtgctggaggagatcgacgtgatcgtggccagcctgctggacatcctgctgagaaccatcctggagatcaccagcagaccccagcccagcagcagcgccatgagattccagttccaggacgtgaccggcgagttcgtggcctgcctgctgagcctgctgagacagatgaccgacagacactaccagcagctgctggacagcttcaacaccaaggaggagctgagagacttcctgctgcagatcttcaccgtgttcagaatcctgatcagacccgagatgttccccaaggactggaccgtgatgagactggtggccaacaacgtgatcatcaccaccgtgctgtacctgagcgacgccctgagaaagaacttcctgaacgagaacttcgactacaagatctgggacagctacttctacctggccgtgatcttcatcaaccagctgtgcctgcagctggagatgttcacccccagcaagaagaagaaggtgctggagaagtacggcgacatgagagtgaccatgggctgcgagatcttcagcatgtggcagaacctgggcgagcacaagctgcacttcatccccgccctgagacaggagaacagactgaacctgggcggcggcggctgcagcgagcccagagcctgccactgcacccccgcctgggccaccaagagagactgcgtgagcaagaagaaggagaagaagacctag

SEQ ID NO: 307799 - DNA, 3318 bp, Artificial Sequence
  derived and/or modified sequence
tggattccaagtgagaagcaaacattttttacagttattgccagtttccgaggaaccgttccatatggcctgtcattggaaattggagatacagttcagatcctggagaagtgtgatggctggtacagaggatttgccttaaaaaacccaaatatcaagggtatatttccttccagctacgttcacttgaaaaatgcctgtgtaaagaacaaaggacaatttgaaatggttattcccactgaagactctgttatcacagaaatgacatcaacattaagagactggggaaccatgtggaaacaactctatgtgcgtaatgaaggcgatctcttccaccggctgtggcacatcatgaatgaaatcctggacctgaggcggcaggtgctggtgggccacctcacccacgaccggatgaaggacgtgaagcgccacattactgcccggcttgactggggcaatgaacaactgggactggacctggtgcctaggaaagagtacgcaatggtggatccggaagacatcagcattactgagctctaccgattgatggaacatcgacatcggaagaaagacaccccggtgcaggccagcagtcaccacctctttgtccagatgaagagcctcatgtgttccaacctgggagaggagctggaggtcatcttctcactctttgacagtaaagagaaccggccaatcagtgagagatttttcttgaggctgaatagaaacgggcttcccaaagcccctgataaaccggaacgacattgctccctctttgtggatttgggcagcagtgagctaagaaaggacatttatatcaccgtgcacattatccgaatcggtcgaatgggagcaggagaaaaaaagaatgcctgtagtgtccagtaccgacgaccctttggctgtgcagttcttagcatcgctgacctgctaacaggagagacaaaggatgacctcattctgaaagtatacatgtgtaacacagagagtgagtggtaccaaatccatgagaacatcatcaaaaagctgaatgcacgttataacttgactggctccaatgcaggtttagcagtttccttacagctattgcacggagacattgaacaaatcagaagggaatattcatcagtattttctcatggagtatccataacaaggaagctgggattttcaaatattattatgcctggtgaaatgaggaatgatttatatatcactattgaaaggggagaatttgagaaaggagggaagagcgtggccagaaatgtggaagttacgatgttcattgtagacagtagtggccaaaccctgaaggattttatctccttcggctctggggagccaccagccagtgagtaccactcctttgtgctttaccataacaacagtcccaggtggtctgaactgctgaaacttcccattcctgtggataaattccggggtgcacacatccgcttcgagtttcggcattgttccacaaaggagaaaggagagaagaagttgtttgggttttcttttgtccctctgatgcaagaagatggtaggactcttccagatggcactcatgagctcatcgtgcataagtgtgaagaaaacacaaatcttcaggatactacccgctacctcaaacttcccttttccaagggcattttccttgggaataataatcaagccatgaaggccacaaaggagtccttttgtattacatcttttctctgttccacaaaactcacacaaaatggtgatatgcttgatcttttgaaatggagaacccacccagacaagatcactggctgtctctctaaattaaaagaaattgatggctcagagatagtaaagtttctgcaggatacactggataccttatttggaattttagatgaaaattcccaaaaatatgggtctaaagtgtttgattctttggttcacataataaatttgctgcaagatagcaaatttcatcattttaaacctgtaatggacacttacattgagagtcattttgctggggcacttgcatacagagatctcatcaaagtgctcaaatggtacgtggaccggatcacagaagcagagcggcaagagcatatccaggaggtgctgaaggcacaagaatacatttttaagtatatagttcaatctcgaaggctgttttcccttgccactggtgggcaaaacgaagaggagttccgctgctgcattcaggagcttctcatgtcagtccgtttctttctttcgcaagagagcaaagggtctggagcattatctcagtcacaggctgtgtttctgagctctttccctgccgtgtactcagaactgttgaagctctttgatgtccgggaagtagccaacttggtccaggacaccctgggcagtctgccgaccatcctgcatgtggatgattccctgcaggccatcaaactgcagtgcattggcaaaaccgtggaaagccagctttataccaacccagattcccgatacattcttctgcctgtcgtgttacatcacctccacattcacttgcaagaacagaaggacctgatcatgtgtgcacgtatccttagcaacgtattttgtcttatcaagaaaaatagctcagaaaaatctgtgctggaggaaatagatgtgatagtggccagcttgctggatattctgctgaggaccatattggagatcaccagccgacctcagccatccagctcagcaatgcggttccagttccaggatgtcactggggagtttgttgcttgtctcctgtccctattacgacaaatgacagatagacattatcaacagcttcttgatagttttaatacaaaggaagaactaagggatttcctgctgcagatatttactgtgttccgaatattgatacgcccggagatgtttccaaaggactggactgttatgcgcttggttgctaacaatgttattattacaacagttctatacctctcagatgcacttcgtaagaacttcttaaatgaaaactttgattataagatctgggattcctacttttacctcgcagtcatttttataaaccagttgtgtctgcagttggagatgttcacaccttccaagaagaaaaaggtgttagaaaagtatggtgacatgcgggtaacaatgggttgtgaaattttcagcatgtggcaaaacctaggagagcacaagcttcattttatccctgcgctgaggcaggagaatcgcttgaacctgggaggaggaggttgcagtgagccgagagcatgtcactgcactccagcctgggcaacaaagcgagactgtgtctcaaagaaaaaagaaaaaaagacatga

SEQ ID NO: 307800 - protein, 550 aa, Artificial Sequence
  derived and/or modified sequence
MISAHRNLCLPDNYYGTPKPPAEPAPLLLNVTDQILPGATPSAEGKRKRNKSVSNMEKASIEPPEEEEEERPVVNGNGVVVTPESSEHEDKSAGASGEMPSQPYPAPVYSQPEELKEQMDDTKPTKPEDNEEPDPLPDNWEMAYTEKGEVYFIDHNTKTTSWLDPRLAKKAKPPEECKENELPYGWEKIDDPIYGTYYVDHINRRTQFENPVLEAKRKLQQHNMPHTELGTKPLQAPGFREKPLFTRDASQLKGTFLSTTLKKSNMGFGFTIIGGDEPDEFLQVKSVIPDGPAAQDGKMETGDVIVYINEVCVLGHTHADVVKLFQSVPIGQSVNLVLCRGYPLPFDPEDPANSMVPPLAIMERPPPVMVNGRHNYETYLEYISRTSQSVPDITDRPPHSLHSMPTDGQLDGTYPPPVHDDNVSMASSGATQAELMTLTIVKGAQGFGFTIADSPTGQRVKQILDIQGCPGLCEGDLIVEINQQNVQNLSHTEVVDILKDCPIGSETSLIIHRGGKTNTGSAIKYVGKIVGSFNNIVKMQISLELNEIIL

SEQ ID NO: 307801 - DNA, 551 bp, Artificial Sequence
  derived and/or modified sequence
gtttttgaagcggggcccgggccccaccgggctgcggcgtccgactcgagtgagactctcccctgcggccccgccggaggtagggggctggcagggctgtcctggcgtggtcttctccgtttccttcctagcgattcctctcgagcttcctctccccctggccgcccctcgtctctcttctcttgggcgcattacctctctggcctgtcttactgcgttcccgggttattcatcacccatttgctcggttccattaagaaccagcttggagattagatgaagaaactgaggcacaaaaattaaatataacttgcccaagttctcacagctagaaaatggcaaaactgggatgccagcatcttttagtattttttgaaatactttatgctcactggggaaatacttccccagctcactgatctaatgacagacaggacacctgctgtttgagctgggcactgttggggcatttggagtatatctgtaaacaaaacaaagatccctgcgttttggttatatactgatttggttcgaaaacatggccaaaagaa

SEQ ID NO: 307802 - DNA, 1653 bp, Artificial Sequence
  derived and/or modified sequence
atgatcagcgcccacagaaacctgtgcctgcccgacaactactacggcacccccaagccccccgccgagcccgcccccctgctgctgaacgtgaccgaccagatcctgcccggcgccacccccagcgccgagggcaagagaaagagaaacaagagcgtgagcaacatggagaaggccagcatcgagccccccgaggaggaggaggaggagagacccgtggtgaacggcaacggcgtggtggtgacccccgagagcagcgagcacgaggacaagagcgccggcgccagcggcgagatgcccagccagccctaccccgcccccgtgtacagccagcccgaggagctgaaggagcagatggacgacaccaagcccaccaagcccgaggacaacgaggagcccgaccccctgcccgacaactgggagatggcctacaccgagaagggcgaggtgtacttcatcgaccacaacaccaagaccaccagctggctggaccccagactggccaagaaggccaagccccccgaggagtgcaaggagaacgagctgccctacggctgggagaagatcgacgaccccatctacggcacctactacgtggaccacatcaacagaagaacccagttcgagaaccccgtgctggaggccaagagaaagctgcagcagcacaacatgccccacaccgagctgggcaccaagcccctgcaggcccccggcttcagagagaagcccctgttcaccagagacgccagccagctgaagggcaccttcctgagcaccaccctgaagaagagcaacatgggcttcggcttcaccatcatcggcggcgacgagcccgacgagttcctgcaggtgaagagcgtgatccccgacggccccgccgcccaggacggcaagatggagaccggcgacgtgatcgtgtacatcaacgaggtgtgcgtgctgggccacacccacgccgacgtggtgaagctgttccagagcgtgcccatcggccagagcgtgaacctggtgctgtgcagaggctaccccctgcccttcgaccccgaggaccccgccaacagcatggtgccccccctggccatcatggagagacccccccccgtgatggtgaacggcagacacaactacgagacctacctggagtacatcagcagaaccagccagagcgtgcccgacatcaccgacagacccccccacagcctgcacagcatgcccaccgacggccagctggacggcacctaccccccccccgtgcacgacgacaacgtgagcatggccagcagcggcgccacccaggccgagctgatgaccctgaccatcgtgaagggcgcccagggcttcggcttcaccatcgccgacagccccaccggccagagagtgaagcagatcctggacatccagggctgccccggcctgtgcgagggcgacctgatcgtggagatcaaccagcagaacgtgcagaacctgagccacaccgaggtggtggacatcctgaaggactgccccatcggcagcgagaccagcctgatcatccacagaggcggcaagaccaacaccggcagcgccatcaagtacgtgggcaagatcgtgggcagcttcaacaacatcgtgaagatgcagatcagcctggagctgaacgagatcatcctgtag

SEQ ID NO: 307803 - DNA, 1653 bp, Artificial Sequence
  derived and/or modified sequence
atgatttctgcacacaggaatctgtgcctgccagacaattactatgggaccccaaaaccacctgccgagccagcccccttgctgctgaatgtgactgatcagattctgcccggtgccactccctcagctgaaggtaagcgaaagagaaataaaagcgtgtccaatatggagaaggcctccatcgaacctccggaggaagaggaagaggagcgacccgtcgtgaatggtaacggggtcgtggtcaccccagaaagcagtgaacacgaggataagtccgctggcgcaagtggagagatgccctcccaaccctatccagcgcctgtctattcccagccagaggaactcaaggagcagatggacgataccaaaccgacgaagcccgaggataatgaggagcctgaccccctgcccgacaattgggagatggcatatacggagaaaggcgaggtctattttatcgatcataatactaaaaccacttcctggctagaccccaggctggctaaaaaggccaagccacccgaggagtgtaaagaaaatgagcttccctatggctgggagaagatagacgatcccatttacggaacttactatgtcgaccacatcaacaggagaacgcagttcgagaaccccgttctagaggccaaacggaagctgcagcagcacaacatgccgcacaccgaactgggcacgaagcccctccaggcacccggcttccgcgagaagccattatttacccgcgatgccagccagcttaaagggacctttctgagcacaaccttgaagaaatccaacatgggcttcgggttcaccatcatcggcggggatgaacccgatgagtttctgcaggtaaagagtgtcatcccagatggcccagcggcacaggatggtaagatggagacaggcgatgtgatcgtgtacattaatgaagtttgtgtgttgggccatactcacgccgacgtggtcaaactgttccagtcggtgccgatcgggcagagcgtcaatttagtgttgtgccgggggtatcctctgccatttgaccccgaggaccccgctaactccatggtaccacctctcgctatcatggagagaccaccgccggttatggtcaacggtcgccacaattatgaaacctacctcgagtatatctctagaacttcccagtccgtgccggacattaccgacagaccgccacactcactccactcaatgccaacagacggccagctggacggcacatacccccctcccgtgcacgacgacaacgtgtccatggcaagcagtggcgccacacaggccgaactgatgactctgacgatcgtgaagggcgctcaaggtttcggattcacaatcgcggactcccccaccggccaaagggtgaaacagatacttgatattcaaggatgccccggcctgtgcgaaggcgacttgattgtcgagattaatcagcagaacgtacaaaatttaagccacaccgaggttgtcgacatcctgaaagattgtcccataggttctgagaccagtctaattatccacaggggcgggaagaccaacaccggcagtgcgattaagtatgtgggcaaaattgttggcagcttcaacaacatcgttaagatgcagatatccctggagctgaatgagattatcctgtag

SEQ ID NO: 307804 - DNA, 1653 bp, Artificial Sequence
  derived and/or modified sequence
atgatcagcgcccacaggaacctgtgcctgcctgacaactactacggcacccccaagcccccagctgagcccgcccccctgctgctgaatgtgacagaccagatcctgcccggggccacccccagcgctgagggcaagaggaagaggaacaagtctgtgagcaacatggagaaggccagcattgagcccccagaggaggaggaggaggagaggcctgtggtgaatggaaatggagtggtggtgaccccagagagcagcgagcacgaggacaagtctgctggggccagcggggagatgcccagccagccctacccagcccctgtgtacagccagcctgaggagctgaaggagcagatggatgacaccaagcccaccaagccagaggacaatgaggagccagaccccctgcctgacaactgggagatggcctacacagagaagggggaggtgtacttcatcgaccacaacaccaagaccacctcctggctggacccccggctggccaagaaggccaagcccccagaggagtgcaaggaaaatgagctgccctacggctgggagaagattgatgaccccatctacggcacctactacgtggaccacatcaacagaaggacccagtttgaaaatcctgtgctggaggccaagaggaagctgcagcagcacaacatgccccacacagagctgggcaccaagcccctgcaggcccctggcttccgggagaagcccctcttcaccagagatgccagccagctgaagggcaccttcctgagcaccaccctgaagaagagcaacatgggcttcggcttcaccatcattggaggagatgagccagatgagttcctgcaggtgaagagcgtcatcccagatggccctgctgcccaggacggcaagatggagactggagatgtgattgtgtacatcaatgaggtgtgtgtgctgggccacacccatgctgatgtggtgaagctgttccagagcgtgcccatcggccagagcgtgaacctggtgctgtgccggggctaccccctgccctttgatcctgaagatcctgccaacagcatggtgccccccctggccatcatggagaggcctcctcctgtgatggtgaatggccgccacaactatgagacctacctggagtacatcagcaggaccagccagagcgtgcctgacatcacagacaggcctccccacagcctgcacagcatgcccacagatggccagctggatggcacctacccacctcctgtgcatgatgacaacgtgtccatggccagcagcggggccacccaggccgagctgatgaccctgaccatcgtgaagggggcccagggcttcggcttcaccatcgctgacagccccaccggccagagggtgaagcagatcctggacatccagggctgccccggcctgtgtgagggggacctgattgtggagatcaaccagcagaatgtgcagaacctgagccacacagaggtggtggacatcctgaaggactgccccatcggcagcgagaccagcctcatcatccaccggggcggcaagaccaacacaggcagcgccatcaagtatgtgggcaagatcgtgggcagcttcaacaacatcgtgaagatgcagatcagcctggagctgaatgagatcatcctgtag

SEQ ID NO: 307805 - DNA, 2348 bp, Artificial Sequence
  derived and/or modified sequence
aaaagtgagagacaggcgcgtagataacacaggttcttgtgctgagagatgtaaatgcccctgactgaccgggaagcgagcgaggttgctggtgggggttggggaaagggaaacggagggagagagcataagcgagagaggggagaaggagagagagggagagggagagagggagaggcagagggagacagagagagagagagagaagtgctgcatgcttcatctttgagaggagggaaaacaaaagagctcagcggcagttttgtgttgctgtgtctggcttaaagaggaaaattctagacatccatgttgaaaaatcaaagctcagctgagactacttctatcaagaaaattatttttatctgcgaatgggttggatcagtacaggtggtttgagaagacactgactgaggaccatggaaaggtgggagaggacgtgcggcttctctgcttcctttgaacagagctctaggcaccacaaggccacataaggagggtgaggtccctggagtggattatattttcatcactgttgaagattttatggaattggagaaaagtggtgctctcctagaaagtgggacttatgaagacggagtctcgctctgtcgcccaggctggagtgcagtggcatgatctcggctcaccgcaacctctgcctcccagacaattactacggtaccccaaagccgccagcagaaccagcaccattattgttaaatgtaacagaccagatacttccaggagccactccaagtgctgaaggaaaacggaagaggaataaatcagtgagcaacatggagaaagccagtatagagcctcctgaggaggaagaggaagagaggcctgtggtcaatggaaatggagtagtagtaacaccagaatccagtgaacatgaagacaaaagtgcaggtgcctcaggggagatgccctcccagccttatcctgcaccagtgtacagtcagcctgaggagctgaaggagcagatggatgacacaaagccaactaaacctgaagacaatgaggaaccagacccattgcctgataactgggaaatggcctatacagagaagggcgaagtctacttcattgaccataacacaaagacaacatcatggctggatccacgacttgcgaaaaaggctaaacctccagaagagtgcaaagaaaatgagcttccatatggctgggaaaaaatcgatgatcccatttatggcacttattatgttgaccacataaatagaagaacacagtttgaaaatcctgtcctggaagcaaaaaggaagctacagcaacataacatgccccacacagaacttggaacaaagcccctgcaggccccaggtttccgagaaaaaccactcttcacccgggatgcatcccagttgaagggaacattcctcagcaccaccctaaaaaagagcaacatgggctttggatttaccatcattggtggagacgagcctgatgagtttctgcaggtgaaaagtgtgattccggatgggcctgcagcacaggatggaaaaatggaaacaggtgatgtcattgtctatattaatgaagtttgtgtccttggacacactcatgcagatgttgtcaaacttttccagtctgttcctattggtcagagtgtcaacctggtgttgtgtcgtggctaccctttgccctttgatcctgaagaccctgctaacagcatggtgccaccccttgcaataatggagaggccacctccagtgatggtcaatggaagacacaactatgaaacatatttggagtacatttctcggacctcacagtcagttccagatataacagatcggccgcctcattctctgcactccatgccaactgatggtcagctagacggcacgtatccaccgcccgtccatgatgacaatgtgtctatggcttcatctggggccacccaagctgaacttatgaccttaaccattgtgaaaggtgcccagggcttcggcttcactattgccgacagtcctacaggacagcgggtgaaacaaatacttgacattcagggatgccctggcctgtgtgaaggcgacctcattgttgagatcaaccagcagaatgtacagaacctgagccatacagaagtagtggatatacttaaggactgtcccattggaagtgaaacttctttgattatccatcgaggaggtaagacaaacactggctcagcaataaaatatgtgggtaaaatagtaggatcatttaataatattgttaaaatgcagatttccttggagttgaatgaaattatactttaaaaaataaagcttaaagagtgagagagaaaaacatgaattaaaggaaactttgtttttgaattc

SEQ ID NO: 307806 - DNA, 1653 bp, Artificial Sequence
  derived and/or modified sequence
atgatcagcgcccaccggaacctgtgcctgcccgacaactactacgggacacccaaaccccccgcagagccagctccccttcttctgaacgtaaccgaccagattcttccaggcgcaacacctagcgcggagggaaagaggaaacggaacaaatccgtatctaacatggagaaggcatccatagaacctccagaggaagaagaggaggagcgccctgtcgttaatgggaatggagtagtggtcacacctgagtccagcgagcacgaggacaagagcgccggcgcatcaggggagatgccatctcagccatacccagccccagtgtatagtcaaccagaagaactgaaagaacaaatggatgataccaaacccacaaagcccgaagataacgaggagcctgatcccctgcctgataactgggaaatggcttacaccgagaagggagaagtgtacttcattgaccacaatacaaaaaccactagctggctcgaccccaggcttgccaagaaggccaagcctcctgaagagtgtaaggagaacgagcttccctatggatgggagaagatcgatgacccgatttacggtacatattatgtggaccatataaacagacgcacccaattcgaaaacccagtgttggaggcgaaaaggaaacttcagcagcacaacatgccccacacagagctcggaaccaagcccttacaagcccccggattccgggaaaaaccactttttaccagggacgcctctcagctgaaaggcactttcctatccaccactctgaagaagtctaatatgggctttggatttacaattattgggggcgacgagcctgacgagtttcttcaagtgaagtccgttatccctgacggcccggctgcccaagacgggaaaatggagactggagatgtgattgtttatatcaacgaggtgtgtgtgctgggtcatacccacgcagacgttgtgaagttgttccagagcgtcccaattggccagtccgtgaatctggtgctctgtcgaggctaccctctcccctttgaccctgaggaccccgctaacagcatggtgccacctctggctattatggagagaccgccccccgttatggtgaatggccgacataattacgaaacttatttggagtatattagtagaacctcccaatccgtgccggatatcaccgaccgtcctccacactctctccatagtatgccaactgacggacagctggacggtacctatccgccacccgtacatgatgataatgtcagtatggcatcctcaggagcaacgcaagcagaactcatgacccttaccatagtcaaaggagcccagggtttcggattcaccatagcagattcacctaccggtcagagagtgaaacagatcctggacatccaggggtgcccggggttgtgcgagggcgacctaatcgtcgaaattaatcagcaaaacgtacagaatctgtcccataccgaagttgtggatattctgaaagactgtccaataggctcagagacaagtttaatcatacatcgaggcggcaagacaaataccggctctgctatcaaatacgtggggaagatcgtgggctctttcaacaacatcgtgaagatgcagatttccctggagttaaacgagattattctgtag

SEQ ID NO: 307807 - DNA, 1653 bp, Artificial Sequence
  derived and/or modified sequence
atgatttccgcccacagaaacctttgcttgcccgataactattacggcactccgaaaccaccagccgaacccgcaccactcctgctcaacgttactgaccaaatcctgcctggggcaacccctagcgcagagggcaagcggaagcgcaacaagtcagtgtccaatatggaaaaggcaagtattgagcctccggaagaagaggaagaagaaagaccagtagtgaatggcaatggagtggttgtgacaccagagagctctgagcacgaggacaaatctgctggtgccagtggggagatgcccagtcagccctaccccgcaccagtgtactctcaaccagaggagctgaaggagcagatggatgacacaaaacctaccaagccagaagacaatgaagaaccagatcctctcccggataattgggagatggcctatacagaaaagggggaagtgtatttcattgaccataacaccaagacgacgagctggctcgacccccgactggcaaagaaggccaaacccccagaagagtgtaaagagaacgagctcccctacggttgggaaaagattgatgacccaatttatggaacttactatgttgaccacatcaatagacggacgcaattcgagaatccagtactggaggccaaaagaaaactgcagcagcataatatgcctcataccgaactgggaacaaaacccctgcaggccccagggttccgcgagaagcccctgtttacccgcgacgcctcacagctgaaaggtacatttctgagtactactctcaagaaaagcaatatgggcttcggctttactatcatcgggggagatgaacccgacgaattcctacaggtgaaatcggtcattcccgatggtcctgccgctcaggatggaaagatggagacaggcgatgtcatagtgtatataaatgaggtttgcgtgctcgggcatacacacgctgacgtggttaagttatttcagtccgtcccgattggccagagcgtgaatctggtcctctgtcgcggataccctctccctttcgatcctgaggacccagccaattctatggtgcctcccctggccataatggaaaggccgcctccagtcatggtcaacgggcgacataattacgagacatatctcgagtatatctctaggacgtcccaatctgtgccggacattactgaccgacctccccacagcctccattctatgccaaccgacggtcagttagatggcacctacccgcctcctgtgcatgacgataacgtaagtatggcatcatccggagccacacaggctgagctcatgactctaacgattgtgaagggagcacagggctttggatttaccattgcagactcgcctactggccagagagttaaacaaatcttggatattcagggatgcccagggctgtgcgaaggcgacctgattgtcgagattaaccaacagaacgtgcaaaacctctctcacacagaagtggtggacatcttaaaggattgcccgataggaagcgaaacatctcttatcatccaccggggtggcaagacaaataccggtagcgctatcaaatatgtcggcaagattgtcgggtccttcaacaatattgttaagatgcagatcagcctggaattgaatgagattatcctgtag

SEQ ID NO: 307808 - DNA, 1176 bp, Artificial Sequence
  derived and/or modified sequence
atggccggcagcatggtgacccccctgctgtacagaagaaagctgagacccggcgagagaaagatgagacccgaggtgggcagagagcccgccgccctgcagcccagacagagacccagaagcgaccaccagctgcacagaagccccttcaccgtgccccccagaacccccgcctgcagaagccccggccccagcccccccatcgccgtggccctggaggtgaagccccagctggaggacgccgtgggcaagctggccgccgaggccgtggccgtgagagtgttccccctggccgtggacgacctggagagcgacgtgctggtgggcagacccagagtggaggcccaggacggcgagatcctggtggtgggcgccggcctgcaggaggtgctgggcagaggcgccctggtggacgaggtgggcgtggaggacgtggagctggtgagcctgcacgacctgggcagatgggtggtgaaggtggtggtgagactggtggtgctggtgcccctggaggccagagtgcacgccgtggaggaggccagactggcctggcccgtgctggtgggcccccaggtgggcctggccggcgagtggcacctgcacgccgagctgagactggtgctggcccacgccctgctgggcccccccgaggaggacgtgctgggcgccctggccggcgtgagcagagacctggagctgctggccagagagctgcaggccctgcaggtgctgatcagattccagcacgtgagagtgcagtggcagctggtgagaagagagcagcccagagccgtgcccgccggcgtggtggtggtgcaggccctgctggaccaggtgctgctgcacgagcacagactggccctggccctggccctgaccgtgcccgtggccgtggccctgtgcagaggcagagccgtgcacctgggcctgagaggcgccgccctgagaggcggccccggcagaggcggcagaagagtgctgagactgcaggccgccgccggcggcctgggcctgctgctggaggacggcgagcagagactggccctgcacgccctgctgctgctgcagttcgtgcagctgctgccccagcacgtgctggtggccctgacccagcccagcgcccacagagccagagccatgtgggccagaagctgctgcagaagactgagccagtag

SEQ ID NO: 307809 - protein, 760 aa, Artificial Sequence
  derived and/or modified sequence
MSTVEEDSDTVTVETVNSVTLTQDTEGNLILHCPQNEADEIDSEDSIEPPHKRLCLSSEDDQSIDDSTPCISVVALPLSENDQSFEVTMTATTEVADDEVTEGTVTQIQILQNEQLDEISPLGNEEVSAVSQAWFTTKEDKDSLTNKGHKWKQGMWSKEEIDILMNNIERYLKARGIKDATEIIFEMSKDERKDFYRTIAWGLNRPLFAVYRRVLRMYDDRNHVGKYTPEEIEKLKELRIKHGNDWATIGAALGRSASSVKDRCRLMKDTCNTGKWTEEEEKRLAEVVHELTSTEPGDIVTQGVSWAAVAERVGTRSEKQCRSKWLNYLNWKQSGGTEWTKEDEINLILRIAELDVADENDINWDLLAEGWSSVRSPQWLRSKWWTIKRQIANHKDVSFPVLIKGLKQLHENQKNNPTLLENKSGSGVPNSNTNSSVQHVQIRVARLEDNTAISSSPMAALQIPVQITHVSSADSPATVDSETITLNSGTLQTFEILPSFHLQPTGTPGTYLLQTSSSQGLPLTLTASPTVTLTAAAPASPEQIIVHALSPEHLLNTSDNVTVQCHTPRVIIQTVATEDITSSISQAELTVDSDIQSSDFPEPPDALEADTFPDEIHHPKMTVEPSFNDAHVSKFSDQNSTELMNSVMVRTEEEISDTDLKQEESPSDLASAYVTEGLESPTIEEQVDQTIDDETILIVPSPHGFIQASDVIDTESVLPLTTLTDPILQHHQEESNIIGSSLGSPVSEDSKDVEDLVNCH

SEQ ID NO: 307810 - protein, 285 aa, Artificial Sequence
  derived and/or modified sequence
MSTVEEDSDTVTVETVNSVTLTQDTEGNLILHCPQNEADEIDSEDSIEPPHKRLCLSSEDDQSIDDSTPCISVVALPLSENDQSFEVTMTATTEVADDEVTEGTVTQIQILQNEQLDEISPLGNEEVSAVSQAWFTTKEDKDSLTNKGHKWKQGMWSKEEIDILMNNIERYLKARGIKDATEIIFEMSKDERKDFYRTIAWGLNRPLFAVYRRVLRMYDDRNHVGKYTPEEIEKLKEKKAIAACFFFTHRQLWTPKKGHTFKLWLSKYCCPQLPNQSNGKKKNEE

SEQ ID NO: 307811 - protein, 272 aa, Artificial Sequence
  derived and/or modified sequence
MSTVEEDSDTVTVETVNSVTLTQDTEGNLILHCPQNEADEIDSEDSIEPPHKRLCLSSEDDQSIDDSTPCISVVALPLSENDQSFEVTMTATTEVADDEVTEGTVTQIQILQNEQLDEISPLGNEEVSAVSQAWFTTKEDKDSLTNKGHKWKQGMWSKEEIDILMNNIERYLKARGIKDATEIIFEMSKDERKDFYRTIAWGLNRPLFAVYRRVLRMYDDRNHVGKYTPEEIEKLKEQLWTPKKGHTFKLWLSKYCCPQLPNQSNGKKKNEE

SEQ ID NO: 307812 - protein, 690 aa, Artificial Sequence
  derived and/or modified sequence
MSTVEEDSDTVTVETVNSVTLTQDTEGNLILHCPQNEADEIDSEDSIEPPHKRLCLSSEDDQSIDDSTPCISVVALPLSENDQSFEVTMTATTEVADDEVTEGTVTQIQILQNEQLDEISPLGNEEVSAVSQAWFTTKEDKDSLTNKGHKWKQGMWSKEEIDILMNNIERYLKARGIKDATEIIFEMSKDERKDFYRTIAWGLNRPLFAVYRRVLRMYDDRNHVGKYTPEEIEKLKELRIKHGNDWATIGAALGRSASSVKDRCRLMKDTCNTGKWTEEEEKRLAEVVHELTSTEPGDIVTQGVSWAAVAERVGTRSEKQCRSKWLNYLNWKQSGGTEWTKEDEINLILRIAELDVADENDINWDLLAEGWSSVRSPQWLRSKWWTIKRQIANHKDVSFPASADSPATVDSETITLNSGTLQTFEILPSFHLQPTGTPGTYLLQTSSSQGLPLTLTASPTVTLTAAAPASPEQIIVHALSPEHLLNTSDNVTVQCHTPRVIIQTVATEDITSSISQAELTVDSDIQSSDFPEPPDALEADTFPDEIHHPKMTVEPSFNDAHVSKFSDQNSTELMNSVMVRTEEEISDTDLKQEESPSDLASAYVTEGLESPTIEEQVDQTIDDETILIVPSPHGFIQASDVIDTESVLPLTTLTDPILQHHQEESNIIGSSLGSPVSEDSKDVEDLVNCH

SEQ ID NO: 307813 - DNA, 4052 bp, Artificial Sequence
  derived and/or modified sequence
aagtaagtgcgatggaaccttcaggttccaaccgccgccagggccgctccgcccagtggagcctgtccggcccccttgctgcccgctagctcccgccggctggcgcaagctgtcggcgccggggcactgcgggcggggtcggagcctggccttcctgacgttgcagctgccgtccccgcacgttccggccagggcctccctcttagggccgggcggtgcccgtggctcaggctgcagagtagaaagcacaaaaaccagcctgattgtatctggaaaaaaccattatgttacagttgataggctcaccccaaaatatgcttttggggactgatttagcacctgcatattctgcgtgaatctctttaattggttgcagttgagctaatggtggagccaaaatgctattgccctgtcttcatcaacatttaatcaagtgttgcggagataggaacatgggagagaaacaatctgggtaacatgaaagtgatgctggttgctaagggaaggcaacttgattctgtgggaagggctgtagctgatccatccgttgtctagatttgagtatgagcacagtggaagaggattctgacacagtaacagtagaaactgtgaactctgtgactttgactcaggacacagaagggaatctcattcttcactgccctcagaatgaagcggatgaaatagactcagaagatagtattgaacctccacataaaaggctttgtttgtcctctgaggatgatcagagtattgatgattctactccttgcatatcagttgttgcacttccactttcagaaaatgatcagagctttgaagtgaccatgactgcaaccacagaagtagcagatgatgaggttactgaggggactgtgacacagatacagattttgcagaatgagcaactagatgaaatatctcccttgggtaacgaggaagtttcagcagttagccaagcatggtttacaactaaagaagataaggattctctgactaataaaggacataaatggaagcaggggatgtggtccaaggaagaaattgatattttgatgaacaatattgaacgctatcttaaggcacgcggaataaaagatgctacagaaatcatctttgagatgtcaaaagacgaaagaaaagatttctacaggactatagcatggggtctgaaccggcctttgtttgcagtttatagaagagtgcttcgcatgtatgatgacagaaaccatgtgggaaaatatacacctgaagaaattgagaagctcaaggagctccggataaagcatggcaatgactgggcaacaataggggcggcgctaggaagaagtgcatcttctgtcaaagatcggtgccgactgatgaaggatacttgcaacacagggaagtggacagaagaagaagaaaagagacttgcagaagtggttcatgagttgacaagcactgagccaggtgacatagtcacacagggtgtgtcttgggcagctgtggctgaacgagtcggtacccgctcagaaaagcaatgtcgttctaaatggctcaactacctgaattggaaacagagtgggggtactgaatggaccaaggaagatgaaatcaatctcatcctcaggatagcagaacttgatgtagctgatgaaaatgacattaactgggatctgttagctgagggatggagtagtgtccgttcaccacaatggctacgaagtaaatggtggaccatcaaaaggcaaattgcaaaccataaggatgtttcgttccctgtcttaataaaaggtcttaaacagttacatgagaaccaaaaaaacaacccaacgcttttggagaataaatcaggatctggagttccaaacagtaataccaattccagtgtgcagcatgttcagataagagttgcccgcttggaagataatacagccatctcttctagccccatggcagcattgcagattccagtccagatcacccatgtttcttcagcagactctcctgctaccgttgactcagaaacaataacactaaacagtggaacactacagacatttgagattcttccctctttccatctacagcccactggcactccaggcacctacctacttcaaacaagctcaagccaaggccttcccctaactctgactgctagtcccacagtaaccctgacagctgctgctcctgcttctcctgaacagattattgttcatgctttatccccagaacatttgttgaacacaagtgataatgttacagtgcagtgtcacacaccaagagtcatcattcagactgttgccacagaggacatcacttcttccatatcccaagcagaactgacagtcgatagtgatattcagtcatctgattttcctgagcctccagacgccctagaagcagacactttcccagatgaaattcatcaccctaagatgactgtggagccatcatttaatgatgctcatgtatccaaattcagtgaccaaaatagcacagaactgatgaatagtgttatggtcagaacagaagaagaaatctctgacaccgaccttaaacaagaggaatcaccctctgatttagccagtgcttatgttactgagggtttagagtctcccactatagaagaacaagttgatcaaacaattgatgatgaaacaatacttatcgttccttcaccacatggctttatccaggcatctgatgttatagatactgaatctgtcttgcctttgacaacactaacagatcccatactccaacatcatcaggaagaatcaaatatcattggatcatccttgggcagtcctgtttcagaagattcaaaggatgtcgaagatttggtaaactgtcattagaataattcttagaaataggcagttcaagcaaagaaggcacactgttaattacaacctcttcaaagaaataggagcaacccccaagaggcttaatttaccaatttaaatagccacagtccttaagccacacacattgttgctgctatgactttttacctcctttaaacacatcatctgaggttgagttttatgacagtatgtagttgagtggaggctgggagttttaagcataaatccctgtttagtgttacatgggaataaggaatttcattcacttcagccactaagaaaagtttagaatcacgaaagcttaactgctgtggtttaaagtacagtttctctaaagatcagacatggcactgtctcctctcaagcctggttgtagttcagatgagtcttttcaacatggtcttcaacatggtctagagcttaccagtgatcttctgatcttcaagaagactaagtttgagacttgaccagcatacaagtatagagacctaggaggtggtcttgtggtggtacatttggttaacccattgctggcagtgggagctgatttaggcagggtaaacaggaaagcattaaaagttaaaattcactacaggttttttgttacttttaaagggaatatggataagcatagtaacaaaacccaccagaatctaagcagttttcaccccctcagaaaccactgtcattagtttacaaagttagcactttgaagtaaaactaaatgaggaaggaagtaatgttacctatccttgataccatgaccatttattagatgttttgctatataaattaccgagagaatagtttgtcatccacttagtgtgttagctggtggggtacaatataacctctcatctcaggctattttaaaaaaacaatatttgcttctataacaaaaggaaacaaatctaagaatcattcctgtactacagaagggttaaggcaaaggtagccttttgggctttttaatgaatatgacccctatagaaaagtcaagaaaaaaaaacccttgtataaattattttatttattattgtaattagatcttcacaaagttgtcttttcactgtgttttgtcaacgtgaaattaaattgtagttataagcaaaagttggttgcctagggaacaattgtatattcagtttaacagaaataaaagaatatttgtcttaagatgcaaaaaaaaaaaaaaaa

SEQ ID NO: 307814 - DNA, 2283 bp, Artificial Sequence
  derived and/or modified sequence
atgagcaccgtggaggaggacagcgacaccgtgaccgtggagaccgtgaacagcgtgaccctgacccaggacaccgagggcaacctgatcctgcactgcccccagaacgaggccgacgagatcgacagcgaggacagcatcgagcccccccacaagagactgtgcctgagcagcgaggacgaccagagcatcgacgacagcaccccctgcatcagcgtggtggccctgcccctgagcgagaacgaccagagcttcgaggtgaccatgaccgccaccaccgaggtggccgacgacgaggtgaccgagggcaccgtgacccagatccagatcctgcagaacgagcagctggacgagatcagccccctgggcaacgaggaggtgagcgccgtgagccaggcctggttcaccaccaaggaggacaaggacagcctgaccaacaagggccacaagtggaagcagggcatgtggagcaaggaggagatcgacatcctgatgaacaacatcgagagatacctgaaggccagaggcatcaaggacgccaccgagatcatcttcgagatgagcaaggacgagagaaaggacttctacagaaccatcgcctggggcctgaacagacccctgttcgccgtgtacagaagagtgctgagaatgtacgacgacagaaaccacgtgggcaagtacacccccgaggagatcgagaagctgaaggagctgagaatcaagcacggcaacgactgggccaccatcggcgccgccctgggcagaagcgccagcagcgtgaaggacagatgcagactgatgaaggacacctgcaacaccggcaagtggaccgaggaggaggagaagagactggccgaggtggtgcacgagctgaccagcaccgagcccggcgacatcgtgacccagggcgtgagctgggccgccgtggccgagagagtgggcaccagaagcgagaagcagtgcagaagcaagtggctgaactacctgaactggaagcagagcggcggcaccgagtggaccaaggaggacgagatcaacctgatcctgagaatcgccgagctggacgtggccgacgagaacgacatcaactgggacctgctggccgagggctggagcagcgtgagaagcccccagtggctgagaagcaagtggtggaccatcaagagacagatcgccaaccacaaggacgtgagcttccccgtgctgatcaagggcctgaagcagctgcacgagaaccagaagaacaaccccaccctgctggagaacaagagcggcagcggcgtgcccaacagcaacaccaacagcagcgtgcagcacgtgcagatcagagtggccagactggaggacaacaccgccatcagcagcagccccatggccgccctgcagatccccgtgcagatcacccacgtgagcagcgccgacagccccgccaccgtggacagcgagaccatcaccctgaacagcggcaccctgcagaccttcgagatcctgcccagcttccacctgcagcccaccggcacccccggcacctacctgctgcagaccagcagcagccagggcctgcccctgaccctgaccgccagccccaccgtgaccctgaccgccgccgcccccgccagccccgagcagatcatcgtgcacgccctgagccccgagcacctgctgaacaccagcgacaacgtgaccgtgcagtgccacacccccagagtgatcatccagaccgtggccaccgaggacatcaccagcagcatcagccaggccgagctgaccgtggacagcgacatccagagcagcgacttccccgagccccccgacgccctggaggccgacaccttccccgacgagatccaccaccccaagatgaccgtggagcccagcttcaacgacgcccacgtgagcaagttcagcgaccagaacagcaccgagctgatgaacagcgtgatggtgagaaccgaggaggagatcagcgacaccgacctgaagcaggaggagagccccagcgacctggccagcgcctacgtgaccgagggcctggagagccccaccatcgaggagcaggtggaccagaccatcgacgacgagaccatcctgatcgtgcccagcccccacggcttcatccaggccagcgacgtgatcgacaccgagagcgtgctgcccctgaccaccctgaccgaccccatcctgcagcaccaccaggaggagagcaacatcatcggcagcagcctgggcagccccgtgagcgaggacagcaaggacgtggaggacctggtgaactgccactag

SEQ ID NO: 307815 - DNA, 2073 bp, Artificial Sequence
  derived and/or modified sequence
atgagcaccgtggaggaggacagcgacaccgtgaccgtggagaccgtgaacagcgtgaccctgacccaggacaccgagggcaacctgatcctgcactgcccccagaacgaggccgacgagatcgacagcgaggacagcatcgagcccccccacaagagactgtgcctgagcagcgaggacgaccagagcatcgacgacagcaccccctgcatcagcgtggtggccctgcccctgagcgagaacgaccagagcttcgaggtgaccatgaccgccaccaccgaggtggccgacgacgaggtgaccgagggcaccgtgacccagatccagatcctgcagaacgagcagctggacgagatcagccccctgggcaacgaggaggtgagcgccgtgagccaggcctggttcaccaccaaggaggacaaggacagcctgaccaacaagggccacaagtggaagcagggcatgtggagcaaggaggagatcgacatcctgatgaacaacatcgagagatacctgaaggccagaggcatcaaggacgccaccgagatcatcttcgagatgagcaaggacgagagaaaggacttctacagaaccatcgcctggggcctgaacagacccctgttcgccgtgtacagaagagtgctgagaatgtacgacgacagaaaccacgtgggcaagtacacccccgaggagatcgagaagctgaaggagctgagaatcaagcacggcaacgactgggccaccatcggcgccgccctgggcagaagcgccagcagcgtgaaggacagatgcagactgatgaaggacacctgcaacaccggcaagtggaccgaggaggaggagaagagactggccgaggtggtgcacgagctgaccagcaccgagcccggcgacatcgtgacccagggcgtgagctgggccgccgtggccgagagagtgggcaccagaagcgagaagcagtgcagaagcaagtggctgaactacctgaactggaagcagagcggcggcaccgagtggaccaaggaggacgagatcaacctgatcctgagaatcgccgagctggacgtggccgacgagaacgacatcaactgggacctgctggccgagggctggagcagcgtgagaagcccccagtggctgagaagcaagtggtggaccatcaagagacagatcgccaaccacaaggacgtgagcttccccgccagcgccgacagccccgccaccgtggacagcgagaccatcaccctgaacagcggcaccctgcagaccttcgagatcctgcccagcttccacctgcagcccaccggcacccccggcacctacctgctgcagaccagcagcagccagggcctgcccctgaccctgaccgccagccccaccgtgaccctgaccgccgccgcccccgccagccccgagcagatcatcgtgcacgccctgagccccgagcacctgctgaacaccagcgacaacgtgaccgtgcagtgccacacccccagagtgatcatccagaccgtggccaccgaggacatcaccagcagcatcagccaggccgagctgaccgtggacagcgacatccagagcagcgacttccccgagccccccgacgccctggaggccgacaccttccccgacgagatccaccaccccaagatgaccgtggagcccagcttcaacgacgcccacgtgagcaagttcagcgaccagaacagcaccgagctgatgaacagcgtgatggtgagaaccgaggaggagatcagcgacaccgacctgaagcaggaggagagccccagcgacctggccagcgcctacgtgaccgagggcctggagagccccaccatcgaggagcaggtggaccagaccatcgacgacgagaccatcctgatcgtgcccagcccccacggcttcatccaggccagcgacgtgatcgacaccgagagcgtgctgcccctgaccaccctgaccgaccccatcctgcagcaccaccaggaggagagcaacatcatcggcagcagcctgggcagccccgtgagcgaggacagcaaggacgtggaggacctggtgaactgccactag

SEQ ID NO: 307816 - DNA, 33 bp, Artificial Sequence
  derived and/or modified sequence
atgaccgccaccaccgaggtggccgacgactag

SEQ ID NO: 307817 - DNA, 84 bp, Artificial Sequence
  derived and/or modified sequence
atgagcaccgtggaggaggacagcgacaccgtgaccgtggagaccgtgaacagcgtgaccctgacccaggacaccgagggctag

SEQ ID NO: 307818 - DNA, 3794 bp, Artificial Sequence
  derived and/or modified sequence
agcgggacagacgagcgggaggggcagcgtgcggggagctgggggcggggcgcggccgcagctccgtttccggtggctcgtcgcgctcgctcactccagctgcagccactctcgcccgtggctgcttcctccatcctggtattttttggagcttccatcctggttcttccaaagtgcccggacccaaaacaggaaagtgttgcggagataggaacatgggagagaaacaatctgggtaacatgaaagtgatgctggttgctaagggaaggcaacttgattctgtgggaagggctgtagctgatccatccgttgtctagatttgagtatgagcacagtggaagaggattctgacacagtaacagtagaaactgtgaactctgtgactttgactcaggacacagaagggaatctcattcttcactgccctcagaatgaagcggatgaaatagactcagaagatagtattgaacctccacataaaaggctttgtttgtcctctgaggatgatcagagtattgatgattctactccttgcatatcagttgttgcacttccactttcagaaaatgatcagagctttgaagtgaccatgactgcaaccacagaagtagcagatgatgaggttactgaggggactgtgacacagatacagattttgcagaatgagcaactagatgaaatatctcccttgggtaacgaggaagtttcagcagttagccaagcatggtttacaactaaagaagataaggattctctgactaataaaggacataaatggaagcaggggatgtggtccaaggaagaaattgatattttgatgaacaatattgaacgctatcttaaggcacgcggaataaaagatgctacagaaatcatctttgagatgtcaaaagacgaaagaaaagatttctacaggactatagcatggggtctgaaccggcctttgtttgcagtttatagaagagtgcttcgcatgtatgatgacagaaaccatgtgggaaaatatacacctgaagaaattgagaagctcaaggagctccggataaagcatggcaatgactgggcaacaataggggcggcgctaggaagaagtgcatcttctgtcaaagatcggtgccgactgatgaaggatacttgcaacacagggaagtggacagaagaagaagaaaagagacttgcagaagtggttcatgagttgacaagcactgagccaggtgacatagtcacacagggtgtgtcttgggcagctgtggctgaacgagtcggtacccgctcagaaaagcaatgtcgttctaaatggctcaactacctgaattggaaacagagtgggggtactgaatggaccaaggaagatgaaatcaatctcatcctcaggatagcagaacttgatgtagctgatgaaaatgacattaactgggatctgttagctgagggatggagtagtgtccgttcaccacaatggctacgaagtaaatggtggaccatcaaaaggcaaattgcaaaccataaggatgtttcgttccctgtcttaataaaaggtcttaaacagttacatgagaaccaaaaaaacaacccaacgcttttggagaataaatcaggatctggagttccaaacagtaataccaattccagtgtgcagcatgttcagataagagttgcccgcttggaagataatacagccatctcttctagccccatggcagcattgcagattccagtccagatcacccatgtttcttcagcagactctcctgctaccgttgactcagaaacaataacactaaacagtggaacactacagacatttgagattcttccctctttccatctacagcccactggcactccaggcacctacctacttcaaacaagctcaagccaaggccttcccctaactctgactgctagtcccacagtaaccctgacagctgctgctcctgcttctcctgaacagattattgttcatgctttatccccagaacatttgttgaacacaagtgataatgttacagtgcagtgtcacacaccaagagtcatcattcagactgttgccacagaggacatcacttcttccatatcccaagcagaactgacagtcgatagtgatattcagtcatctgattttcctgagcctccagacgccctagaagcagacactttcccagatgaaattcatcaccctaagatgactgtggagccatcatttaatgatgctcatgtatccaaattcagtgaccaaaatagcacagaactgatgaatagtgttatggtcagaacagaagaagaaatctctgacaccgaccttaaacaagaggaatcaccctctgatttagccagtgcttatgttactgagggtttagagtctcccactatagaagaacaagttgatcaaacaattgatgatgaaacaatacttatcgttccttcaccacatggctttatccaggcatctgatgttatagatactgaatctgtcttgcctttgacaacactaacagatcccatactccaacatcatcaggaagaatcaaatatcattggatcatccttgggcagtcctgtttcagaagattcaaaggatgtcgaagatttggtaaactgtcattagaataattcttagaaataggcagttcaagcaaagaaggcacactgttaattacaacctcttcaaagaaataggagcaacccccaagaggcttaatttaccaatttaaatagccacagtccttaagccacacacattgttgctgctatgactttttacctcctttaaacacatcatctgaggttgagttttatgacagtatgtagttgagtggaggctgggagttttaagcataaatccctgtttagtgttacatgggaataaggaatttcattcacttcagccactaagaaaagtttagaatcacgaaagcttaactgctgtggtttaaagtacagtttctctaaagatcagacatggcactgtctcctctcaagcctggttgtagttcagatgagtcttttcaacatggtcttcaacatggtctagagcttaccagtgatcttctgatcttcaagaagactaagtttgagacttgaccagcatacaagtatagagacctaggaggtggtcttgtggtggtacatttggttaacccattgctggcagtgggagctgatttaggcagggtaaacaggaaagcattaaaagttaaaattcactacaggttttttgttacttttaaagggaatatggataagcatagtaacaaaacccaccagaatctaagcagttttcaccccctcagaaaccactgtcattagtttacaaagttagcactttgaagtaaaactaaatgaggaaggaagtaatgttacctatccttgataccatgaccatttattagatgttttgctatataaattaccgagagaatagtttgtcatccacttagtgtgttagctggtggggtacaatataacctctcatctcaggctattttaaaaaaacaatatttgcttctataacaaaaggaaacaaatctaagaatcattcctgtactacagaagggttaaggcaaaggtagccttttgggctttttaatgaatatgacccctatagaaaagtcaagaaaaaaaaacccttgtataaattattttatttattattgtaattagatcttcacaaagttgtcttttcactgtgttttgtcaacgtgaaattaaattgtagttataagcaaaagttggttgcctagggaacaattgtatattcagtttaacagaaataaaagaatatttgtcttaa

SEQ ID NO: 307819 - DNA, 4036 bp, Artificial Sequence
  derived and/or modified sequence
aagtaagtgcgatggaaccttcaggttccaaccgccgccagggccgctccgcccagtggagcctgtccggcccccttgctgcccgctagctcccgccggctggcgcaagctgtcggcgccggggcactgcgggcggggtcggagcctggccttcctgacgttgcagctgccgtccccgcacgttccggccagggcctccctcttagggccgggcggtgcccgtggctcaggctgcagagtagaaagcacaaaaaccagcctgattgtatctggaaaaaaccattatgttacagttgataggctcaccccaaaatatgcttttggggactgatttagcacctgcatattctgcgtgaatctctttaattggttgcagttgagctaatggtggagccaaaatgctattgccctgtcttcatcaacatttaatcaagtgttgcggagataggaacatgggagagaaacaatctgggtaacatgaaagtgatgctggttgctaagggaaggcaacttgattctgtgggaagggctgtagctgatccatccgttgtctagatttgagtatgagcacagtggaagaggattctgacacagtaacagtagaaactgtgaactctgtgactttgactcaggacacagaagggaatctcattcttcactgccctcagaatgaagcggatgaaatagactcagaagatagtattgaacctccacataaaaggctttgtttgtcctctgaggatgatcagagtattgatgattctactccttgcatatcagttgttgcacttccactttcagaaaatgatcagagctttgaagtgaccatgactgcaaccacagaagtagcagatgatgaggttactgaggggactgtgacacagatacagattttgcagaatgagcaactagatgaaatatctcccttgggtaacgaggaagtttcagcagttagccaagcatggtttacaactaaagaagataaggattctctgactaataaaggacataaatggaagcaggggatgtggtccaaggaagaaattgatattttgatgaacaatattgaacgctatcttaaggcacgcggaataaaagatgctacagaaatcatctttgagatgtcaaaagacgaaagaaaagatttctacaggactatagcatggggtctgaaccggcctttgtttgcagtttatagaagagtgcttcgcatgtatgatgacagaaaccatgtgggaaaatatacacctgaagaaattgagaagctcaaggagctccggataaagcatggcaatgactgggcaacaataggggcggcgctaggaagaagtgcatcttctgtcaaagatcggtgccgactgatgaaggatacttgcaacacagggaagtggacagaagaagaagaaaagagacttgcagaagtggttcatgagttgacaagcactgagccaggtgacatagtcacacagggtgtgtcttgggcagctgtggctgaacgagtcggtacccgctcagaaaagcaatgtcgttctaaatggctcaactacctgaattggaaacagagtgggggtactgaatggaccaaggaagatgaaatcaatctcatcctcaggatagcagaacttgatgtagctgatgaaaatgacattaactgggatctgttagctgagggatggagtagtgtccgttcaccacaatggctacgaagtaaatggtggaccatcaaaaggcaaattgcaaaccataaggatgtttcgttccctgtcttaataaaaggtcttaaacagttacatgagaaccaaaaaaacaacccaacgcttttggagaataaatcaggatctggagttccaaacagtaataccaattccagtgtgcagcatgttcagataagagttgcccgcttggaagataatacagccatctcttctagccccatggcagcattgcagattccagtccagatcacccatgtttcttcagcagactctcctgctaccgttgactcagaaacaataacactaaacagtggaacactacagacatttgagattcttccctctttccatctacagcccactggcactccaggcacctacctacttcaaacaagctcaagccaaggccttcccctaactctgactgctagtcccacagtaaccctgacagctgctgctcctgcttctcctgaacagattattgttcatgctttatccccagaacatttgttgaacacaagtgataatgttacagtgcagtgtcacacaccaagagtcatcattcagactgttgccacagaggacatcacttcttccatatcccaagcagaactgacagtcgatagtgatattcagtcatctgattttcctgagcctccagacgccctagaagcagacactttcccagatgaaattcatcaccctaagatgactgtggagccatcatttaatgatgctcatgtatccaaattcagtgaccaaaatagcacagaactgatgaatagtgttatggtcagaacagaagaagaaatctctgacaccgaccttaaacaagaggaatcaccctctgatttagccagtgcttatgttactgagggtttagagtctcccactatagaagaacaagttgatcaaacaattgatgatgaaacaatacttatcgttccttcaccacatggctttatccaggcatctgatgttatagatactgaatctgtcttgcctttgacaacactaacagatcccatactccaacatcatcaggaagaatcaaatatcattggatcatccttgggcagtcctgtttcagaagattcaaaggatgtcgaagatttggtaaactgtcattagaataattcttagaaataggcagttcaagcaaagaaggcacactgttaattacaacctcttcaaagaaataggagcaacccccaagaggcttaatttaccaatttaaatagccacagtccttaagccacacacattgttgctgctatgactttttacctcctttaaacacatcatctgaggttgagttttatgacagtatgtagttgagtggaggctgggagttttaagcataaatccctgtttagtgttacatgggaataaggaatttcattcacttcagccactaagaaaagtttagaatcacgaaagcttaactgctgtggtttaaagtacagtttctctaaagatcagacatggcactgtctcctctcaagcctggttgtagttcagatgagtcttttcaacatggtcttcaacatggtctagagcttaccagtgatcttctgatcttcaagaagactaagtttgagacttgaccagcatacaagtatagagacctaggaggtggtcttgtggtggtacatttggttaacccattgctggcagtgggagctgatttaggcagggtaaacaggaaagcattaaaagttaaaattcactacaggttttttgttacttttaaagggaatatggataagcatagtaacaaaacccaccagaatctaagcagttttcaccccctcagaaaccactgtcattagtttacaaagttagcactttgaagtaaaactaaatgaggaaggaagtaatgttacctatccttgataccatgaccatttattagatgttttgctatataaattaccgagagaatagtttgtcatccacttagtgtgttagctggtggggtacaatataacctctcatctcaggctattttaaaaaaacaatatttgcttctataacaaaaggaaacaaatctaagaatcattcctgtactacagaagggttaaggcaaaggtagccttttgggctttttaatgaatatgacccctatagaaaagtcaagaaaaaaaaacccttgtataaattattttatttattattgtaattagatcttcacaaagttgtcttttcactgtgttttgtcaacgtgaaattaaattgtagttataagcaaaagttggttgcctagggaacaattgtatattcagtttaacagaaataaaagaatatttgtcttaagatgc

SEQ ID NO: 307820 - DNA, 3369 bp, Artificial Sequence
  derived and/or modified sequence
ggcgcggccgcagctccgtttccggtggctcgtcgcgctcgctcactccagctgcagccactctcgcccgtggctgcttcctccatcctggtattttttggagcttccatcctggttcttccaaagtgcccggacccaaaacaggaaagtgttgcggagataggaacatgggagagaaacaatctgggtaacatgaaagtgatgctggttgctaagggaaggcaacttgattctgtgggaagggctgtagctgatccatccgttgtctagatttgagtatgagcacagtggaagaggattctgacacagtaacagtagaaactgtgaactctgtgactttgactcaggacacagaagggaatctcattcttcactgccctcagaatgaagcggatgaaatagactcagaagatagtattgaacctccacataaaaggctttgtttgtcctctgaggatgatcagagtattgatgattctactccttgcatatcagttgttgcacttccactttcagaaaatgatcagagctttgaagtgaccatgactgcaaccacagaagtagcagatgatgaggttactgaggggactgtgacacagatacagattttgcagaatgagcaactagatgaaatatctcccttgggtaacgaggaagtttcagcagttagccaagcatggtttacaactaaagaagataaggattctctgactaataaaggacataaatggaagcaggggatgtggtccaaggaagaaattgatattttgatgaacaatattgaacgctatcttaaggcacgcggaataaaagatgctacagaaatcatctttgagatgtcaaaagacgaaagaaaagatttctacaggactatagcatggggtctgaaccggcctttgtttgcagtttatagaagagtgcttcgcatgtatgatgacagaaaccatgtgggaaaatatacacctgaagaaattgagaagctcaaggagctccggataaagcatggcaatgactgggcaacaataggggcggcgctaggaagaagtgcatcttctgtcaaagatcggtgccgactgatgaaggatacttgcaacacagggaagtggacagaagaagaagaaaagagacttgcagaagtggttcatgagttgacaagcactgagccaggtgacatagtcacacagggtgtgtcttgggcagctgtggctgaacgagtcggtacccgctcagaaaagcaatgtcgttctaaatggctcaactacctgaattggaaacagagtgggggtactgaatggaccaaggaagatgaaatcaatctcatcctcaggatagcagaacttgatgtagctgatgaaaatgacattaactgggatctgttagctgagggatggagtagtgtccgttcaccacaatggctacgaagtaaatggtggaccatcaaaaggcaaattgcaaaccataaggatgtttcgttccctgcttcagcagactctcctgctaccgttgactcagaaacaataacactaaacagtggaacactacagacatttgagattcttccctctttccatctacagcccactggcactccaggcacctacctacttcaaacaagctcaagccaaggccttcccctaactctgactgctagtcccacagtaaccctgacagctgctgctcctgcttctcctgaacagattattgttcatgctttatccccagaacatttgttgaacacaagtgataatgttacagtgcagtgtcacacaccaagagtcatcattcagactgttgccacagaggacatcacttcttccatatcccaagcagaactgacagtcgatagtgatattcagtcatctgattttcctgagcctccagacgccctagaagcagacactttcccagatgaaattcatcaccctaagatgactgtggagccatcatttaatgatgctcatgtatccaaattcagtgaccaaaatagcacagaactgatgaatagtgttatggtcagaacagaagaagaaatctctgacaccgaccttaaacaagaggaatcaccctctgatttagccagtgcttatgttactgagggtttagagtctcccactatagaagaacaagttgatcaaacaattgatgatgaaacaatacttatcgttccttcaccacatggctttatccaggcatctgatgttatagatactgaatctgtcttgcctttgacaacactaacagatcccatactccaacatcatcaggaagaatcaaatatcattggatcatccttgggcagtcctgtttcagaagattcaaaggatgtcgaagatttggtaaactgtcattagaataattcttagaaataggcagttcaagcaaagaaggcacactgttaattacaacctcttcaaagaaataggagcaacccccaagaggcttaatttaccaatttaaatagccacagtccttaagccacacacattgttgctgctatgactttttacctcctttaaacacatcatctgaggttgagttttatgacagtatgtagttgagtggaggctgggagttttaagcataaatccctgtttagtgttacatgggaataaggaatttcattcacttcagccactaagaaaagtttagaatcacgaaagcttaactgctgtggtttaaagtacagtttctctaaagatcagacatggcactgtctcctctcaagcctggttgtagttcagatgagtcttttcaacatggtcttcaacatggtctagagcttaccagtgatcttctgatcttcaagaagactaagtttgagacttgaccagcatacaagtatagagacctaggaggtggtcttgtggtggtacatttggttaacccattgctggcagtgggagctgatttaggcagggtaaacaggaaagcattaaaagttaaaattcactacaggttttttgttacttttaaagggaatatggataagcatagtaacaaaacccaccagaatctaagcagttttcaccccctcagaaaccactgtcattagtttacaaagttagcactttgaagtaaaactaaatgaggaaggaagtaatgttacctatccttgataccatgaccatttattagatgttttgctatataaattaccgagagaatagtttgtcatccacttagtgtgttagctggtggggtacaatataacctctcatctcaggctattttaaaaaaacaatatttgcttctataacaaaaggaaacaaatctaagaatcattcctgtactacagaagggttaaggcaaaggtagccttttgggctttttaatgaatatgacccctatagaaaagtcaagaaaaaaaaa

SEQ ID NO: 307821 - DNA, 2411 bp, Artificial Sequence
  derived and/or modified sequence
actctcgcccgtggctgcttcctccatcctggtattttttggagcttccatcctggttcttccaaagtgcccggacccaaaacaggaaagtgttgcggagataggaacatgggagagaaacaatctgggtaacatgaaagtgatgctggttgctaagggaaggcaacttgattctgtgggaagggctgtagctgatccatccgttgtctagaagcggatgaaatagactcagaagatagtattgaacctccacataaaaggctttgtttgtcctctgaggatgatcagagtattgatgattctactccttgcatatcagttgttgcacttccactttcagaaaatgatcagagctttgaagtgaccatgactgcaaccacagaagtagcagatgatgaggttactgaggggactgtgacacagatacagattttgcagaatgagcaactagatgaaatatctcccttgggtaacgaggaagtttcagcagttagccaagcatggtttacaactaaagaagataaggattctctgactaataaaggacataaatggaagcaggggatgtggtccaaggaagaaattgatattttgatgaacaatattgaacgctatcttaaggcacgcggaataaaagatgctacagaaatcatctttgagatgtcaaaagacgaaagaaaagatttctacaggactatagcatggggtctgaaccggcctttgtttgcagtttatagaagagtgcttcgcatgtatgatgacagaaaccatgtgggaaaatatacacctgaagaaattgagaagctcaaggagctccggataaagcatggcaatgactgggcaacaataggggcggcgctaggaagaagtgcatcttctgtcaaagatcggtgccgactgatgaaggatacttgcaacacagggaagtggacagaagaagaagaaaagagacttgcagaagtggttcatgagttgacaagcactgagccaggtgacatagtcacacagggtgtgtcttgggcagctgtggctgaacgagtcggtacccgctcagaaaagcaatgtcgttctaaatggctcaactacctgaattggaaacagagtgggggtactgaatggaccaaggaagatgaaatcaatctcatcctcaggatagcagaacttgatgtagctgatgaaaatgacattaactgggatctgttagctgagggatggagtagtgtccgttcaccacaatggctacgaagtaaatggtggaccatcaaaaggcaaattgcaaaccataaggatgtttcgttccctgtcttaataaaaggtcttaaacagttacatgagaaccaaaaaaacaacccaacgcttttggagaataaatcaggatctggagttccaaacagtaataccaattccagtgtgcagcatgttcagataagagttgcccgcttggaagataatacagccatctcttctagccccatggcagcattgcagattccagtccagatcacccatgtttcttcagcagactctcctgctaccgttgactcagaaacaataacactaaacagtggaacactacagacatttgagattcttccctctttccatctacagcccactggcactccaggcacctacctacttcaaacaagctcaagccaaggccttcccctaactctgactgctagtcccacagtaaccctgacagctgctgctcctgcttctcctgaacagattattgttcatgctttatccccagaacatttgttgaacacaagtgataatgttacagtgcagtgtcacacaccaagagtcatcattcagactgttgccacagaggacatcacttcttccatatcccaagcagaactgacagtcgatagtgatattcagtcatctgattttcctgagcctccagacgccctagaagcagacactttcccagatgaaattcatcaccctaagatgactgtggagccatcatttaatgatgctcatgtatccaaattcagtgaccaaaatagcacagaactgatgaatagtgttatggtcagaacagaagaagaaatctctgacaccgaccttaaacaagaggaatcaccctctgatttagccagtgcttatgttactgagggtttagagtctcccactatagaagaacaagttgatcaaacaattgatgatgaaacaatacttatcgttccttcaccacatggctttatccaggcatctgatgttatagatactgaatctgtcttgcctttgacaacactaacagatcccatactccaacatcatcaggaagaatcaaatatcattggatcatccttgggcagtcctgtttcagaagattcaaaggatgtcgaagatttggtaaactgtcattagaataattcttagaaataggcagttca

SEQ ID NO: 307822 - DNA, 2283 bp, Artificial Sequence
  derived and/or modified sequence
atgtctaccgtggaggaggattccgacaccgttactgtggagacagtgaattccgttaccttaacccaggataccgaaggaaatcttatcctccactgtccgcagaatgaagcagatgagatcgactcagaggatagcatcgaacctccccacaagcgtctctgcctctcatctgaggacgatcagagtattgacgactctaccccctgcatttcggtggtggcgttgccccttagcgagaacgatcagagcttcgaggttaccatgacagcgacaactgaagtggcggacgatgaagtaacggaggggactgtgacccagatccagatcttgcaaaacgaacaactggacgagataagtcccttgggcaatgaggaagtcagtgcggtaagccaggcctggttcaccacaaaggaagataaggatagtttgactaataaggggcataagtggaaacagggcatgtggtcgaaagaggagattgacattctgatgaataatatcgaaagatacctaaaagccaggggaattaaggacgctaccgagataatcttcgaaatgtctaaggacgagcggaaagatttctatcgaacaatcgcctggggcctgaacaggcctctgttcgctgtgtatcgccgcgtgctccgcatgtacgacgatcgaaatcacgtgggcaaatacacaccagaggagattgaaaaactgaaggagttacgtatcaaacacgggaatgactgggccaccataggagcagccctgggcaggagcgctagcagtgtgaaagacagatgtagacttatgaaagatacgtgtaatactgggaagtggacagaggaagaggaaaagaggctcgcagaggtggtgcacgagctgacatctactgaacctggagatatcgtcactcaaggggtgagttgggccgcagtggccgagcgggtgggtactagaagtgagaagcagtgtcgcagcaagtggcttaattatttgaactggaaacagagtggtgggacggaatggaccaaggaagatgagattaatcttatacttcggatcgctgagctcgatgtggctgatgaaaacgatatcaactgggatttactggccgaaggttggagttctgtgcggagccctcagtggttgagatcaaaatggtggaccattaagcgccagatcgcaaaccataaggatgtatccttcccagttctcattaaagggcttaagcagctgcatgagaaccaaaagaacaatccaactcttctggaaaataagtccggctcaggggttccgaactccaacactaactcgtcggttcagcacgtgcagatcagagtcgcccgactcgaagacaataccgccatatccagctctcctatggcggctctgcagattcctgtccagataactcacgtgagtagcgcagacagcccagctacggtggactccgagaccatcacactgaattcggggacactgcagacatttgaaatattacctagtttccaccttcagcctactgggacccctggaacttatctgctgcagacgagttcttctcaaggtctcccactgacgctgacggcatcccccactgtgacgcttacagctgcggctccagcatccccagaacagatcatagttcacgcccttagccctgaacaccttctgaacacgtctgacaacgtgactgttcaatgtcataccccaagggtgattattcagacagtggcaaccgaggacataacatcctctatctctcaggccgaattaaccgtcgatagcgacattcagtccagcgattttcccgagccacccgatgcactggaagcagacacatttcctgatgagattcaccaccccaaaatgacagtcgaaccaagcttcaacgacgcccatgtgagtaaattttctgaccagaacagcaccgagctgatgaacagtgtgatggtccgcaccgaggaggaaattagcgacacagacctgaagcaggaagagtctccgagcgacctcgcttccgcctatgtgacagagggtctggagagtcccacgatcgaggaacaggtggaccaaactattgacgatgagactattctcatcgttccctcacctcacggctttatacaggcatccgatgtgatcgacaccgagagcgtcctgcccctcactacccttacggaccccatcctgcaacaccaccaggaggagagcaacatcatcggaagttccctcggttcacctgtaagtgaggactctaaggatgtggaggacctggtgaactgccactag

SEQ ID NO: 307823 - DNA, 2283 bp, Artificial Sequence
  derived and/or modified sequence
atgagcaccgtggaggaagattctgatacagtcaccgtagagacagtgaactctgtcactctcacacaggatacagagggtaatttaatcctgcactgccctcagaacgaggccgatgaaatcgattcggaggactctatagagccgcctcataaacgcctgtgcctcagttcggaggacgatcagtccattgacgatagcacaccttgtatcagcgtcgttgccctgccgctgtcggagaacgatcagtctttcgaggtgaccatgactgcaacaacagaggtcgcagatgacgaggttacagaagggacagtcactcaaattcaaattctccagaatgagcagctggacgagatctcccccctggggaatgaagaagtgagcgcagtatcacaggcttggttcacaactaaagaagataaggactcccttacgaacaaaggtcacaagtggaagcaggggatgtggtccaaagaagagatcgacatcctgatgaacaatatcgagaggtaccttaaggctcgagggatcaaggacgccactgagataatctttgaaatgtcaaaagacgagcgaaaagatttttataggacgatcgcatggggactgaacaggccactcttcgccgtctatcgccgagttttaaggatgtacgacgacaggaatcacgtcggcaaatacacacccgaggagatagagaaactgaaggaactgcgaattaagcacggcaatgattgggccaccatcggcgccgctttaggtaggtctgcttccagcgttaaagataggtgtagactcatgaaggacacctgcaatacgggaaagtggaccgaagaagaggagaagcgacttgctgaggttgtgcacgagcttactagtacggaacctggtgacattgtcacacagggagttagttgggccgctgtggcagagcgggtaggcacccgtagcgagaagcagtgtcggtcaaagtggctgaattacctgaactggaagcaatcgggcggtactgagtggaccaaggaagacgagatcaatttgatcctgcgcattgccgagctcgacgtggcagacgagaacgacattaactgggaccttctcgctgaaggatggagcagtgtccgtagtccccagtggcttagaagtaagtggtggactatcaaacgacagatcgctaatcacaaggacgtctcttttcccgtgctgattaaaggcctcaaacagctgcatgaaaaccagaagaacaacccaacactgctggagaacaagagcggaagcggcgtgcctaatagtaacaccaatagctcagtgcaacatgtgcaaatccgagtggctaggctagaggataacactgccatcagtagttcccctatggccgcccttcagatcccagtgcaaataactcacgtctcaagcgctgactcccctgctactgtcgactctgaaacgatcactttaaacagtgggacgctgcagaccttcgagatcctcccatcatttcatttgcaacctaccggtactcccgggacatacctgctgcagacttcctcgtcacagggcctcccccttacgctgaccgcatcccccaccgtgacgctgaccgcagccgccccggcaagccccgagcagatcatcgtgcatgcactgtcccctgaacatttactgaacacaagcgataacgttacagtgcagtgccacaccccaagggtcatcatccagacggtcgcgacggaagatataacctctagcattagtcaggccgagctgaccgtggattctgatatccaatctagcgattttcccgagccccccgatgccctagaagccgacacctttcccgatgaaatccaccatccaaagatgactgtggaacccagctttaacgatgctcatgtttcgaaatttagtgaccagaattccaccgagctcatgaattcggtaatggtacggaccgaagaggagattagcgacacagacctaaagcaggaggaatcaccatctgacctggcctctgcatacgtgactgagggcctcgaaagccccactatagaggagcaggtggaccagacaatcgacgacgaaacaattctcatcgtgccctccccacacggtttcattcaggcctcagatgttattgatacagaatcagtgctgcccctcaccactctgacagaccctattctccaacaccatcaggaggagtccaacatcatagggagctccctggggagccccgtatcggaggattctaaagatgtagaggatctggtgaactgccattag

SEQ ID NO: 307824 - DNA, 2073 bp, Artificial Sequence
  derived and/or modified sequence
atgtcaacagtcgaggaagactccgacaccgtcaccgtggaaaccgtcaattctgtcaccctgactcaggatacagaaggtaacttgatcctgcattgtccccagaacgaggcagatgagatagattcggaagattcgatcgaacctcctcacaaaagactctgcctctcttctgaagacgaccagagtatcgatgatagtacgccttgcatttccgtagtcgctctccccctctccgaaaacgatcaatccttcgaagtgaccatgacagccacaaccgaggtcgccgacgatgaagtgaccgagggtaccgtgacacagatccaaatcctgcagaatgagcaactcgatgagattagccctctcgggaacgaagaggtttcagcagtgagccaggcttggttcactaccaaggaagataaggacagtctcactaataagggacataagtggaagcagggcatgtggtctaaggaagaaatagacatcctgatgaacaacatcgaacgatacctgaaagccagggggataaaagacgctacggagataattttcgagatgagtaaagacgagcggaaagatttttacagaacaattgcctgggggctcaaccgccctctgttcgccgtatatagaagagtcctgcggatgtatgatgacaggaaccacgtaggcaaatacaccccagaagagatcgaaaaacttaaggagctgcgaataaaacacggaaacgactgggctactataggggccgcgctaggaagatcggcatcctcagtgaaggacaggtgccggttaatgaaggatacatgtaatacaggaaagtggaccgaagaagaagagaagcgtctggcggaggtggttcacgagctgaccagcacggaacctggagatattgtgacacagggagtttcatgggctgccgttgcggagagagtcgggacaaggagcgaaaaacaatgccggagcaagtggttaaattatctgaattggaaacagtccggcggcaccgagtggacaaaggaggatgagataaatctcatactgcgtatcgcagaactggacgtggcagatgaaaacgacattaattgggacctattggccgaggggtggtcctcagtccggagcccccagtggctgcgctcaaaatggtggacgataaaaagacagatagccaatcacaaagatgtgagtttccctgcttcagccgatagtccagcgaccgtcgatagtgaaactattacactgaacagcggaacattgcagacattcgaaatccttccctcttttcacctgcagcccactggtacacctggcacctacctgcttcagacgtctagtagccagggcttgcccctgacgctaacagcctcccccacagtcactctgaccgccgcggctcctgcctcgcccgaacaaatcatagtgcatgctctgagtcctgaacacctattgaatacctctgacaacgttactgtccagtgccataccccaagggtgattatacagaccgtcgccacagaagatattactagcagcatatcacaggccgaactgactgtcgatagcgatatccagtcctccgacttcccagagccccctgacgccttggaagcagatacgttccccgacgagatccaccaccctaaaatgacggttgagcccagtttcaacgatgcccatgtctcgaaattcagtgaccagaattccacagagcttatgaattcagtgatggttcggacagaagaagagatatccgacaccgacttgaaacaggaggaaagtccaagtgacctggcttcagcctatgttacagaaggcctggaatcccccactatcgaggaacaagtagaccaaaccattgatgatgagactatactgatagtgccatccccacacggcttcattcaagcctcagatgtgatagacacggaaagcgttctgcctttgacgacattgactgaccctatcctccagcaccaccaggaagagtccaatatcatcggtagctcattgggtagtccagttagtgaggattcgaaggacgtcgaggacttggtgaactgtcattag

SEQ ID NO: 307825 - DNA, 33 bp, Artificial Sequence
  derived and/or modified sequence
atgaccgccactacggaagtggccgatgactag

SEQ ID NO: 307826 - DNA, 84 bp, Artificial Sequence
  derived and/or modified sequence
atgtccacagtggaagaggatagcgatactgtgaccgttgaaaccgtgaacagtgtgactttgacccaagatactgaaggatag

SEQ ID NO: 307827 - DNA, 2283 bp, Artificial Sequence
  derived and/or modified sequence
atgagcacagtggaggaggacagcgacacagtgacagtggagaccgtgaacagcgtgaccctgacccaggacacagagggcaacctgatcctgcactgcccccagaatgaagcagatgaaattgattctgaggacagcattgagcccccccacaagaggctgtgcctgagcagtgaagatgaccagagcattgatgacagcaccccctgcatctctgtggtggccctgcccctgtctgaaaatgaccagagctttgaggtgaccatgacagccaccacagaggtggctgatgatgaggtgacagagggcaccgtgacccagatccagatcctgcagaatgagcagctggatgagatcagccccctgggcaatgaggaggtgtctgctgtgtcccaggcctggttcaccaccaaggaggacaaggacagcctgaccaacaagggccacaagtggaagcagggcatgtggagcaaggaggagattgacatcctgatgaacaacatcgagcgctacctgaaggcccggggcatcaaggatgccacagagatcatctttgagatgagcaaggatgagaggaaggacttctaccgcaccatcgcctggggcctgaaccggcccctgtttgctgtgtaccgccgggtgctgaggatgtatgatgacagaaatcatgtgggcaagtacaccccagaggagattgagaagctgaaggagctgcgcatcaagcacggcaatgactgggccaccatcggggccgccctgggccgcagcgccagctctgtgaaggaccgctgccgcctgatgaaggacacctgcaacacaggcaagtggacagaggaggaggagaagaggctggccgaggtggtgcatgagctgaccagcacagagcccggggacatcgtgacccagggcgtgtcctgggccgctgtggccgagcgggtgggcaccaggtctgagaagcagtgccgcagcaagtggctgaactacctgaactggaagcagagcggcggcacagagtggaccaaggaggatgagatcaacctgatcctgagaattgctgagctggatgtggctgatgaaaatgacatcaactgggacctgctggccgagggctggagctctgtgcgcagcccccagtggctgcggagcaagtggtggaccatcaagaggcagatcgccaaccacaaggatgtgtccttccctgtgctgatcaagggcctgaagcagctgcacgagaaccagaagaacaaccccaccctgctggagaacaagagcggcagcggcgtgcccaacagcaacaccaacagctctgtgcagcacgtgcagatccgggtggcccggctggaggacaacacagccatcagcagcagccccatggccgccctgcagatccctgtgcagatcacccacgtgagcagcgctgacagccctgccaccgtggacagcgagaccatcaccctgaacagcggcaccctgcagacctttgagatcctgcccagcttccacctgcagcccaccggcaccccaggcacctacctgctgcagaccagcagcagccagggcctgcccctgaccctgacagccagccccaccgtgaccctgacagctgctgccccagccagccctgagcagatcatcgtgcacgccctgagccctgagcacctgctgaacaccagtgacaacgtgacagtgcagtgccacacccccagggtcatcatccagacagtggccacagaggacatcaccagcagcatcagccaggccgagctgactgtggacagcgacatccagagcagtgacttccctgagcccccagatgccctggaggccgacaccttcccagatgagatccaccaccccaagatgacagtggagcccagcttcaatgatgcccacgtgtccaagttcagtgaccagaacagcacagagctgatgaacagcgtgatggtgaggacagaggaggagatcagtgacacagacctgaagcaggaggagagccccagcgacctggccagcgcctacgtgacagagggcctggagagccccaccatcgaggagcaggtggaccagaccattgatgatgagaccatcctgattgtgcccagcccccacggcttcatccaggccagtgatgtgattgacacagagagcgtgctgcccctgaccaccctgacagaccccatcctgcagcaccaccaggaggagagcaacatcatcggcagcagcctgggcagccctgtgtctgaggacagcaaggatgtggaggacctggtgaactgccactag

SEQ ID NO: 307828 - DNA, 2073 bp, Artificial Sequence
  derived and/or modified sequence
atgagcacagtggaggaggacagcgacacagtgacagtggagaccgtgaacagcgtgaccctgacccaggacacagagggcaacctgatcctgcactgcccccagaatgaagcagatgaaattgattctgaggacagcattgagcccccccacaagaggctgtgcctgagcagtgaagatgaccagagcattgatgacagcaccccctgcatctctgtggtggccctgcccctgtctgaaaatgaccagagctttgaggtgaccatgacagccaccacagaggtggctgatgatgaggtgacagagggcaccgtgacccagatccagatcctgcagaatgagcagctggatgagatcagccccctgggcaatgaggaggtgtctgctgtgtcccaggcctggttcaccaccaaggaggacaaggacagcctgaccaacaagggccacaagtggaagcagggcatgtggagcaaggaggagattgacatcctgatgaacaacatcgagcgctacctgaaggcccggggcatcaaggatgccacagagatcatctttgagatgagcaaggatgagaggaaggacttctaccgcaccatcgcctggggcctgaaccggcccctgtttgctgtgtaccgccgggtgctgaggatgtatgatgacagaaatcatgtgggcaagtacaccccagaggagattgagaagctgaaggagctgcgcatcaagcacggcaatgactgggccaccatcggggccgccctgggccgcagcgccagctctgtgaaggaccgctgccgcctgatgaaggacacctgcaacacaggcaagtggacagaggaggaggagaagaggctggccgaggtggtgcatgagctgaccagcacagagcccggggacatcgtgacccagggcgtgtcctgggccgctgtggccgagcgggtgggcaccaggtctgagaagcagtgccgcagcaagtggctgaactacctgaactggaagcagagcggcggcacagagtggaccaaggaggatgagatcaacctgatcctgagaattgctgagctggatgtggctgatgaaaatgacatcaactgggacctgctggccgagggctggagctctgtgcgcagcccccagtggctgcggagcaagtggtggaccatcaagaggcagatcgccaaccacaaggatgtgtccttccctgccagcgctgacagccctgccaccgtggacagcgagaccatcaccctgaacagcggcaccctgcagacctttgagatcctgcccagcttccacctgcagcccaccggcaccccaggcacctacctgctgcagaccagcagcagccagggcctgcccctgaccctgacagccagccccaccgtgaccctgacagctgctgccccagccagccctgagcagatcatcgtgcacgccctgagccctgagcacctgctgaacaccagtgacaacgtgacagtgcagtgccacacccccagggtcatcatccagacagtggccacagaggacatcaccagcagcatcagccaggccgagctgactgtggacagcgacatccagagcagtgacttccctgagcccccagatgccctggaggccgacaccttcccagatgagatccaccaccccaagatgacagtggagcccagcttcaatgatgcccacgtgtccaagttcagtgaccagaacagcacagagctgatgaacagcgtgatggtgaggacagaggaggagatcagtgacacagacctgaagcaggaggagagccccagcgacctggccagcgcctacgtgacagagggcctggagagccccaccatcgaggagcaggtggaccagaccattgatgatgagaccatcctgattgtgcccagcccccacggcttcatccaggccagtgatgtgattgacacagagagcgtgctgcccctgaccaccctgacagaccccatcctgcagcaccaccaggaggagagcaacatcatcggcagcagcctgggcagccctgtgtctgaggacagcaaggatgtggaggacctggtgaactgccactag

SEQ ID NO: 307829 - DNA, 33 bp, Artificial Sequence
  derived and/or modified sequence
atgacagccaccacagaggtggctgatgactag

SEQ ID NO: 307830 - DNA, 84 bp, Artificial Sequence
  derived and/or modified sequence
atgagcacagtggaggaggacagcgacacagtgacagtggagaccgtgaacagcgtgaccctgacccaggacacagagggctag

SEQ ID NO: 307831 - DNA, 2283 bp, Artificial Sequence
  derived and/or modified sequence
atgagcaccgtggaggaggacagcgacaccgtgaccgtggagaccgtgaacagcgtgacgctcacccaggacaccgaggggaatctgattctgcattgcccacagaacgaagcggacgagatcgactccgaagactctatcgaacctccacacaaaaggctctgcttatccagtgaagatgaccagtccatagacgactccaccccttgcattagcgtggtcgcattgcctttgtctgaaaatgatcaatcttttgaagtaaccatgaccgccaccacggaggttgctgatgacgaggtcaccgaaggcactgtcactcagatccaaatcctacagaatgaacagctggatgagatttcccccctgggcaacgaggaggtgtctgctgtatcccaggcatggtttacaacgaaagaggacaaagatagcctgactaataagggtcacaagtggaagcaggggatgtggagcaaagaggagatcgatatactcatgaataatattgagcgatacttgaaggctcgggggattaaagatgcaacagagatcatcttcgagatgagtaaggacgaaagaaaagatttctacaggaccatagcctggggactcaatcggccgcttttcgcagtataccgtcgggtcttgcgaatgtacgacgacaggaaccacgtcggaaaatatactccagaagaaatcgaaaaactgaaggagctgcggatcaagcatgggaatgattgggccactatcggagccgctttaggcaggtcagcctcgtcagtcaaagatagatgtcgcttaatgaaggacacctgcaataccggaaaatggacagaggaagaagagaaacggttggcggaggtggttcacgaactgacttctactgagccaggcgacatcgttacccagggggtatcctgggcagctgtggccgagcgagtgggcacacgctcagaaaaacagtgtaggtcaaagtggctgaattacctcaactggaagcagagcgggggtactgaatggaccaaggaggatgagatcaatttgatcctcaggatcgccgagttggacgtggccgacgaaaatgacataaactgggaccttttggccgagggttggtcctccgtgcggtctcctcaatggttacggagtaaatggtggaccattaaaagacaaatcgcaaaccacaaggatgtaagctttcccgtgcttattaaaggcctgaagcaactacatgaaaatcagaaaaacaatccgacgcttctggagaacaagtccgggtctggcgtgcctaactctaacacaaattcatctgtccagcacgtccagataagagtggcacggctggaggacaacaccgccatcagctcatcccctatggccgccctgcagattccagtgcagatcacccatgtgtccagcgccgattcaccagctactgtggattccgaaacaatcactctcaacagtgggacgctccagacctttgagatcctcccctcttttcacctacagcctacagggacccccggcacgtatctcctgcaaacctcatcaagtcagggtctgcccctgactctcacagcgagccccaccgtgaccctgactgccgcggcccctgccagccctgagcagattatcgttcatgcactctcccccgaacacctccttaatacatccgacaacgtgacagttcagtgtcatactccccgggtgattattcagacagttgctactgaggacatcacgtccagcatctctcaagcggagttaaccgtagatagcgacattcagagctccgatttccctgaacccccagatgctctggaggccgacacattccctgacgagattcaccaccccaaaatgacagtggagccctcctttaacgatgcccatgtgagcaaatttagtgatcagaacagcaccgagcttatgaacagcgtcatggtgaggaccgaggaggaaatcagtgatacagacctgaagcaagaggagtccccgtctgatctggcctcggcctacgtgaccgaaggactggagagccctacgatagaggagcaggtcgaccagacaatagatgatgagacgatactcatcgtgccatccccccatggctttattcaggcctctgacgtcatagacacggagagcgtgcttcccctgactacattgactgatcccattctacagcatcaccaagaagagtccaacattatcggatcttcgctgggctctcctgtcagcgaggattccaaagacgtggaggatctggtcaattgccattag

SEQ ID NO: 307832 - DNA, 2283 bp, Artificial Sequence
  derived and/or modified sequence
atgagcaccgtggaggaggacagcgacaccgtgaccgtggagaccgtgaacagcgtaactctaactcaggacaccgagggcaacctgattttgcattgtccccagaacgaggccgacgagattgattccgaggactctatagagccaccccataagagactgtgtctgagtagcgaggacgatcagagcatcgacgactctactccttgcatttcggtggtcgccttgcctctcagtgagaatgaccagagcttcgaggtgacaatgaccgccaccactgaggttgccgacgatgaagtgaccgagggtactgtcactcagatccagatcctgcagaacgaacagcttgacgagattagtcccctcgggaacgaagaggtgtccgcagtttctcaggcctggttcaccacaaaagaggacaaggactctctcacaaacaaaggccacaagtggaagcagggaatgtggtcaaaagaagaaattgacatccttatgaacaacatcgagagatatctgaaagcccggggcattaaagacgcaacggagataatcttcgaaatgtcaaaagatgaacggaaggacttttatcggaccatcgcgtgggggttgaacaggcccctgtttgcggtataccgtcgcgtgctccggatgtacgacgacagaaaccacgtgggtaaatacacaccagaggaaattgagaagctgaaggagctgcgtataaagcatggcaacgattgggccacgatcggagcagcgctggggagaagtgcttccagtgtcaaagaccggtgcaggctgatgaaagacacatgcaacactggaaaatggactgaggaggaagaaaagaggctggcagaggtggtccatgagcttacctctacagagcccggcgacatagtcacccaaggagtgtcatgggctgcggtggcagaaagggtgggaacccgcagtgaaaaacagtgtcgatccaagtggctgaattacctcaattggaaacagtcgggcggaaccgagtggaccaaggaggatgaaattaacctgattctcaggattgcagaacttgacgtcgctgacgaaaatgacattaactgggatctactggccgagggttggtctagtgttagatccccacagtggttgaggtcaaagtggtggaccatcaaacgccaaattgccaaccacaaggatgtatctttcccagtcctgatcaaaggcctcaaacagttacacgagaatcagaagaacaacccgacccttctcgagaataagagtggttctggcgtccccaacagcaacaccaactcttctgtgcaacacgtgcagatcagagttgcccgtctcgaagacaatacagccatcagctctagccctatggctgccctgcaaattcccgtgcagatcacacatgtatcctctgccgattctccagctaccgtggactcagagacaatcacccttaacagcggtacactgcagacattcgaaattctgccgagctttcacctgcagccgaccggcacaccaggtacctacctgctccaaacatccagcagtcaaggcctccctctgactttgacggcatctccaaccgttacactcacagccgctgcgcccgcatcccctgagcagattattgtacatgccttaagccctgagcacctgctcaacacttctgataacgtgacagtgcagtgtcacacccccagggtaattatccagactgtggctaccgaagatataacatccagtatctcccaggccgagctgactgtggactcagatatccaatcttcggatttccccgaaccacccgatgccttagaggcagatactttccctgacgaaatacaccaccctaaaatgacagtggagcctagtttcaacgacgcccatgtttccaaattttccgaccaaaacagcaccgaactgatgaacagcgtgatggttcgtaccgaagaggaaatctccgacaccgatcttaaacaagaggaaagcccttctgacctcgcctcggcctacgtcacggagggcctcgagagtcccacaatcgaagaacaagttgaccagacaatcgatgacgaaactattttgatcgtgcccagtccacacggattcatccaggcaagcgacgtaatagatactgagtctgttctgcctctgaccacattaactgatccaatcctacagcaccatcaggaagagtcaaacataatcggatcttccctgggctcccctgtgagtgaagacagtaaggacgtggaagatttggtgaattgtcactag

SEQ ID NO: 307833 - DNA, 2073 bp, Artificial Sequence
  derived and/or modified sequence
atgagcaccgtggaggaggacagcgacaccgtgaccgtggagaccgttaattctgtgacgttgacccaggatactgaaggtaacttaattctccattgcccacagaacgaggccgatgagatcgatagcgaagattctattgagcctccgcataagcgactgtgtctgagctccgaagatgatcagtccatcgatgattccacaccttgcattagcgtggtcgctcttcctttgagcgagaatgaccagagtttcgaagtgactatgactgcaactaccgaggtggccgacgacgaggtgaccgaaggaactgttacccaaattcaaatcttgcagaatgagcaattagatgaaatcagtccgcttggcaacgaagaagttagcgctgtgtcacaagcatggttcacgaccaaagaggataaggatagccttacgaataaggggcacaagtggaagcagggtatgtggtctaaagaagaaatcgatattctgatgaacaatatcgaaagatatctgaaagctcggggcattaaagatgccactgagatcatttttgaaatgtctaaggacgagcgtaaagacttttaccgaactatcgcgtggggacttaatcgcccgctcttcgctgtgtaccggagggtgcttaggatgtacgacgatagaaaccatgttggaaaatacactcctgaagagatcgagaagcttaaggaactcaggataaaacatggcaatgattgggctactatcggcgctgctctcggtagatcagccagttcagtaaaagaccggtgtaggctaatgaaggatacctgcaacactggcaagtggactgaagaggaggagaagagactggctgaagtcgtgcacgaattaacgtccaccgagccaggggacatcgtgacacagggtgtgtcttgggctgcagtggctgagcgggtcggtaccaggtctgaaaaacaatgtagatctaaatggcttaattacctcaattggaagcagagcggcgggaccgaatggactaaagaggatgaaatcaacttaatccttcggattgccgaattggatgttgccgatgagaatgacatcaattgggatctgctggcagaggggtggtcttcagtcagatctccacagtggttaaggtcaaaatggtggaccattaagagacagatcgccaaccacaaggatgtctcctttccagcctccgcagattcgccagccaccgttgattcggaaacgattacacttaatagcgggacgctacagacttttgaaatcctgccatcattccatctgcagcccacaggaacacctggaacatacctgttacagacttccagtagtcaggggctaccgctaacactgacggcctccccgacggtcacactgaccgctgctgcccccgcatccccagagcagattatcgtgcacgccctgtctcctgaacacttgcttaacacctccgacaatgtaactgtgcagtgtcacacccccagagttatcatccagacggtcgcgaccgaggatatcacatccagcatctcacaggctgaactcacggtggacagcgacattcagtcctccgatttcccagagccaccggacgccctagaggctgacaccttccccgatgagattcatcacccgaaaatgaccgtagaaccgagcttcaacgacgcccatgtcagcaaattctccgaccagaacagcactgagctgatgaatagcgtgatggtgcggaccgaagaggagatcagcgacaccgacctgaagcaggaggagagccctagcgatctggcaagtgcctatgtgacggagggacttgagtccccaacaattgaggaacaggtggaccagactatcgacgatgagacaatactcatcgtcccctccccccacggatttatccaggcatcagacgtcatagacactgagtccgtgctgcctttaactactctaactgatccgatattacaacaccaccaggaagagtccaatatcattggcagtagcctgggaagtcccgtgtccgaggactccaaagatgtcgaggacctggtgaattgtcattag

SEQ ID NO: 307834 - DNA, 84 bp, Artificial Sequence
  derived and/or modified sequence
atgagcaccgtggaggaggacagcgacaccgtgaccgtggagaccgttaacagtgtgacattaacccaggacaccgagggatag

SEQ ID NO: 307835 - DNA, 2283 bp, Artificial Sequence
  derived and/or modified sequence
atgtccactgtggaagaagattcggacaccgttacggtggaaacagtaaactcagtgaccttgacacaagacaccgagggcaatctgatattgcattgtcctcagaatgaggccgatgaaatcgactccgaggacagtatcgaacccccacataaacgtctttgcctgtcctctgaggacgatcagtccattgatgatagcacaccctgtattagtgtggtggcgctgccactctcagagaatgaccagagttttgaggtgaccatgaccgcaacaactgaggtcgccgacgacgaagtcacggaggggaccgttacccagatccaaattttacaaaatgaacagttagatgaaatcagcccacttggaaacgaggaggtaagtgctgtatctcaggcatggtttacaactaaagaagataaggacagtctgacaaataaaggacataaatggaagcagggaatgtggagcaaggaggaaatcgatatcttgatgaataacattgagaggtatttaaaggctagaggcatcaaggacgcgaccgagattatattcgagatgtcaaaggacgaacggaaggacttctacaggacaatcgcctggggcctgaaccgtcccctgttcgcagtatacagaagagttctgcggatgtacgatgaccgcaatcatgtgggaaaatacactcccgaagagatagaaaagttaaaagagctacgcataaagcacgggaatgattgggcgactattggagcagctctcgggcgatcagcgtcctcagttaaggatagatgcagactgatgaaggatacgtgtaataccggcaaatggacggaggaagaggaaaagcgattggcagaagttgtacacgaactcactagcacagagccaggcgatatcgtcactcagggcgtctcctgggctgccgtcgccgagcgcgtcggcacaagaagcgagaagcagtgtcgaagcaaatggcttaattatctgaactggaaacaatcaggaggaactgaatggactaaggaggacgagataaatcttatacttaggattgctgagctggacgtggcagatgaaaacgacatcaactgggacttgttagctgagggctggagcagcgtgaggtcgccccagtggctccgttccaagtggtggactattaagaggcagatagcaaaccataaggatgtgtctttcccggtgctgatcaaaggcctcaaacagctgcacgagaaccagaaaaacaatcccacactactagagaacaagtctggctctggcgtccctaacagcaatacaaactcctctgttcaacatgtgcagattagagtcgccagattggaggacaacacagcgatttcctcatcccctatggctgccctccagatccccgtacagataacccatgtgtcctccgctgactcgcctgccaccgtagattctgagactatcaccctcaattcagggacactgcagacatttgaaatactgccgagcttccatttacagcctacggggacacccggaacctatctcctgcagactagctcgagccaagggctgcccctaacccttaccgcaagtccaacagtcacactcacggcggctgccccagcgtccccagaacagatcattgtccacgctctgagtcccgaacacctgctgaatacctcagacaacgtgaccgtccagtgccacactccccgtgtgattatacaaaccgtcgccaccgaagacattacttccagcatttcacaggcagagctgacagtggactccgacatccagtcttccgattttccagaacccccagacgcattggaagcagataccttccccgacgagatccaccaccctaaaatgacggtcgagccgtcgttcaatgacgcccacgtttcaaaattctccgatcagaattcaacagaactgatgaactccgtcatggtgcgcaccgaggaggagatctcagatactgacctgaaacaggaggagtcgccctcggacctggcatccgcttatgttactgagggcttggaaagccccacgattgaagagcaggtggaccagactattgacgatgaaaccattctgatcgttccctcccctcacggctttatccaggcatctgatgttatcgataccgagtcagtgctgccccttaccacccttaccgaccctatactgcagcatcatcaggaggagtctaatatcataggtagcagcctgggtagtcccgtttcagaggactccaaggatgtagaagacttggtaaattgccactag
